United States Patent Application Publication US 2013/0332133 A1 - sequence listing, part 45

SEQ ID NO: 290692 - DNA, 1038 bp, Unknown
  Bacterial polypeptide expressing nucleotide sequence isolated from the Sargasso Sea
aacaaatctgggaccgggccaacgagcaactggccgagccgtccttctcggcccggggcatgctcaggcgcttcgacgtgaaggccctgtgcacgacggacgacccggccgacccgatcacgcaccacgaggcaatcgccaacgacccggaaatcgagaccgcggtctacccgaccttccgcccggacaagtcctggggaatcggactggccggccccttcaagggatggctcaagggtctggaggcaacttccgggatctccatttccagcctggacgatttcctttccgcgctggccaagagagtcgaggatttccacgccctggggtcgcgcatttccgaccacagcttcccctacttcttttgcgatttcccgagcgaggaggatgcgaagagaattttccaggacaccctcgacggcaaggacgcagagcgaccggaggaggaagccttcggggccttcgtcatgcatcgcctggcccggctctacgccgagagaggatggaccatgcaaatccacctcggccctttgcgcaacaactccagccgcctgctgcggtccttcgggccggacgcgggaaccgattcaatcggggactggccccaggccgagagaatgagccattttctcgaccgtctggacagcgaggacgccctacccaggaccatcgtctacaacaacaacccctcggacaactttaccgtcgccaccatgttggggaacttccagcgggaggtacccggcaagatgcagttcggctcgggttggtggcacctcgatcagcgcgacgggatggaggaacagctcaagacgctggccaacctgggcctgctctcgcgcttcgtggggatgctgaccgactcccggtcctttctttcctttccgcgccacgagtacttccgcagaatcctctgcaacctcctgggcacctggatgagggacggcttcgtccccaacgaccccgaaatgatcggcgacctcgcgcgccgggtctgcttccggaacgcccgcgagtttctgaggcttggggaataag

SEQ ID NO: 290693 - DNA, 628 bp, Unknown
  Bacterial polypeptide expressing nucleotide sequence isolated from the Sargasso Sea
actgggtatcaagctgattgccatgacaggtaacccggcgtctacccttgccaagctggctgacgctcacttgtgtgtcaaagttgaacaagaagcctgcccactaggcttagcaccgacagccagtaccacggcgacactggccatgggtgacgcgctggcagtcgcgctgctcgacgccagaggcttttctgccgatgactttgcgctatcacatcctggtggcagcctggggcgtaagttgttattgcgcctggaagatattatgcacaccggcgagcaggtgccgacagtgttgtacagtgcgacaattaaagatgccttgctggaaatctcaaaaaaaggcttgggtatgacagccgttgttgacgagcaaggcaaaatggctggcgtatttaccgatggcgacctgcgccgtattctggaccagcgctatgatatccatagcaaccaaatcgccgatgttatgacacgaaactgtatcacggcacaggcacaacaattagctgctgaggcgctgcagataatgcagcagaagaaaattaacggactgattattatcgacgatgccggcaaacctgtcggtgcaatgaatatgcacgatctgctgcgggccggggtattataa

SEQ ID NO: 290694 - DNA, 754 bp, Unknown
  Bacterial polypeptide expressing nucleotide sequence isolated from the Sargasso Sea
tcgactcgaggcggcggcattgaccgctctgtcaaaccgcgtggacaaggtgtttgcccaggcggtgcagatggtgctgcagacccggggccgtgtggtggtcatgggcatgggcaaaagcggccacgtgggccgcaagattgccgccacgctggcttccaccggcacccccgcgttttttgtccatcccgccgaagccagccatggcgacctgggaatggtcaccagcgacgacctggtgctggccatctccaacagtggcgaaagcggcgaactcacggccatcctgcccgtgctgcggcgcctgggcgcgcccatgatcgccatgacgggcggtctgcagtccaccctcgcgcgttatgccgacctggtgctcgactgcagcgtggcgcgcgaagcctgcccgctcaacctggcccccaccgccagcaccacggcccagctggccatgggcgacgcgctggccgtggccctgctggacgcccggggcttccgccccgaagactttgcccgctcgcaccccggcggtgcgctgggccgcaagctgctcacccatgtgagcgacgtgatgcgctcgggcgcagaggtgccgcgcgtggcgcctgacgcctcgttcagcgacctcatgcgcgagatgagcgccaagggcctgggcgcctcagccatcgtcgatgcagcagggcaggtgctgggcatcttcaccgacggcgatttgcgcccgcgcatcgaggcaggggcggaactgcggtctaca

SEQ ID NO: 290695 - DNA, 565 bp, Unknown
  Bacterial polypeptide expressing nucleotide sequence isolated from the Sargasso Sea
agatatccatatccatgttcctgttgatgaagaggtttgcccaatgaacctagcccccacagccagcacttcaacggcattggcagttggggatgcttttgcagttgctcttcttgagcgtaaaggattcacaaaggaagattttgccaaatcacatccaggaggctcacttgggaaacaacttctgcttagtataggtgatatcatgcatacaggtgaagaaatacctcttgtttactcagatgattcactatcagtcggccttattgaaatgtctcaaaaagcattaggaatgacagcagtggttaataaagataatcaacttgctggaatttttacagacggagatctaagaaggacattggaatcaaatattgatataaaagtaacaaaaatgtccgatgtaatgacagcaaacccatttgtcctctctgcagagactcttgcttataatgcagtgagccttattcaagaaaaaaagatcacatcaattatcgtaacaaaagaaaataaagtcgtaggagctctaaatattcatgatctattcagagctggcctgatgtga

SEQ ID NO: 290696 - DNA, 579 bp, Unknown
  Bacterial polypeptide expressing nucleotide sequence isolated from the Sargasso Sea
tctcgcatgaagctgatattcatgttcatgttttagttaaagaagaagcatgcccaatgaaccttgctccaactgcaagtacatctgcagctctagctatgggcgatgcaattgcggttgccctcctagagaaaagagggttcacaaaagaagactttgcaaaatctcaccctggaggatctttaggaaaacagctgctgttatctgttgaagacataatgcacacaggtgatgagatcccttctgtatatgagacagataaactagcttctggtttgatagagatgtctgaaaaagcacttggtatgactgtagtactaaatcaaaaagatgatttggttggaattttcacagatggtgacctaagaagaactttggaaaatagaattgatatacaaaatactagtatgaaggaagtgatgacaaaagatccttatataataaacaaagaaacacttgcatataatgcggttgcaaagatccaagataaaaaaattacctctctaatcattgtggacggaaaaaaagttattggagctttgaacatccatgatttatttagagctggagtaatgtaaa

SEQ ID NO: 290697 - DNA, 688 bp, Unknown
  Bacterial polypeptide expressing nucleotide sequence isolated from the Sargasso Sea
ttaatattctcttattcaggtgaaactgaagaaataatttccttaattccatatctaaagaaaaaagaaattaagatcattgcttttacaggtaacattgactctaaattatcatctgagtccgacatacatatccatgtacctgttgaagaagaagcctgcccaatgaatctagctcccactgctagcactactactgccttggcagttggggatgctttcgcagttgctcttctagagcgcaaagggttcacgaaggaagattttgccaaatcacaccctggaggttccctaggtaaacagctattactatcgattagagatattatgcacactggagaagaggtcccagttgtttactcagatgatactctctcaaaaggtcttattgagatgtcacaaaaagcattaggaatgaccgcaatagttaatgaaaatgatcaacttgttggaatttttactgatggagaccttaggagaacacttgaatcaaacatagatattaagttaactaaaatgaatcaagtcatgacgaagaatccgtttgtacttcctgctgatactcttgcctataatgctttaagtctcattcaagaaaagaaaataacttcgattattgttactaatgaaaggaaagtcgtaggagcactaaatattcatgatctattcagatcaggcttaatgtaaa

SEQ ID NO: 290698 - DNA, 985 bp, Unknown
  Bacterial polypeptide expressing nucleotide sequence isolated from the Sargasso Sea
atgatagcgaaaatcaatgatgaccgggcgctcgcgctcgcccgcgacgtgctcgacatcgaggcggacgccgtgcgcgcgctgcgcgaccagctcgacggcgggttcgtccaggccgtcgcgctgctgctcggctgccgcggccgcgtggtggtatccggtatcggcaaatcggggcatatcgcccgcaagatcgcggccacgctggccagcaccggcacgccggcgttcttcgtccaccctgccgaggccagccacggcgacctcgggatggtcacctccgacgacgtcttcatcggcatctcctattccggcgaatccgaagaactcgtggcgatcctgccgctcgtgaagcggatcggcgcgaagctgatcgcgatcacgggccgtgcggaatcgagcctcggcacgctcgccgacgtgaacctgaacgccgcggtctcgaaagaggcctgcccgatgaatctcgcgcccacggcgagcacgaccgccgcgctcgcactcggcgacgcgctcgccgtggcggtgctcgacgcgcgcggcttcggctcggaagatttcgcgcgctcgcacccgggcggcgcactgggccggcgcctgctcacctacgtgcgtgacgtgatgcgctcgggcgacgacgtcccgtccgtcgggctcgacgcgacgctgtcggacgccctgttccagatcaccgcgaagcgcctcggcatgaccgccgtcgtcgacgccggcggcaaggtcgcgggcatcttcaccgacggcgacctgcgccgcgtgctcgcgcgcgacggcgacttccgcacgctgccgatcaccgacgtgatgacgcgcgacccgcgcacggttgcgccggatcacctggcggtcgaggccgtggaactgatggagcgccaccggatcaaccagatgctggtggtcgatgccgacggcgtgctgatcggcgcgctgaacatgcacgacctgttttcgaagaaggtgatctgat

SEQ ID NO: 290699 - DNA, 680 bp, Unknown
  Bacterial polypeptide expressing nucleotide sequence isolated from the Sargasso Sea
aattcgggtgagactgatgaaaattgtcgggttattaccagttataaagagattaaacattagtcttataacattaaccggaaattcagattcaactttagccaaagcatcaaacattaatattaatgtaagtgtggaaaaagaagcatgtccgcttgggcttgcaccaacatcaagtaccacagcaactctggcaatgggtgatgctttatcgattgccttgcttgaaaaacgtggtttcaatgaagatgactttgctctttctcatcctggaggagcattaggcaaacgtttgctactgcgtgttgatgatattatgcacacggaaaatgaaataccaaaagttttagaaaatgcaacacttggtgaagcattaattgaaatgtctgccaaaggtctcggtgttacaacaattactaataaaaataatgagtttttaggtattttcactgatggggatttgcgccgagcacttgactcagggattgattttaaactatccaagataaaagatgtaatgacgaaaaacgcaaaaaccatagttactaactcacttgctgcttcagcattagcactaatggaaacgcatagtattaatgcgcttgtcgtagtggatgaagaagagatactgtgtggcattctaaatatgcatgatcttttgcgtgctcgagtgatttaaa

SEQ ID NO: 290700 - DNA, 197 bp, Unknown
  Bacterial polypeptide expressing nucleotide sequence isolated from the Sargasso Sea
gttggataactggaaacgcattatgtcgcacttagagttgcaaccgggttttgactttcagcaagcaggcaaggaagtcctggcaattgaacgtgaaggcctggcggagcttgatcagtacatcaaccaaaattttaccctcgcatgcgagaaaatattcagttgcccgggcaaagtcgtggtgatgggaatgggga

SEQ ID NO: 290701 - DNA, 970 bp, Unknown
  Bacterial polypeptide expressing nucleotide sequence isolated from the Sargasso Sea
atgaaagattttgattacattacagttgcgaaaaaggttcttgaaattgaatcaaaggcactcacaaagcaaattgatcaaatcgatcaaacatttgtcgatgcctgcgaattatgtcttgagtgtaatggcaaattaatcgtcatggggcttggtaaatcaggacatattgcagataagattgcagcaacgctctcaagtacaggtacgccctcttactttatccatcctagcgaggcaatccatggcgatattggcatgatcgacgaaaaagacatagttttaatattctcgtattcaggtgaaactgaagaaataatctccttaattccgtatctcaagaaaaaagagattaaaatcatttccttcacgggaaatattgactctaaattatcctctgagtcagacatacatatccatgtacctgttgaagaagaagcctgtccgatgaatctagctcccactgcaagtacaactacggctttggcagttggtgatgcttttgctgttgctcttctagaacgcaaaggattcacaaaggaagattttgccaaatcacaccctggtggctcacttggtaagcaattgctgctatcgataaaagatattatgcatacaggagaagaggttccggtcgtttactctcatgatacactctcaaaaggactcattgagatgtcacaaaaagcactaggaatgacagcaatagttgatgaaaaggatcaacttgttggaatttttactgatggagacctcagaagaacacttgaatcaaacatagacattaagacaactaaaatgcatcaagtcatgacaaaggatccatttgtaatccctgctgatactcttgcctatagtgccttaagcctcattcaagaaaaaaaaataacttcgattattgtcacgaatgaaaataaagtaataggagcacttaatattcatgatctattcagatccggcttaatgtaaa

SEQ ID NO: 290702 - DNA, 967 bp, Unknown
  Bacterial polypeptide expressing nucleotide sequence isolated from the Sargasso Sea
catgcgtgaacagatccagcgctacgctcatgaaaccctgagtatcgaactggccgaggcacaaaggctgtgctctcggctcaatgattccttcgtctcggcctgcgaggccatccttgcttgtacgggcaagatagtggtcaccggcatcggcaagtccggccatatcggcaagaagattgccgcgaccctggcctcgaccggctcgcccgcctttttcgtccatcccgccgaggcgctgcatggcgatttgggcatgatcaccaagggggatctggtcatcatgatctccaactccggcgaggccggcgagttcaagaccatgctgccgctgctcaagcacaagggtctggtggtgatcggtttcaccggcaagctcgactcctatctggcgcgacaggccgatcacgtcatcgacatcagcgtccagcaggaggcctgtcctctcggtctggcgccgacttccagtgccatcaacaccctgatgatgggcgatgcccttgccatcagtgctatgcgcattcgcgatttcaacgagcaggactatgcagtttctcacccgggcggtagcctgggtgcccgattgttgctacgcaacaaggatatattagaccctgagctaccaataccagtttgttctgcagacacatccttgagggatgccattgtggctttgagtcgtggtggatttgggctagtagtgattagtagtgatcagggcagcatcttgggagttttcacggatggtgatttgcggcgctctttggaaaaaacattgcccctggatacctgtgtcaccgagctgatgacccgaacaccggtggtggtccaagcggacggtctggcggctgccacactggaacttatgcacgaacatcgcatcaatgctgtccccgtggtgtctgatgaggctcgattgttgggggtgatcagtattcatcagatatataaagctggtattcgttga

SEQ ID NO: 290703 - DNA, 574 bp, Unknown
  Bacterial polypeptide expressing nucleotide sequence isolated from the Sargasso Sea
tttgaatcagacatacatattcatgtacccgtggaagaagaagcctgtccgatgaatctagctcctactgctagtactactactgccttggcagttggcgatgctttcgctgttgctcttttagagcgcaaaggattcacgaaggaagattttgcaaaatcacacccaggaggctcgctgggtaagcaacttcttctatcaattaacgatattatgcacactggagaagaggtaccagttgtttactcagacgatactctttcaaaaggtcttattgagatgtcacaaaaagcattaggaatgactgcaatagttgataagaaggaccagcttgttggaatttttaccgatggagaccttagaagaacgcttgaatcaaacattgatatcaagacaactaaaatgcatgaggtcatgacaaaaaatccatttgtacttcctgctgatactctcgcctataatgctttgagtctcattcaagaaaagaaaataacttcgattattgttgcgaatgaaaacaaagtcataggagcactaaatattcacgatctattcagatcaggcttaatgtaaa

SEQ ID NO: 290704 - DNA, 585 bp, Unknown
  Bacterial polypeptide expressing nucleotide sequence isolated from the Sargasso Sea
ctctgcaaaaaacttcaactgtaaatatagacgttagtgttaaaaaagaggcatgccctcttgggttagctccaacttcaagcacaactgcaacattagcaatgggagatgcgatcgctattgcgctactagaatcgcggggatttagtgaagatgatttcgctttatcacacccaggtggaacattaggaagacgcctattactgcgcgtggacgatattatgcataccggggaggagataccaaaagttaacgaaagtgccacccttagtgaagctttagtggaaatgtcaaaaaaaggtcttggggtaactacaatagtgaagaaagacggtgttgttttaggtatttttactgatggtgatttacgtcgagcacttgattctggtgctgattttaaaaattgtcatgttaaagatgtaatgacaaaagatggcaaacaaataactgttgattcgcttgctgcttccgcactagccttaatggaaaatcatagaattaatgctctagttgtagttgatgaaaaaaacaaattatgcggaatactaaatatgcatgatcttctaagagcaagagttatttaaa

SEQ ID NO: 290705 - DNA, 934 bp, Unknown
  Bacterial polypeptide expressing nucleotide sequence isolated from the Sargasso Sea
ctggacatcgagaaacaagcgattgatggactctaccagtacctgaacgatgccttcgatcaggcgtgcgagatgatactgcgctgcagtggcaagatagtggtcaccggcatgggcaagtcaggtcatgtcggaagcaagattgcggccaccctggccagcaccggcactcccgccttcttcctccatccgggtgaagccagccacggcgatctggggatgatttccggcggcgatctcatcatcgccatctccaactccggcgagagcgacgagatcctggccctgttgccggtgcttaagcgccgcggtatcccgctcatctgcatgaccggcaacccggcctccaccatggcgaaagaggccaacgtgcacctgtgcatcaaggtagagaaagaagcctgcccgctggggctggctcccacatccagcaccacagcgaccctggtgatgggcgatgcgctggcggtggccctgctggaagcccgcggctttaccgccgacgattttgccctgtctcacccgggcggctcccttggcaagcgactgctgctgcgggtgggcgatctgatgcacagcggcgagctgttgccccaggtggggatagatgccaccatcagccaggcactgctggaagtgagccgcaaggggcttggcatgacggccgtggccgatgccgatggccgcctggctggtctgttcaccgacggcgacctgcgccgtattctggacctgcaggtggatatccaccacaccccgatcagccgcgtgatgacggtcaactgtgttaccgtgggaccagagatgatggcagccgaggccgtcaaactgatggaaaccagaaagatcaacggattactggttgtggatggcgacaagcgcccgctgggtgccttcaacatgcatgacctgctgaaagccggagtaatttgat

SEQ ID NO: 290706 - DNA, 979 bp, Unknown
  Bacterial polypeptide expressing nucleotide sequence isolated from the Sargasso Sea
catggtagaccaatcacaattgcgccagtggggctgtaaagtcatcgatattgaaaaatcggccctcgacaatctttatcaatatgtcgattccgttgaatttgcccaagcctgcgagttaattctcaactgcaccggcaaagtgatagtgatggggatggggaaatcaggccacattggcaataaaatctcggccaccctcgccagcacaggcaccccagcgttttttgtccaccccggagaagccagccatggtgacctaggcgtgctttcggacaatgatgtaattcttgcgatttcaaactcgggtgaatcgagcgaaatcctcgcgctgatgccggtcatccaacgaaaagccattcccgtgattgccatgacaggcaagccagaatccaccatggcgcgtctatctaaaattcatttatgtattgaggtgccagaggaagcctgtccgcttgggctggcgccaacttccagcaccacagcaaccttagtcatgggcgatgccatcgccattgctttgctgcaagccaaaggctttacccgagaagatttcgccatgtcccatccgggcggcgccttaggtcgtaagctgctgcttaaagtcagcaacgtgatgcacagcggcgatgatttgcctttggttaaacacgatatctgcattaccgatgccctgtatgagatctccaagaaaggccttggtatgacggcggtaatcgatgaacagaacaaactcgtgggtatctttaccgacggcgaccttcgccgggttatcgatgcccaagtcaacctacgcaccacgcctatcgccgatgtgatgacgcgaaactgtgtcacaattactgaaaacgttttagcggcgcaggcgctgcaagtgatggattccaaaaatatcaacggcctgatagtgatagataaagaacatcatcctgtcggtgccctcaatatgctcgatatggttaaagcgggagtgatttaa

SEQ ID NO: 290707 - DNA, 982 bp, Unknown
  Bacterial polypeptide expressing nucleotide sequence isolated from the Sargasso Sea
ttgaaaaaaataagccctgaaaaactcaaagcactcggtcaagcagtaattcagaccgagcaggtagagctctccgcgctaattaaacgtatcgataataagtttgttgatgcctgcaatataattcttcagtgtgacggccgtacagttgttacgggtatggggaaatctggtcacatagcaaataaaatcgcagctacacttgccagtacaggaacaccgtctttcttcgtccaccccggggaagctagccatggtgatcttggaatgatcacaacagatgatgttgttattgcattatcgaattctggtgaaactgatgaaattgttgctttacttcctgtaattaaaagaatgaacacgccattaattacactaactggtaatcccgattctactctggcaaaaacttcaactgtaaatatagacgttagcgttgaaaaggaagcatgtccgctcgggttagccccaacctcaagcacaactgcaacattagcaatgggagatgcgatcgctattgcgctactagaatcgcggggatttagtgaagatgatttcgctttatcgcatccgggcggaacattaggaagacgtctattactgcgcgtagacgatattatgcataccggagaagagatcccaagagttaacgaaaatgccagcctcagcgaagctttagtggaaatgtcagaaaaaggccttggagtgactacaatagtaaataaagacggtgtagttttaggtatttttacggatggtgatttacgtcgtgcacttgattctggcactgattttaaaaattgtcatgttaaagatgtaatgacaaaaaatggtaaacaaataactgttgattcgcttgctgcttccgcactagctttaatggaaaatcatagaattaatgctctcgttgtagttgatgaaaaaaacaaattgtgtggaatactaaatatgcatgatcttctaagagcaagggttatttaaa

SEQ ID NO: 290708 - DNA, 970 bp, Unknown
  Bacterial polypeptide expressing nucleotide sequence isolated from the Sargasso Sea
catgacaaattttgattacatcgccgttgcgaaaaaggttttggaaattgaatccaaagcgcttacaaaacaaattaatcaaatcgatcaagcatttgtcgatgcatgcgagttatgccttcaatgttcaggaaaattaattgtaatgggtctgggaaagtcaggacatatcgcagataaaattgctgcaacactttcaagtactgggactccttcctactttattcaccccagtgaagcgattcatggtgatcttgggatgatagatgaaaaagatatcgtattaatattctcttattctggagaaactgaagaaatcatatctttgcttccgtatctcaagaaaaaagaaatcaagattgttgcttttacgggaaatattgattctaaattatccttagagtcagatatccatatccatgttcctgttgatgaagaggcctgcccaatgaacctagctcccacagccagcaccaccacagcattggcagttggggatgcttttgccgttgcacttcttgagcgcaaaggattcacaaaggaagattttgcgaaatcacacccgggaggctcacttgggaaacagcttctacttagtattggtgacatcatgcatacgggtgaagagatacctgttgtttgctcagatgattcgctatcaactggacttattgagatgtcacaaaaagctttgggaatgacggctgtggtcgataaagacaaccaacttgctggaatttttactgatggcgatctcagaaggactctagagtcgaatatagatataaaagcaactaaaatgtctgatgtcatgacaccaaacccatttgttctttcagaagatactcttgcttataatgcattgagccttattcaagaaaaaaagatcacctcagttatcgtaaccaaagaaaataaagtcataggagctctaaatattcatgatctatttagggctggcctgatgtaa

SEQ ID NO: 290709 - DNA, 826 bp, Unknown
  Bacterial polypeptide expressing nucleotide sequence isolated from the Sargasso Sea
gatgggcctggggaagtcaggtcatattgcagataaaattgctgcaacactttcaagtactgggactccttcctactttattcaccccagcgaagcaatccatggtgatcttgggatgatagatgaaaaagacatcgtattaatattctcttattctggagaaactgaagaaatcatatctttgcttccgtatctcaagaaaaaagaaatcaagattgttgcttttacgggaaatattgattctaaattatccttagagtcagatatccatatccatgttcctgttgatgaagaggcctgcccaatgaacctagctcccacagccagcaccaccacagcattggcagttggggatgcttttgccgttgcacttcttgagcgcaaaggattcacaaaggaagattttgcgaaatcacacccgggaggctcacttgggaaacagcttctacttagtatcggtgacatcatgcatacgggtgaagagatacctgttgtttgctcagatgattcgctatcagctggacttattgagatgtcacaaaaagctttgggaatgacggctgtggtcgataaagacaaccaacttgctggaatttttactgatggcgatctcagaaggacgctagagtcgaatatagatataaaagcaactaaaatgtctgatgtcatgacagcaaacccatttgttctttcagaagatattcttgcttataatgcggtgaaccttattcaagaaaaaaagatcacctcagttatcgtaaccaaagaaaataaagtcataggagctctaaatattcatgatctatttagggctggcctgatgtaa

SEQ ID NO: 290710 - DNA, 970 bp, Unknown
  Bacterial polypeptide expressing nucleotide sequence isolated from the Sargasso Sea
catgacaaattttgattacattgctgttgcgaaaaaggttttggaaattgaatccaaagcgcttacaaagcaaattgatcatattgatcaagcatttgttgatgcatgcgagttatgccttgaatgttcaggaaaattgattgtaatgggtctgggaaagtcagggcatattgcagataagattgctgcaacactttcaagcactggaacgccttcttactttattcatcccagtgaagcaatccatggtgatcttgggatgatagatgaaaaagacatcgtattaattttctcttattctggagaaactgaggaaatcatttctttgcttccatatcttaagaagaaagaaatcaagattgttgcttttacgggaaatactgattctaaattatccttagagtcagacgtccatatccatgttcccgttgatgaagaggcctgtccaatgaacctagctcccacagcaagcaccaccacagcattggcagttggggatgcttttgccgttgctcttcttgagcgcaaaggattcacaaaggaagattttgcgaaatcacaccctggaggctcacttgggaaacagcttctgcttagtatcggtgacatcatgcatacgggtgaggaaatacctattgtctgctcagatgattcactatcagtcggccttattgaaatgtcacaaaaagctttgggaatgactgctgtggtcaataaagacaaccaacttgctggaatttttactgatggcgatctcagaaggacgttagaatcgaatatagatatcaaagcaactaagatgtttgatgtcatgacagcaaaaccatttgttctttcagaagatactcttgcttataatgcagtgaaccttattcaagaaaaaaaaatcacctcagttatcgtaaccaaagaaaataaagtcgtaggagctctaaatattcatgatctatttagggctggcctgatgtaa

SEQ ID NO: 290711 - DNA, 979 bp, Unknown
  Bacterial polypeptide expressing nucleotide sequence isolated from the Sargasso Sea
atggtagaccaatcacaattgcgccagtggggctgtaaagtcatcgatattgaaaaatcggccctcgacaatctttatcaatatgtcgattccgttgaattcgcccaagcctgcgagttaatcctcaactgcaccggcaaagtcatcgtgatggggatggggaaatctggccatattggtaataaaatctctgctaccctcgccagcactggcacccctgccttctttgtgcatccaggcgaagccagccatggcgacttaggcgtactctctgataatgatattatcctcgccatttcaaactcgggtgaatcgagcgaaatccttgcgctgatgcccgttatccaacgtaaagccattcccgtgattgctatgactggcaaacctgagtccacgatggcacgtttggccaaaattcatttatgtattgaagtgcctgaagaagcctgtccgctcgggcttgcgccaacctcgagcaccacggcaaccttagtgatgggtgatgcgatggccattgcgctgctgcaagccaaaggctttactcgggaagactttgccatgtctcacccaggcggtgccctaggacgtaagctactgttaaaagtaagtaatgtcatgcatagcggcgatgacttaccactcgtcaaacacgatatctgtattaccgatgccctgtatgaaatctccaagaagggcctaggcatgacggcggtgatcgatgaacaaaacaaactcgtgggtatttttaccgacggcgacctacgccgcgttatcgatgcccaagtcaacctacgcaccacgcctatcgccgatgtgatgacgcgaaactgtgtcacaattactgaaaacgtcttggcagcgcaggcgctgcaagtgatggactcaaaaaatatcaacggcctgatagtgatagataaagacaatcatcctgtcggtgcgctcaatatgctcgatatggttaaagcgggagtcatttaat

SEQ ID NO: 290712 - DNA, 248 bp, Unknown
  Bacterial polypeptide expressing nucleotide sequence isolated from the Sargasso Sea
catgaccactcaacttgaacaagcctgggaactggcaaaactgcgtttcgccgcggtaggcattgatgtcgaggcggccttacgccagctcgatcgtctgccagtctccatgcactgctggcagggcgatgatgtcgccggtttcgaaaatccggaaggttcgctcactggcggtattcaggctaccggtaactatccgggtaaagcgcgtaacgccaccgaactgcgggccgatctggagcaggcgc

SEQ ID NO: 290713 - DNA, 483 bp, Unknown
  Bacterial polypeptide expressing nucleotide sequence isolated from the Sargasso Sea
ccggccattttcaccccaccgaggtcatcagcgacaagatcagcgcggtctccctatttgtccggcacctgctgctgcacgtcagccgcccggtgcgctgggacagcgatcacgtggtgctgctggatgacgaaacccaggccatcgccaatgaaatcatccgcaatgagttgctagagcgggtgcatatcggcctcgacttcttcgatgcctccatcaaccgcatcgcggcctgggttatcggtacccgcaacatgaagaaggcgctgttgcgtgctctgctcgagcccattgagatgctgcgtcaagccgaatgcaagggggattattcgacccgcctggctctgatggaggagacccgcagcctgccgtggcaagccgtctgggactacgcctgcgcccgtgaaggggtcgcggtgggcgtcgactggctcgacgccgtcaaggagtacgaggtgcaggaactgctcactcgtcgctgag

SEQ ID NO: 290714 - DNA, 1261 bp, Unknown
  Bacterial polypeptide expressing nucleotide sequence isolated from the Sargasso Sea
atgaccactcaacttgaacaagcctgggaactggcaaaactgcgtttcgccgcggtaggcattgatgtcgaggcggccttacgccagctcgatcgtctgccgatctccatgcactgctggcagggcgatgatgtcgccggtttcgaaaatccggaaggttcgctcactggcggtattcaggctaccggtaactatccgggtaaagcgcgtaacgccaccgaactgcgggccgatctggagcaggcgctgagcctgattccgggtccaaaacgtctgaatttgcacgcgatctatctggaatctgatacgccggttgcccgcgatcaaatcaaacctgagcactttaaaaactgggtggagtgggcgaaagcgaaccagttaggactggatttcaacccatcctgcttctcacacccgctgagcgccgacggtttcacgctggcccacgccgatgacaccattcgccagttctggatcgatcactgcaaagccagccgtcgcgtctcagcgtattttggcgagcagttgggtacgccatcagtgatgaacatctggatcccggatggcatgaaagatatcaccgttgatcgtttagcaccgcgccagcgtctgctggacgcgctggacgaagtgatcagcgagaaactcgacccggcgcaccatatcgatgccgtcgaaagcaagctgtttggcatcggtgcggaaagctacaccgtgggctctaacgagttctacatgggttacgccaccagtcgccagacggcgctgtgtctggatgcgggtcatttccatccgaccgaagtgatttccgacaaaatctccgccgccatgctgtacgtgccgcgcctgctgctgcatgtcagccgtccagtgcgttgggacagcgatcacgtggtgctgctggatgatgaaacgcaggcgattgccagcgagatcgtgcgccacaacctgtttgaccgcgtacacatcggcctcgacttcttcgacgcctccattaaccgcatcgccgcgtgggtgatcggtacccgcaatatgaaaaaagccctgctgcgcgcgctgttagaaccgaccgagcaactgcgccagctcgaagccagcggcgactacaccgcacgcctggccctgctggaagagcaaaaatcgctgccgtggcaggccgtctgggagatgtattgccagcgtcacgacacgccagcgggcagccagtggctggacagcgtgcgcacttatgaaaaagagattttgagcaaacgtagctaac

SEQ ID NO: 290715 - DNA, 200 bp, Unknown
  Bacterial polypeptide expressing nucleotide sequence isolated from the Sargasso Sea
aatgattttatttccagcaatagatttaaaagatggtaaatgtgttagattgactcaaggagacttcaacaaatcaaccgtttacaattcttctccgatcgatcaagcaaaaatatttgaagatcttggagttgagtggttgcactgtgtagatttagatggtgctttacatggagtatcagaaaatcttaaatttatcg

SEQ ID NO: 290716 - DNA, 331 bp, Unknown
  Bacterial polypeptide expressing nucleotide sequence isolated from the Sargasso Sea
ttttgccacagatttagtaaaagagttttcttcatttaatattgctagttttattgttacagatataaatacagatgggacgttagaagggacaaatgaagaattcataaaaagcatacttgaaattacagatattccagtaatagcctcaggaggtgtaggttcaatttctgatttattatcgttagtaaaatttgagaactctggactctttggagtaattgtaggtaaagctctttatgaaaataaattcacgatcaacgaggcgaataatgtattctcatcaaagagattaaatgactttgatttaaacagaaattactacgcctaa

SEQ ID NO: 290717 - DNA, 655 bp, Unknown
  Bacterial polypeptide expressing nucleotide sequence isolated from the Sargasso Sea
atgagtttttctctgattcctgcgattgatattattgatggggggctggttcgtttggttcaaggtgattatagccaagtgaccaaatatgatgcctctccagtggatattgctcagtactatgtttcattgggatttaattatattcatgtggttgatttaaatggcgcaaaagatgggcatttaacgaatctagatgtcattcaatcgattgccgctcttccggatgtgaatattcaagtaggtggtggggttcgatcgcatgatcatgtgaaacagttattggatgtcggcgtttcttccgtcattgttgggtctttgtttgttcaggattatgatttggcgattcagattgtgcaggactttccgggtaaaattatcgcgggactggatattcttgatggctgtttggccagtcatggctggacccaacagtctcaaatatcattggatgtgatgattggtcaattatcagatttaccacttcattccattgtgacgacagatatttcaaaagatggaacatttgaggggctaaatgttgatttgtatcgcaatatgtccaggattagttcacacgccattgttgcctctggtggtgtcgcaaccatttcagatgtgatcgggcttcgggaccgaaattttacaaacggac

SEQ ID NO: 290718 - DNA, 172 bp, Unknown
  Bacterial polypeptide expressing nucleotide sequence isolated from the Sargasso Sea
tatggacctaataccagcaattgatttaatgaatggtaagtgtgtaaggctttttaaaggcgactttaataaaagaaaagacttcacaaaagagcctcatgagcaagctaaattttgggaaagcgaaggggcaaaatatatacatatagttgatttggatgctgcaagattc

SEQ ID NO: 290719 - DNA, 262 bp, Unknown
  Bacterial polypeptide expressing nucleotide sequence isolated from the Sargasso Sea
tttttaaatatgtttgagtctgcagggctaacgcatgttttatgtaccgatattgatcgtgatgggacattgcgggggtttaacagggcgctctataccagtgtaaaacgagaattttcatgtctgcaacttcaggcttcaggaggggcaagccgccttgaagatttgaaacatcttgatgcggatggggtgattattggcaaggctctgtatgaagggcgttttagcgttgccgaagcgctggaggcgaccgcatgttgac

SEQ ID NO: 290720 - DNA, 613 bp, Unknown
  Bacterial polypeptide expressing nucleotide sequence isolated from the Sargasso Sea
tgagagcaggagcaaaagattacatttagttgatctggatggttcatttgacggagtaggtgccaatatttcctgtattcgctcaattctaaaaaatgtttctataccagttcaaataggtggaggcctccgtacggaagaagacattgacactatgatggatctgggtgtttcagctgttattgtcggaacaatggctgtaaaattccctgctgtacttgagaaacttttaaataaatacactgatgaacaaataattctcggcgtagatgcacgtaatcgtaaagtttcgatcgaaggctggaaggaaaacactcaaattaaagatgtaaaatttgccttaaaatggaaaaatttcggtataaagagagtggtttttacagacatttccagagacggaatgttaagcgggccgaatttggttgcacttcgtgaaatggctgagcataccggattgaaaatagttgcatcaggaggggtttcttccatagatgaccttgaacagcttaaaaaacttgagcaatatggtgtggatcaggttatcagtggaaaagccatttatgaaaggaaaatagatctcaaaagggttttcaaatgcttgcaaagcgaataa

SEQ ID NO: 290721 - DNA, 327 bp, Unknown
  Bacterial polypeptide expressing nucleotide sequence isolated from the Sargasso Sea
catgattatatacccagcaattgatattatagacgggaaatgtgttcgactttcaaaaggggactattctttaaaaacaatttattcagataatctagaggacattgctaagagcttgattagtaacgggacaaaattcctacacatagttgaccttgatggagcgaaggctggcatgcctactaatattcaaaacatttttgatataagaaaatcattcccaaatatttttatacaagttggaggcggaattagaactatagatactatagaacagtatcttagtcatggtattgaccgaattattcttggtacaaagattttaaa

SEQ ID NO: 290722 - DNA, 698 bp, Unknown
  Bacterial polypeptide expressing nucleotide sequence isolated from the Sargasso Sea
aatgaaaatcatacctgcaattgatttgatggatggtaaagttgtacgtttgtacaaaggtgatcctaaaaataaaacaatttacagtgataatccagtcaaaattgcaaaaaaatgggaatcatcaggagctgatattttacatgttgttgatttagatgctactttaggtagtggtgagaatttcaaaacaattaaagaaatatctgaaaatatatcaattcctttacaagttgctggtggacttagaactgaagaaaaaatttctgaggttttagactttgcatctcgtgcagtaattggaacaattgcaatgcaacttaaagaaagtgaacaggataatatcttgagtgattttattcaaacatttgggaatgaaaaaattgtaatttctattgatcatattgatggcaaaatcgtcactcatggatggcaaaatagtactgatattgatctatatgatgcaacaaatgaatttgttaagtatggttttactgaatttctaactacaaacgtttcaaaagatggaaccttggaaggtcctgatattgaatccctaagaaaaatttgtcaaatagaaaaatgtaatgcaattgctagtggtgggatttctaaaatagaagacattcaagatgtaaataaaattaatccgtttggagtcattttaggaaaggcactttatgaaagggctagtttca

SEQ ID NO: 290723 - DNA, 658 bp, Unknown
  Bacterial polypeptide expressing nucleotide sequence isolated from the Sargasso Sea
aatgaaaatatttcctgctatagatattagaggggggaagtgtgttcgccttttaaaaggtgattttgaaaaatctactgaatataaaaaaactcctttagaccaagcaaaagagttcttagacctaggttttaaagacttacatattgttgatttagacggcgctttaaaaggtaagacagttaacttagatataattcgagaaataataagtaattataatttaaaaatcgaagtaggtggaggtattagatctcttgatagtattaagcagtatattgattcaggagtagagaaagttattttgggaagtggtgctattaaaaacaaaggattcttgaaagatgcctgtaaaaagtttaaaaataaaattgccttaggattagattccaagggtggttatttatctatttctggctggaaagaaaaattgaatgttagaactatagactaccttaaacaggtaaatagttttggtattagtagaattatttatacagatatcaatagagatggaatgaaaactagccctaactttggggagacaataaaaattgctgaaatttccaattgtccagtagtaatttcaggcggtgtttctacaattaaggatattataaaatgtaaagagttaaaaaataaaaaattgaaggtataa

SEQ ID NO: 290724 - DNA, 620 bp, Unknown
  Bacterial polypeptide expressing nucleotide sequence isolated from the Sargasso Sea
gatgattctatttccagcgatagatatcaaagatggcgattgtgtaagattggttaagggcaaaagggatagcgcaaccgtattcaataaaaacccagccgatcaggcgtctttttttaaacgcatgggctgtgaatggattcatcttgtagatttggatggagcttattttgggaaagtaaaaaatgttgaatctatagaggcgattcgaaaagaggtggatgttcagattcaattaggaggagggataaggaacttaaagtctatagagctatggttatctaaggggctagatagaattattttaggtactgcggctttagaaaattctaatttagttagaaaatcatgcaagttgttcccgaatagtatagttgtaggaatcgatgtcagaaatggttacgtttgtactgaaggctgggaaaagaccagcaaaacccaagcggtagatttagcaagaaaattagaagattttggtgtcgctgcgataatttatacagatattaatagggatggtgtgctatcagggcctaatattgatcagctagaattttttgctgatgcaataaatgttcccattattttgagtggaggtgtatcttcccacgatgatttacaat

SEQ ID NO: 290725 - DNA, 429 bp, Unknown
  Bacterial polypeptide expressing nucleotide sequence isolated from the Sargasso Sea
catgaagatttttccagcaattgatttaaagaacggatcttgtgtacgtctactaaagggagattttaataatctgactgaatataataaagatccgattgatcaagcaaaaattttcttagaaaataattttgattttcttcatgtggttgatctcgatggagctcaaacaggcaatcaatcaaatgtttctgttatcaaagaattattgaaaattcccaatcttaagatacaagttggaggtggcataagaacgattgatgatgctctaaatgcaatagatatgggagtctcgagaatcataattggaacatcaatttttaaaaaaggttttttagctgaaattaaaaaaaaatttaatcgggaacaaattattttagcaatagatttcatagagactaatggaattccatatatttatactcatgg

SEQ ID NO: 290726 - DNA, 511 bp, Unknown
  Bacterial polypeptide expressing nucleotide sequence isolated from the Sargasso Sea
atgaagaaaaaactgtttcctgctatagatctcattgatggtaaatgtgttcgccttttacaaggtgaatactcgaatgaaactaaatacagcgaagaccctatttcgcaagccttatcttttcaagaagaaggtgcttcgtggcttcatgttgttgatctggatgcagctagaacaggaatagctaataacgcttcaatagtggaaaaaattgcttctagattggagatacctgtgcaagtagggggaggtattcgtgacatagagtgtgcccgctcactctttgaatctggcgttactcgtattgttatcggtacagcagctacagataacccatctttagtcgaagaggtagcttcaattggcagggtggctgttgctgttgatttgagaggtgacaaggttgccgttcatgggtggaagaccgaaacagatttatcttatggagatctttttgaaagtttcgagaaatcaggtattgatgcgtacatcgttacacacatcgagtagg

SEQ ID NO: 290727 - DNA, 736 bp, Unknown
  Bacterial polypeptide expressing nucleotide sequence isolated from the Sargasso Sea
tatagtgaaaatttttccagcaattgacctaaaagacaacaaatgtgttaggcttacaaaaggcaaagatgacaccagtgaagtttttaatgaaaatccaatagagcaagcaaaatattttgaaggacagggttgttctaggttgcacttagtagatcttgactccgcttttggaagaaaagaaataaattcaaaaacaattcaaaaaattagagaggccatctcaatacctgttcagcttggtgggggaattagaaacaaagagattgcagagaaatattttgaacttggtataaactatttaataattggttcatacgctgtaaaaaatattgaagaagttatcgggcttgcagattcttataaagacagaatttatgtcgcgcttgatcttataggtgaaaccattatggttaatgggtgggagaacaaaagcgtttttacccctgctaaaatttttcaacattatgacaaaaccaacataagaggatatgttcttactgatattgaaaatgacggaatgctgtctggcctaaaccttaatatgatttcatcaaatgtaaaactagcttcaaaaaaatttattgttggtggtggtcttaaggacattgaagatattaagagcttaaaaaatatttacacaccacaattagaaggggttatagcaggtaaggcctactatgttggtgccattaatctcaaagatgctgataagctattaagcgcttatgcttaa

SEQ ID NO: 290728 - DNA, 538 bp, Unknown
  Bacterial polypeptide expressing nucleotide sequence isolated from the Sargasso Sea
gcagccttaaataaaaacagtaataaaacgataattttgaagctacttcaaaaatttcataactccataaatatccaaattggaggaggtgtaaggtcagtcgaagacataaaattttggattgatagaggtgctaaaagagttgtgataagcactttagcatacaaaaatccaaaatcaattaatcgtattgataaaaagtactataaaaaaatagcaattggattggacgtaagagataaaaaaatgtcagttgatggatggaaaactgatttgaaagacatacaacctctagacgtagttagtaaaataaaatcttcaatcttagatgcgataatttatacagacattacaagagacggaaccctaaaaggttctaacataaaagatacaataaaatttgctaattctgtaaatattcctgtgataatatctggtggagtgtccagtttcaatgaaataaataaaattaaaagtttacagaataatggaattataggagtaattgttggaaaggctctatacgaaaaaaaaatat

SEQ ID NO: 290729 - DNA, 210 bp, Unknown
  Bacterial polypeptide expressing nucleotide sequence isolated from the Sargasso Sea
aatgattattccagcgattgatcttattgacggacgcgtagtacgcctttatcaaggcgactacgagcagaaaacacaatacgaactggacccagtagacgtggttcacgactatgccgaccaaggtgcaacctggctgcacattgttgaccttacgggtgctaaagacaccagtaaacgtcagctttcactaaatcagtctatggtcga

SEQ ID NO: 290730 - DNA, 730 bp, Unknown
  Bacterial polypeptide expressing nucleotide sequence isolated from the Sargasso Sea
atgaaaatcatacctgcaattgatttgatggatggcaaagttgtacgtttgtacaaaggcgatcctacaaataaaacaatttacagtgacaatcctgtagaaattgcaaaaaaatgggaatcacttggaggtgatatcttgcatattgttgatttagatgcaactttgggcagtggccaaaattttaaaacaatcaaggaaatatctaaaaacgtatcaattccgttacaggttgctggtggacttagaagtgaagaaaaaatttctgaagttctagattttgcatctcgtgcagtaattggcacaattgcaatgcaacttaaagaaagtgagcaagataatattttgagtgattttgtccaaacatttggttctgaacgaattgtaatttctattgatcatgtggatggaaaaattgttactcatggatggcaaaataatactggtattgatctatatgatgcaacaaatgagtttgttaggtatggtttcactgaatttctaacaacaaatgtttcaaaggacggtactctagagggtcctgatattgaatctctaaaaaaaatatgccaaataaaaaattgtaatgtaattgctagtggaggaatatcaaaaatgcaggatgttcataatgtgaatgaaattaatccatttggagtgattttaggaaaggcactttatgaaggacttgtttcaatagaggaggcaaagaaaattggttctaactaaa

SEQ ID NO: 290731 - DNA, 109 bp, Unknown
  Bacterial polypeptide expressing nucleotide sequence isolated from the Sargasso Sea
gatgattattccagccattgatctgattaacggccaagtcgtgaggctctatcagggcgactacggtcagaagaccgcctacagcgacagcccgcaggcccgcttcgac

SEQ ID NO: 290732 - DNA, 676 bp, Unknown
  Bacterial polypeptide expressing nucleotide sequence isolated from the Sargasso Sea
accagccattgatttaaaagataataaatgcgttagactttctaaaggtaaagatgacaccagtgttgtttacaatgaagacccagaaaaacaagctatctactttgaacaaattggttgtaaaaaacttcacttggttgacctagatgctgcttttggtagatcaaatgttaattttgaaacaataaagaaaattagaaaatcaatctcaataccaatacaattaggaggtggagttagaagtttagatttagccaaaaaatattttgaagttggaataaataatttgattattgggtcaatgtctgttgaaaaaccaaatgaagttataattttatcaaatatttatgcggataaagtgtatatatcattagatatccttgaagataacataatgataaaagggtgggataaaaattcaggaaaaaaaatacaagacattcttgatatttatactaactcaaaaattaaaggatatgtaattacagatattcaaaatgatggaatgctaaaaggtttaaatttggattttgttagtaatttcataaaaaaaataaacttaattaaaaaatttaataaaaaaattataattgcaggcggtttaacagattactctgatctaacaaatttaaaaaagctaaacacaaaaaatattgaaggaataatttcaggtaaa

SEQ ID NO: 290733 - DNA, 292 bp, Unknown
  Bacterial polypeptide expressing nucleotide sequence isolated from the Sargasso Sea
atgaaagataacttttttacattataccccgccattgatattaaagatggaaaatgcgttagacttctttttggagaaatggaaaaagaaacagtctataataataatccattagatcaagctatgtggtttgttgatcaaggagcagagtggttgcatattgttgatttagatggtgctgttgctggagagaatataaatagaaaagtaattgaagaaattttgcacaaacttcaaaacaaggtaaaaattcaactaggcgggggtataagaaatattaacgatatcgatt

SEQ ID NO: 290734 - DNA, 313 bp, Unknown
  Bacterial polypeptide expressing nucleotide sequence isolated from the Sargasso Sea
aatgatcatctttccttcaattgatattaaagatggcaaatgtgttagacttataaagggaaacttagaacaaatgatctcttatgaaaatacgccatttaaccaagccaaaatgtattttgaaaacggatttaaaaatattcatgtagttgatttagacggtgcttttaaaggaaaatcatctaattcaaatattgttaaagaaatacttaaaaatcttaatttaaaaattcaaattggtggaggaataagaactattgaagatgttgaagattggattaaaaacggtgttgataaagttattatgggaact

SEQ ID NO: 290735 - DNA, 307 bp, Unknown
  Bacterial polypeptide expressing nucleotide sequence isolated from the Sargasso Sea
ttgagcaatctcaaatttcgggcagaagatttagttaaaaaatttgcatcggtagaggtgtctgcaattatatatactgatattagtagggatgggattttaatgggcccagcactagaagagacattaaaattttcagataaaactaatattccaattataatatcaggaggagtttcttcagagaaagatattatagaaattaaaaaaagagcaaatgataaaatcttaggcgttataagcggccgagctatatatgataatcgattaaatgtccataattgcaataagatattaggtaattaat

SEQ ID NO: 290736 - DNA, 544 bp, Unknown
  Bacterial polypeptide expressing nucleotide sequence isolated from the Sargasso Sea
taacctagatattattaagcagatagttagtaaatatgatttaaaaattgaaataggtggaggcgtaagatcacttgatagcattaaaaaatatatcgaagcaggtgttgagaaagtaatcttaggaagtggcgctataaaaaataaagaatttttaaaagatgcttgtcaaaaatttaaagatcaaattgctttaggattagatgcgaaggaagggaaccttgccgtatcaggttggaaagaaaatctaaatattaaaactacagactttcttaaagaagttaatagttatggtgtaagccgaataatttatacagatattagtagagatggaatgaaaactagtccaaattttgaagagactataaaaattgcagagcttgctaattgtcctgttgtgatttcaggaggcgtctcttcaattaacgatattaaaaaagctaaagaattaaataataataaaatagaaggtatcattgttggaaaagctatttacgatggtgatattaaacttgaagagttagcgaaggagatcagtgcttaa

SEQ ID NO: 290737 - DNA, 261 bp, Unknown
  Bacterial polypeptide expressing nucleotide sequence isolated from the Sargasso Sea
tcgtatatactgatattgctcgtgacggcatgatgaagggttgtaacattgaggccactgtcgagcttgccaggcagagctccatcccaattattgcgtcgggaggtattgcaaaacttgctgacattgtcgatttaaaggcggcaacgaaaacagaggttggtgcgaatatagttggcgctatcaccggtagagcaatttatgagggtaaattagatttgatggcggctcaaagatattgtaatcgtgaggtaagttaga

SEQ ID NO: 290738 - DNA, 553 bp, Unknown
  Bacterial polypeptide expressing nucleotide sequence isolated from the Sargasso Sea
aatggattttgtcatttatccggcgatagacatcgttaatgggaagtgcgttcgacttcatcaaggaaactacgatcttgaaaaagtttataacgaggatccagtatcgcaagcactgcacttcgcttctgcgggagccagatggatacatgttgttgatcttgacgctgctcggacaggtaatccagaaaatcgggaaataatttcccaaatagcttcttcggctccaatccctattcaggtaggaggtgggataagaagcattgattccgctaaagcactctatggcagcggagtggaacgtgtcgtaataggtacggccgcagtagagaatccgaaccttatagagggcctgacacgccaagggtatcgcgttgctgtaggtctcgatggaagaaacgggcgaatagcaactagaggctggaaggacgataccggctttcaagttacagaaatggccaagcaatttgaagattcaggtgtagacgcagtcatagtaacagaaatagaacgtgacggaaccctgctggacctgatactaaaggctgaaaga

SEQ ID NO: 290739 - DNA, 274 bp, Unknown
  Bacterial polypeptide expressing nucleotide sequence isolated from the Sargasso Sea
ctggcaaagaaatttgaaaacgatggggtttcagctgttatatacacagatattgaaagagatggggctatgatgggaccaaatttaagtgccaccgctgaaatagctaatgctgtttctattccagtaattgcatcgggcggcgtaagctcgttgaaagacttgaaagctcttcgggactgtggcgcaaaactcaatggcgtgatttcgggaagagctctgtatgatcataaattcagtattgagcaagctttggatgttctaaatgcttaaa

SEQ ID NO: 290740 - DNA, 448 bp, Unknown
  Bacterial polypeptide expressing nucleotide sequence isolated from the Sargasso Sea
atgaaaatatttcctgctatagatattaaaggggggaagtgtgttcggcttctaaagggagattttgacaaatccacagaatacaaaaagtctcctatagatcaagcaaaggaattttcagactcaggatttagagatcttcatatagttgatttagacggcgccctaaaaggagaaccagtaaacggaaagttaatcgaggagatatgtaaattaacaaaaataagggttcaaattggtggtggaataagatcaatcgatcatataaaaaaattaattgatattggcgttgatagagtagttataggcactatggctgttgaggatactaaatttctcgagaatatttgtagtaaatttaaaaataaaatcgcagtagctcttgatgttcgtaatggatttattgcattaagaggtggaaagaacaaacaaaaattctggcgtcaga

SEQ ID NO: 290741 - DNA, 409 bp, Unknown
  Bacterial polypeptide expressing nucleotide sequence isolated from the Sargasso Sea
agcagttggaaacccatcactggtaaggctcgcagcaaataaatacccaggcaatatagccgtcggaatagatgcaagaaatgggcgcgtagcaacggatggctgggctaaaagtacagatatctgggccacagaacttgccaaaaagtatgaaaattatggtgtttcagcaattatttatactgatattgatagggatggagcaatgatgggaccaaatgtgagtgctaccgctgaaatggccagtgcagtttctattcctattatagcatcaggtggggtcagctctctaaaagacctaaaagcacttaaggagtgtggagctcaactaaatggtgctatttcgggaagggcgctttacgaccagaaatttactgttcaggaggcattagaggttctcaatgcttaa

SEQ ID NO: 290742 - DNA, 484 bp, Unknown
  Bacterial polypeptide expressing nucleotide sequence isolated from the Sargasso Sea
atgataaaaatatttccagctattgatattaaggatggtaaatgtgttcgtttagctaaaggaaattatcaacaggttacacattattatgatgatcctgtaatggttgcaaaaaattggatatcagaaggttctaataatctacatattgttgatctagatggtgctagaagcggaactacaacaaattatgatgtgattactaagattagaaaaatatatccagaagtattcatgcaagttggtggaggaataagaaatgttgaaacaataactaaatatttaaatattggcatagataagattgtgataggaactaaagtagtttcagacccgtctttcctagaagaaataaccagtgatttaaaatcaaaaattatcgtagatattgcgataaaaaatagcaaacttgcgattcatggatggaatagttcatcaaaatacactatagaaaattatattaaaattttagaagaccaataat

SEQ ID NO: 290743 - DNA, 371 bp, Unknown
  Bacterial polypeptide expressing nucleotide sequence isolated from the Sargasso Sea
ccataaaaaaatagctcttggcatagatgtacgagataatagagtttctattaatgggtggaaagaagatttactaaacattgatcctttggaaatggtgaaattaataaatccttgcatattagacggtattatttatacagatatttttaaagatggaactctaaaaggagcaaacattaaagatgccttaaaatgtgctagtttgacaaatttgcctgttatagtttcaggaggtgtatcaaccttgcaagaaattaaacaaattaaaaatcttcgaaaaaaaggtttaataggtgtaattgttggtaaagcattatatgaaaaaaaagtatcattaaatgaactaataaaagaagtttatagttaaa

SEQ ID NO: 290744 - DNA, 311 bp, Unknown
  Bacterial polypeptide expressing nucleotide sequence isolated from the Sargasso Sea
aatgaaaatatttcctgcaatagatattaaagggggaaagtgtgtgagattacttaaaggcaaatttagtgaaataacagaatatgccaactctcccttagaacaggcaaaaatattcattaatcacggattttataatttacacattgttgatttagatggagcattagaaggaaaatccgttagtaaaaatataattaaggaaataagcaaattaaatggggccagtatccaagttggaggtggaataagaacttctgaacagatacacgaattattagattttggtgttgacaaagtaatactgggta

SEQ ID NO: 290745 - DNA, 130 bp, Unknown
  Bacterial polypeptide expressing nucleotide sequence isolated from the Sargasso Sea
catgaaactaattccagcaatagatttaatgaacggtaaatgtgtaagactttttaaaggtgactttaacaagagaaaagacttctccagggaaccctatgagcaagcaaaatactgggagaatgagggc

SEQ ID NO: 290746 - DNA, 502 bp, Unknown
  Bacterial polypeptide expressing nucleotide sequence isolated from the Sargasso Sea
catgattttttttccagccatagatcttaaagacggacaatgtgtaaggctagtaaagggaaatatggaaaaagttactatttttcacaaaagtccaactgaacaggcgcgattgtttcaaaactccggatgtaactggctccatctagtagatctagacggagcagttaagggacaaaacattaattctaaatcagtgaaagaagtaatacacaacacagacttgaaaatccagttaggtggtggaattagaaagagagaacaagttgaaacttggctagaatcaggtgtaaaaaaagttgttttaggtacagttgcagcaagggaacccacggttgttcgagaactagcaaaagcttatccaaaaatgatagcggtggggattgatgctctcaatggcacggtagctatcgagggttggactaaaaattcagagattaaagctattgatttatgcaagctttatgaagattccggcgtcgcctcaataatttatacagac

SEQ ID NO: 290747 - DNA, 351 bp, Unknown
  Bacterial polypeptide expressing nucleotide sequence isolated from the Sargasso Sea
cagttggaatagatgctcgcaatggacgtgttgcaacaaatggttgggtaaaagatactgatatatcagcccctgagctggcaaagcaatttgaaaacgatggggtttcagccgtcatatacacggatattgaaagagatggggctatgatgggaccaaatttaagtgctaccgctgaaatggctaatgctgtttctattccagtaattgcatcgggcggcgtaagctcgttgaaagacttgaaagctcttcgggactgtggcgcaaaactcaatggtgtgatttcaggaagagctctgtatgatcataaattcagtattgaccaagctttggatgttctaaatgcttaaa

SEQ ID NO: 290748 - DNA, 696 bp, Unknown
  Bacterial polypeptide expressing nucleotide sequence isolated from the Sargasso Sea
tatgaaaatttttccagcaattgatataagaaatggtaagtgtgtaagactaataaaagggaattacgatgaagaaattattttcaatgatgatcctataatagtagctaaaaactttgaagagatcggaactaaatatgtacatataatagatcttgatggagcaaaagatggagaatcaagaattagggataatatagcaaaaataataaataatacaaaattaaaaattcaaataggcggaggaataagaacatttgaaagagctgaatctttttttaatttaggagttgaaaaaattatttttggcacagcagctcttgaaaataaaaaagaggtcataaagtcaatagataaatataaatctaaaataatagtaagtattgatgcatctaaaggaaagattaagaccaaaggttggcttaataatagtgatgtaaaaatagatgatcttgtaaatgagctcgaagaaataggctgtaaaaattttatttacactgatatagataaggatggaactttatcccatccaaattttgattatataaaaaagttcagaaaaatttgtaattctgaactctatattgctggaggaatttctacaattgatgatgttatcaagcttagagatataggtgtagatggagctattttaggtatgtctatctatactgggaatattgacttaaaaaaatt

SEQ ID NO: 290749 - DNA, 334 bp, Unknown
  Bacterial polypeptide expressing nucleotide sequence isolated from the Sargasso Sea
aatgattatattccctgcaatagatattaagggaggaaaatgtgtaagactcttaaaaggagattttaatcaaatcacacaatataataaatctccaatagaccaagcaaaggagttttcaaatttaggttttaataatattcacttaattgatttagatgcagcattagaaaaaaagtcatctaatgaaaatataattaaagaaattagtaaaattaaaaaaataaaaattcaaacaggcggggggattaggtcattagagcatataaaaaaattgttagactttggtgttgatagagttattcttgggaactgctgcagttcaaaatgttga

SEQ ID NO: 290750 - DNA, 730 bp, Unknown
  Bacterial polypeptide expressing nucleotide sequence isolated from the Sargasso Sea
atgaaaataattcctgccatcgatctgatggatggtaatgtagttcgtctgtataagggtgatcctaaaaataaaataatttacagtgacaatcctgtagaaattgccaaaaaatgggaatcttcgggtgctgatattttacatattgttgatcttgatgcgactcttggacgtggtgaaaatttgaaaataattcaagaaatttctaaaaatacatcggtacctttgcagatagctggcggacttagaaatgaagaaaaaatttctgaagtattggattttgcatttcgcgcagtaattggaactattgccatgcagcttaaagaaagcgaacaggacaatattctaggcgattttatccagacatttggaaatgaaagaatagtaatctcaattgatcatattgatggaaaaattgtcacccatggatggcaaaataataccggaattgatctttatgatgcaacaaatgaatttgtaaagtatggatttactgaatttctaaccaccaatgtatcaaaagatggaacattagaaggccctgacatacaatctttaaaaaaaatatgtcaaatagataattctaatgtgattgctagtggtggaatctccaaaatgcaagatatccgtgatgtaaatgaaatcaatccatttggagtaatcttaggaaaagcactttatgaaggacttgtttcaatagaggaggcaaaaaaaattggttctaactaaa

SEQ ID NO: 290751 - DNA, 253 bp, Unknown
  Bacterial polypeptide expressing nucleotide sequence isolated from the Sargasso Sea
gttgaatttttatccagctatagaccttaaagagggctcatgcgtaagacttaagcgaggagatttagacacggcggtagtttacaataatgaccccatcgcccaagcaagtttatttcaaaaagagggctgtgaatggttacacatagttgatcttgatggagcagtattgggaagtaaaaaaaacttcaaaaccattcaagagataagaaaatctacctctctcaagattcaagttggaggagggataaga

SEQ ID NO: 290752 - DNA, 170 bp, Unknown
  Bacterial polypeptide expressing nucleotide sequence isolated from the Sargasso Sea
tatggacctaataccagcaattgatttaatgaatggtaagtgtgtaaggctttttaaaggcgactttaataaaagaaaagacttcacaaaagagcctcatgagcaagctaaattttgggaaagcgaaggagcaaaatatatacatatagttgatttggatgctgcaaaaa

SEQ ID NO: 290753 - DNA, 220 bp, Unknown
  Bacterial polypeptide expressing nucleotide sequence isolated from the Sargasso Sea
atggacctaataccagcaattgatttaatgaatggtaagtgtgtaaggctttttaaaggcgactttaatacaagaaaagacttcaccaaagagcctcatgagcaagctaaattttgggaaagcgaaggggcaaaatatatacatatagttgatttggatgctgcaaaaactggatccccaacaaacgataaatcaataaaaaggattgcaaaaacagtaa

SEQ ID NO: 290754 - DNA, 272 bp, Unknown
  Bacterial polypeptide expressing nucleotide sequence isolated from the Sargasso Sea
aatgattattccagcgattgatcttattgacgggcgcgtagtacgcctttatcaaggcgactacgagcagaaaacccaatacgaactggacccagtagacgtggttcacgactatgctgaccaaggtgcaacctggttacacattgttgacctaacaggtgctaaagacaccagtaagcgtcagctttcgctcattaagtctatggtcgacaccaagcgcatgcagtttccagcaggcggcggtattcgtagcgaagaagaagtggcgcagt

SEQ ID NO: 290755 - DNA, 562 bp, Unknown
  Bacterial polypeptide expressing nucleotide sequence isolated from the Sargasso Sea
tttgtcatttagaatacctaataagagattaaaacttatgaatttttttaaacacactatattttgccttattattctttctaatgcttgtattggtaaggagtttagtaaactttttgtagtgttcgagccaattgagccttcttctaatattgaaaaatctatcaacaattcttttaacactatggtgcatagactcagtggcaattcagcaccatcaaatatatggaaaattattaatgctggcaatgctagaaaagacttcgtaaaaagttattcaataaagaattatgaaaatgaaaattttattcaagtaaactttgataaagatttattaattaaaaagtttaaggaactcaatattccatttgtaggtatttcaagaccagtaattttaatgattattaatattgattcaggtattgaagagccctatattttaaatacaaatgattcaacaaaagaaatggatgtcctaattaagaattatttaaaaaaagtttcagattcacgtgcaatattcctagagatacctgctatcgatctgaaagctcaaagcagc

SEQ ID NO: 290756 - DNA, 730 bp, Unknown
  Bacterial polypeptide expressing nucleotide sequence isolated from the Sargasso Sea
aatgaaaataatacctgcaattgacttgatggatggtaaagttgtacgtttgtacaaaggtgatcctaaaaataaaacaatttacagtgataatcctgtagaaattgcaaaaaaatgggaatcacttggaggtgatattttacatattgttgatctagatgcaactttgggtagtggtcaaaattttaaaacaattaaaaaaatctctgaaaatacatcaattcctctacaagttgctggtggacttagaactgaagaaaaaatttctgaagttttagattttgcatcccgtgccgtaattgggacgattgcaatgcaacttaaggagagtgagcaagataatattctaagtgattttatccaaacatttggttctgaacgaattgtaatttctattgatcatgtggatggaaaaattgttactcatggatggcaaaataacactggtattgatctatatgatgcaacaaatgagtttgtcaactatggatttaccgaatttttaaccacaaatgtttcaaaagatgggacattagagggtcctgatattgaatcactaaaaaaaatatgtcaaatagaaaagtgtaatgcaattgctagtggtggaatatctaaaatgcaagatatacaagatgtaaatgaaattaatccatttggagtaattttaggaaaggcactttatgaagggctagtttcaatagaggaggcaaagaaaattggttctaactaa

SEQ ID NO: 290757 - DNA, 703 bp, Unknown
  Bacterial polypeptide expressing nucleotide sequence isolated from the Sargasso Sea
aatgataatattccctgcaatagatataaagggaggaaaatgtgtaagacttttaaagggtgattttgaaaatttaacagaatataaaaactcaccttttgaccaagccaatattttttcaaaaataggatttaaaaatttacatttagtcgacttagatggggccctagaaggtaaactaataaataaaaatagcattcaaagtattacaaaaataaatggtgtaaaaattcaagttggtggaggagtcaggtcgttagaacaaattgatgaattagtaaaacttggtgttgacaaagtaatacttggaacaaaagcaattgaagacccgtcttttctaaaaaaagcatgtataaaattcgataaaaaaatagttcttgcaatagatgtaagaaatggttttctctcattatctggctggaagagacaaactgatattttagcaacagattttataaaaaaagttaatgattttaacatttctagaattatatacactgatattgatagagacggaacaaagtctggaccaaacatcgattctacagttgctttctcaaagtcctctaagtttccgatcgtagtctctggtggtatttcttcaattgaggatgtgaaaagtttaaaaagtgaaaatgcaaaagaaattgagggcgtaattataggaaaagcaatctatgaccaaaatattaatattaacgag

SEQ ID NO: 290758 - DNA, 739 bp, Unknown
  Bacterial polypeptide expressing nucleotide sequence isolated from the Sargasso Sea
catgaatttaataccagctattgatttacttgaccagaaatgtgtcaggctgcttcgaggtgattttgataaggtaaccttttatgacaaagatccgcttcaactagccacccattatgaatctcttggctgcaaacatttacatttggttgatttaaatggaacaagagatggagttagtaaaaacaagtcaatcatagactcaatcatttcccaaacaaatctcaaggttcaaatgggtggtggaattcgatcgattgaatctattaattactggctaaattcaagcttagacaaaattgtaatcggaagctatgcgattgaagggactgaggaatttatatcatcaattaaacctggaatgcgttccagaatagttattgcattggatgttctgattcgtgatggtgagccttcgatacgtatacatggttggcagaaagattcaaagatgagtctcatacccaccatgaaattatttatagacaatgggtttagaaactttttgatcactgatatcagaaaggatggaacgcttgagggtccaaacattaatttatatgacgaaatcaacagtcaattcaatgagattaatatcattgcctctggcggtgtaagcatcttcgatgatctgatcaaattggataaaatatcactgtcatcagtggttgttggaaagtcattgctagagaataaaataacggaaaaggaggtagtacaattcttacaaagaggataa

SEQ ID NO: 290759 - DNA, 721 bp, Unknown
  Bacterial polypeptide expressing nucleotide sequence isolated from the Sargasso Sea
atgaaaattattccagctattgatatccaagatgggaagtgtgtaaggcttacaaaaggcgatctaaattctactgttaaatattttgatgatcctgtccaagctgccgaatattggtattcatttggcatagacagaattcatatagttgatttagatggggcaaaaaaaggccaatctttaatattgaacatcattgatagtattaaaaagaaattgccaaaagtttcccttcaagtaggtggaggttttagaaataaagaaacaattgagcgtgcattaaattctggcatcgatcaaattattttaggtagtcttgctgtcaaagattctattttatttaacgacattgtttcctcttatccagataaaattatttttggactcgatacaaagaatgaccatgttaagtcagaggcttggacagaagattcaggagtctattggatagatttggttaagaagttcaatgatttacctttaaactctattatttttacagacatagatagagatggaatgctcaatggacctaatttggaaaaaataactgaattaacagccaatacctcattgcccgttatcgcatccggtggtgtatcttctctggaagatttaattcaattaaaaaaaattaaaggcgtctcaggagttatttctggcaaagctttatacgaaaataccttttctttagatgaggcattaaatttaatttcttaat

SEQ ID NO: 290760 - DNA, 679 bp, Unknown
  Bacterial polypeptide expressing nucleotide sequence isolated from the Sargasso Sea
catgaatattatacctgcaattgatctaaaaaaaggcaaagttgtaagagctattcaaggtgatagagcctcatacgaaccgatagatcttgttaccacgtattcatcaaatcctattgcttttatcaaagctttaataattagatataaaccgtctacgatatatcttgctgatctagacttacttgatggttatggtgacaatattgatatcatttacaaaatagctaacatgttcaggaataagatcttttgggtagacgtaggttcaaaaaaaataaaaaaattgagcatcaaaaatataactcctatcttatgtagtgaatcttgtgaagatataaggttaattaattatgtttataaagatcacattcactcatatgactataaaaaccgatttcttggaacacaatatttcaaaaagtttcactcctcttacaagaaaaaagttatttttatgaacatttccgatgtaggtagtaaaaaagggcctgactttagatatctacgtggaatgccaaagaattctgatacagaatactatgttggaggaggtgttaattctattctagatttatataagttaagtaaaatgaacatttcaggtgctttagtctcatcacttttgatgagtaagaaaataagcaattatattataaaaaaaagagccagcgactag

SEQ ID NO: 290761 - DNA, 496 bp, Unknown
  Bacterial polypeptide expressing nucleotide sequence isolated from the Sargasso Sea
tatgaaaatcttaccagcaattgatattaaaaatggccaatgtgtgagattgcaaaaaggtaattttgataaaatcgatgtttatagtgattcacctttggatcaagcaaagctctttaaagaaaacggttttaattttattcatatcattgatcttgatggagctctcgagggtaaaagaattaataccaaaatcattaatcaaattgttgacatggacattaaattacaaattggaggtggaataagaacaatcttagatatcaaaaatttattaaatttaggtgttgagcgagtaattttaggaacagcaatagtagaaaacaatgaatttttattagaggtactttcaaagtttgacaataataggattacatttgctttagattttaggattgaaaaaaatattcccttgatagcaacaaatggttggactagccaaacaagtataaatctttgtgaatttataaaaattcataattttgtaaatgttttg

SEQ ID NO: 290762 - DNA, 724 bp, Unknown
  Bacterial polypeptide expressing nucleotide sequence isolated from the Sargasso Sea
gatgatttttttccctgcgattgatctaaaagacggtaaatgtgtaagattggcccaaggagataaatctcgtatgactacttataatgaaaatccccttgatcaagctaaaatatttgagggacatggtattaagtggattcattgtattgatctagatggagcatttgaaggcgatagcaaaaatgtaagatttgtatcacaaattttagagtccactgatttgaaagtccaatttggaggtggtgtgagagatgaaaaaaaagttcaacaattaattgaaattggagtttctaatataattattggaacaagagcctatgaagacaaaagcttttttagagacttggttgtaaaatatccaaataatatttctttagcattggatataaaaaatggattagtatctactaagggatgggttgaacagcttgaactagatcttgatgaactttttgaggagttaaatgaattaccactaaattctgtaatatgtactgatattttacgtgatggaatgaagcaaggtgtaaacatcgatatgttagaaaagattatgaatttatcaaaagctccttgtgtggcctcaggaggtattgcgaaaatcgaaaaccttattgaattaaaaaataaaaattatgcaaaactaaaaggagttatttctggtaaagctatatatgacaatgaaatttcattaactgaagcacttaaagttctaaaataa

SEQ ID NO: 290763 - DNA, 721 bp, Unknown
  Bacterial polypeptide expressing nucleotide sequence isolated from the Sargasso Sea
atgagagtcctacccgctctagatttaaaaaatggaaactgtgtaaggttaattaaaggtaattttaatgatgtaactaattacaataatgatccgatcaatcaagcgaaaatttttttagaaaacaattttaactatttacatgttgtagatcttgacggtgctcaaacaggcaatcaattaaatcgatcggttattcaaaaacttttagagatatctggactaaaaattcaagttggcggaggcattagagaagttgaagatgtttacaacatgcttgaattgggtgtttcaagagtcattgttggtacagcaatatttaaagaaaaatttttagataaaatcaaagaaaattttgatccagatcagataattttagctgttgattttaattcattagatggcataccctatatttatactcacggatggcaagataatagcaatattaaattatttgattttatttcagataattcttattttaaaaatctccttgctacagatatttcactcgatggcgtattacaaggagccagttttgaaacctatgaacagatcttacgattatttcctgcgtcaaatttaattgcctctggaggcgtaagttcaatgagtgatcttgcgaagctagaaaacttacaaattcaagaatgtattgttggcaaagcgatatatgaaaaaaaaatatctttatctgatttaagcaatgattactaaa

SEQ ID NO: 290764 - DNA, 769 bp, Unknown
  Bacterial polypeptide expressing nucleotide sequence isolated from the Sargasso Sea
aatggattttgtcatttatccggcgatagacatcgttaatgggaagtgcgttcgacttcatcaaggaaactacgatcttgaaaaagtttataacgaggatccagtatcgcaagcactgcacttcgcttctgcgggagccagatggatacatgttgttgatcttgacgctgctcggacaggtaatccagaaaatcgggaaataatttcccaaatagcttcttcggctccaatccctattcaggtaggaggtgggataagaagcattgattccgctaaagcactctatggcagcggagtggaacgtgtcgtaataggtacggccgcagtagagaatccgaaccttatagagggcctgacacgccaagggcatcgcgttgctgtaggtctcgatggaagaaacgggcgaatagcaactagaggctggaaggacgataccggctttcaagttacagaaatggccaagcaatttgaagattcaggtgtagacgcagtcatagtaacagaaatagaacgtgacggaaccctgcttggacctgatactaaaggcttgaaagaagttctagcttcaacttctcttgaagttattgcttcaggaggcgtaggatctctcgatgatataaaagctctcttagagctagaatctgacgaccgaaaactagggggcgtgatcatcggcaaatctctatacgaaaacaaagtagaccttctgtccgcacttcatgcatgtcacccaacagaccgaatcaaagagaaaaatgaagactgttag

SEQ ID NO: 290765 - DNA, 703 bp, Unknown
  Bacterial polypeptide expressing nucleotide sequence isolated from the Sargasso Sea
atgaaaataattcctgcaattgatttgatggatggtaaggtagtacgtctttacaaaggtgatcctaaaaataaaacgatttacagtaataatcctatagaaatagccaaaaactgggaatctgctggagcagacatcctacacattgttgatcttgatgcaacacttggtaatggtgaaaatctaaaaacaattcaagcaatatcaaaaaacacttcagttccactacaagtagctggtggactaagaagtgaagagaaaatatctgaagttttggattttgcatcccgtgcagtgataggaactattgctatgcaactaaaagaaagtgaacaagatgacattctaggtgattttatcaatacatttggcaatgaaagaataataatctccattgatcacattgatggaaagatcgttactcatggttggcagacaaataccggaattgacctatatgatgcaactaatgaatttgtcaaatacggatttactgaatttcttaccacaaatgtttcaaaagatggaaccttagaaggtccagatattgattctctaaagaaaatatgccaaatagaaaattgtaatgtaattgccagtggtggaatatccaaaatacaagatatagctgatgtaaatcaaattaatccatttggggtgattttgggaaaggcactttatgagggactagtttcaatagagg

SEQ ID NO: 290766 - DNA, 733 bp, Unknown
  Bacterial polypeptide expressing nucleotide sequence isolated from the Sargasso Sea
catgaaaatattaccagctattgatttgaaggatggaaagtgcgtaagactttcaatgggagattatcgtcaagttaggaattatgactttaacccattggagctcgctatgaattgggcagacaatggagttaagaatttgcacattgttgatttggatggagccaaggatggaaagttatctaattttgagacaatacaaaagataagaaagcaaattcccaatctttacattcaaatgggcggtggaattcgttcgttaggtgatgttcaaaaatacttagatattggactagataaagttatcatcggaactaaagcaatgtcagaccgtacatttctagatgagcttgacagtgttactaaaaataaagtaattatcgatatggcggttaaagacgggaagatggctattcaaggatggaatcaatcctccgcattagatatagatagttttatcaattatattgaaactcaacagatctgtgaggtcgtactcacggacgtttcaaaagatggtatgcttagcggtgtaaattttaatcttattaacgaagtgttatcaaaaacggaaataccaataattgcttcaggtggtgtaacaactattgatgatattgaaaaattaatcctattaactaaaaagggattatcaggcgtaatcataggtaaagcaatttatgagagtcgtattaaaataaaagacttaattatgttagagagcagaatatga

SEQ ID NO: 290767 - DNA, 679 bp, Unknown
  Bacterial polypeptide expressing nucleotide sequence isolated from the Sargasso Sea
ctggtcggagagtttaaagtgattgtttatccagcaattgacataattggtggaaaatgtgtcagattatctagaggtgattattcaagtaagactatttactcagataacttaaaatctgtcgtatcatcatggctcagtaaaggcactagatttcttcacatagtcgatctagatggcgctaaagctggaagaccgttgaatattgatagtattttgaagataagaaaatcatttccggatattttcatacaaattggaggtggaattagaaatattgaaacagttaaccaatatcttgctaatggcattaatagaattatcttaggtactaaagttcttaaagacaaagaatttattctgtcaattgaccaggcacagagaaagtcattggcgatagatatagcaatcaaggacggacaacttgcaggtgatggatgggaaataaccgcaaaaaatgatgtaggcgattttatagattactttgagcaaaatggtattgaactgtttgtagtcactgatataaatcaagatggcatgatgcagggcatcaatagcgaatctattgagaggatactaaagcttataagtaccaaagctatcatttctggtggagtaacatccattaatgatattcagtcaatcctaagaatgactacaagtaagattgacggattta

SEQ ID NO: 290768 - DNA, 721 bp, Unknown
  Bacterial polypeptide expressing nucleotide sequence isolated from the Sargasso Sea
atgaagatttttccagcgattgatttaaagaacggatcttgtgtacgtctactaaagggagatttcaataatctgactgagtacaataaagatccgattgatcaagcaaaaattttcttaaaaaataattttgactatcttcatgtggttgatctagatggagctcaaacaggtaatcagtcaaatatttctattatcaaagaattagtaaaaattcctaatcttaagatacaagtaggaggcggcataagaacaatcgatgatgctgtaaatttaatagatatgggagtctcgagaatcattattggaacatcaatatttgcaaaaggttttttaacggaaattaaaaatacattaaatccggaacaaattattttagcaatagatttcatggagactgagggaattccatatatctatactcatggatggcaagataatagtcatatcaatttatttgactttatgtctgataattttcactttaaaaactatcttgctactgatatttctctagacggagttatgcagggtccaagcttcaaaacatatgagaaaattttagcaatgaatccttcaattaatctaatagcatcaggaggtatcacttcaattaatgatttatctaaattaaaacgcatcaaaattaaggaatcaatagttggtaaagctatctatgaaaaacaaatatctttgtctgagttaaataatgattactaaa

SEQ ID NO: 290769 - DNA, 691 bp, Unknown
  Bacterial polypeptide expressing nucleotide sequence isolated from the Sargasso Sea
gatataagaaatggtaaatgtgtaaggttaattaagggtaattacaataatgaaataatttttgatgaaaatccaattgatgttgcaatgaaatttgaagaggatggaagtagctttattcatatcattgatcttgatggagcgaaggatggagattctactataaagaatataattgctcagattcttaataaaactaatctaaaaattcaggtaggaggaggaattagaacttatgaaaaagcttcttcatacttaaatttaggagtttctagaattatatttggaacagctgcatacgaaaacaaaaaagaagttattaaggctattcagaactttggtaaagccatagtaattagtatagatgcactagaaggagaaattaaaacaaaaggatggttagaaaattcaagcttgagtattgaaaatatagttcaagatttcgagaaagagggatgcaaatcatttatttatactgatatagaaaaagatggtactctatctcacccaaactttgattatatttctaaatttagaagtttttgttcagtagaattaaatattgcaggaggtatatcttcatttgaagatttaattcagctaaagaataataaaatagatggcgcaattttaggaatgtccatatataagaaaaatattaatctaaaagaagttttggaaaaattataat

SEQ ID NO: 290770 - DNA, 356 bp, Unknown
  Bacterial polypeptide expressing nucleotide sequence isolated from the Sargasso Sea
cggctggattgagcagagcgatgtcctggcgacggacctggccagaaccttcagcagctccgggattgccgcgatcatcaccaccgatatcgccaccgatggcaccctggccgggccgaacctcgaggctctcaggaccatggcggcgagcagcagcgttccggtgatcgcctccggtggcattggctgcatggcggatctgctgtctctcctgcccctggaaccacttggtgtgagtggtgtgatcgtcggtcgtgccctgtacgacggtcgtgtcgatctggcggaagcggtgcgggcgctggcggagccgaggctgcaggacatcactgcggttgcagcggacctggcttgat

SEQ ID NO: 290771 - DNA, 721 bp, Unknown
  Bacterial polypeptide expressing nucleotide sequence isolated from the Sargasso Sea
atgattgtgataccagctatagatattaaaggatctaactgcgtaaggttaataaaaggtgattttagcaaggaaactgtttattcaaaaagtcccttagaagtagcttctaggtggtttgaagaaggggcagagtgcatacacttggtcgatctagatggagcattaaagggtaaatctattaactccgatattttctttgaaatatctaatgcttttaaagacaaacttatccaagttggaggtggaattagagatttaggaatagcaagccaatatttagataacggaatagatagaattatcattggaactagagcaattgaagatccaagctttattactagtttatgtaatttataccctgatagaattattttaggagtggattctgacgaaggctttgtaaaaactaagggttggcagaaaaaaacttcaattagaactctagatttaataagaagatacaaccaatatccattagcaggttttatttttacggatatttctaaagatgggatgatggcaggtcctaacttaaaagctactttagaggtagcttcaaatactcaattacccgttattgcatctggaggtgtggctagtttagatcatataaaggaactatctgaatctgggtccatatatggaactataactggaaaagccctttatgaaaaagcatttacgcttgaagaggccatagaggctgctagttaat

SEQ ID NO: 290772 - DNA, 772 bp, Unknown
  Bacterial polypeptide expressing nucleotide sequence isolated from the Sargasso Sea
gatggaaatcatacctgcaatagatctactgaatggaaaatgtgttcgactaaatcagggaaattataatgaagttactaagttcaatagtgatcctgtaaaacaagcgcaaatttgggaaagcaagggagcaaaacgactacatcttgtagatcttgatggtgctaagacaggtgagcccataaatgatctaactataaaagagataaaaaaatctattacaatacctattcaacttggcggtggaattaggagcattgatcgtgcgaaagaattattcgacattggaatagacagaattattttaggaacaattgcaatagagaatcccgaattagttaaagacctatctaaagaatatccaaaaaaagttgcagtaggaattgatgccaaagagggaatggtagccactcgaggttggttaaaacaaagcgaaatttcttctctagacttagcaaaacaacttaacgatcttgacttagcggcaatcatatcaactgacattgctaccgatggcactctaaaaggacctaatgttcaagccttgagagagatagctgagataagtattaatccagtaattgcctcaggggggataggttcaatagctgatttaatttctctagcagatttcgcggatgaaggtattgaaggaataatcgtaggcagagccctatatgacggctcaatagatttaaaggaagcgattttaactctaaaaaatcttcttctgcaagatgcattcaatgctaaagataaatttcttgtctaa

SEQ ID NO: 290773 - DNA, 643 bp, Unknown
  Bacterial polypeptide expressing nucleotide sequence isolated from the Sargasso Sea
tatgaatttaataccagcaattgatttacttgaccagaaatgtgtcaggctacttcgaggcgattttgatcaggtaaccttttatgacaaagatccgcttcaattagccgcccattatgaatctcttggctgcaaacatttacatttagtggatctaaatggaacaagagatggggccagtaaaaataagtcaatcatagattcaatcatttccaaaacaaatctcaaggttcagatgggcggtggaattcgctcgattgaatcaattaattactggctgaattcaaacttaagtaaagttgtaatcggaagttatgcgattgaagagactgaagaatttatttcattgcttgaccctggaatgcgttccaaaataattattgcattggacgttctgattcgtgatggtgagccttcaatacgtatacatggttggcagaaagattcaaaaatgagtctcatacccactatgaaattatttatagacaatggatttagagactttttgatcactgatatcagcaaagatggaacgcttgagggtccaaacattgatttatatgacgaaatcaataatcaattcaaagagattaatatcattgcttctggtggtgtgagcattttcgatgacctcatcaaatta

SEQ ID NO: 290774 - DNA, 493 bp, Unknown
  Bacterial polypeptide expressing nucleotide sequence isolated from the Sargasso Sea
atgcagatcatccccgccatcgacctgttgcaaggctcctgcgtcaggcttcatcagggcgattacaaccaggtcacgtgtttcagtgaagaccccgttgcacaggcgctcgagtggcaaagccagggtgcaagccgactgcatttggtggatctcgatggcgcccgcagcggtgaacccaccaatgattccgccgtccgcgcgatcacagcagcactctccattcctgtgcagctcggcggcggggttcgcagtcttgagcgcgcagaagctttgctgagctttggcttggaccgagtcatcttgggaacggtcgcactagagcaacccgagctggtcgagcagctcgccgcccgttatcccggccgaatcgtggttgggatcgatgcccgcaacggcaaggtggccacccgcggctggatcaccgacaccgacacccgggccacaagcttggccaaacgctttgaggggctaggcctagcggccattgtca

SEQ ID NO: 290775 - DNA, 190 bp, Unknown
  Bacterial polypeptide expressing nucleotide sequence isolated from the Sargasso Sea
gcaactataaacctagcaagcaatataagtattccagttattgcatctggcggggtaagctgtttagaggatattcaagaaataagtttgcatagcaagttagggattactggaatcattattggacgagctttgtatgaaaagaaatttaatataaaagatgcaaaagatctttttaaaaaaatatgac

SEQ ID NO: 290776 - DNA, 170 bp, Unknown
  Bacterial polypeptide expressing nucleotide sequence isolated from the Sargasso Sea
aatgttagtgatacccgcaatagatctgaaagaaggtaaatgtgttaggctaagagagggaaagatggaagaagaaaccattttttctgatgatcctatttctacagctgcttcatggtttacacaaggtgcagagttactgcatatggttgatttagatggagctgtat

SEQ ID NO: 290777 - DNA, 766 bp, Unknown
  Bacterial polypeptide expressing nucleotide sequence isolated from the Sargasso Sea
atgaagatatttcctgcaatagatataaaaaatggaaagtgtgttaggcttctcaagggtgattttgacaaaagtactatttatgaaaaaactccactagatcaggctaaagaattttcaaatcaaggtttccgagatcttcatatagttgatttagatggtgctctaaaaggtgagccggtaaatgggaaattgattgaggaaatatgtaaattaacaaatttgaatgtatttggtttaaaaatgaggatacaagttggagggggaataagatcaatagatcatataaaaaaattaattgatgctggagtagatagagttgttttaggaactatagctgttgaagatattaaatttcttgagaaagcatgtaataaatttaaaaacaaaatagcagtgggcctcgacgtacgtaatggatttattgctttaaaaggatggaaagaacaaacgaaaattcttgcatcagactttttaatgaaaattaaagacattggtgtttcaagaataatttatacagatattgaaagagatggaaccttaacagtgccaaatattccagaaactttaaaatttgcaaagcttttaaattataacgaacgaattccagttgtagtttcagggggagttagcaatataaatcatttggttgctataaagcgccatactagtcctcctgaattagaaggtgttatagttggaaaagctatgtatgacggaaatttaaaagggtttaatctggttagtttattgagagattattaga

SEQ ID NO: 290778 - DNA, 535 bp, Unknown
  Bacterial polypeptide expressing nucleotide sequence isolated from the Sargasso Sea
catgaaacccatcggaaagatcatctccgcgttaaacattccggttcaggttggtggagggatccgcacccctgaggatgttgagaccaaactcaaattgggagccgcttctgtgatcattgggacaatggcagtgaaaaatccaaagcattttgaacaaactctggaaactcatgggggtgattcggtccttttggggattgatgcaagaaaccgcagagtggctgtggaaggctggaaggaaggaactgatctggaagatgttgaatttgcacagctttggaaatccaagggagtgaaaagggtgatctttaccgacattgccagggacgggatgctgagtggccccaatctggaagcccttgaggattttacaatccgttcaggactgaatgttacggcatccggtggagtttcgtcgtttgaggacctgaaaaatcttcgcaaacttgaaacaagaggagtcgatcaggttattgtcggtaaggctatttacgacgggcggatcaacctcaaagaggcgcttgagtgttag

SEQ ID NO: 290779 - DNA, 291 bp, Unknown
  Bacterial polypeptide expressing nucleotide sequence isolated from the Sargasso Sea
aatgctgctgatacccgcaatcgacttgaaacaggggaaatgcgtccgtcttcttcagggtcaggaagaggagcaaaccgtttactctgatgatcccgttagtcaggccttggaatttcagaaagcaggagcccaacggctccatttggtggatcttgatggtgccttccgggggcgcggagaaaatcatgaaaccatcggaaagataatctctgcgttgaacatcccggttcaggttgggggagggatccgcacccctgaggatgttgaaaccaaactcaaattgggtgt

SEQ ID NO: 290780 - DNA, 397 bp, Unknown
  Bacterial polypeptide expressing nucleotide sequence isolated from the Sargasso Sea
atgccactcaaaaaaattcttagaagattttggaaaagatcacgtctgtcttgctgctgatgtgataccagaaaatggaaattacaaaattgctatttctgggtggcaagagactagcactattactctcgaagcattgatcgaagattatctaccccagggtataatccatattctttgtactgatatatcgcgcgatggtaccatgggtggatgcaattttgagttgtatgagaaggtgcagtttttgtttccagacttgagcatacaggcctcaggcggtattaacagcttgaatgatttgaagaaactgcaaacatctggcgcaatcattggtaaagcactttatgaaggattatttacgcttgaacaggcactggaagcaatatcatgctag

SEQ ID NO: 290781 - DNA, 115 bp, Unknown
  Bacterial polypeptide expressing nucleotide sequence isolated from the Sargasso Sea
atgctgattatccccgctatcgatctcaaggacggcgcctgcgtgcgtctgcgccagggcctgatggacgatgccacggtgttttccgacgacccggtggccatggccgccaaat

SEQ ID NO: 290782 - DNA, 721 bp, Unknown
  Bacterial polypeptide expressing nucleotide sequence isolated from the Sargasso Sea
ttgaatttttatcctgctatagacctaaaagagggtcaatgtgttagattagagcgtggagatttagacactgcagttatttacaatgatgatcccatcgctcaagcaaagctatttcaaaaagaaggctgtgagtggttgcacatagtagatctggatggagcagtttcgagaagcaaaaagaatgtcaagactattgaagatataagaagttctacttctctaaagcttcaagttggaggaggtataaggagcctggatgagatagaattctggaagtcgagagatatagatcgagtgattttgggtactttggcagtttccgatcctactcttgttagaaaggcgtgcagattgtttgatggtatattgattgctttagactctaggaaaaataaagtcgccacttcaggctggaaaaatatatcaaatagaaacacattagatcttgcaaaaagcttcgaagattgtggtgtggatgcaattgtatttacagatatagatagagatggccttatggagggattgaattctagtgacaccaagaaattagccgaatatgtaagcatcccagtgataggatccggaggtataaatggcccagaaaatctttcaagcgttaaaaaatctattccaaatctggaaggcattattgctggcaaagcgctttacaccggggctctcaatataaaggatgcattgagaattttaaagaaataaa

SEQ ID NO: 290783 - DNA, 361 bp, Unknown
  Bacterial polypeptide expressing nucleotide sequence isolated from the Sargasso Sea
gcgcatcgcggtcggtattgatgccaaggacggaatggtagcgacccatggttgggtcgaagtctcggagtggcaggcggtggaattggcaaaagccgtgatcgatctcggagtacaaaccattatttacacggacattgctacggatggcatgttcaccgggcctaatctgtcagcgcagcaggaaatgctggagcaggcttcggtgccacaattgattgcatcgggtggagtaggatccgttgaggatgtgatgaacctaaaccagattgagaatatctacggcgttatcattggtaaggcgctttatgacgataagctgaatttaaaaacggcagcgcgtcagctccatacggaatag

SEQ ID NO: 290784 - DNA, 328 bp, Unknown
  Bacterial polypeptide expressing nucleotide sequence isolated from the Sargasso Sea
atgatctttttcccggccattgatttgaaggacggccaatgtgtccggcttctccgcggagagatggacgctgcgacggttttcaatgaaaatcccgcccgccaggctgccaccttcgaattaaagggctccaagtggctgcatcttgtggatcttaatggtgcctttgagggccgcccagtcaacggcagtgcagttgatgctattctccaggagatctcgatcccggtagagctgggcggaggtattcgcgatcgggagacaatcgctatgtggttagacaagggcgtggcccgtgtaattttgggaacaggtcgctgtccccgta

SEQ ID NO: 290785 - DNA, 730 bp, Unknown
  Bacterial polypeptide expressing nucleotide sequence isolated from the Sargasso Sea
atgagagtcttgccggctattgatataaaggatggcaaatgtgtcagattagctaaaggtgattattctaaggttactcattattctgataacccattggttgtggctgagtcatggttagataaaggagcaaccagtattcatatcgttgacctagatggagctaaagacggggaaacccctaattttgatatcatacaaaaaattagatccgcatataaggatatttttatacaagttggaggtggtattaggagcaattctattatcaaaaagtacgttaatataggtattaataaagtgataataggtacaaaagcactatcagatccatcttttttaaaaactattccattatattttaaaaacaaaattattattgatttagcagttaaaaatatgaagttagctgttcatggatgggaatcagagtctgaacatacaattgaagactacctaaaaattttggaagacaatgatatagctgaaattgtatatacagatgttgataaagatggaatgcttaatgggatgaattttgatgagctaaataaacttcttaaaattactaatataccaatcattgcctcaggtggagtaacctccattgaggatattaagaatctgagtgaaatctgcaaacatggaatatcaggggtaataattggaaaagctttatacgaaaatagaattaatttatccgatgtatttaatattataggagattgaa

SEQ ID NO: 290786 - DNA, 487 bp, Unknown
  Bacterial polypeptide expressing nucleotide sequence isolated from the Sargasso Sea
aatgatcattttacctgcaattgatattaaagatggaaaatgtgtgagacttataaagggtgattttgagcaaatgaccgcttataaaaatactccatttgatcaagctaaaatatattttcaaagtggatttaaaaatattcatattgttgatttagacggtgctttgaaaggaaagtcatccaattcaaatattattaaagaaatagttaaaaatattaaattaaaaattcaaataggcggaggaataagaactattgatgatgtagataattggattaaaagtggcgttgataaagttattattggaactgctgctgttgaaaacaaaaatttgcttaaaactgcgtgtgaaaaatttaaaaataaaattgctatatccttagatgtaaaagatgggtttatttttttgtcaggttggaaaaaacaaactaatattttggccactgatttcgtaaaagaaattgaaaattttggagtttctaga

SEQ ID NO: 290787 - DNA, 358 bp, Unknown
  Bacterial polypeptide expressing nucleotide sequence isolated from the Sargasso Sea
ggagcagatgtaagagatggaaaaattgcttctcatggctggaaaaatcagtctgatattatggctgtagaattaattaaaacttttaaatcgtcagttgttaattcagttatatacactgatatttccaaagatggtagtttacaaggagttagccttgaccaaactgttaattttgctaagtcaattcaacattcagtaattgcctctggaggagtgtcatcactcaaagatatttcaaaactaagtgaagagttttcaaatggaatccaaggagttataattggtagagcattatatgacaaaaaatttacattcacagaggctttaaaaataataaaaaaggtcaaaaactgat

SEQ ID NO: 290788 - DNA, 532 bp, Unknown
  Bacterial polypeptide expressing nucleotide sequence isolated from the Sargasso Sea
atgaaatgtttgcctgctatagacatactcgatggaaaatgtgtaagactaaccagaggagattttgacaaatccaaaatttataataaatcacctttggatcaagcaaagatttttgaagatgctggattcaaagaaattcacattgttgatttaaatggagcgaaatctgggaatcgtttaaatctctctattatttccaaaattgcatctaatacttgtcttaaagttcaattggggggcggcattcggtccattgattcaataagagaagtttttgatcttgggatcaataaaattattttaggaacctcgatactttataaagaatttgcaagagaagtcatgcacagatttaatccaaataaaattatatttggactcgatgttgaattaaaaaataatatttattgcctagcgtcccatggatggaatgagatttcagatataaatatttttgattttgttgatgaaattaagcctatacatgtgctggttacagatatttcaaaagatggcatgatgactggtc

SEQ ID NO: 290789 - DNA, 376 bp, Unknown
  Bacterial polypeptide expressing nucleotide sequence isolated from the Sargasso Sea
atgctgctgatacccgcaatcgacttgaaacaggggaaatgcgtccgtcttcttcagggtcaggaaaaggaggaaaccatttattctgatgatcccgttagtcaggccttggaatttcagaaagcaggagcccaccggctccatttggtggatcttgatggtgccttccggggtcgcggagaaaatcatgaaaccatcggaaagatcatctccgcgttgaacatcccggttcaggttgggggaggaatccgcacccctgaggatgttgaaaccaaactcaagttgggtgccacttctgtgatcattgggacgatggcagtgaaaaatccaaagcattttgaacaaactctggaaactcatgggggtgattcagtcc

SEQ ID NO: 290790 - DNA, 718 bp, Unknown
  Bacterial polypeptide expressing nucleotide sequence isolated from the Sargasso Sea
atgaaaaaagaacaatttattttatatccagctatagatattaaagatggaaagtgtgtaaggcttttgtttggagatatgaaaagggaaacagtttataataataacccaatagatcaagctatgtggtttatagatcaaggtgcaaaatggttacatattgtagatcttgatggagcaattgaaggtaaaagtgttaataaaactataatacaaaaactttctaaaacctttcaaaatagagtaaatatccaattaggtggtggaattagaaatctagagaatattgatttctggttacaaaactcagttgaaagattgattttaggaactttagctttagaaaatccagatttttttaaagaattagaaaatgaatattataaaaaaattgtaattggagcagatgttagagacggtatgattgcttcacatggttggaaaaagcaatctaatatcagtgcccatgacttaatcaaaaaattcaatccttccataattagctctgtaatatatactgacatatcaagggatggaagtttgaagggcgttagtcttaaggaaactttaaaatttgcgaaatctatctcacatcctgttatagcctctggcggtgtttcatcattaaatgatattgttagattaagtgatcaatattcaaatggtattgaaggagttataattggaagagcattatacgataaaaagtttacttcgc

SEQ ID NO: 290791 - DNA, 481 bp, Unknown
  Bacterial polypeptide expressing nucleotide sequence isolated from the Sargasso Sea
gatgaaagacaatatttttacattatatccggccattgatattaaagatggaaaatgtgtaagacttctttttggagaaatggaaaaagaaacagtttataacaataacccattagatcaagctatgtggtttgttgatcaaggcgcagagtggttgcatattgttgatttggatggagcggttaccggcaagactataaataaaagtgcaattcaaagtattttacacaaacttcataacaaagtgaaaattcaaataggcggggggataagaaatattaatgatattgatttttggatacagaaatcagtaaatagggtaattttaggcacattagctcttgaaaaaccaaattttataaatgaactcgataaagagtattcaaaaaaaatagttgtaggagcagatgttagaaatgggaagcttgcttctcacggttggaaaaaacaatcggatataatcgctacagacataattaaa

SEQ ID NO: 290792 - DNA, 742 bp, Unknown
  Bacterial polypeptide expressing nucleotide sequence isolated from the Sargasso Sea
atgattaataattttcatatttatccagcaatagatattaaaaatggtcaatgcgttagactagtgcatgggagtattaaaaatgagactgtttataaaaataatcccttaactcaagtagaacattttattgaaaatggatgtaagtgggttcatatcgttgatttagacgcagctttaaatataggaaataatgagcaattaatcttaaatattttaaatacttttagtaaagatataaaaattcaacttggaggaggaataaggtcttatcaaaagataaaaaaatggttggatgatggtatatcaagagtagtcattggcacattagcatatgaaaacccagatataattaattcattaggaaaagattgccatgataagatttctcttgctattgacgtaaaagataacaaagtagcaattcatggatggaaaaaagagctgactttatcccctatagatcttgtagataaaatagatagacacttattaaattctattatttatactgatattgatagagatggaaccatgcaaggggtcaatttaaaaaaaattttgaatttttgtaaaaatatttcattacctgtgattgcctctgggggtgtctcaaatatacaagatgtcaagaatttatataatctacataaatttggtattgtaggtataattataggaaaagctatttatgaaaaaactttatgtttaaaagaaatcaatcaaatggttaatatttaat

SEQ ID NO: 290793 - DNA, 412 bp, Unknown
  Bacterial polypeptide expressing nucleotide sequence isolated from the Sargasso Sea
tgggacggtagcagtcgaaaaccccctactggtaaaagaagcagcaaaggagtttcccgggaaaatagcagttggtgtagatgcgagagatgggatagtagcaactgagggctgggcaaaatccacaaatattagcgccacagaactggcaaaatcctttgaagatgctggtgtttgttcgataatttatacagacatcaatagagatggagcaatgcaaggaccaaatgtgcaggctactgcagagttagctaatgaggtatcaatccccataattgcatcaggaggtgtctcaaaaatggatgatataatcgcattgaaaagttgcggagcagaacttaacggagtaatttctggacgagccttgtatgatggagcaattgatttgaaaaaagccttggaaattctttaa

SEQ ID NO: 290794 - DNA, 258 bp, Unknown
  Bacterial polypeptide expressing nucleotide sequence isolated from the Sargasso Sea
aatgctgctgatacccgcaatcgacttgaaacatgggaaatgcgtccgtcttcttcagggtcaggaagaggagcaaaccgtttactctgatgatcccgtaagtcaggccttggaatttcaaaaagcaggagcccaccggctccatttggtggatcttgatggtgccttccgggggcgcggagaaaatcatgaaaccatcggaatgatcatctccgcgttgaacatcccggttcaggttgggggagggatccgcacccc

SEQ ID NO: 290795 - DNA, 653 bp, Unknown
  Bacterial polypeptide expressing nucleotide sequence isolated from the Sargasso Sea
gatgaaaatatttcctgctatagatattagaggaggaaaatgtgttcggctcttaaagggggatttcgaaaaatctaccgaatataaaaaaactcccacagatcaagcaaaagagttcttagacttaggttttaaagatttacacatcgttgatttagatggcgctttaaaaggcaagacagttaacctagacataattcgtgtcataataagtaattataatttaaaaattgaagttggcggaggcataagatctcttgaaagtattaagcagtatattgatacaggcgtagagaaagttattttagggagtggagcaattaaaaataaggaatttttaaaagatgcctgtataaagtttaaaaataaaattgcattaggattagattctaaggatggtttcttatccatctcaggttggaaagaaaattcgaatattaaaactatagactacttaaaagaggtaaataattttggcattagcagaataatttacacagatattaataaagatggaatgaaaattgggcctaactttgaggagacagtaaaaattgctgaaatttctaattgtccagtagtaatttcaggtggggtttctacaattagcgatgttgtaaaatgtaaaaatttaaataataaaaaaattgaag

SEQ ID NO: 290796 - DNA, 736 bp, Unknown
  Bacterial polypeptide expressing nucleotide sequence isolated from the Sargasso Sea
atgaaaatatttcctgctatagatattaaagggggaaagtgtgttcgactcctaaaaggagattttgaaaaatctacagaatacaaaaattctcctttagaccaagctaaggaattttcagaatcaggatttaaagatcttcacatagttgatcttgacggcgctttaaaaggtgaaccagtaaatgggaaaataattgaggagatatgtaaaataaaaaaaatgaaggtccaaattggtggaggcataagatcaattgaccatataaataaactaataagtataggagtagacagggtagttctgggaactgtagcatttcaggatgtagaatttcttgaaaatgtttgtaataaatttaaaaataaaatagcagtggccattgatgttcgtaatggatttattgcattaaaaggttggaaagaacaaacaaaaattcttgcttcggattttttaatgaaaattaaaaatataggtgtttcaagaattatttatactgatattgatagagatgggacattaacacaaccaaatcttacagaaactttaaaatttgcaaagcttttagatattaatgagaggattccagtcgtgctttcaggtggcgttggttccatagaagatgtaattaacatcaaacaggctaagggagatttagaaggttttgttgtaggtaaagcattgtatgatggaaaaataagtttcaatagtataaaaaaattattattaaattgat

SEQ ID NO: 290797 - DNA, 709 bp, Unknown
  Bacterial polypeptide expressing nucleotide sequence isolated from the Sargasso Sea
tatgttacctattccagcaatagatattcaaagtggaaaatgcgttaggttaaaaatgggtaacttagatagcgcaaaaatttattatgagaatcctctcgaagcagcagaattttggattgaaaagggaacaaaaagacttcacattgttgatcttgacggtgctttaaaaggcgcatctgttaatttctctgtgattttagaaattagaaattctttcccagacatagaaatacaactaggaggcggaataagaagttatgaaacagttgaaagttatgtaaaaaataaaatagattttttaatacttggaagtgcggcaattaagaacaaagctttttttaaagaagcttgcacaaattatccaaatcaaattattttgggcctagatgcaaaaaaaggttttatatccaccgaagcctggacggagtcttcagagataagagctaaagatttgataaatgaatattcttctttgccaattaactcaattatttacacagatataagcaaggacggaatgttagagggtccaaatgtagaagaaactaaagaattagcagatttttcaaatattccaacaattgcatcgggcggcgtacgaaatctaaatgatttaattaaacttgagaaaactaaaaaaatatttggcgcaatttgtggaagggcattgtacgagggtactctagatctcgaggaagctatgaat

SEQ ID NO: 290798 - DNA, 154 bp, Unknown
  Bacterial polypeptide expressing nucleotide sequence isolated from the Sargasso Sea
aatgataattattcctgcaattgatttaaaagaagggaaatgtgtgcgattgaaacaaggggtaatggatgattctactattttctctgagcaacctgcacaaatggcaaaaaaatggctgaaagagggagcaaagcgccttcatttagtagat

SEQ ID NO: 290799 - DNA, 534 bp, Unknown
  Bacterial polypeptide expressing nucleotide sequence isolated from the Sargasso Sea
tagggggagggataaggtcgcaagaaaggatagaagaattattttcatatggtattgagaaagttattatgggaacgtctgcaatagaaaataaagaattagtaaaagacttatcaaataaatttcctggaaggataattgttggtatagatgcaaaagatgggaaagttagtacaaggggttggcttgagcaatctaatattttagccaaagatctagtaaaggagttttcttcatttaaaattgctaattttattgtcacagatataaatacagatgggacgttagaaggaacaaatgaagaattcataaaaagcatacttgaaatcacagatattccagtaatagcctcaggaggtgttggttcaatttctgatttattatcgttagtaaaatttgaaaattctggactctttggagtaattgtaggtaaagctctatatgaaaataaattcacaataaacgaagcgaataatgtattgtcatcagagagattaaatgactttaatttaaacagaaatcactacgcttaaa

SEQ ID NO: 290800 - DNA, 473 bp, Unknown
  Bacterial polypeptide expressing nucleotide sequence isolated from the Sargasso Sea
agtcataatgagaacatctgcaatagaaaataaagaattagttaaagacttatcaaataaatttccaggaaggataattgttggtattgatgcaaaagacggaaaagttagtacaagaggttggcttgaacaatctaatattttagcaactgatctagtaagggatttttcttcctttaaaatcgctagttttattgttacagatataaatacagatggaacattagagggaactaatgaaaaattcataaaaagtattctagagattacagatatcccagtaatagcctcaggaggggtaggttctatttctgatttattatctttagtaaaatttgagaattctggactttttggcgtaattgtaggtaaagctttatatgaaaataaattcaaaataagcgaagcgaataatgtattagcatcagagagactatctgactttgatttaaacagcaattactacgcttaaa

SEQ ID NO: 290801 - DNA, 673 bp, Unknown
  Bacterial polypeptide expressing nucleotide sequence isolated from the Sargasso Sea
gtcgctcaggccctcagttggcagcagcagggcgcaacccgtctgcacctggtggatctcgatggtgccaagcggggagagccggtgaatgatgccgccgtccaggcgatcacatcagccctggacatcccggtgcagctcggtggcggcgtccgctccctggaacgggctgagcagttgctcgcctgcggtcttgatcgcgtgatcctcggcaccgtggcgatcgagcagcccgacctggttcgatccctcgccgagcggcatcccgatcggatcgtggtgggaatcgatgccaaggacgggcgggtggccacccgcggctggatcgagcagagcgatgtcctggcgacggacctggccagaaccttcagcagctccgggattgccgcgatcatcaccaccgatatcgccaccgatggcaccctggccgggccgaacctcgaggctctgagggccatggcggcaagcagcagcgttccggtgatcgcctccggcggcattggctgcatggcggatctgctgtctctcctgcccctggaaccacttggtgtgagtggtgtgatcgtcggtcgtgccctgtacgacggtcgtgtcgatctggcggaagcggtgcgggcgctggcggagccgaggctgcaggacatcacagcggttgcagcggacctggcttgat

SEQ ID NO: 290802 - DNA, 672 bp, Unknown
  Bacterial polypeptide expressing nucleotide sequence isolated from the Sargasso Sea
atgagcaagctaaattttgggaaagcgaaggggcaaaatatatacatatagttgatttagatgctgcaaaaactggatccccaacaaacgatgaatcaataaaaaagattgcaaaaacagttaacatcccaattcaaataggtggggggataagatctcaagaaaggatagagcaattattttcttatggtattgagaaagttatcatgggaacctctgcaatagaaaataaagagttagttaaagacttatcaaataaatttcctggaaggataattgttgggatagatgcaaaagatggaaaagttagtacaaggggttggcttgagcaatctaatatttttgccaatgatctagtaaaagagttttcttcatttaaaattgctagttttattgttacagatataaatacagatgggacgttagaaggaacaaatgaagaattcataaaaagcatacttgaaattactgatattccagtaatagcctcaggaggtgttggttcaatttctgatttattatcgttagtaaaatttgaaaaatcaggactctttggagtaattgtaggtaaagctctttatgaaaataaattcacgatcaacgaagcgaacaatgtattgtcatcagagagattaaatgactttgatttaaacagaaattactacgcctaaa

SEQ ID NO: 290803 - DNA, 669 bp, Unknown
  Bacterial polypeptide expressing nucleotide sequence isolated from the Sargasso Sea
aacaagccaaactttgggaaagcgaaggagcaaaatatctacatatagttgatttggatgccgcaaaaaccggatcacccaccaacgataaatcaataaaagagattgcaaaaacagttaacatccctattcaaataggtgggggaataaggtctaaagaaaggatagaacaattattttcttatggcattgaaaaagttataatgggaacttctgcaatagaaaataaagaattagttaaagaattatcaaataaatttccaaaaaagataattgttggtattgatgcaaaagacggtaaagttagtacaagagggtggctagagcaatctaatattttagccacagatctagtaaaggaattttctacatttaaaatcgcaagttttattgttacagatataaatacagatgggacgttagaaggaactaatgaagaattcataaaaagtattcttgagattacagatataccagtaatagcctcaggaggtgtaggctcgatttctgatttgttatctttagtaaaatttgagaattctggactctttggcgtgattgtaggtaaagctttatatgaaaataaatttaaaataagcgaagcgaataatgtattgtcatcagagagactatctgactatgatttaaacaacaattactacgcttaaa

SEQ ID NO: 290804 - DNA, 380 bp, Unknown
  Bacterial polypeptide expressing nucleotide sequence isolated from the Sargasso Sea
agacaatttttttgaaaaaaaaattgctttagcagtagatgttaaagatggcaggatagctacacatggctggaaaaaccatttagatttaactcctttaagtttgattaaaaaattagataaatctctaattgacgcaattatatatacagacatttctagagatggaactttaaatggccttaatataacggacacgctaaaattttctcaatcagtggccatgccagtgatagcatctggtggaatttcaaaagtggaggaaatagataggctgtttaatttaaaaaatatgggaatcattggagtaatagtaggaaaagcgctatacgaaaacagatttaccataaatgatgtcaatcaaataatttatacataaa

SEQ ID NO: 290805 - DNA, 682 bp, Unknown
  Bacterial polypeptide expressing nucleotide sequence isolated from the Sargasso Sea
aaagaacctcatcagcaggctaaattttgggaaagcgaaggagccaaatatatacatatagttgatttggatgctgcaaaaacagggtccccaataaatgataaatcaataaaaaaaatcgtagaaactgttaatattcctattcaaataggtggagggataaggtctcaagaaaggatagaacaattattttcttatggtattgagaaagtgatcatgggaacctcagcaatagaaaataaagaattagttaaagacctatcaaataaattcccaggaaggataattgttggtatagatgcaaaagaaggaaaagttagtacaagggggtggcttgagcaatctaatattttagccacagatctagtaaaggaattttcttcctttgaaattgctagttttattgttacggatattaatacagatgggacgttagaaggaacaaatgaagagttcataaaaagcattttagagataacagatattccagtaattgcctcaggaggtgttggttcaatttctgatttactatccttagttaaatttgaaaattatggactctttggtgtaattgtaggtaaagctctatatgaaagtaaattcacaataaacgaagcaaataatgtattgtcatcagagaggctaactgactttgatttaaacaaaaatttctacgcataaa

SEQ ID NO: 290806 - DNA, 376 bp, Unknown
  Bacterial polypeptide expressing nucleotide sequence isolated from the Sargasso Sea
gatgattgtaaaaataaaatttgtcttgctatagatgttagagataataaaattgcggtaaatggttggaaagaacagttgaaactatcacctctagaattgatcaataaaattgataaaagtttattaaattccattatatatactgacattactagagacggaactctaaagggtataaataaaaagcaaacagttgatttatccaaaaaagtttcacttcccattattgcctcgggaggtgtttcaagcataaaagacgttaaggatttatatagtttaaagaaatttggtataataggtgtaattgtaggcaaagctctttatgaaaacatcttatcaataagtgaaattaataaagtaatctcaaaataat

SEQ ID NO: 290807 - DNA, 700 bp, Unknown
  Bacterial polypeptide expressing nucleotide sequence isolated from the Sargasso Sea
atgataatatttcttgcgatagacatcaaagaggggaaatgtgtgagattgttaaagggtgattttaaacaattaaaagaatatagaaaatctcctttagagcaagcaaaagtctttattaattatggttttcataatttacatattgttgatttagatggagctttaaaaggaaaatcatttagcaaagaaattataaaagaaattagcatgttaaacagagcaaatgttcaggtgggcggaggtataagaacccttgatcaaattgatgaacttttggattttggagtagaaaaaataattttaggaaccagagcaattgaagacaaaagttttttagaaattgcttgtaagaaatttaaagataaaattgtgttatcgatcgatgcaaaaaatggctacattgctttatctggttggacaaaaaaaactaatataaaggccacagattttatagctgatattaaagatttaagtatttctagaataatttatactgatattgataaagacggaacaaaaactggtccaaatcttaaagaaactttatctttatcaaatctaacaaaaattccgatcgtcatttccggtggcatttcttctataaaagatgttttaaatattaaaaataaaaaatttaaaaatatagaaggcgtcataatcggcaaagccatatacgatggaaatattaatttaaaag

SEQ ID NO: 290808 - DNA, 667 bp, Unknown
  Bacterial polypeptide expressing nucleotide sequence isolated from the Sargasso Sea
atgcagctaattccggcaattgacttgaaaaacggttcatgcgttagactcctccagggcgagtttgataaggaaactgtgtattccaatgatcctgctgccatggcgttcaaatttgaagaagcaggagcaaaaagactacatttagttgatctggatggttcatttgacggtgtaggtgccaatatttccagtattcgctcaattctaaaaaatatttccataccagtccaaataggtggaggtctgcgtacggaagaagacattgacacaatgatggatatgggagtttcagctgttattgtcggaacaatggctgtaaagtccccttctgtacttgagaaacttttaaataaatacactgatgaacaaataattcttggcgtagatgcacgtaatcgtaaagtttcgattgaaggttggaaagagaacacacaaattaaagatgtaaagtttgccttaaaatggaaaaatttcggcataaagagagtggtttttacagatatttccagagatggaatgttaggcggtccgaatttggttgcacttcgtgaaatggctgaggataccggattgaaaattgttgcatcaggaggagtatcttccttagaagaccttgaagagcttaaaaaacttgagccatatggtgtggatcaggttataagta

SEQ ID NO: 290809 - DNA, 721 bp, Unknown
  Bacterial polypeptide expressing nucleotide sequence isolated from the Sargasso Sea
ttgaatttttatccagctattgatctgaaagaaggtcaatgtgtaagactgcagcggggagatctagacactgcgatcgtttacaatgatgatcctattgcgcaagcaaacatatttcaagaggcagggtgtaattggttacacgtagtagacctagatggtgccgtttctgggagtaagaagaatgtaaaaaccatcgaagagataagaagttctacctccctaaaaatccaagttggtggggggataagaaatctgaagcaaatagaattctggaagtcgaagggtatagatcgtatcattttaggaactgtagccgtttctaaccctactgtagttcaagaagcatgtagactatttgatggtatcttaattgcgctagactccaggtcaaataaggtcgctactgcaggctggaaaactacatcaaataaaaatactctagacctggcaaaaagtttcgaagattgtggtgtcgatgcaataattttcaccgacatcgatagagatggcttaatgaagggattgaattctaatgctacaaaaagactgtcggataatgtaagtattcccgtaattgggtcaggaggtataaatggccctgaaaatcttaaaaacataaaaaaaaatattcctaacttagagggcgttatcgctggaaaagctatatatactggagctttaagaattgaagaggcattgagaattttgaaggattaaa

SEQ ID NO: 290810 - DNA, 721 bp, Unknown
  Bacterial polypeptide expressing nucleotide sequence isolated from the Sargasso Sea
aatgaagataatacctgcaattgatttattagatggccaatgcgtaagattattgcaaggcgattataaaaaagtaacatcttataatatctctccaattaaccaagctaactacttttttaaagaaggttttagatatttacatatcgttgatcttgattctgcaaaaaatgcgaataataaaaatctaaatattattaagtcaataaacaagattaaaaacttaaaaattcaagttggtggcggaattagagacattcaaaaggtaaaagaccttttagatattggtattgatcgtttgattgtaggaactgaagcaataaaaaataaaaatttccttaacgctcttaaaaatgaagttgacgtgaaaaaaatagtgtttgggttagatttcaaaattattgaaaatgaagctgttttatatacaaatggttggttagaaaagtctagatataagctttttgattttattgaaaaaaatagctggatgttcaacatacttgctactgatatatcatctgatgggatgttgagtggcccaaatataaaaatttatgaaatgattttaaataaatcaaattcaaatcttatagcatcaggtggaatatctgcagtttctgatattaataatctaaaaaaaattggtattcaagaatgtgtagtcggtaaggcaatatatgaaaatatcatccctattgaggatattagaaatgctaactaa

SEQ ID NO: 290811 - DNA, 260 bp, Unknown
  Bacterial polypeptide expressing nucleotide sequence isolated from the Sargasso Sea
cgtggcactgggtgtggttgattttctgtgtactgacatcagtaaagacggcaccatgaccggcccttcgttcgcactttatgaagatttaaccaaccacaacagcgagattaaagttcaagcatcaggcggtgtaagctcactggatgatattgcaaagctgaaaaaactgggtgttggcggtgttatcttaggtaaatcattgctcgatggtgcctttaatgttgaggaggcgttagcatgttatcaaaacgcataat

SEQ ID NO: 290812 - DNA, 718 bp, Unknown
  Bacterial polypeptide expressing nucleotide sequence isolated from the Sargasso Sea
gttgaatttttatccagctattgatctgaaagagggtcagtgtgtaagattgcaacgaggagatctagacactgcggttgtttacaatgataatcccgttgcacaagcaaagatatttcaagaggcaggatgtcgttggttgcacgtagtagacctagatggtgccgtttctagaagtaagaaaaatgtaaaaaccatagaagagataagaagttctacttccctaaaaattcaagttggtggagggataagaaatctgaaggaaatagatttctggaagtcaaagggtatagatcgtgtcattttagggactgtagcagtttctaacccttctgtagtacaaaaagcatgtagacacttcgatggtatcttaattgcgttagactccagagcaaataaggtcgctactgcaggctggaaaactacctcaaataaaaataccttagatctggcaaaaagtttcgaagattgtggggtcgatgcaattattttcaccgatatagatagagatggcttaatgaaaggattgaattctaatgatacaaagagactgtcggatcatgtaagtattcccgtaattggatcgggaggtataaatggccccgagaatcttgaaaacgtaaaaaaagatattccgaacttagagggagtcatcgctggaaaagctatatacactggtgccctgagaattgaagacgcattgagaattttagaggat

SEQ ID NO: 290813 - DNA, 565 bp, Unknown
  Bacterial polypeptide expressing nucleotide sequence isolated from the Sargasso Sea
ggcaaagatccacaaaatagacaaattgacctaatcgccaatatcattaacagcaccggcttattggtgcagacgggtgggggggtccggtcagcagatgatgtggccacgcttcttgatgcgggggctgcacgtgttgttatcggcagtcttgcggtgcatgaccccgatgttgtcaaacagctaatgcacatgcatgggccggataaaatctgtctggcggcggatgtcatcttgcaaaatgacgctttttacattgctgtatcgggatggcaggaagccagtgacctcagcctgtttgattttttagatatgttcgcgcctgcagggctaacgcatgttttatgtaccgatattgatcgcgatgggacattgcgggggtttaatcgggcgctctatactaatgtaaaactaaaattttcctatttgcaacttcaggcatcaggcggagcaagccgccttgaagatttgaaacatcttgatgcggatggggtgattattggcaaggccctgtatgaagggcgttttagcgttgccgaagcgctggaggcgaccgcatgttgac

SEQ ID NO: 290814 - DNA, 295 bp, Unknown
  Bacterial polypeptide expressing nucleotide sequence isolated from the Sargasso Sea
agctgttgatcttataaaaaaatttaatccatctattattaattctataatatacactgacatatcaagagatgggagtttattaggtgttaatattgaccagactattaattttgccaaatgtattcctcatccagtgattgcctctggtggagtttcttcactaaatgatattattaaattaagtgatcaagtatcaaatggaattgaaggtgttataattggaagagctttatatgataaaaaattctctttttttgaagctgtaaaagaaataaaaaagagaaaaatataa

SEQ ID NO: 290815 - DNA, 742 bp, Unknown
  Bacterial polypeptide expressing nucleotide sequence isolated from the Sargasso Sea
attggtcggagagtttgaagtgattgtttatcctgcaattgacataattgatggaaaatgcgtcagattatctagaggtgactactcaaataagactatttactcagataacttagaatcagtcgtatcatcatggcttagtaaaggcactagatttcttcatatagtcgatctagatggagcaaaagctggaagaccattgaatattgacagtattttgaagataagaaaatcatttccagatattttcatacaaattggaggtggaattagaaatattgaaacagttaaccaatatcttgctaatggcattaatagaattatcttaggtactaaagttcttaaagatagagaatttattcggtcaattgaccaggcacatagaaagtcactggcgatagatatagcaatcaaggacggacaacttgcaggtgatggatgggaaacaactgcaaacaatgatgtaggcgattttatagattactttgagcaaaatggcattgaactgtttatagtcactgatataaaccaagatggcatgatgcagggtatcaatagcgaatctattgagaagatactaaagtttataagtaccaaagctataatttctggtggagtaacatccactaatgatattcagtcaatcctaaaaatgactagaagtaagattgacggatttataattggtaaagctctatatgaaaacacaatagacttaaaggaagccatcaatgagtgtagc

SEQ ID NO: 290816 - DNA, 521 bp, Unknown
  Bacterial polypeptide expressing nucleotide sequence isolated from the Sargasso Sea
tatggacctaataccagcaattgatttaatgaatggaaagtgtgtaaggctttttaaaggcgactttaataaaagaaaagacttcacaaaagagcctcatgagcaagctaaattttgggaaggcgaaggagcaaaatatatacatatagttgatttggatgctgcaaaaactggatccccaacaaacgataaatcaataaaaaagattgcaaaaacagttaacatccctattcaaataggtggggggataaggtctcaagaaaggatagaacaattattttcttatggtattgagaaagttataatgggaacctctgcaatagaaaataaagaactagttaaagacttatcaaataaatttcctggaaggataattgttgggatagatgcaaaagatggaaaagtaagtacgaggggttggcttgagcaatctaatatttttgccacagatctagtaaaggagttttcttcatttaaaattgctagttttattgttacagatataaatacagatggaactt

SEQ ID NO: 290817 - DNA, 538 bp, Unknown
  Bacterial polypeptide expressing nucleotide sequence isolated from the Sargasso Sea
attgaacgtgattattccagctatagatttaatacaaggtaaaacagtgcggctctatcagggcagctacgataaaaccactgaatatcagcaaactccattgcagctgcgcgacttatacgccaaagctggcgcaggtattttgcatttggtggatttaacaggcgcaaaaaacgccgctgatcgtcaacttgagctattaaccagcttaatgaaaaatgcacctctgccagtacaagtgggtggtggtgtgcgcaccgcagctgatgtagaacagttattagcagctggcgccagccgcgtagtcgtaggtagtgtcgctattcgtgagccagagacagtgcaaggctggttacgcagttatggcggcgacaaaatagtgttggcgctggacgtggctattaatgccaaaggcgataaaactctgccaagccacggctggattgaagagtcgactattacccttgaacaagtgctggatggttttattgcagccaggtgccaaaccatgtgctttgcacccgacatcagtaaagac

SEQ ID NO: 290818 - DNA, 742 bp, Unknown
  Bacterial polypeptide expressing nucleotide sequence isolated from the Sargasso Sea
atgattttatttccggcaatcgatttaaagggcgggcactgcgttcgtttgttaaagggcgacatgaacgagtccacagtgtttaacacgtcaccagtcgatcaggcgactattttccaatctgcgggctgccaatggctgcacgtagtagatttggatggggcaatagctggccactcaattaacaatgaggcgatactttcgattattaggggcgtcgagtgtccaatccaattaggcggtggcataagagatttgcaaagcgtggaatattggatcaacgaaggtgtttctcgcgttattcttgggactgcagctatgaaagaccctaatcttgttaaactgagttgtagagaatttccagaaagaatagtcgttggaatagatgctagagatggctttgtcgcagtagagggttgggcaaagcactctaacattaacagtcaagaattagctaacagatttcaggattgtggcgtttcagctattatttacactgatatcaacagagatggtattttagctggcgttaacattgaagccacgctggcattagcatcttcggttaacataccaatcatagcttcaggcggtctatcttccatggacgaattaacagttctctcagatcaggcggaaggaagaatagccggtgtgatttgtgggcgagcgctctatgaaaatagaataaatttgaaggatgcattaaagttattgagagatcggattgatgaatgttaag

SEQ ID NO: 290819 - DNA, 163 bp, Unknown
  Bacterial polypeptide expressing nucleotide sequence isolated from the Sargasso Sea
aatgattgttatacctgcaattgatttaaaagatggaaaatgtgtccgccttagaggaggaaagatggatgaagtaactgttttctctgatgaccctcttgagacttcaagaatttggttttctgaaggagcagaacttcttcatatcgtagatctagacggt

SEQ ID NO: 290820 - DNA, 724 bp, Unknown
  Bacterial polypeptide expressing nucleotide sequence isolated from the Sargasso Sea
catgattttatttccagcaattgatttaaaagacggtaaatgtgtaagattaatacaaggtgattttaaacaatctacaacatacaatgagtcaccgttagaacaggctaaaatttttgaagactctggagtggaatatttgcattgcgttgacctagatggtgcgcttaagggcaattttgaaaatattaaatctattgagcaaataaaaaaaaatacaaatcttaagattcagttcggtggcggagtaaggaatatagaaagagttgaaagactcattaatattggtgttaataatgttattattggaacatcagcttttgaaaataaaactttttttgagaaatcagtttgcaattatcctaatagaatttcaattgctctcgacattaagcaaaaccaaattgctacaaaaggttggaaagaggtaaaagatttacaaatttctgatttcttaaaaagtatagaagatcttaatatcaactcaataataattactgacgttatgagggatggtatgaagcaaggaattaactttgaaatgctagaaaatgtaatggttcaaacaaaaattgactgtgttgcatcaggcggggtatcaaatatctcggaccttattaacctaaagaaaaaaaattactcacaaataaaaggtgtaattgtaggtaaagcaatttatgacaaaaatattgatattgctgaggcattaaagatagttagatag

SEQ ID NO: 290821 - DNA, 724 bp, Unknown
  Bacterial polypeptide expressing nucleotide sequence isolated from the Sargasso Sea
atgaaaatatttcctgctatagatattagaggggggaagtgtgttcgacttttaaaaggggatttcgaaaaatccactgaatataaaaaatctcctacagatcaagcaaaagagttcttagacttaggttttaaagatttacacatcgttgatttagatggcgctttaaaaggtaagacagttaacttagacataattcgtgtaataataagtaattataatttaaaaattgaagtaggcggaggcataaggtctcttgaaagtattaagcagtatattgatacaggtgtagataaagttattttagggagtggagcaattaaaaataaagaatttttaaaagatgcctgtataaagtttaaaaataaaattgcattaggtttagactcgaaggatggcttcttatctatttcaggctggaaagaaaattctaatattaaaactatagactacctaaaagaggtaaataattttggtattagcagaattatctatacagatataaataaagacggaatgaaaattggacctaactttgcagagacaataaaaattgctgaaatttctaattgtccagtagtaatttcaggtggcgtttctacaatgagcgatattataaaatgtaaaaaattaaataataaaaaaattgaaggtataatagttggtaaagctatttatgatggtgacattaaacttgacgagttggtaaaagagatagattaaa

SEQ ID NO: 290822 - DNA, 271 bp, Unknown
  Bacterial polypeptide expressing nucleotide sequence isolated from the Sargasso Sea
ctgatcaaaaaatttgaggacgatcctatcgcagctattatcttcactgatatttcaaaggatggaaagatgataggacctaatatcgaggctacatcagacttagcaaaccaaacaaaaattcctgtaattgcttctggaggtgtctcctctctagatcatatcactcaacttgaagataaaaaaaacatctcaggtgtgatatgcggaagagcactatatgagaaagcttttacttacgcagatgtactcgaggtattaggaaagtaat

SEQ ID NO: 290823 - DNA, 574 bp, Unknown
  Bacterial polypeptide expressing nucleotide sequence isolated from the Sargasso Sea
aatgattattattccagccatagacattaaaggaggtaattgcgtaaggttattaaaaggtaattttagtaaggaaactgtttattcaaataatcctttagaagtagcttctatgtggtttgaagggggagcagagtgcatacatttggtagatctagatggagcattagaaggtaaatctattaactctgatatttttttagagatatctagtgcttttaaagataaaactattcaagttggagggggtattagagacttagatatagcaactcaatatttagaaagcggtatagatagaattatcattggaactagagcaattgaagacccaggttttattgttaatttatgtgatttatatcctaatagaattattcttggagtggattctgaagaaggttttataaaaactaagggatggcagcaggaaacttctattagaactctagatttaataagaagattcaacaaatttcctttagcgggttttatttttacagacatttctaaagatgggatgatggaaggacccaacctaaaagctaccctggaggtagcttcaaatactcaa

SEQ ID NO: 290824 - DNA, 721 bp, Unknown
  Bacterial polypeptide expressing nucleotide sequence isolated from the Sargasso Sea
aatgaaaatatttcctgctattgacattaaagggggaaagtgtgttcgtcttctcaaaggagattttggaaaactaacccaatacaaaaagtcaccatttgaccaggcgaatattttttcaaatttaggttttaaaaacttgcatttaatagatttagatggggctctagaaggaaaatctattaacaaagaaattattcaaaatatagcgaaaataaaaaatattaaaattcaagttgggggtggagtaaggtctcttgaacaagtagatgatttattaaatattggggctgacaaagttatacttggcacaaaagctattgaagatataaattttttggagaaagccagtcaaaaatttaaaggaaagattgcgcttgccattgatgttagaaatggttttatagctctctctggatggaaaaaacaaacggatatcttggcttcagaattcattaagaaggtagatagattagaagtttccagaattatatacactgatataagcagagatggaactaagacaggcccaaacattgtcgagactataaaattttctagtttaaccaaaattccagttattgtctctggaggtgtatcttctctccaagacgtgataaacttaaagaaaaataaatctgaaagaattgaaggaataatagttggtaaggcaatttatgacgaaagtattgacctaaatgaactttcaaaagtgagttaa

SEQ ID NO: 290825 - DNA, 547 bp, Unknown
  Bacterial polypeptide expressing nucleotide sequence isolated from the Sargasso Sea
gcccttgaatcaggagataatcttcaatatagcttctaagtttcctgataaaagaattcaaataggcggtggtattagaaatttccaatctgcttctcaatacctagatcaaggtatagaaagagtgatcatgggcacttctgcagtggagaatccagaaatgcttagagagttttgtaatctgtatcctaacagattagtactgggggttgatgctttggatgggcaggttaaaacacaaggatggctcaaaggctcaagcatttctcctttagagctgatcaaaaaatttgatggcgagcctattgctgctgttattttcacagatatctccaaagatggcatgatgtcaggccctaatgtgaaagcaacattagagcttgcacaacaaacagacataccagttatagcttctggaggagtctcctcattggagcacataagacaactggcccgtgagaatattttagccggtgctatatgcggaagagctctgtatgagagtgcatttagttatttagaggcggttgaggcaacgagtacataa

SEQ ID NO: 290826 - DNA, 409 bp, Unknown
  Bacterial polypeptide expressing nucleotide sequence isolated from the Sargasso Sea
atgattttatatccagctatagatttaaaaaaaggtaaatgtgtccggttattacaaggaaatatgaataagcaaaccatctttaatcatgatccattgatgcaagcaaaattattcgttaataaggggtgtgaatggcttcatgttgttgatttagatggcgcattgacccaatccttggtaaatcagaaaattattaaagatattataaaaaatgtggctattccagttcaactagggggtggaattaggcatatagaaactattgaagattggatttctaatggagtacaaagaatcattcttggtactattgcactaaaagatccccaattagtaaaagaggcatgtaaatattttccaaataaaattgcagttgggatagatgcaaaaaatagtaaagtaatga

SEQ ID NO: 290827 - DNA, 541 bp, Unknown
  Bacterial polypeptide expressing nucleotide sequence isolated from the Sargasso Sea
aatcaagagataatttttgatatagcttctcaattccctgagaaaagaatacagatcggcggcgggattagaaatttccaatcagcttcccaatacttagaacaaggcatagaaagagtaatcatgggcactgctgcagtagaagatcctgagatgctaagagagttttgtaattcctatcccaataggttggttttaggaatagatgccctgcatggccaggttaaaactcaaggatggcttaaaggttccagtattactccattagagcttgtaaaagattttgatggtgagcctatcgctgctgttattttcactgatatatccaaagacggcatgatgtcaggtcctaatgtgatcgcaacattagagctggcaaagcaaacagatatacccgttatagcctctggaggagtctcttctttagaacacttaaaacaactttctaatgaaaatattttatttggagctatctgtggaagagctctgtacgagagtgcttttacttattcagaggcattagaggtcataggcagatagt

SEQ ID NO: 290828 - DNA, 742 bp, Unknown
  Bacterial polypeptide expressing nucleotide sequence isolated from the Sargasso Sea
tatgatattgtttcccgcgatagatttaaaaggtgggaattgtgttcgcttgataaagggtgacatgaatgaaagtacggtattcaatacctcaccaggtggccaagcaaccatctttcaatctgcaggatgtgagtggttgcatgttgtagatttagatggagcgtttgccgggcgttcaatcaataatgaagcaataggctcaattattgatagtgttaaatgcccaatccagttgggcggcggcataagagatctaaaaagtgtggaacactggataaatagaggcatctcccgggttattcttggaaccgccgctatgaaaaacccagaatttgttaaagagagttgtaaagaattcccggaaagaatagtggttggtatagatgcaagagagggctttgtctcagtggaaggttgggccaagcactctgatatgaatattctggagctggcggatagatttgaggatagcggtgtttctgccattatttacacggacattgatagagatggagtgttatcaggagttaatattgagggcaccctcgcgttagcctcgaaggtggagatacccgtaatagcttcaggtggtctttcttctatacaggaattaaaaaatcttttagatgaggccagaggaaaaatagatggcataatatgcgggagagctctctatgaaaacagaataaatttagaagatgcgctagaaattttaagccacggaggccgcgaatgttga

SEQ ID NO: 290829 - DNA, 727 bp, Unknown
  Bacterial polypeptide expressing nucleotide sequence isolated from the Sargasso Sea
aatgatcttatttcccgctattgatttgaaagatggtaaatgtgtacgccttgtccagggcgattttaataaatctactacttataataattcacccttagatcaggctaagttatttgaagatttaggtataacctggcttcattgtgtagatttggatggagcattggcgggtcaatcagaaaatgcaaagtcaattgaagagattgcttcaaaaacaaatttgaaattgcaatttggtggaggtattcgaaatataaaatcagttgaaaccttaatcaatattggcatacaaaatgtaatacttggaacagcagcatttgaagattatgaattatttcaaactgctattcagaaatatccaaacaaaatgtctattgcactagacattaaaaatgagcaagtcgctcttcgtggttggagagaagttaagtcaattaatctcgagaaatttttactatcgattgaaggtttaaaaataaattcaattatatgtacagatgtgatgagagatggaatgaaaaaaggaattaactttgatatgctggaaaatgtcatgaaaatgacgagctttttgtgcgttgcttcaggcggcgtgtcgtcaattgatgatataaaaaatatcaaaggtaaaaactactctcaaatgaaaggtgtcattgttggtaaagcaatttatgacaaaaacattgatattaaagaagcattaaaaatattaagtaaataa

SEQ ID NO: 290830 - DNA, 481 bp, Unknown
  Bacterial polypeptide expressing nucleotide sequence isolated from the Sargasso Sea
atgattttatttccagcaatagatttaaaagatggcaaatgtgttagattgactcaaggagacttcaataaatcaactgtttacaattcttctccgattgatcaagcaaaaatatttgaagaccttggagttgagtggttgcactgtgtagatttagatggtgctttacatggagtgtcagaaaatctaaaatttattgaacaaatcgctaatgaaacaaacctcaaaattcaaattggtggaggcattagaacgatggaaaaagtaagattattaattgatcttggggtttctaatcttattcttggtactgctgtttttaaagatagagagttttttgataaaacggtaaatttatatccaaaatcaatttcaatagctttagatataaaaaataatcaaatagcaactcagggttggagtgaagttcatgaaatagatttaatttcttttctgacttcattaaataatatgaaaataa

SEQ ID NO: 290831 - DNA, 712 bp, Unknown
  Bacterial polypeptide expressing nucleotide sequence isolated from the Sargasso Sea
gatgaaaatatttcctgcattagatataagaaatggtaaatgtgtaaggttaattaagggtaattacaataatgaaataatttttgatgaaaatccaattgatgttgcaatgaaatttgaacaggatggaagtagctttattcatatcattgatcttgatggagcgaaggatggagattcaactataaagaatataattgctcagattcttaataaaactaatctaaaaattcaggtaggaggaggaattagaacttatgaaaaagcttcttcatacttaaatttaggagtttctagaattatatttggaacggctgcatacgaaaataaaaaagaagttattagggctattcagaactttggtaaagctatagtaattagtatagatgcactagaaggagaaattaaaacaaaaggatggttagaaaattcaagcttgagtattgaaaatatagttcaagatttcgagaaagagggatgcaaatcatttatttatactgatatagcaaaagatggtactctgtctcacccaaactttgattatatttctaaatttagaagtttttgttcagtagaattaaatattgcaggaggcatatcttcatttgaagatttaattcagctaaagaataataaaatagatggcgcaattttaggtatgtccatatataagaaaaatataaatctaaaagaagttttggaaaaattataa

SEQ ID NO: 290832 - DNA, 739 bp, Unknown
  Bacterial polypeptide expressing nucleotide sequence isolated from the Sargasso Sea
tatgaaactaataccagcaatcgatctccttgatcaaaaatgcgtgagacttcttcgtggagatttcgaccgggttactttttatgaaaaagatccgcttcaattggccaaacattatgaatcgctgggatgtgagcacatacaccttgttgatctcaatggcactagagatggaaaaagtgaaaataagtccatcgttgattcaatcatttcaaagaccaatctaaaggttcaaatgggtggtggaatacgatcaaaggactcaatcaattactggcttgattcagatttagaaaaactcgtaattggaagttttgcagtcgaagagtatgaccaatttatatctttactaagtcccaatacacgttcacgaatagtaatcgcattagacgtattgattgtcgccaatatacctcaaattcaaatacatggttggcagaaagattccgaactaactctattgccaacaattaaaactttcatagatcaggggtttgatgagttcctaatcacagatatcagcaaagacggaacactcaagggccctaatattgaactatataagcaaataaatctagaattcagtccaatcaatgtaattgcatctggaggcgttagctcgcttgatgatctaatcaagctggataacatatccattcaatcagcagtggttggtaaatcattgcttgaaaataaaattacagatcaggaggtaatgcaattcttacaaaaaggataa

SEQ ID NO: 290833 - DNA, 586 bp, Unknown
  Bacterial polypeptide expressing nucleotide sequence isolated from the Sargasso Sea
atggacctaattccagcaattgatttaatgaatggtaagtgtgtgaggctttttaaaggcgactttaataaaagaaaagacttcaccaaagagcctcatgagcaagcgaaattttgggaaagcgaaggggcaaaatatatacatatagttgatttggatgctgcaaaatctggatctccaacaaacgatgaatcaataaaaaagattgcaaaaacagttaacataccaattcaaataggtggggggataaggtctcaagaaaggatagagcaattattttcttatggtattgagaaagttatcatgggaacctctgcaatagaaaataaagagctagttaaagacttatcaaataaatttcctggaaggataattgttgggatagatgcaaaagatggaaaagttagtacaagggggtggcttgagcaatctaatatttttgccacagatctagtaaaggagttttcttcatttaaaattgctagttttattgttacagatataaatacagatgggacgttagaagggacaaatgaagaattcataaaaagcatacttgaaattacagatattccagtagtagcct

SEQ ID NO: 290834 - DNA, 724 bp, Unknown
  Bacterial polypeptide expressing nucleotide sequence isolated from the Sargasso Sea
aatggaactttggccagcgattgacctccgtggaggttgttgtgtacgcctgcagcaaggcgactatggtcgtgagacagtctttggagaggatcctgtcgagacagtgaaacagttcacatcagctggtagtcgtcgtcttcatatcgttgatcttgagggagcaaaagatggagctgctatacagtccgatttgatccggcagatggtagcgacggccggcgtgccctgccaggtaggaggaggaattcgttctcgaaagataatagaatcgtatcttgaggctggtgtttcacgcctcgttatgggaagtgttgcgattgagcagccagatctgtttgctgagcttgcccatgcatatccggatacgcttgttcttggtctcgacgcccgagaaggaaagctcgcagcacgaggctggctcgaaacgagtacacagcaagctgtggacgtagctgctcaatcagctgagctcccacttgcggctattgtctatacagatattgctcgtgatggcatgctccaaggtccaaacctgcccgctctcgaggcaatggtgcaggcttccccccaccccgtggtggcatcgggtggtatcgcggaggcagatgatctgcgggcagtcgcggcaactggtgcgtctggatgtatcgttgggcgggcactttatgatggcggcctcactctttccgcagccattgaagcatccggtgaatcactataa

SEQ ID NO: 290835 - DNA, 247 bp, Unknown
  Bacterial polypeptide expressing nucleotide sequence isolated from the Sargasso Sea
gcaaataatttatactgatattagtacagatggcatgatgaaaggaccaaatcttaaaggtacaacgaatttagctaaatctcttaatattcctgtgattgcctcgggcggtataagttcagaaaatgacgtaatgaattatctttctaacgaaaagcatggaatcaatggagttataataggaagggctttatacgaaaataaaatatcatttagtaaattaataaataaattgcataaaaaataa

SEQ ID NO: 290836 - DNA, 401 bp, Unknown
  Bacterial polypeptide expressing nucleotide sequence isolated from the Sargasso Sea
gataattgttgggatagatgctaaagatggaaaagttagtacaagaggttggcttgagcaatctaatatttttgccacagatctagtaaaggagttttcttcatttaaaattgctagttttattgttacagatataaatacagatgggactttagaagggacaaatgaagaattcataaaaagcatacttgaaattacagatattccagtaatagcctcaggaggcgttggttcaatttctgatttattatcgttagtaaaatttgaaaactctggactctttggagtaatagtaggtaaagctctatatgaaaataaattcacgataaacgaagcgaataatgtattgtcagcagagagattaaatgactttgatttaaacacaaattactacgcttaaa

SEQ ID NO: 290837 - DNA, 739 bp, Unknown
  Bacterial polypeptide expressing nucleotide sequence isolated from the Sargasso Sea
atgaatttaataccagcaattgatttacttgaccagaaatgtgtcaggctgcttcgaggcgattttgatcaggtgaccttttatgacaaagatccgcttcaattagccacccattatgaatctcttggctgcaaacatttacatttggtggatctaaatggaacaagagatggagccagtaaaaataagtcaatcatagattcaattattgctaaaacaaatctcaaggttcagatgggcggtggaattcgctcgattgaatcaattaattactggcttaattcaaatttaagtaaagttgtagtcggaagttatgcgattgaagagactaatcaatttatttcatcgcttgaccctggaatgcgttccaaaataattattgcattggacgttctgattcgtgatggtgagccttcaatacgcatacatggttggcagaaagattcaaaaatgagcctcatacccactatgaaattatttatagacaatggatttagagactttttgatcactgatatcagcaaagatggaacgcttgagggtccaaacattgatttatatgacgaaattaatattcgattcaatgagattaatatcattgcttctggcggggttagcattttcgatgatctcatcaaattagataaaatatcactgtcatcagtggttgttggaaaatcattgctagaaaataaaataacagaacaagaggtagtccaattcttacaaaaaggataat

SEQ ID NO: 290838 - DNA, 410 bp, Unknown
  Bacterial polypeptide expressing nucleotide sequence isolated from the Sargasso Sea
ttctgctgttgaagagcccgatatgttaaaagacttttgcgttaagtacccaaatcgcttggttcttggcattgacgcccttgatggtgttgtaaaaactcagggttggctaaagggttctggaatctctcctgccgagttagtcaaaaaatttgaggatgaacctatcgcagctattatcttcactgatatatcaaaggatggaatgatgatgggacccaatatcgaggctacatccgacttagctaaccaaacaaaaattcctgtaattgcttctggaggtgtttcctctctagatcatattatccaacttgaagataaaaagaatatctcaggtgtaatatgtggaagagcactatatgagaaagcttttacttatgccgatgttctcgaggtactaggaaagtaac

SEQ ID NO: 290839 - DNA, 739 bp, Unknown
  Bacterial polypeptide expressing nucleotide sequence isolated from the Sargasso Sea
tatgaaactaataccagcaatcgatcttcttgatcaaaaatgcgtgagacttcttcgtggagatttcgatcgggttactttttatgaaaaagatccaattcaattggccaaacattatgaatcgctgggatgtgagcacatacaccttgttgatctcaatggcactagagatggaaaaagtaaaaacaagtctatcgtcgattcaatcatttcaaagaccaatttaaaggttcaaatgggtggcggaatacgatcaaaggactcaatcaattactggcttgattcagatttagaaaaactcgtaattggaagttttgcagtcgaagagtatgaccaatttatatctttactaagtcccaatacacgttcacgaatagtaatcgcattagacgtattgattgtcgccaatatacctcaaattcaaattcatggttggcagaaagattccgagctaactctattgccaacgattaaagctttcatagatcaggggtttgaagagttcctaatcacagatatcagcaaagacggaacactcaaaggccctaatattgaactatataagcaaataaatctagaattcagtccaatcaatgtaattgcatctggaggcgttagctcgcttgatgatctattcaagctggataacatatccgttcaatcagcagtggttggtaaatcattgcttgaaaataaaattacagatcaggaggtaatgcaattcttacaaaaaggataa

SEQ ID NO: 290840 - DNA, 730 bp, Unknown
  Bacterial polypeptide expressing nucleotide sequence isolated from the Sargasso Sea
atgaagataatacccgcaatagaccttaaagaaggaaaatgtgtaaggctcagagaagggaaaatggatcaagagactattttttcagaagatcctattgctacagctgaacattggttttccgaaggcgctgatttattacatatagtggatttagatggggctgtttcgggtaagccaattaataacaaaataatttcagaaattgctttggaatttccctctaagcatattcaagttggaggcggtatacgtagttttgagattgctcaagattatataaggataggagttcaaagagtcataatgggaacttcagctattgaaagtcctgaggttttaaaagacttttctaactcttatcctaatcaagttgtgcttggtattgatgctctcgatggtaaggtgaagaccgaaggatggttaaaagaatctggtattacacctctggatttgattaaagtttttgaggggctgccaattgcagctattatcttcactgatatttcaaaagacggaatgatgtctggacctaactttgaggcaacctcttccttggctaaagcaactgcaatacctgtcattgcttctgggggaatatcttctttatctcacataaaaaaactatctgaagataaattaatatatggagctatctgtgggagagcattgtacgaaaaggtatttacttttgctgaagcagagaagacggcagaatctagattatgac

SEQ ID NO: 290841 - DNA, 769 bp, Unknown
  Bacterial polypeptide expressing nucleotide sequence isolated from the Sargasso Sea
tatggacctaataccagcaattgatttaatgaatggtaagtgtgtaaggctttttaaaggcgactttaataaaagaaaagacttcaccaaagagcctcatgagcaagctaagttttgggaaagcgaaggggcaaaatatatacatatagttgatttggatgctgcaaaaaccggatccccaacaaacgataaatcaataaaaaagattgcaaaaacagttaacattcctattcaaataggtggagggataaggtctcaagaaaggatagaacaactattttcttatggtattcatagagttatcatggggacctctgcgatagaaaataaagaactagttaaagacttatcaaataaatttcctggaaggataattgttgggatagatgcaaaagatggaaaagttagtacaagggggtggcttgagcaatctaatattttggccacagatctagtaaaggagttttcttcatttaaaattgctagttttattgttacagatataaatacagatgggacgttagaagggacaaatgaagaattcatacaaagcatacttgaaattacagatattccagtaatagcctcaggaggtgttggttcaatttctgatttattatcgttagtaaaatttgaaaactctggactctttggagtaattgtaggtaaagctttatatgaaaataaattcacgataaacgaagcgaataatgtattgtcatcagagagattaaatgactttgatttaaacagaaattactatgcataa

SEQ ID NO: 290842 - DNA, 598 bp, Unknown
  Bacterial polypeptide expressing nucleotide sequence isolated from the Sargasso Sea
tatggacctaataccagctattgatttaatgaatggtaagtgtgtaaggctttttaaaggggactttaataaaagaaaagacttcaccaaagagcctcatgagcaggctaagttttgggaaagcgaaggggcaaaatatttacatatagttgatttggatgctgcaaaaactggttccccaacaaacgataaatcaataaaaaagattgcaaaaacagttgacatacctattcaaataggtggggggataaggtctcaagaaaggatagaacaattattttcttatggtattgagaaagtcatcatgggaacctctgcaatagaaaataaagaactagttaaagacttatcaaataaatttcctggaaggataattgtgggtatagatgcaaaagatggaaaagttagtacaagggggtggcttaagcaatctaatattttagccacagatctagtaaaggagttttcttcatttaaaattgctaattttattgttacagatataaatacagatgggacgttagaaggaacaaatgaagaattcataaaaagcatacttgaaattacagatattccagtaatagcctcaggaggtgta

SEQ ID NO: 290843 - DNA, 747 bp, Unknown
  Bacterial polypeptide expressing nucleotide sequence isolated from the Sargasso Sea
atttaatgaatggtaagtgtgtaaggctttttaaaggcgactttaataaaagaaaagacttcacaaaagagcctcatgatcaagctaaattttgggaaagcgaaggtgcaaaatatatacatatagttgatttggatgctgcaaaaactggatccccaacaaacgataaatcaataaaaaagattgcaaaaacagttaatatacctattcaaataggtgggggtataaggtctcaagaaaggatagaacaattattttcttatggtattgagaaagttatcatgggaacctctgcaatagaaaataaagaactagttaaagacttatcaaataaatttcctggaaggataattgttgggatagatgcaaaagatggaaaagttagtacaaggggttggcttgagcaatctaatatatttgccacagatctagtaaaggagttttcttcatttaaaattgctagttttatagttactgatataaatacagatgggactttagaagggacaaatgaagaattcataaaaagcatacttgaaattacagatattccagtaatagcctcaggaggtgttggttcaatttctgatttattatccttagtaaaatttgaaaactctggactctttggagtaatagtaggtaaagctctatatgaaaataaatttacgataaacgaagcgaataatgtattgtcagcagagagattaaatgacattgatttaaacacaaattactacgcttaaa

SEQ ID NO: 290844 - DNA, 313 bp, Unknown
  Bacterial polypeptide expressing nucleotide sequence isolated from the Sargasso Sea
gatgatcattcctgctttagatttaattgacggcacggttgtccgtctccatcagggcgattacggccagcagcgcgactacggcaacgatccgctgccgcgcctgcagtcctacgccgcgcaaggggccgaagtgctgcacctggtcgacctgaccggcgcgaaagacccggcgaagcgccagatcccgctgctgaaaacgctggttgccggagtgaacgtgccggtgcaggttggcggcggcgtgcggacggaagaagatgtggcagccctgcttgccgcaggcgtggcgcgcgtggtggtgggttcaaca

SEQ ID NO: 290845 - DNA, 769 bp, Unknown
  Bacterial polypeptide expressing nucleotide sequence isolated from the Sargasso Sea
atggagatccttcccgctattgatctgctggacggagcctgcgtgcgcctgcacaagggggattacgagcaggtcacccgctttagcgatgaccctgtcgctcaggccctcagttggcagcagcagggcgcaacccgactgcacctagtggatctcgatggtgccaagcggggagaaccggtgaatgattccgccgtccaggcgatcacatcagccctggatatcccggtgcagctcggtggcggcgtccgctccctggaacgggctgagcagttgctcgcctgcggtcttgatcgcgtgatcctcggcaccgtggcgatcgagcagcccgacctggttcgatccctcgccgagcggtaccccggtcggatcgtggtgggaatcgatgccaaggacgggcgggtggccacccgcggctggatcgagcagagcgatgtcctggcgacggacctggccagaaccttcagcagctctgggattgccgcgatcatcaccaccgatatcgccaccgatggcaccctggccgggccgaacctcgaggctctcaggaccatggcggcgagcagcagcgttccggtgatcgcctccggcggcattggctgcatggcggatctgctgtctctcctgcccctggaaccactcggtgtgcgtggtgtgatcgtcggtcgtgccctgtacgacggtcgtgttgatctggcggaagcggtgcgggcgctggcggagccgaggctgcaggacatcacagctgttgcagcggacctggcttgat

SEQ ID NO: 290846 - DNA, 748 bp, Unknown
  Bacterial polypeptide expressing nucleotide sequence isolated from the Sargasso Sea
gttagttattccagctattgatttgaaggatggccagtgcgtaagactgcggcagggtaaaatggaagagagcacggttttctcggataatcctattgaaatggccaggcactgggtcgagcaaggagcccaaaggctgcacgttgtagatttaaatggagcatttgctggcactctagtcaactccgacatagttgcctcgatagtaaaaaattttcctaacttagaagtacaggttggtggtggaataagaactctcgagggtataaagttttacgttgatgttggggttagcttcgtaataattggaacagcggcgttaaaaaacccagactttgtcagagaagcttgtcaagcctatgaaggtaaagtaatcgtaggccttgatactattgacggcaaagttgctacagagggatggtcagacgtatcggacacctctgctatcgagttggtcggtaagtttgcaggtttaggcgtacaagcgattgtttacacggatattgccagagacggcatgatgcagggatgtaatattgatgctacggtcgaactggcgaggcgcagtcctattccaatcattgcctcgggaggggttgctaagcttgctgatattgtggatttaaaagccgcaataaacagcgaggttagtgcaaacatagtgggcgctatcacaggccgagccatctatgagggtaaattgaatttgagaactgcgcaagaatactgcgatagtgaggctagttag

SEQ ID NO: 290847 - DNA, 739 bp, Unknown
  Bacterial polypeptide expressing nucleotide sequence isolated from the Sargasso Sea
aatgattattccagcgattgatcttattgacggacgcgtagtacgcctttatcaaggcgactacgagcagaaaacccaatacgaactggacccagtagacgtggttcacgactatgccgaccaaggtgcaacctggctgcacattgttgacctaacaggcgctaaagacaccagtaaacgtcagctttcactaattaagtctatggtcgataccaagcgcatgaagtttcaagccggcggcggtattcgaagcgaagaagaagtggcgcaattactagaaactggcgtcagccgcgtagtgattggttctttggccgttaagcaacctgaactagtgaagtcttgggtagaaaagtacggtccagagcacattgtactggccctggatatcaatatcagcgatagcggtgaaaagcttattgccacccacggttggcaagagaattctggcgtagcccttgaaggcttgcttgaagacttcgcttctgttggtgcaaagcatgtactgtgtaccgacattagccgtgacggcacgctacaaggcgcgaacaccgagctgtatcaagaaatggcagcccgtttcccacacgttagctggcaagcgtctggcggtattggcagcatcgctgatatcgaagcgctaaaacccacaaacgttggcggcgttattcttgggcgcgcactacttgaaggtaagtttacggtgaaggaggctatcgcatgctggcaaaacgcataa

SEQ ID NO: 290848 - DNA, 712 bp, Unknown
  Bacterial polypeptide expressing nucleotide sequence isolated from the Sargasso Sea
tatggacctaataccagcaattgatttgatgaatggtaagtgtgtaaggctttttaaaggtgactttaataaaagaaaagacttcgccaaagaacctcatgagcaagctaaatattgggagagggaaggggcgaaatatatacatatagttgatttggatgctgcaaaaactggatccccaacaaacgataaatcaataaaaaagattgcaaaaacagttaacataccgattcaaataggtggggggataaggtctcaagaaaggatagaacaattattttcttatggtattgagaaagttataatgggaacctctgcaatagaaaataaagaactagttaaagacttatcaaataaatttcctggaaggataattgttgggatagatgcaaaagatggaaaagttagtacaaggggttggcttgagcaatctaatatttttgccacagatttagtaaaggaattatcttcatttaaaattgctagttttattgttacagatataaatacagatgggactttggaagggacaaatgaagaattcataaaaagcatacttgaaattacagatattccagtaatagcctcaggaggcgttggttcaatttctgatttattatcgttagtaaaatttgaaaactctggactctttggagtaattgtaggtaaagctctatatgaaaataaattcacgataaacgaagcgaataat

SEQ ID NO: 290849 - DNA, 693 bp, Unknown
  Bacterial polypeptide expressing nucleotide sequence isolated from the Sargasso Sea
aatgctgctgatacccgcaatcgacttgaaacaggggaaatgcgtccgtcttcttcagggtcaggaagaggagcaaaccgtttattctgatgatccagttagtcaggccttggaatttcagaaagcaggagcccagcggctccatttagtggatcttgatggtgccttccaggggcgaggagaaaatcatgaaaccatcggaaagatcatttccgcgttgaacatcccggttcaggttgggggaggaatccgcagccctgatgatgttgaaaacaaaatcaagttgggggctgcttcagtgattattgggacgatggcagtgaaaaaccctgagcattttgaacaaactctggaaactcatgggggtgattcagtccttttggggattgatgcaagaaaccgccgggtggcagtggaaggctggaaggaaggaactgatctggaagatgttgaatttgcaaagctttggaaatccaagggagtgaaaagggtgatctttaccgacattgccagggacgggatgttgagtggccctaatctggaagcccttgaggattttacaatccgttcaggtctgaatgttacagcatccggaggagtttcgtcgattgaggacctgaaaaatctccgtaaacttgaaacaaatggagtcgatcaggtcattgtcggtaaggctatatacgacggacggat

SEQ ID NO: 290850 - DNA, 724 bp, Unknown
  Bacterial polypeptide expressing nucleotide sequence isolated from the Sargasso Sea
atgattattccagcgattgatcttattgacggacgcgtagtacgcctttatcaaggcgactacgagcagaaaacccaatacgaactggacccagtagatgtggttcacgactatgccgaccaaggtgcaacctggctgcacattgttgacctaacaggcgctaaagacaccagtaaacgtcagctttcactaattaagtctatggtggacaccaagcgcatgcagtttcaagcaggcggcggtatccgtagtgaagaagaagtggcgcaattactagaaacgggcgtaagccgcgtagtgattggttctttggcggtaaaacaacccgagcttgtgaagtcttgggtagaaaaatacggcccagagcacattgtattggcccttgatatcaatattagcgacagcggtgaaaagcttattgctacccacggctggcaagagaactctggcgtagcccttgaaggcttgcttgaagacttcgctacagtaggcgcaaagcatgtgctgtgtaccgacattagccgcgacggcacgctacaaggtgcgaacactgagctgtatcaagaaatggcagcccgtttcccacacgttagctggcaagcgtctggcggtattggcagcatcgctgatatcgaagcgctaaaacccacaaacgttggtggcgtaattttaggccgcgcactacttgaaggtaaattcacggtgaaggaggctattgcatgct

SEQ ID NO: 290851 - DNA, 655 bp, Unknown
  Bacterial polypeptide expressing nucleotide sequence isolated from the Sargasso Sea
aatgatcttttttcctgcaatagacttaaaagatggaaaatgcgttagattaaaacaaggcgatattttaaagtctacgatttttgattcagacccagtagcgagggcagaatcatttcatgatgcaggatgttcttggcttcatttggtagatttaaatggagcatttgaagggaaacctataaatcatcagatagtagaaaaaataataaagagtgttgatataaaaattcaactaggaggaggagttagaaatttcgatactattgatttttggatgaacgcaggcattaaaaggctaattataggaacaatggctttaaaaaagcctgagttagttattgaggcatgcgaaaaatacccaggaaaaatcgccttaggcatagatgttagagatggcaaaatagcgacggaaggctgggttgagcagtctcaaatttcggctgtagatttagttaaaaaatttgaagacgtagatgtgtctgcaattatatatactgatattagcagagatggcattttaatgggcccagcaatagaagagacattaaaattttcagataaaaccaaaattccaattataatatcaggaggagtttcttcagagaaagatattatagaaattaagaaaagagcaaatgataaaatcttaggc

SEQ ID NO: 290852 - DNA, 769 bp, Unknown
  Bacterial polypeptide expressing nucleotide sequence isolated from the Sargasso Sea
atgggatggaagtcaatagtgttagtgattccagcgatggatctgaaagatggacagtgtgtcagactgcggcaggggaaaatgaatgaaagtactgttttctctgacaatcctgtggaaatggctggtcattgggctgagcagggagcccaaaggttgcacgttgtagatttgaacggtgcttttaccggcagtctagttaactctgagatagttgcctctatagtaaagagttttcctggcttacaagtacaaattggtggcggaataagagacctaaaaagtattgagttttacatcggtgttggtgcgcgctttgtgataattgggactgcagcattaaaggatccagattttgttgctgaggcatgtcagatgtatccgggcaaagtcatagtaggacttgatactatcaatggtaaagtcgcgacagaaggctgggccgaggtgtcagaaatctcgcctattgaaattgctaataagttttctgaatatggagtacaggctattgtatacacagatattgctcgagatggcatgatgcaaggttgcaacattgaggctactgtcgaacttgccaagcagagtcctatcccaattattgcgtcgggaggcatcgcaaagctagctgatattgtcgatttaaaggcggcaacaaaaaagggggttggcgcaaacatagtcggagcaataacgggcagagcgatctacgagggtaaattggatttgatggcggctcaaaaatattgcaacagcgaggcaagttaga

SEQ ID NO: 290853 - DNA, 717 bp, Unknown
  Bacterial polypeptide expressing nucleotide sequence isolated from the Sargasso Sea
acaagggggattacgagcaggtcacccgctttagcgatgaccctgtcgctcaggccctcagttggcagcagcagggcgcaacccgactgcacctagtggatctcgatggtgccaagcggggagaaccggtgaatgattccgccgtccaggcgatcacatcagccctggatatcccggtgcagctcggtggcggcgtccgctccctggaacgggctgagcagttgctcgcctgcggtcttgatcgcgtgatcctcggcaccgtggcgatcgagcagcccgacctggttcgatccctcgccgagcggtaccccggtcggatcgtggtgggaatcgatgccaaggacgggcgggtggccacccgcggctggatcgagcagagcgatgtcctggcgacggacctggccagaaccttcagcagctctgggattgccgcgatcatcaccaccgatatcgccaccgatggcaccctggccgggccgaacctcgaggctctcaggaccatggcggcgagcagcagcgttccggtgatcgcctccggcggcattggctgcatggcggatctgctgtctctcctgcccctggaaccactcggtgtgcgtggtgtgatcgtcggtcgtgccctgtacgacggtcgtgttgatctggcggaagcggtgcgggcgctggcggagccgaggctgcaggacatcacagctgttgcagcggacctggcttgat

SEQ ID NO: 290854 - DNA, 584 bp, Unknown
  Bacterial polypeptide expressing nucleotide sequence isolated from the Sargasso Sea
ggtggatttaaatggcgcgtttgagggtcaaccaatgaatgcggcggccgttgaatcgatcctgagcgcaattgacatccccgtgcaattgggcggtggcattcgtgacatggcaacgatcgacgcgtggcttgggcggggtattcgtagggttatcctaggaacggttgccgtgaaagacccggatctggtgcgtgcagcctgcgaaaaatggccgggccgtgttgccgtcggcattgacgccaagggcggtaaggtcgctattgaaggttgggccgaggtatctgaattgacggccgaaaccctcgctggggaattcgaaggtgtaggggtctcagccatcatttacactgacgtggatcgggatggcgtgcttgctggagcgaatattgaagcaacggcgcggctcgctgaatcgactgcaattccggtgatagcgagtggaggtgtcgcctccctggatgatctgttggccatacaggcaaatggtactattgcgggtgcaatcattgggcgagctctctacgacgggcgtatcagtttcgaagaagcgctggccgcacttggtgaacgggcctcctaat

SEQ ID NO: 290855 - DNA, 631 bp, Unknown
  Bacterial polypeptide expressing nucleotide sequence isolated from the Sargasso Sea
tccggccgcgcaggcgctggagttcgtggcgtcgggctgtgaatggctgcatctggtggatctgaacggtgccttcgccggggagccggtgaacgccgcgccggttgaggagatcctgaagcagtgtcaggtgcccgcgcagcttggtggtggtatccgcgatatggccaccatcgagcgctggctcgacaaggggctggcgcgggtgatccttggcaccgtagcggtggagaaccccgatctggtgcgcgaggcagcacgggcgtttccgggcaaggtcgcggtcgggatcgacgcgcgtggtggcaaggttgcgaccaaaggctgggccgaggaaaccgatgtcgacgtcaccgatctggcgaagtcctttgaggacgcgggcgttgcagcgatcatctacaccgacattatgcgcgacggcgcgatgaaaggtccaaacattgacgccaccgccgcgctggcaaatgccgtgtcgatcccggtgatcgcctctggcggcgtatcctcgctcgacgatcttcgcgcgctgaaatcctgcggcgcgccgctcaatggcgcgatttccggtcgcgcgctctatgatggcgcgattgatctttctgaggcgctggcggtcctcaagggctga

SEQ ID NO: 290856 - DNA, 748 bp, Unknown
  Bacterial polypeptide expressing nucleotide sequence isolated from the Sargasso Sea
atggacctaataccagcaattgatttaatgaatggtaagtgtgtaaggctttttaaaggcgactttaataaaagaaaagacttcacaaaagagcctcatgatcaagctaaattttgggaaagcgaaggtgcaaaatatatacatatagttgatttggatgctgcaaaaactggatccccaacaaacgataaatcaataaaaaagattgcaaaaacagttaatatacctattcaaataggtggggggataaggtctcaagaaaggatagaacaattattttcttatggtgttgagaaagttatcatgggaacctctgcaatagaaaataaagaactagttaaagacttatcaaataaatttcctggaaggataattgttgggatagatgcaaaagatggaaaagttagtacaaggggttggcttgagcaatctaatatatttgccacagatctagtaaaggagttttcttcatttaaaattgctagttttatagttacagatataaatacagatgggactttagaagggacaaatgaagaattcataaaaagcatacttgaaattacagatattccagtaatagcctcaggaggtgttggttcaatttctgatttattatcgttagtaaaatttgaaaactctggactctttggagtaatagtaggtaaagctctatatgaaaataaatttacgataaacgaagcgaatcatgtattgtcagcagagagattaaatgactttgattaaa

SEQ ID NO: 290857 - DNA, 719 bp, Unknown
  Bacterial polypeptide expressing nucleotide sequence isolated from the Sargasso Sea
tatggacctaataccagcaattgatttaatgaatggtaagtgtgtaaggctttttaaaggcgactttaataaaagaaaagacttcacaaaagagcctcatgagcaagctaaattttgggaaagcgaaggagcaaaatatatacatatagttgatttggatgctgcaaaaactggatccccaacaaacgataaatcaataaagaagattgcaaaaacagttaatatacctattcaaataggtgggggtataaggtctcaagaaaggatagaacaattattttcttatggtattgagaaagttatcatgggaacctccgcaatagaaaataaagaactagttaaagacttatcaaataaatttcctggaaggataattgttgggatagatgcaaaagatggaaaagttagtacaagggggtggcttgagcaatctaatatttttgccacagatctagtaaaggagttttcttcatttaaaattgctagttttattgttacagatataaatacagatgggactttagaagggacaaatgaagaattcataaaaagcatacttgaaattacagatattccagtaatagcctcaggaggtataggttcaatttctgatttattatccttagtaaaatttgaaaactctggactatttggagtaatagtaggtaaagctctatatgaaaataaattcacgataaacgaagcgaataatgtattgt

SEQ ID NO: 290858 - DNA, 769 bp, Unknown
  Bacterial polypeptide expressing nucleotide sequence isolated from the Sargasso Sea
tatggacctaattccagcaattgatttaatgaatggtaagtgtgtgaggctttttaaaggcgactttaataaaagaaaagacttcaccaaagagcctcatgagcaagctaaattttgggaaagcgaaggggcaaaatatatacatatagttgatttggatgctgcaaaatctggatccccaacaaacgatgaatcaataaaaaagattgtaaaaacagttaacataccaattcaaataggtggagggataagatctcaagaaaggatagagcaattattttcttatggtattgagaaagttatcatgggaacctctgcaatagaaaataaagagctagttaaaaacttatcaaataaatttcctggaagaataattgttgggatagatgcaaaagatggaaaagttagtacaaggggttggcttgagcaatctaatatttttgccacagatctagtaatggagttttcttcatttaaaattgctagttttattgttacagatataaatacagatgggacgttagaagggacaaatgaagaattcataaaaagcatacttgaaattacagatattccagtaatagcctcaggaggtgttggttcaatttctgatttattatcgttagtaaaatttgaaaactctggtctctttggagtaattgtaggtaaagctctttatgaaaataaattcacgatcaacgaagcaaataatgtattgtcatcagagagattaaatgactttgatttaaacagaaattactacgcctaa

SEQ ID NO: 290859 - DNA, 721 bp, Unknown
  Bacterial polypeptide expressing nucleotide sequence isolated from the Sargasso Sea
atgattttatatccagcaatagacttaaaaaatggcaagtgtgtccggttaatacagggaaaaatgaacaaagaaactgtatttaataacgacccactattgcaggctaaatcttttgtagatcaaggatgtgaatggcttcatttagttgatttagatggcgcactatctcaatctttagtaaatcaaacaataataaaaaaaatcatcagtactgttccaattccagtacaacttggtggtggaataagaaattttaaaactattgaacatttaatttcagttggtgttcaaagaattattttaggtactattgcattaagtgatccccaattagtaaaaaaagcatgcaaatattttcctaacaaaatagctataggcatagatgcaaaaaatagtaaagtaatggtagaaggatggataaaaaaatccaaaatgtctgtttttgatttggcaaaatcttttgaagatgttggagtttcagcaatcatttataccgatataagtaaagatggaatgatgcttggaccagatattagtggtacaaaaaagttattggaatatatttctattccaataattgcatctggaggggtttcttcaatttctgatttgaagaaattaaaaaaagactgttcagaactaaatggaatagtatgtggaagagctttgtatgataagaaaataaatattgatgaagcaataagagtattgaattaat

SEQ ID NO: 290860 - DNA, 572 bp, Unknown
  Bacterial polypeptide expressing nucleotide sequence isolated from the Sargasso Sea
aatgatagtaattccagcaatagacttaaaaaatgggaaatgtgttaggttgcgagaagggaaaatggatgaagaaaccatattctctgaagatccaatctcaacagcaggctcttggttttcacaaggggcagaaattctacatatagttgatttagatggtgctgttaatggtcaacccatgaatcaagaagttatattttctatcattgcagagtttccggaaaaaagaatacaaataggagggggtataagaagttttgagtcggcatctgagtatttaaatgaagggatagagagagttattatgggaacttctgctgttgaagaacctgatatgttgaaagacttctgtagtaagtttccaaatcgtttgattctaggtattgatgctcttgacggtgttgtaaaaacacaaggctggcttaagggctctggaatttccccctccgagctgatcaaaaaatttgaggacgatcctatcgcagctattatctttactgatatatcaaaggatggaatgatgataggaccctatatcgaggctacagcagacttagcaaaccaacaaa

SEQ ID NO: 290861 - DNA, 517 bp, Unknown
  Bacterial polypeptide expressing nucleotide sequence isolated from the Sargasso Sea
atgatagtaattccagcaatagatttaaaaaatggcaaatgcgttaggttacgagaagggaaaatggaagaggaaaccatattttctgaagatccaatctcaacagcgggctcttggttttctcaaggggcagaaattcttcacatagttgatttagatggtgccattgaaggtaaacccatgaatcaagaaatcatattttctatcatttcagagtttccggaagaaagaatacaaataggaggaggtatcagaagttttgattcggcagcggagtatttaaaagcggggatcgagagggttattatgggcacttctgctgttgaagaacccggcatgttaaaagacttttgcgttaagtacccaaatcgcttggttctaggtattgatgcccttgacggtgtggtaaaaactcagggctggctaaagggatctggaatttctcctgccgagctagtcaaaaaatttgaagacgatcctatcgcagctattatcttcactgatatagcaaaggatg

SEQ ID NO: 290862 - DNA, 745 bp, Unknown
  Bacterial polypeptide expressing nucleotide sequence isolated from the Sargasso Sea
attgaacgtgattattccagctatagatttaatacaaggtaaaacagtgcggctttatcagggcagctacgataaaaccactgaatatcagcaaactccgttacagctgcgcgatttatatgccgaagctggcgcaggtattttgcatttggtggatttaacaggggcaaaaaatgcagctgaccgccagcttgaactattaacgaccttaatgaaaaacgctccgctgccagtacaagtaggtggcggtgttcgtactgccgctgatgtggagcagttattagcagctggcgccagccgcgtagtcgtaggtagtgtggctattcgtgagccagagacagtacaaggctggctgcgtacttatggcggcgacaagatagttctggcgcttgatgtggctattaatgccaaaggtgacaaaactctgcccagccacggctggattgaagagtccactattacccttgagcaggtgttggatggttttattgctgctggcgctaaacatgtactgtgcaccgacatcagtaaagacggtactttacagggccctaatgtcgccttatatgccgaactggtacagaagtatccgcaaattcagtggcaagcctctggtggtgttggctctttggcagatatcaaagccttaaaacccactggtgtggccggagtgattttaggccgggccttgctggaaggtaagttcactgttgaggaggccatccaatgctggcaagacgcataa

SEQ ID NO: 290863 - DNA, 721 bp, Unknown
  Bacterial polypeptide expressing nucleotide sequence isolated from the Sargasso Sea
atgctgctgatacccgcaatcgatttgaaacaggggaaatgcgtccgtcttcttcagggtcaggaagaggagcaaaccgtttactctgatgatccagtaagtcaggcactggaatttcagaaagcaggagcccaccggctccatttggttgatcttgatggtgcattccgggggcgcggagaaaatcatgaaaccatcgggaagatcatctccgcgttgaacattccggttcaggttgggggcgggatccgcacacctgaggatgttgaaaccaaactcaaattgggtgctgattctgtgatcattgggacgatggcagtgaaaaaccctgagcattttgaacaaactctggaaactcatgggggtgattcagtccttttggggattgatgcaagaaaccgccgggtggcagtggaaggctggaaggaaggaactgatctggaagatgttgaatttgcaaaactttggaaatccaagggagtgaaaagggtgatctttaccgacattgccagggacgggatgttgagtggccctaatctggaagcccttgaggattttacaacccgttcaggtctgaatgttacggcgtccggaggagtttcttcgatcgaggacctgaaaaatcttcgtcgacttgaaacatcaggagtcgatcaggtcatcgtcggcaaggctatttacgacggacggatcaacctcaaagaggcgcttgagtgttagc

SEQ ID NO: 290864 - DNA, 730 bp, Unknown
  Bacterial polypeptide expressing nucleotide sequence isolated from the Sargasso Sea
tatgatcgttatacctgctattgatttaaaagacggaaaatgtgtacgtctaaaagaaggaaaaatggacgaggttactattttttctgaagatcctcttcgtacctctgaagtttggtttgcacaaggagctgaagttcttcatatagttgacttagatggtgctgttaaaggaaggcctctaaacgatagatatatattatccatttcggagaagtttcctgacaaacatatccaagttggaggaggcatcagggatttcaattctgcttcaggttacatagaaaaaggaatttcaagagtcataatgggaacagccgcagtgagagatcctgaaatgttaaaagaattttgtaatgtgtatccaaataaattaattctaggtgtagattgtctggatggttacgtcaaaactgatgggtggctcgaatctagtaaattgaaaccagaagaattaatcgagaaattcgaggatatgaagcttgcaggactgatttatacagacatttctagagatgggatgatgactggacctaatattgaatctactttgtcactatgtgacaagactgacttacctataattgcttctggaggagtttctagcttagagcatatcagggagttatcttcttcttccagaatttatggtgtaatttgtggaagagctttatatgaagaaaagttcaccttagaggaagccataaaagtagcaaatcaatcaaaatga

SEQ ID NO: 290865 - DNA, 727 bp, Unknown
  Bacterial polypeptide expressing nucleotide sequence isolated from the Sargasso Sea
atgatcttttttcctgcaatagacttaaaagatggaaaatgcgttagattaaaacaaggcgatattttaaaatctacgatttttgattcagacccagtagcgagggcagaatcatttcatgatgcaggatgttcttggctacatttggtcgatttaaatggagcatttgaagggaagcctataaatcatcagatagtagaaaaaataataaagagtgttgatataaaaattcaactaggaggaggagttagaaatttcgatactattgatttttggatgaaagcgggtattaaaagactaattataggaacaatggctttaaaaaagcctgagctagttattgaagcatgcgaaaaatacccaggaaaaatcgccttaggcatagatgttagagatggcaaaatagcgacggaaggctgggttgagcagtctaaaatttcggctgtagatttagttaaaaaatttgaagacgtagatgtgtctgcaattatatatactgatattagcagagacggcattttaatgggcccagcactagaagagacattaaaattttcagataaaactaatattccaattataatatcaggaggagtttcttcagagaaagatgttatagaaattaagaaaagagcaaatgataaaatcttaggcgttataagtggccgagccatatatgataatcgattaaatattcatgcttgtaataagatattaggtaattaat

SEQ ID NO: 290866 - DNA, 739 bp, Unknown
  Bacterial polypeptide expressing nucleotide sequence isolated from the Sargasso Sea
gatgatcattccagcaattgatttaattgatggcaaagtagttaggctctaccaaggggattatgggcagcagaccaccttcgatttaagcccactggcccagttgcaatcctatcaagaccaaggggcaaactggctgcatatcgtggatttaactggcgccaaagatcctgctaaacgccaaacagctttgattgccaagctgacagcgggacttaacgccaatattcaggtgggcggcggggtccgtactgaagaacaagtcgccgagttattatcccttggggttaaacgcgtggtgataggctcgctcgccgtcaaagagcccgagttagtcaaaggctggtttaacaagtttggcagcgaggcaatttgcctcgcactggatgtgaatatcaatcagagcggcgagaaaatcgtcgcggtttctggctggcaaagcggtggaggtaagagtttagaatctatcgttgaagactttagccaagtgggacttaaagatgcgctagtaactgacatcagccgtgatggcaccctcacaggcgccaataccgcactctaccgtgagctatccagccgctatcccgatatcgcgtggcaagcctctggcggcattgccacccttgaggatgttgccgccgtcagagactgtggtgctgcggggatcattatcggtaaagctttacttatcaatcagtttaatgtggcggaggcaatccaatgctggccaaacgaatag

SEQ ID NO: 290867 - DNA, 739 bp, Unknown
  Bacterial polypeptide expressing nucleotide sequence isolated from the Sargasso Sea
atgattattccagcgattgatcttattgacggacgcgtagtacgcctttatcaaggcgactacgagcagaaaacccaatacgaactggacccaatagacgtggttcacgactatgccgaccaaggtgcaacctggctgcacattgttgacctaacaggcgctaaagacaccagtaaacgccagctttcccttatcaagtctatggtggacaccaagcgcatgcagtttcaagcaggcggcggtatccgtagtgaagaagaagtggcgcaattactagaaacgggcgtaagccgcgtagtgattggttctttggcggtaaaacaacccgagcttgtgaagtcttgggtagaaaaatacggcccagagcacattgtattggcccttgatatcaatattagcgacagcggtgaaaagcttattgctacccacggttggcaagagaattctggcgtagcccttgaaggcttgcttgaagacttcgctacagtaggcgcaaagcatgtgctgtgtaccgacattagccgcgacggcacgctacaaggtgcgaacactgagctgtatcaagaaatggcagcccgtttcccacacgttagctggcaagcgtctggcggtattggcagcatcgctgatatcgaagcgctaaaacccacaaacgttggcggcgttattcttgggcgcgcactacttgaaggtaagtttacggtgaaggaggctatcgcatgctggcaaaacgcataat

SEQ ID NO: 290868 - DNA, 220 bp, Unknown
  Bacterial polypeptide expressing nucleotide sequence isolated from the Sargasso Sea
catgctgctcatccccgccatcgacctcaaagacggccactgcgtacgcctcaagcaaggcgatatggaccaatccaccacctttggtgaagaccctgccgccatggcgcgcaaatgggtggatgccggcgcacgccgcctgcatctggtggacctgaacggtgcgtttgcggggcgtgcccaagaactacagcgccatcaagtccatcctgaaagaggt

SEQ ID NO: 290869 - DNA, 717 bp, Unknown
  Bacterial polypeptide expressing nucleotide sequence isolated from the Sargasso Sea
ttattgacggacacgtagtacgcttatatcaaggtgactacgagcaaaaaacccaatacgaactggaccctgtagaagtggttcacgactatgccgaccaaggcgcaacctggctacacattgttgaccttactggcgctaaagacaccagcaaacgtcagctagagttgattaaatccatggtggataccaagcgcatgcagtttcaagccggcggcggtattcgcagtgaagaagaagttgcgcagctgcttgaaaccggtgtgagccgcgtagtaattggctcgctagcggtaaaacagccagaacttgtaaagtcttgggtagagaaatatggccctgagcgcattgtgctggcccttgatatcaatattaacgaaagcggtgaaaagcttattgcgacgcacggctggcaggaaaactcaggcgtagcccttgaaggcttgcttgaagacttcgctacagttggcgcaaagcatgtgctatgtactgacattagccgcgacggtacgctacaaggcgcgaacacagagttataccaagagatggcggcgcgttttcctaatgtaagctggcaagcttctggtggtattggcagcattaacgacatcgaagcacttaagcccactaacgttggtggcgtaattttaggtcgcgccttacttgaaggtaagtttaccgtgaaggaggctatcgcatgctggcaaagcgcataat

SEQ ID NO: 290870 - DNA, 739 bp, Unknown
  Bacterial polypeptide expressing nucleotide sequence isolated from the Sargasso Sea
gatgatcattccagcaattgatttaattgatggccaggtagttagactctaccaaggggattatgggcagcagaccaccttcgatttaagtccgctggcccagttgcaatcctaccaaggccaaggggcaagctggctgcatattgtagatttaactggcgcgaaagatcctacaaaacgccaaacggctttgattgctaagctgacagcggggctaagcgccaatattcaagtgggcggcgggatccgcactgaagagcaagtcgccgagttattatcccttggggttaaacgcgtggtgataggctcactcgccgtcaaagagccagagctagtcaaaggctggtttaacaagtttggcagcgaggcaatttgcctcgcactggatgtcaatattaatcagaacggtgagaaaatcgtcgcggtttctggctggcaaagcggtggcggtaagagtctagaatctatcgtcgaggactttagccaagtgggacttaaacatgcgctggtgactgacatcagtcgcgatggcaccctcactggcgccaatactgaactctaccgtgagctatccagccgctatcccaatatcgcttggcaagcctcgggcggcattgccacccttgaggatgttgccgccgtccgagacagtggcgccgcggggatcattatcggtaaagctttacttatcaatcagtttaatgtggcggaggcaatccaatgctggccaaacgaatag

SEQ ID NO: 290871 - DNA, 763 bp, Unknown
  Bacterial polypeptide expressing nucleotide sequence isolated from the Sargasso Sea
cctaattccagcaattgatttaatgaatggtaagtgtgtgaggctttttaaaggcgactttaataaaagaaaagacttcaccaaagagcctcatgagcaagcgaaattttgggaaagcgaaggggcaaaatatatacatatagttgatttggatgctgcaaaatctggatctccaacaaacgatgaatcaataaaaaagattgcaaaaatagttaacataccaattcaaataggtggggggataaggtctcaagaaaggatagagcaattattttcttatggtattgagaaagttatcatgggaacctctgcaatagaaaataaagagctagttaaagacttatcaaataaatttcctggaaggataattgttgggatagatgcaaaagatggaaaagttagtacaagggggtggcttgagcaatctaatatttttgccacagatctagtaaaggagttttcttcatttaaaattgctagttttattgttacagatataaatacagatgggacgttagaagggacaaatgaagaattcataaaaagcatacttgaaattacagatattccagtaatagcctcaggaggtgttggttcaatttctgatttattatcgttagtaaaatttgaaaactctggactctttggagtaattgtaggtaaagctctttatgaaaataaattcacgatcaacgaagctaataatgtattgtcatcagagagattaaatgactttgatttaaacagaaattactacgcctaa

SEQ ID NO: 290872 - DNA, 754 bp, Unknown
  Bacterial polypeptide expressing nucleotide sequence isolated from the Sargasso Sea
tatgctgctgattcccgccatcgacctgaaagatggtcagtgtgtacgcctcaaacagggcgatatggaccaggcgacgatattttccgaggaaccggcggcaatggcccggcattgggtcgaccgcggcgcccgccgtctgcatcttgtcgatctgaatggcgcattcgccggcaagccgaaaaacgaagacgcgattcgcgcgatcatcgaggaagtgggtggcgagattcccgtccagctgggcggcggtatccgcgacctgaacacgatcgagcgctatctggacgacggtttgtcctacgtcatcatcggcacggctgcggtgaagaatccgggcttcctgcaggatgcctgcacggctttcggcggccacatcatcgtcgggctggatgcaaaagacggcaaggtggccaccgacggctggagcaagctgaccggccatgaagtggccgatctggcgcgcaagttcgaggattatggctgcgagtcgatcatctacacggacatcggccgcgacggcatgctgcagggcatcaacatcgaagccacggttcgtctggcgcgcgcggtgaagattccggtgatcgcgagcggcggcctgtcgaatctcacggacatcgaatcgctatgcgaagtcgaggacgagggcatcgaaggcgtgatctgcggccgggcaatctactcgggcgatctggatttcgcggcggcgcaaaccctcgcggaccggctgcgcgagtcggacgacgcttaa

SEQ ID NO: 290873 - DNA, 745 bp, Unknown
  Bacterial polypeptide expressing nucleotide sequence isolated from the Sargasso Sea
gatgattattccagccattgatctgattaacggccaagtcgtgaggctctatcagggcgactacggtcagaagaccgcctacagcgacagcccgcaggcccgcttcgacgaatatgtctcccagggggcggtgcaactgcacctggtggaccttgatggtgccaaggatgccaaggcgcgccagctccctctcatcgcccagctgctgtcggccaccgaagcaccggtgcaggtggggggcggcgtgcgcagcgagcaggatgtggcagacctcttggccgccggctccagccgggtggtgattggctccaccgccgtcaaatcgccggctctggtgaccagctggatggagaaatacggccccgagcgcatcgtgctggcactggacgtcaacattgatgcccagggcaatcgccatatcgcggtggccggctggcaggagaacagcggggtgaccatcgaagcgttgatcgagcgcttcctccctgccggtctcaagcacgtgctctgcaccgacatcagccgtgatggcaccctggctggcaccaacgtcgagctctaccgggatctctgcgcccgctacccgagcgtcggttttcaggcctccggcggtattggcggcatcgaagacatcgaggcgctcaagggctcaggggtcaaggggatcatccttggccgcgccctgctggagggcaagttctcggtaggggatgccatcgcctgctggggaaatggcagcctgtaa

SEQ ID NO: 290874 - DNA, 240 bp, Unknown
  Bacterial polypeptide expressing nucleotide sequence isolated from the Sargasso Sea
gatgctgattatccccgctatcgatctcaaggacggcgcttgtgtccgcctgcgccaaggccgcatggaagattccaccgtgttctccgatgacccggtgagcatggctgccaaatgggtagaagggggctgccgtcgtctgcatctggtggacctgaacggcgccttcgaaggccagccggtcaatggcgaggtggtcaccgccatcgccaagcgctacccgacactgccgatccagat

SEQ ID NO: 290875 - DNA, 757 bp, Unknown
  Bacterial polypeptide expressing nucleotide sequence isolated from the Sargasso Sea
tatgttgctgattccggccatcgacctcaaagacggtcagtgtgtgcgcctcaaacagggcgatatggaccaggccacgattttctccgaggacccggcggcgatggcccgcaagtgggtcgatctcggcgcccggcggctccatctcgtcgacctgaacggcgcattcgccggcaagccgaagaacctcgaggcgatcgaagcgatcctcgacgaagtcggcgatgaaatccccgtacagctcggcggcggcatccgcagcctcgagacgatcgagaagtatctcgacgccggcctgtcctacgtgatcatcggtacggccgccgtgaagaaccccggcttcctgcaggacgcgtgcaccgcgttctccggcaacatcatcgtcggcctggacgcgaaggacggcaaggtcgcgaccgacggctggagcaagctgaccggccacgaagtgatcgatctcgcgcgcaagttcgaggactacggcgtcgaatcgatcgtctacacggacatcggccgcgacgggatgctgcagggcatcaacatcgaggcgaccgtgaagctcgcgcaggcggtcggcatcccggtgatcgccagcggcggcctgtcgaacctcacggacatcgagaacctgtgcgaagtcgaagagcacggcgtcgaaggcgtgatctgcggccgtgcgatctactccggcgatctcgatttcgcggccgcgcaaaagcgcgcggacgaactgaacggcgaactcgacaacgcgtaa

SEQ ID NO: 290876 - DNA, 139 bp, Unknown
  Bacterial polypeptide expressing nucleotide sequence isolated from the Sargasso Sea
gaaattgcaattgcgtcacccagttggtctattcacagtggggtagggacgacaaattatagctttatttgggctatgggcggggaaaaccaagagtttgatgacatggaccacatcgaaatctcttctttacgttaag

SEQ ID NO: 290877 - DNA, 682 bp, Unknown
  Bacterial polypeptide expressing nucleotide sequence isolated from the Sargasso Sea
cggcccggtctcgctgccgcggcagaccgaaccttcctcggccgccggccatgccttcctggagcgccgcgagctgggcgtgatcaacgtcggcagcggcagcggcaccgtcaccgtggacggtaccgtctacaccctcgggccgaaggacggcctgtacgtggcgatgggcagcgaagaggtggcgttcgcgtccgacgatgccgccaacccggcgcagttctacctggcctcgaccccggcgcatgcgcgcttcgagaccaaggcgctgtcgatcaaggacgcggtggccctggaccgcggtgcgctggaaaccagcaacgaacgcaccatttaccagtacatcgtgccggccacctgccagtcctcgcagctgctgctgggcctgaccgtgctcaagccgggcagcgtctggaacacgatgccgccgcatctgcacgaccgccgcagcgaagtgtatttctacttcgatctgggccagaacgaccgcgtgtaccacttcatgggcgagccggacgcgcagcgccacatcgtcatccagaacaacgaagcggtggtgtccccgccgtggtcgatccacatgggcgccggcaccagcaactacgccttcatctgggcgatgggcggcgaaaacctggactacaccgacatgcacgtgctggacatctgccagctcaagtga

SEQ ID NO: 290878 - DNA, 790 bp, Unknown
  Bacterial polypeptide expressing nucleotide sequence isolated from the Sargasso Sea
atgacaaacgcagagcttgaagagggttttactattccagagttgtttgttgtggacgaaattaccttaacttataccgacgtcgatcgtgctgtcgttagtggtgttatgccagtcagcaaaaccattgacctgccgacccataaagagcttgcatcggcttacttttgcgagcgtagagaagtcggtgtcataaatatcggtgacgagggggtggtaacagtagacggcgagaccttcaatatgacaaataaagatagtttgtatattggtcgaggtagcgagaaggtcagctttgcgagtaaggacggaagcacgccagccaaattttatttagtcagctatccagcccacactgcttatccaacgaaactagtcgcacaagagaacgcgaacaaactcgctctaggcgagcaagatcagtcaaataaacgcacaatttatcaaagcctatgccctaaaaccctcgaatcatgtcagttggtaatggggatcactgaaattgaatctggcaatgtctggaatactaagccaccacatactcatgctcgacgtacggaagtttacatgtattttgatatgccctcacacgagcgtgtttttcacttcatgggcgagccgtcaaatgtgcgcgctgttgtgatgaaacctgagacggcaatcgcctctccaacgtggtcaattcatagcggcgtgggctcaaccaactacaccttcatttgggcgatgggcggcgagaaccaagagtttgacgatatggatcacttaacacttgcagatattagctagc

SEQ ID NO: 290879 - DNA, 664 bp, Unknown
  Bacterial polypeptide expressing nucleotide sequence isolated from the Sargasso Sea
gtgggtggcgaagtcggcaagcagctgggcgtaacctatttcctcgaacgtcgtgaactgggtgtgatcaatatcggcggcccgggcacgattaccgttgacggccagtgctatgaaattggccatcgcgacgcgctgtacgtcgggaaaggggcaaaagaagtggtattcgccagtattgatacgacaaaaccggcgaagttttactacaactgcgcgccggcccacacgacttacccaactaagaaagtcacgcctgcagacgttgcgccagtgacgctgggcgataacctcaccagtaaccgtcgtaccatcaacaaatactttgtgccggatgttctggaaacctgccagttgagcatgggtctgactgaactggcaccgggtaacctgtggaacaccatgccgtgtcatacccatgaacgtcgtatggaagtctatttctacttcaatatggaagaagatacctgcgtattccacatgatggggcagcctcaggaaacgcgtcatattgtgatgcacaacgagcaggcggtgatttctccaagctggtctattcactccggtgtcggcacaaaagcgtatacgttcatttggggcatggtcggcgaaaaccaggtctttgatgatatggaccatgttgcagtaaaagatctgcgctagt

SEQ ID NO: 290880 - DNA, 698 bp, Unknown
  Bacterial polypeptide expressing nucleotide sequence isolated from the Sargasso Sea
aatggaagtgagacagagcatcaatagcgagtacgcgaagacgctggataccgcgggattgcgcaagcagtttctcgttgagcaggtgttcgaacgcgacgcgctgcaactcacctacagtcacatcgaccgcatcatcgtcggcggcgtatggccggcctcgcgcgcggtcgaactgcccgcctcgcttggcaaggcaatcggcgtcaactacttgctggagcgccgcgaactcggcgcgatcaacatcggcggcgatggctgggtcgacgtgaacggcacgcgccacacggtgcgcaatgaagaagccatctacatcggcaagggtgcgcaggccgttgcattcggcagcgacgatgcggcgcgtcccgcgaagttctacctgaactgcgcgcccgcgcacgagtcgtatcccacccgcacgatctcactcgcgcaggcctcgcccgaaacgctcggcgcgcccgaaacaagcaaccgccgcaccatctacaagttcatcgtccccgaggtattgccgacctgccaactctcgatgggcatgaccaaactcgagccgggcaacctctggaacacgatgccgtgccacacgcacgagcgccgcatggaggtgtatttctatttcaacatcgccgacgacgcagccgttttccacatgatgggcgagccgagcgagacacggcacattctcgtgcaca

SEQ ID NO: 290881 - DNA, 280 bp, Unknown
  Bacterial polypeptide expressing nucleotide sequence isolated from the Sargasso Sea
catgctgttgcaccgtacccgtatcaagctgtgtggcctgacccagcctgccgatgtcgatcacgccgtcgcaatcggcgccgatgcgatcgggctcgttttctatccgcccagtccgcgttacgtcaccatcgagcgggcggcagagctggcgcatcgcgccggtccgttcgtcaccgtgacgggcctgttcgtcaacgccagtgccgatgatgtggcacgcgtgctcgaccaagtgccgctgacgttgcttcagttccacggtgatgagccggcggag

SEQ ID NO: 290882 - DNA, 658 bp, Unknown
  Bacterial polypeptide expressing nucleotide sequence isolated from the Sargasso Sea
atgaccgtaccccgggtcaaaatctgcggcattactcgaattgaagatggtttagcggcggcgaacgccggtgccgatgccattggcctagttttttatgggcccagccctcgtgctgttactgctcgacaagcagcagaaatctgtgccagcttgccgccgtttgttaccacggtggcgctttttgttgatgcgtctcgtgctgagattgaaggggtgctggccagagtgccggtggacttattgcagttccatggaaatgaaaatccgcagttttgcgacagttttaaccgaccatggatcaaggcagttcgaatgaaggatgatgtggatctccaccattatgctcagatttaccgtaatgcggcaggtttgctgatcgacagttatgttgctggcgtgccgggcgggactggggagacgtttaactggggcagggtacctaaaaccttgcctctgcctgtagtgctggccggtggcctgcacccagggaatgtggctgcagctgtgacacaggttcagccatgggcagtggatgtgagtggtggtgttgaacagaagaatgttcagggtggccgcagcggtggcatcaaagatgcctctgccatccgtgtctttattaatagtgtcaaaacacgaggagtagctggtgtctgaa

SEQ ID NO: 290883 - DNA, 614 bp, Unknown
  Bacterial polypeptide expressing nucleotide sequence isolated from the Sargasso Sea
taaagacagtgtagaggtagcttttaaacttaatgtagattatgttggacttgtttttttcccattatcaccaagaaatatttcgttggataaagcacaaaaactcatcaattttaaaaatagtaatactaaaattgttgcacttactgtaaatgcaaaagattgttttcttaataaagttattaatgaaattaaacctgattattttcagtttcatggttctgaaagtcctaataggtgtaaggaaattcgagataaatataacatcaaaataattaaggcattggaagttagagacatttgttcactacaaaatgacattaataaatataaaagatttgttgatgaatttattttagatgctccaaaaagttttttgcctggaggtaatggagaaaagttcgattgggaacttcttaaaaataatgagattaaagtagattggctcattgcaggaggtttaaatatttcaaatataaaaaatgctttgttaattactaaagctaaaggtgtagatgtttcttctggggtagaaatttcaaaagggaaaaaatcacctaaattaatagaagaatttgtgttaaagtgtaaagatattgagaaggttttttaaa

SEQ ID NO: 290884 - DNA, 617 bp, Unknown
  Bacterial polypeptide expressing nucleotide sequence isolated from the Sargasso Sea
aatgtcaaaatttgctggattaaataataaagaaactgtcgaagttgcggtgaaagctggagcatctcatcttggttttattttttatccaccttccccacgctctttaacaccaaaagaggccggatatatagcatctacaacaccaaatcatatcaagcgggtagctgtaatagtggatgcgcgagatgatttaataaacgacatcattcaaagcttatcaccacatattttacagctgcatgggtccgaaacaactaacagaatccaagaaatcaaagaaaagttcaaactacccatcatgaaagcaattaaagttgctaattttgatgatattaaatctagccaacaatataatgatagtagcgatttccttcttttcgatgccaaacctccatcgactagtataaattcattgcccgggggaaacggaataagtttcgattgggctctccttagatcagtgaaaattggaaaaccttggtttctttcgggtggaatacacattgataatgtgcagaaagcaataaaaacaactgggaacagatcaatagatatatcttctggtgtagaagaccaacccggtgttaaaagctcccaaaagattgaaatgttta

SEQ ID NO: 290885 - DNA, 736 bp, Unknown
  Bacterial polypeptide expressing nucleotide sequence isolated from the Sargasso Sea
atggatcgagcaagcgaaaccatgaaatcaaccgaaaacctggcggccgaagctcacgcgggcgcatcgcaacacgccgtgccgcatcgcacgcgtatcaagctgtgcggcctgtcgaagccggaagacgtggcgtacgccatcgacctcggcgccgacgcgatcggcctcgtgttttatccgccgagcgcgcgctcggtgagcgtcgcgcaggccgtcgaactggtgcacgatgtgccgccgttcgtgtcggtagtcggcttattcgtgaacccgacgcaggactggattcgcgaagtcgtcagtaacgtcgggctcacgctgctgcagttccacggcgacgaaaccgtcgcgcaatgtgaatcgctcgccagtcttgcgggtttgccttggttgcgtgctttgcgggttgcggcggatactcaaccggcagatttggtaaaatcagcgcttaactattcagcagccaatggccttctgttcgacacccatgtcgaaggctatggcggcggcgggaaggttttcgattggtcacttattccagcagagctcgcgcgtcgggccgttttgagtggtgggttgaacgcgcaaaacgtcagtgatgcgatccatcgcgtgcgcccgtacgcggtcgatgtctcgagcggcatcgaagtaccgggcgcccggggcgtgaaagatcacgcccggatggcggcgttcgtacgcgcagtgcgcgcggcggacgctgaatgat

SEQ ID NO: 290886 - DNA, 575 bp, Unknown
  Bacterial polypeptide expressing nucleotide sequence isolated from the Sargasso Sea
catgcctattagagcgactcattcaggttgttggtgtaaaatatgcggggtaacgtctgcagatgaagccgcgtcgatagccgatttaggggcggattcaataggtttgaatttttacagccaaagcccgcgttatttgcttaaaaaagatgctgccgagatcgcagcttcggtcaaaaactgctcaataattgcgctattcgtcaatccaagtgtcgaagaggtagaaagtatcatcagtgatattgagattgatggactgcaatttcacggagacgaggattcagagttttgcgaatccttcggtgtagattatatcaaggcgataagcatgaaagataattatagcccaaaggaacttgaagaatatcaccctaatgcctgggcactattgctcgacagctacgttaagggtcttccaggaggcaccggagaaatcttcgattggaataactggcctgttgcaaatgagcgaaaattaatcttagcagggggactcactcccgagaacgttgcatcggggatcaaagcaactatgccgtatggagtcgatgtgagcagtggggtggaaggtg

SEQ ID NO: 290887 - DNA, 625 bp, Unknown
  Bacterial polypeptide expressing nucleotide sequence isolated from the Sargasso Sea
tatgactcactttataaaaatttgcggtattacctcaaaagaagatgctttgatggttgaagaagaaggggcagatgcattaggttttataatgcataaacagagccataggtatatagagatagagaaagttttggatattattggtggcttgaagggtgaactggatatatttttggtatttgtgaacaaaaaggcagagtttgttgaaaattgcttaaatgaaatacctcatgcaataccacaatttcatggtgatgaagatccccaattttgtgaaaaatttaataaagattttgtcaaggccgttagggttaattcaaatacagattttgaaaatataaattacagttatgggaaggccaaaatgctgcttttggattcacatgaagaaggttcctatggaggaacaggaaaacctttcgattgggatttaattagtaatcaattaaaaattcctttcttgttagctggaggaatagatacaataaacgttgaaaaggcccttgcttcggtatcttgtcgtggaatagacgtaagttctggagtagagagcataccaggtaagaaagatccaaataaggttagggatttgataaaaaaagtaaggagatttaatgtctga

SEQ ID NO: 290888 - DNA, 658 bp, Unknown
  Bacterial polypeptide expressing nucleotide sequence isolated from the Sargasso Sea
ctgccgccgcgcacccgcatcaagctgtgcgggttgtcgcgtcccgaggacgtgctgcacgcggcggcgctcggcgccgatgcgatcggcctcgtgttctatccgaagagcccgcgcgcggtgtcgatcgcgcaggcggcggagcttgcacgcctcgcgccgccgttcgtgtcggtggtcgggctgttcgtgaacgcgaccgaagccgagatcgaggccgtggtgcgcgacgtgccgctcacgctgctgcagttccatggcgacgagacgcccgagcagtgcgatgcgctcggccgcgcggcgcgcctgccgtggctgcgcgcggtgcgcgtgggcccctcgacgcaatcggccgatttggtagaatcgggtcttcattattcgaaagcgcgcggcctcctgttcgacaccctggtgccggattacggtggtagcggcaaggtcttcgattggtctcttattcccgcagagctcgcgcatcgggccgttttgagtggtggcttgagcgcgcaaaacgtcggtgatgcgatccgccagttgcgcccgtttgctgtcgatgtctcgagtggcatcgaagtggagggcgcgaagggcgtgaaggatcacgcccggatggcggcgttcgtacgcgcggtgcgcgaagcggacgccgggtgat

SEQ ID NO: 290889 - DNA, 625 bp, Unknown
  Bacterial polypeptide expressing nucleotide sequence isolated from the Sargasso Sea
atgaatcattttataaagatttgcggaattacttctaaagaagacgcactgatggttgaagcagaaggagcggatgctataggttttatactgcatgaagaaagtgataggtttatagagatagaaaaagttgcagatattgttgagtgcctgaacaatgatctagatatctttctagtatttgttaacaaagcagaagagtttgtagcaaattgcttagataaaattccccgtgcaataccgcaatttcatggtgatgaagacgcagaattttgcagtaaattcagtgaagattttgttaaggctgtcagggttaatgcggagacagactttgataatataaataattgctttgcgggggcaaaattgcttcttttagactcatatgaagaaggatcttatggaggaacaggtaaatcttttgattggggcttaattggcactcagttgaaaattcctttcttattagctggaggaatagatacaataaatgttgaaaaggcactttcttcggtatcttgcaaaggagtagacgtaagttccggagtagagagtgcaccaggtaaaaaggatccaattaaggttagggatttgataaaaaaagtcaggagatttaatgtctgaa

SEQ ID NO: 290890 - DNA, 484 bp, Unknown
  Bacterial polypeptide expressing nucleotide sequence isolated from the Sargasso Sea
atgaagccaaaattaaaaatatgcggtatgaaaaatctcgaaaatattcaagaaatctcaaccttagaacctgattttataggtttcattttttgggaaccttcaaaacgatattgcactttaaattcattgccaattctaccaaaattaattaaaaaagttggtgtttttgtaaatgcttattactatgatattttagaaaaagtaaaacaatatgaactagatattgtacaacttcacggaaacgaatcgccaacgctttgcaaagatttaaaagacgaaaaaattacagttattaaagcgttcagcattgatgaagattttgatttttcaattttaaaacgctataaaaatcacgtagatttttttcttttcgatacaaaaagaaaacttcccggcggaaatggaaaaacattcaactggaaagttctagaaaatacaatggtaataaaccatttttttctagtggcggaattggactaaa

SEQ ID NO: 290891 - DNA, 931 bp, Unknown
  Bacterial polypeptide expressing nucleotide sequence isolated from the Sargasso Sea
ggcaacccacaactggccaagatgggcttggaggaacaggcacaggggcacggtgcaattgcctctggattccaagggcaacgccaatggactgatcactttccgaacggtgattttcttgaagcgattctgaatacgtcatttgactggaatggaaaacgatcgccatacattgttgcgacggaaaatgatgcactcaatgcagcaacaatgctttttggtcacctgctcacgaattctgcccaaatatttgctgaccttcggacatattggagcccggaggctgttgcaacggcttgtgatggctacacacttcagggcgatgctgctgatggtcttctccaccttatcaattctggtcccgctgcactcgatggtaccgggcaacaggtgagtcaagacggtaggccaaccatgaagcccttctgggacattacggatgatgaagtgacgaagtgcctcaaggcaacaacgtggcacccatcaataacggaatattttcctggtggtggtttgagtactcgatatcgaaccttggggcagatgccggcaacaatgactcgaattaatcttgtggcaggtctcgggccagcgattcagattgctgaggggcagacggtcgaacttccagattcggtgcacgacgttcttgaccaacgtacgaatccaacatggccaactacctggtttgcgccaaacattacgggacgcggggcatttacttcgacgtatgaggtgatgaatcattggggggcaaatcactgtgtgatgacagcaggccacgttggacacctgtttattacattggcatctattcttcgaattcctgtttacatgcataatgtgtcggacgaacgagtttttcgtccaagtgcgtggaatgcttttggcaccgatggttctcgaaggagcggactttcgtgcctgtgaa

SEQ ID NO: 290892 - DNA, 972 bp, Unknown
  Bacterial polypeptide expressing nucleotide sequence isolated from the Sargasso Sea
gcattcgcgacatgatgcagggtaaccagaagctggccgacaaaggtcggggtgaagagtcgctgggatacaacgcgatggccgcaggcttccagggccagcgtcactggaccgatcaatatccgaatggtgataccgccgaagcgctgctcaacagctcctttgactggaatggcatacgcgaaccgttcgttgtcgccaccgaaaacgacagcctgaacggcgtggcgatgctgttcggccatcaactcaccggcacggcgcaggtctttgccgatgtgcgcacctactggtcgccagaagcggtggagcgtgtcacgggtaaaccgctgaccggccttgctgagcacggcattattcacctgattaactccggctcggcagcactggacggctcctgcaaacagcgcgactacgcagggaaaccgaccatgaaaccgcactgggaaatctcgcaaaaagaggtcgatgattgcctggcggcaaccgaatggtgtccggctattcacgaatacttccgcggcggcggctactcctctcgcttcctgaccgagggcggcgtgccgttcaccatgactcgcatcaacatcatcaagggcctggggccggtactgcaaatcgcagaaggctggagcgtggaattaccggaagatatgcatgaccagctcgatgcgcgcaccaactctacctggccgaccacctggtttgccccgcgcttaaccggtaaaggcccgttcagcgatgtctattcggttatggctaactggggcgcgaaccacggagtgctgacaattggtcacgtgggcgcagactttatcactctggccgccatgctgcgtatcccggtttgcatgcacaacgtggaagacgagaaaatttaccgtccttcagcctgggcagcccacggaatggatacggaaggccaggattatcgtgcctgccagaactacggtccgctgtataagcgttaaa

SEQ ID NO: 290893 - DNA, 487 bp, Unknown
  Bacterial polypeptide expressing nucleotide sequence isolated from the Sargasso Sea
cctggaggcgggcaacaacctggtgctgggcgcccacatgctggaagtctgcccctccatcgccgccgataaacccgtgctggatgcccagcatctgggcataggcaagaaggccgacccggcccgcctgctgttcgcggcccccgccggcaaggcggtcaacgccagcctgatcgatctcggcaaccgtttccgcctggtggtcaatcagctcgaggtggtggacttgccagaggccatgccgaaactgccggtggccagcgccctgtggcagcccatgccggacctgcagaccagcgccgaggcctggatcctggccggagcagcccaccattcggtgttcacccagtcggtggatatcgagcagctgcgcaccttcgccgacctcatgggcatcgagtgcgtggtgattgacgagcacacccgcatccccgagctcaagcagaccctgcagtggaacgaggtctactacaagctctgccactga

SEQ ID NO: 290894 - DNA, 352 bp, Unknown
  Bacterial polypeptide expressing nucleotide sequence isolated from the Sargasso Sea
aacacaaaaaccggcccggccgtggttgccagcctgatcgatctcggcgatcgctatcgtctgctggttaactgcatcgacaccgtaccaaccccacatgagctgccgaaactgcctgtggcaaacgcactgtggaaagcccagccggatctgccaaccgcatctgaagcctggatccttgccggaggcgcgcaccacactgtcttcagccacgcgctggatctgaacgatatgcgccagttcgcagaaatgcacgatatcgagatcgccgtgatcgacaacgatacccgtctgccagcctttaaagacgcgctgcgctggaacgacgcgtattacggttttaaacgctaag

SEQ ID NO: 290895 - DNA, 897 bp, Unknown
  Bacterial polypeptide expressing nucleotide sequence isolated from the Sargasso Sea
ggtctggctgcataccttctcgccggcgaaaatgtggatcaacggcctggcgatcctcaacaaaccactgatgcagttccacacccagtttaacgccgccctgccgtgggacagcattgatatggactttatgaacctgaaccaaaccgcgcacggcggtcgtgagttcggcttcatcggcgcacgtatgcgtcagcagcacgccgtggtcaccggtcactggcaggacaaacaggcacacgaacgcatcggctcctggatgcgacaggccgtgtccaaacaggacactcgccatctgaaagtctgccgttttggcgacaacatgcgcgaagttgcggtcaccgatggcgataaagttgccgcgcagatcaaattcggcttctcggtaaacacctgggccgtgggcgatctggtgcaggtcgtgaacgcaattagcgacggcgaaatcaacgcactaatcgatgagtatgaaagctcttacaccatgacggcggcaacgcaagtccacggtgaaaaacgtcagaacgtcctggaagccgcccgtattgaactggggatgaagcgcttcctggaacagggcggattccacgccttcaccaccacatttgaagatttacacggcctgaaacagctcccgggtctggccgtacagcgtctgatgcagcaaggctatggctttgctggcgaaggcgactggaaaaccgccgctctgcttcgcatcatgaaggtgatgtcaaccggtctgcagggcggcacctcatttatggaggattacacctaccacttcgagaaaggcaacgatctggtacttggttcgcacatgctggaagtgtgcccgtccatcgcggtggaagagaaaccgatcctcgacgtacaacacctcggcattggtggtaa

SEQ ID NO: 290896 - DNA, 790 bp, Unknown
  Bacterial polypeptide expressing nucleotide sequence isolated from the Sargasso Sea
aatgacgatttttgataactatgaagtgtggtttgtgattggtagccagcatctgtatggccctgaaaccctgcgtcaggtaacccaacatgcggagcacgtcgttaacgcactgaatactgaagccaaactgccctgtaagctggtattaaaaccgctgggcacttcccctgacgagattaccgctatctgtcgtgacgctaactacgacgatcgctgtgcagggatggtggtctggctgcataccttctccccggccaaaatgtggattaacggcctgactatcctcaacaaaccgctgatgcagttccacacccagttcaacgccgccctgccgtgggacagcattgatatggactttatgaacctgaaccagactgcgcacggcggtcgtgagttcggcttcatcggcgcacgtatgcgtcagcagcatgccgtggtcaccggccactggcaggataaacaagcgcatgaacgcattggctcctggatgcgccaggccgtgtccaaacaggatactcgccacctgaaagtctgtcgctttggcgacaacatgcgtgaagttgcggtcaccgatggcgataaagtcgctgcgcagatcaagttcggcttctcggtaaacacctgggccgtgggcgatctggtgcaagtagtgaacgcaattagcgacggcgaaatcaacgcgctaatcgatgagtacgaaagcacctacaccatgacggcggcgacgcaagtccatggtgaaaacgtcagaacgtcctggaagcggcccgtattgaactggggatga

SEQ ID NO: 290897 - DNA, 1504 bp, Unknown
  Bacterial polypeptide expressing nucleotide sequence isolated from the Sargasso Sea
tatgaaagccttcaaacaaaaacaagtgtggtttatcacgggttcgcaggatttatacggcccgaaagtattagagcaagttgctaaaaacagtgagcaaattgttcatggctttaatgaatcttccgccatttcgatggaagtggtgtacaagccaaccgtaaaatccccacgggaaattcatgccgtatgccaagcggccaacagcgatgaaaactgtgttggcgtcattctgtggatgcacactttctctcccgccaagatgtggattgctggcctgaatgaattaagcaagccattcatgcatttacatacccagttcaatgccgagctcccttggagcgaaatcaatatgaactacatgaacacccaccaaagtgcccacggttgccgcgaatttggttttatcggcacacgtatgcgtaaagagcgcaaagtggttgtgggtcactggcaatcgagcgatgtacaggcacaaatcgatgattggtgccgcgcagcagcgggttggcacgagagccaaaacctgcgtatcgcccgctttggcgacaacatgcgtcaagtggccgtgaccgaaggcgacaaagttgccgcacaaattcaattcggttacgaagtgcacgcctatagcttaggtgaacttaatgaggcgattgcagccattgccgaaggcgatgtaaccgcacagctcgatcgttacgccagcgaataccaagtgggtaacgaactttttggtgatgaataccaattagaccgtttaagaaaagaagccaagattgaactcggcttaacccaattcttaacccaaggtggatttggtgcctttaccaactgcttcgaaaacctcaccggcatgacaggcttaccgggactcgctacccaacgtctgatggcgaacggtttcggttacggcggcgaaggtgactggaaaacggctgccatggtgcgcattatgaaggtgatgggtcaaggccgtgccggtggtacttcctttatggaagactacacctataactttggggcgactgaccaagttcttggcgcccacatgttagaagtctgcccatcgattgccgcggcaaaaccgcgtttagaagttcaccgccataccattggtgtgcgttgtgacgtgccacgtctgttattcactggtaaagcgggcccagcaatcaacgtatcgactatcgatttaggcaaccgtttccgtatcattctcaatgaattagatacagtgacgccaccacaggatctgcctaacttaccagtcgcgtctgcgctgtgggagcctcgtccgaatttagccgttgccgccgcagcttggatccacgccggtggtgctcaccactcggcctatagtcaagctatcaccacagatcagattgtcgactttgctgaaatggccggtgctgaactggttatcatcgatgccgacactaagatccgcgagtttaagaatgaacttcgccaaaattccgtttattacggtttagcaagagggttataa

SEQ ID NO: 290898 - DNA, 969 bp, Unknown
  Bacterial polypeptide expressing nucleotide sequence isolated from the Sargasso Sea
gatggaattgatgaaacagctggaagtgtggttcctggtcggcagccagcacctgtatggcgccgccaccctgaagcaggtggccgatcacgcccacaccatcaccagccagctcaacgagcgcgccggcctgccggtcaagatcgtgctcaagcccaccggcaccaccctcgacgagataagcgcggtggcccgcgatgccaaccacgatgagcgctgcatcgggctcatggtgtggatgcacaccttctctcccgccaagatgtggatcccggcgctgagccagttgcaaaaacccctgctgcaatttcacacccagttcaaccgggatctgccgtggagcgagatcgacatggacttcatgaacctgaaccagaccgcccacggcggccgtgagttcggtttcatgggggcacgtctgcggctgccgcgcaccgtggtggtcggtcactggcaggaggaagaggcccaccgcaaactgggcaactggatgcgggtcgccgccgccattcacgacagccgccacctcaagatcgcccgctttggcgacaacatgcgcaacgtggcggtcactgagggcgacaagattgaggcccagatccagttcggctatcaggtgaactaccacccggtcggcgacctggtgaaggtgatcgacgccgtgcccgcaagcgacatcgaggcgctgctggccgaatacgaagaaacctacaccctgaccgaggcggtgcaggcgggcggggtgcttcgcgcctccctttatgaggcggcgcgccaggagctggggatgaagaagttcctcaccgacggcggttttggcgccttcaccaccacctttgaagaccttcacggcctgcaccagctgccggggctggcctgtcagcgcctgatgcagcaaggcttcggtttcggggcggagggagactggaagaccgccgccctgctgcgcaccctcaaggtgatgggggc

SEQ ID NO: 290899 - DNA, 1159 bp, Unknown
  Bacterial polypeptide expressing nucleotide sequence isolated from the Sargasso Sea
atgaaagccttcaaacaaaaacaagtgtggtttatcacgggttcgcaggatttatacggcccgaaagtattagagcaagtcgctaaaaacagtgagcaaattgttcatggctttaatgaatcatccgccatttccatcgaagtggtgtataaaccaactgtaaaatccccacgggaaattcacgccgtatgccaagcagccaacagcgatgaaaactgtgttggtgtgatcctgtggatgcacactttctctcctgccaagatgtggattgctggccttaatgaattaagcaagccattcatgcacttacacactcagttcaatgccgagctcccttggagcgaaatcaacatgaactacatgaacacccaccaaagtgctcacggttgccgcgaatttggttttatcggcactcgtatgcgtaaagagcgtaaagtggttgtgggtcactggcaatcgggcgatgtacaggcacaaatcgatgattggtgccgcgcagcggcgggttggcacgagagccaaaacctgcgtatcgcccgctttggtgacaacatgcgtcaagtggccgtgactgaaggcgacaaagttgccgcacaaattcaattcggttacgaagtgcacgcctacagcttaggtgaactcaatgaggcgattgcagccattgccgaaggcgatgtgactgcacagctcgaccgttacgccagcgaataccaagtgggtaacgagctatttggcgatgaataccaattagaccgtttaagaaaagaagccaagattgaacttggcttaactcaattcttaacccaaggtggatttggtgcctttaccaactgcttcgaaaacctcactggcatgacaggattaccaggactggcgacccaacgtctgatggcgaacggtttcggttacggcggcgaaggtgactggaaaacggctgccatggtgcgcatcatgaaggtgatgggtcaaggccgtgccggtggtacttcatttatggaagactacacctataactttggtgcgactgaccaagttctcggcgcccacatggttagaagtgtgcccatcgattgccgctgcaaaaccacgtttagaagttcaccgccacaccattgggtgtggcgttgtgacgtgcccacgtctgttgttcactggtaaa

SEQ ID NO: 290900 - DNA, 397 bp, Unknown
  Bacterial polypeptide expressing nucleotide sequence isolated from the Sargasso Sea
gatacagatcaattcccaaacaatcctttagacttattaatgcctttctatcatattttttctaatgggggttttaaacaagggggtttaaattttgacgctaaaataagaagacagtctattgatccagaagatttattttatgcgcatataggaggaatggatgttgctgctagagctctacttgctgttgaaaaaatgattaatgataaagaaatatcaacatatattgataatcgttataagaaatggaatcaagatcttggtcagtatattcatagcaataaaagtgatttagaatctattgcaaataaggtaattcaagaagatattgagccagatccagaatctggccaacaagaatatttagaaaatgttttaaataaatatatttagt

SEQ ID NO: 290901 - DNA, 539 bp, Unknown
  Bacterial polypeptide expressing nucleotide sequence isolated from the Sargasso Sea
agaaaatgattttaaaattaatatcgaaaataatcatgctacccttgcaggacatacatttgctcatgaaattcaaactgcatataattttaatgctttcggaagtcttgatataaaccaaggggatccacataatggttgggacacggatgaatttttgaacaacatttatgatgctgtacatattatgctcattattttaagtgaaggcggtctaaaatcaggaggaatgaattttgatgcaaaaacgcgtagaagttctaccgatttagaagatattttcataggccatatacatgctatggatacccttgcaagaggacttatgatagcggatgatattttacaaaattctgaataccagaatcttaaaaatcaaagatataaaagctttgatggtaacaaagggctattgttctcagatggaaaattaaaccttgaagaactcgctagtttagcatcaaatcaaaacgaacctagtctaagtagtggtaaacaagaactttttgaatcaattattaacaagcatataaaatagg

SEQ ID NO: 290902 - DNA, 364 bp, Unknown
  Bacterial polypeptide expressing nucleotide sequence isolated from the Sargasso Sea
aattgataatgtcattttattttattttcaaaatggaggattaggtcaaggcggtatgaatttcgatgcaaaaataaggagacaatcaattgatccagaggatctattttatgcacacatcggaggcatggatgtttgtgctaaaacattaatcgctttagaaaaactaattaatgataacgttattccaaaatatattgatgaccgatattctgattggaataatgattttgggaaatttatacatgacaaaaatacaggtttagatcatattcataaaaaagtattagataataacatagaacctaagcctagatctggacaacaagaatatttagaaaacattcttaataaatatttatag

SEQ ID NO: 290903 - DNA, 406 bp, Unknown
  Bacterial polypeptide expressing nucleotide sequence isolated from the Sargasso Sea
tatgacaacaataggaaataaagaattttttaaagggatcaacaaaattgaatttgaaggtaaagactctaaaaatccattagcctttaaatactataacccgaatcaaatagttgcgggcaagacaatgcgagatcattttaagtttgcagttgcttattggcactcattctgtggacaaggtgcagatccatttggagttggtactcaaaattttccatgggataagtctaaagatccttttttagcatcaaaggataaggcagatgcagcatttgagttcatatcgaagatgggatttgattatttctgctttcatgattttgatttaattgaagagtcagatgatttttcagaatctgaagatagattgaactttattacagattacgttcaaacaagatga

SEQ ID NO: 290904 - DNA, 436 bp, Unknown
  Bacterial polypeptide expressing nucleotide sequence isolated from the Sargasso Sea
atgtcaattgtactaggaaataaagaatattttaaggatgttaaaaaaataaaatttgaaggaaaagactctaaaaatcccttttcttatagattttatgatgaaaataaaattgtacttggaaaaaaaatgagtgaacattttaaatttgcagttgcttattggcattcatttgtaaaccctggaaatgacccatctggtattggaactaggttttttccatggtcaaaatcttctgatccttttcaaaacgcttgtgataaaatggatgctgcttttgaatttatttctaagttaggattgaattatttttgctttcatgattttgacttaattgaggaaggatcttctctttctgaatcagaaaaaagattaggaaaaataacaaattatgctaaggaaaagataaaagcatccgatattaatgtgctttggg

SEQ ID NO: 290905 - DNA, 463 bp, Unknown
  Bacterial polypeptide expressing nucleotide sequence isolated from the Sargasso Sea
gacggctgcagccgccggtgcgctgggttcgatctatgcgaacatggggcatccgcatctcggctgggacaccgatcattttcccacggacatctatctgacgactcgaatcatgcggatcgttctggggatgggaggtctcggtcaaggtggtcttaactttgatgcaaagcgaaggcgtggctccttcgaaccggtggatctctttcattcccatatcgcgggcatggatgcctttgcacgtgggctgaagatcgcggcagccatccgagaggatcgaaggcttgatgaagcagtccagaatcgatattccagttgggattccgatctgggtaccggtatcgagtcgggccgtgtcactcttgaggaactggaatcccatgcacggtcagctggcgagcccatcctgtcctcaggcagggaagaaatgctcgagtccctcctgaatgacttcatccgatga

SEQ ID NO: 290906 - DNA, 299 bp, Unknown
  Bacterial polypeptide expressing nucleotide sequence isolated from the Sargasso Sea
catgtcaataaatcttacactagggcaaaaagaatacttccctaacataaaacaaattgaatatgaaggcagagattcagataatcctctcgccttcaaattttatgattctgaaaaaatagtgtccggaaagcctatgagagagcatctcaagtttgcagtggcatactggcataccttctgtggaactggtagtgatccttttgggacaggaacaaaacatttcccttggaatgtatcccagcaccaaatagaatccgcatatgccagactagatgcagcttttgaattttttcgaa

SEQ ID NO: 290907 - DNA, 272 bp, Unknown
  Bacterial polypeptide expressing nucleotide sequence isolated from the Sargasso Sea
tccagaagatttatgttatgctcatataggcggaatggatacatgtgcaaaaacactcttggcaacagaaaaacttctgaatgataaaattttgcctgaatatatcaaaaaaagatatcaaaattgggaaaaagatcttggtagttttatacattcaaaagaagcatccttagagtctatccaaaaaaaggttattgatgataatattgaaccaaaacctcgttttggaaatcaagaatatttagaaaatattttaaacaagtacctgtagt

SEQ ID NO: 290908 - DNA, 475 bp, Unknown
  Bacterial polypeptide expressing nucleotide sequence isolated from the Sargasso Sea
atgactgattttttccatgggattccaaagtgcactttcgagggcaccgaaaccaataatgaattcgcgtttcgccactacaacccaaaccaaatagttttgggaaaacgcatggaggaccaacttagattcgcggtcgcctattggcacagttttgcatggcctggaggagatccatttggtggccagacttttgatcgaccatggtttggggacacaatggagcatgcacgttggaaggcagatgctgcctttgagatgtttgagattttgggagtgccctacttctgtttccacgaccttgatgttcgtcccgaaggtaacagctttgccgaaagtctgagtaaccttgaagaaatcacagactacattgctgaaaaaatggactcgaccggcaccaagcttctttggggcaccgccaacttgttcacgcaccgccggttcatgtccggggctgcaacaaaccccgacccgg

SEQ ID NO: 290909 - DNA, 466 bp, Unknown
  Bacterial polypeptide expressing nucleotide sequence isolated from the Sargasso Sea
gcttacgcaacttcaaatagcgccttaggaagcattgatattaatagaggtgatactttaataggttgggatacggatcaattcccaaataatcctgccgacttaattatgtccttttattttatttttaagaatggcggcttaggccaaggaggcatgaactttgatgcaaaaataagaagacaatctattgatgctgaagatttatttcatgctcatattggaggcatggatgtatgtgcaaaaacacttattgctgttgaaaaattaatgaatgataatgttattcctaagtttattgaagacagatatgaagactggaataaaaatttgggtcagtttattcataataaagatactggattagatgatataaataaaaaagtaattgacgataatattgaaccagaacctcgttcaggaagacaagaatatctagaaaatatcttaaataaatatttgtagt

SEQ ID NO: 290910 - DNA, 373 bp, Unknown
  Bacterial polypeptide expressing nucleotide sequence isolated from the Sargasso Sea
aatgagtgactattttaaaaatattaatgaaataatttatgaaggacctgatagtgacaatcctttaagtttcaaatattatgatgaaagcagaaaagtgcttggaaaaacgatgaaagaacatcttcgttttgcaacctgttattggcacacatttacttggccaggattagatccgtttggaggtgcaacatttgaaaggccatggatgtctggagaagagcctcttaaaatggcagaaatgaaacttgaagaggcatttgatttttttactaaaataaaaactcctttcttttgttttcatgacagagacatttctcctgagggaatatcgtataaagaaactcaaaagaactttcttcatattatttga

SEQ ID NO: 290911 - DNA, 508 bp, Unknown
  Bacterial polypeptide expressing nucleotide sequence isolated from the Sargasso Sea
atggccggccactcgggcgagcacgacgtcgaggcgtgcgcgagccgtggcaagctgggctcgatcgacgccaatcgcaacgaggcgatgctcggctgggacacggacatgttcccgaccgacccgctgctctcgacgtacatcatgaagcgcgtcatcgagcagggcggcctcgcgcccggcgggctcaacttcgacgccaaggtgcgccgcgagtcgacggacgtcgaggacctcttcatcgggcacatcaacggcatggactgctacgcgcgcggcctgcgcgccgccgccgcgatgatcgccgacgggaccttcgacaagatgcgcgcggcgcgctacgcgggattcgccgagggcctcggcaagaagtttgccgacgggcaggcgtcgctcgccgagctggccgccgccgccgccgccgtgcccgcgggcggcgaggctgcgccgccgtcgggcaagcacgagcggctcgagtcgatcttcaacgccttcgcgctcgggtagg

SEQ ID NO: 290912 - DNA, 538 bp, Unknown
  Bacterial polypeptide expressing nucleotide sequence isolated from the Sargasso Sea
gctgcggggggacaagacacatgtaaggtcttgggataaggacgacacgctggaaacataccttgagcgcgtccacgttgccttcgagttcttcacaaagcttggagtcgagtactactgctttcatgacgttgatgtagcaccccaaggggcatcccaggaagaattcttcaagaatctcgacatcatcacggatttgatgttgcagaagcagaaggatactggcatcaagttgctttggtgcacccagaacatgttctcgcacaacagatacaaagatggggcttccacaagcccagatctcaacgtgtttgcttttgcttgcgcgcagacaaagaaaagcctcgagatatcaaagaagctaggcgccgagaaccacgtcttctggggcggtcgcgaaggctttcagacgccactcaacacagatgtcaggaaagagcttgaccatatggccgccttcatgaagatggctgttgaatacaaggataagattggccacaaagagtgtcaattcctgatcgacccgaagccacgagaa

SEQ ID NO: 290913 - DNA, 397 bp, Unknown
  Bacterial polypeptide expressing nucleotide sequence isolated from the Sargasso Sea
atgcaagattattttaaaaatatacctgaaataaattttgaaggtgaaaatagtaacaatccactagcttttaaattttatgatgaagataaaattatcttaggaaaaccgatgaaggagcatttccgttttgcaacctgttattggcatacgttcacttggcctggattagacccctttggcgggcaaacatttgaaagaccttggatgaaaagtggtgatccaataaaaatggcagaagaaaaacttcattgcgcatttgatttttttaaaaagattaaaacacccttcttttgtttccacgatagagatattgctccagaaggatcaaattataaagaaacacaaaaaaatttcattcacatcattgatttaatggaaaagaaaattcaagaaa

SEQ ID NO: 290914 - DNA, 389 bp, Unknown
  Bacterial polypeptide expressing nucleotide sequence isolated from the Sargasso Sea
aatgagtgactattttaaaaatattaatgagataatttatgagggcccagatagtgataatcctctaagcttcaaatattatgatgaaaatagagaagttttagggaaaacgatgaaagaaaatcttcgttttgctacttgttattggcacacatttacttggcctggattagatccgtttggaggggcaacatttgaaagaccttggatgtctagtggagatcctcttaaaatggctgagatgaaactcgatgaagcttttgatttttttaataaaataaaaacttcttttttttgttttcacgatagagatatttctcctgagggatctaactataaagaaacccaaaaaaattttctttatataattgatttaattcaatcaaaaa

SEQ ID NO: 290915 - DNA, 515 bp, Unknown
  Bacterial polypeptide expressing nucleotide sequence isolated from the Sargasso Sea
tgaagttaatcatgcaactttatctggtcataattttgaacatgaaattgcttacgcaacttcaaacagcgccttaggaagcattgatatcaatagaggtgatactttaataggttgggatacagatcaattcccaaataatcctgcagacttaattatgtcattttattttatttttaagaatggcggcttaggccaaggaggcatgaactttgatgcaaaaataagaagacaatctatcgatgctgaagatttattccatgctcatattggaggcatggatgtttgtgcaaaaacacttattgctgttgaaaaattaatgaatgataatgttattcctaagtatattgaagatagatattcggattggaataaagaattgggtcagtttattcataataaagatactggattagatgatataaataaaaaagtaatcgatgataatattgaaccagaacctcgttcaggaagacaagaatatctggaaaatatcttaaataaatatttgtagt

SEQ ID NO: 290916 - DNA, 329 bp, Unknown
  Bacterial polypeptide expressing nucleotide sequence isolated from the Sargasso Sea
gggtggcttcaccacggggggattgaactttgacgccaagcgcagacgtgattctcacgagcccatcgatttgatgcatgcgcacattggagggatggatgcgtttgcccgtggtctgaaaatcgcccacgcgattcgtgaagacggtcgactggccaaattcgtggacgaacgttactccagctttgaccgggatatcggggccaaggtggaagccggcaccgccagttttcaggaacttgaggagtttgccatgagcaatggcgaacctacgatcgccagtggccgtcaggaaatgctggagaatttgatcaacgaattcatctgaa

SEQ ID NO: 290917 - DNA, 337 bp, Unknown
  Bacterial polypeptide expressing nucleotide sequence isolated from the Sargasso Sea
aatgagtaaatattttaaaaaaattaatcaaattaaattcgaaggaaaagaaagcaataatcctttaagtttcaaatattatgatgaaaataaaattgtttttggaaaaactatgaaggagaatttgaggtttgcgacttgctattggcatacatttacttggccaggtcttgatccatttggaggggcaacttttgaaagaccttggatggtaaagggcgatccagttgaaaaagcagaagaaaagttagaagaagcatttgatttttttgaaaagattactactccatttttttgctttcacgatagagatatttctcctgaaggagcatcatac

SEQ ID NO: 290918 - DNA, 610 bp, Unknown
  Bacterial polypeptide expressing nucleotide sequence isolated from the Sargasso Sea
catgaaccaactaagcatcaatatgattttgattctgcaacttgcttagcttttttacgaaaagcaggtttggaaaatgagattaaacttaatgttgaagtaaatcatgcgactttatctggccacaattttgaacatgaaatcgcctatgcaacttctaataaagcattaggaagcatcgatattaatagaggtgacaccctactaggatgggatactgatcagtttccaaataatcccgctgatttacttatgtcgttttattttatctttaaaaatggcggtttaggtcaaggaggaatgaactttgatgcaaaaataagaagacaatctattgatcctgaagatttatttcatgctcatgttggagggatggatgtttgtgcaaagacactgatagctactgaaaaacttataaatgataatgttattcctaagtttattgaagataggtattctgattggaatgaaaatctaggacaatttattcataataaagatactggattagatgatatcaataagaaagtaattaacgataatattgagccagaacctcgttcaggtagacaagaatatctagaaaatatcttaaataaatatttgtagt

SEQ ID NO: 290919 - DNA, 595 bp, Unknown
  Bacterial polypeptide expressing nucleotide sequence isolated from the Sargasso Sea
cgcggagacatcctgctcccgacggtcggtcacgccattgccttcatcgaccagttgcagtaccccgacatggtgggtctgaacccggagaccggtcacgagcagatggccgggctgaactacgtgcatgcgatcgcgcaggcgttgtggagcggcaagctcttccacatcgacctgaatgggcagcgcggaatcaaatacgaccaggatctggtgttcgggcatggggatctcacgaacgccttcttcctcgtcgacctgattgagcgaagtgactactccggtcccaagcacttcgactacaagccgatgcgaacagaagacctggacggtgtgtgggcgtcagcggaggccaacatgcggatgtatctgatgttgcgggatcgcgcgcgaagcttccgggaagacccggcggttcagcaagcgctgcgggcctcgggccttgagtcccttgcggagccgaccctgacgtcgggggagaccatcgacgacctcacgttcagcgccgaagccgccgagcgtctgtccgatcgtggatacggctacgtgcagttgtcgcagttggctgtcgagcacttgttgggcgctcgatgac

SEQ ID NO: 290920 - DNA, 403 bp, Unknown
  Bacterial polypeptide expressing nucleotide sequence isolated from the Sargasso Sea
aatgatagactatttcaaaaatatacctgagataaaatttgagggaaaagattctaataaccaactagcttttaaatattatgatgaaaataaagttgttttgggaaaaagtatgaaagaacattttcgttttgctacttgttattggcatacatttacatggcctggattagatccatttggtggcaaaacttttgagagaccttggatgagactaggggatgagttacagttagccgaattaaaattaaacgttgcctttgatttttttaaaaaaattaaaacaccatttttttgttttcatgatcgagatatctcacctgaaggttcaaattataaagaaactcaaaaaaattttttacatattgttgatctgattgaaaaaaaaaatagactccactgg

SEQ ID NO: 290921 - DNA, 538 bp, Unknown
  Bacterial polypeptide expressing nucleotide sequence isolated from the Sargasso Sea
gaaaaggattttaagataaatattgaggtaaatcatgctaccctggctcaacacacattccaacatgaattaactgttgctgcaaaatctggaatgcttgggagtatagacgccaaccgaggtgattatcaaaatggttgggatactgatcaatttccaatcaatattcaagaaactactgaggcaatgcttgtttttttaaatgctggaggtctccaaggtggaggtgtaaattttgatgctaaattgcgcaggaattctactgatctagaggatttatttattgcccacattggaggagcggatacttttgcaagagctttaattatagcagataatttactaaaaaattcaccacttcctgaaatgttaaaaaatagatataaaagctttgattctggtaaaggaaaaagttttgaggatggtaaattagttttagaagatttatacaaattggctaaaggcaatggtaagttaaaacttacaagcgcaaagcaagaattaattgagaacatattgtttaactacataaaataaa

SEQ ID NO: 290922 - DNA, 547 bp, Unknown
  Bacterial polypeptide expressing nucleotide sequence isolated from the Sargasso Sea
ccggtcttgaaggtgaaattaaacttaaccattgaggcgaatcatgcaactttatctgggcataactatgagcatgagatagcatatgcaattgcaaataatgctttaggtagcttagacattaacagaggcgatactcttattggatgggacacagatcaatttccaaataatccagctgagctaataatggctttttattttatatttacaaacgggggattgggtaaaggtggattaaactttgatgctaaaataagaaggcagtcaatagatcctgaagatttattttatgctcatattggtggaatggatgtatgtgcaaaaacccttatcgcagttgaaaaaatgattaatgacaatattattccaaaattcataaaagatagatattcaggttgggataaagaattaggtaaatatatttataatgaaaacacaactttagactctattcaacaaaaagtgattgatgaagaaattgaacctaaaactatatctggaagacaagaatatttggaaaatataataaacaaatatttgtagt

SEQ ID NO: 290923 - DNA, 346 bp, Unknown
  Bacterial polypeptide expressing nucleotide sequence isolated from the Sargasso Sea
atgacagaatactttagtaaaataccagagattaaatttgaaggtgaagaaagtacaaatccatttgcttttaagttttacgatgaaaataaaaaggttttaggcaagtctatgaaagagcatttaaggtttgctacttgttattggcatacatttacttggcctggccttgatccatttggtggtcaaacatttgatagaccttggatgcaagcaggtgatgaaatgaaaatggctgaaatgaaacttgatgctgcgtttgattttttcactaaaataaaaacaccttttttctgctttcacgatagagatatttctcctgaaggttcaaattatgctgagacac

SEQ ID NO: 290924 - DNA, 658 bp, Unknown
  Bacterial polypeptide expressing nucleotide sequence isolated from the Sargasso Sea
aatgagtagttattttaaagatatttctaaaattcagtatgaaggagttgatagcaataatccactaagcttcaaatattatgatgaagataaagtgattttaggaaaaaaaatgaaagatcatttgcgttttgcaacttgttattggcatacttttacttggccaggtcttgatccatttggaggaccaacttttgaaagaccatggatgcaacaaggagatcctattgaaaaagcagaagaaaaactagatgaagcttttgatttttttgataaaattactactccttttttctgtttccatgatagagatatttctccagaaggaaaaaattattctgaaacacaaaagaatttttttcacattatagatttaatggaaaaaaaaataagtaaaagtaaagtaaaattactttggggaacagcaaatgccttttctcatcgacgatatatggcaggagcatctactaatcctgacccagaagtttttgcatataaggctgctcaagtaaaagattgcatggaagctacaatgcgtcttggtggccaaaactatgttctttggggaggtagagaaggatatgaaacaattttgaacaccaatatgaagttggaaatgaacaatcttgcacgttttttagagttagtcgttaatcat

SEQ ID NO: 290925 - DNA, 973 bp, Unknown
  Bacterial polypeptide expressing nucleotide sequence isolated from the Sargasso Sea
atttccatgtcaaaaatcatctgatgtttttgaaagagcttataataagatggatgctgcatttgagtttatatctaagttgggacttgaatatttttgttttcatgatttcgatttaatagatgaaggggaaaatttgattgaatcggaagctagattagccaaaatagttgaatacggaaaaaataaaattaattcaagtaatgttaaagtcttatggggaaccgcaaatcttttttcaaacccaagatatatgaatggagcagcaaccaaccctaactttgatgttttgtcttatgcaggagcacaagtaaaaaatgctttagatgctacaatagctcttgaaggtgaaaattatgttttttggggtggtagagagggttattcttctttaatcaatacgaatatgaagaaagagcttgataatttggcgaagtttcttcatatggctaaagattatgccagatcaaatggttttaaaggttggttttttattgaacctaaaccaatggagccatctaaacatcaatatgattttgatgctgctacagttgttggatttttaaatgaatataacctgcaaaaagactttaaactaaatattgaagttaatcatgctactcttgcaagtcatactttcgatcatgaattacaagttgctgcaaatgcaaatatgctcggaagtattgatgctaacagaggagactatcaaaatggatgggatactgatcagtttccaaatagtatatatgaaatcattgaggctttattagttataaatagatcaggtggattacaaggtgggggtattaattttgatgcgaaaactagaagaaattctactgatttaatagatttattttattcacatattggtgcaattgatttattttcgagatcacttcttataacagagaaaattttaaataattctgaatatctaggattattagattctagatattcatcatta

SEQ ID NO: 290926 - DNA, 726 bp, Unknown
  Bacterial polypeptide expressing nucleotide sequence isolated from the Sargasso Sea
gggtattccgtattactgttttcacgataccgacgttgcccccgaaggcagcaacattaaagagtacgttaataacttctcggcgatggttgatgtgttggaacaaaaacaggctgaaagtggcgtaaaactgctgtggggtacggctaacctgttcagtaacccgcgttatgctgcaggtgctgcgtctaacccggatcctcaggtcttcagctatggcgcaactcaggtatttcatgcgatgaatgccaccaagcgtctgggcggcgacaactatgtactttgggggggccgtgaaggctacgaaaccctgctcaataccgacttacgccaggagcgcgctcagctgggccgctttatgcaaatggtggtcgagcataaacataagatcggttttaaaggcaccttacttatcgagcctaaaccacaagagccaaccaagcatcagtacgattacgactccgccactgtgtatggtttcttaaaacaatttggtctggaaaaagaattccgcgtaaatattgaagccaaccacgccacgctggccggacattcgttccaccatgaaattgctacagccatttcgctcggcattttcggcagtatcgacgctaaccgtggcgatgcgcaaaacggctgggataccgatcagttcccgaacaatgtcgaagagttaagcctggtgatgtacgaaattctcaaatccggcggtttctcaaccggtgg

SEQ ID NO: 290927 - DNA, 668 bp, Unknown
  Bacterial polypeptide expressing nucleotide sequence isolated from the Sargasso Sea
tatgacagaatattttagtaaaatacccgagatcaaatttgaaggtgaagaaagcaataatccatttgcttttaagttttatgatgaaaataaaaaagttttaggcaagtctatgaaagagcatttaaggtttgctacttgttattggcatacatttacttggcctggccttgatccatttggtggtcaaacatttgatagaccatggatgcaagcaggtgatgaaatgaaaatggctgaaatgaaacttgatgctgcatttgattttttcactaaaataaaaacaccttttttctgctttcacgatagagatatttctcctgaaggttcaaattatgctgagacacaaaaaaatttctttcatattatagatttaatggaacaaaaaattaatgactcaggaatgaaattactttggggaacagctaatgctttttctcataaaagatatatgagtggagcttcgactaatccagacccagaagtttttgcatataaagctgcgcaagtaaaagattgtatggatgcaacgatgagactgggcggtcaaaactacgttctttggggtggaagagaaggatacgaaactattcttaatactgacatgactaaggagacagctaatcttcaaagatttttagaattagttgttaattacaaacacaaga

SEQ ID NO: 290928 - DNA, 784 bp, Unknown
  Bacterial polypeptide expressing nucleotide sequence isolated from the Sargasso Sea
aaatactcaatttcttgggggtcaaaactatgttttgtggggaggtagagagggttatgaaacaattctcaatacgaatatgaaacaagaatatgatcaactgggtagatttttgaatatggtagctgaacataagcataaaattggttttaaaggtttacttttgattgaacctaaacctcatgaaccaactaaacaccagtatgattttgactctgcgaatgtttttgcatttctccaaaaatacggtctagagaaagaattcaaactaaatattgaacaaaatcatgctattttggctaaacactcttttgaacatgagatagcatacgctctttccaataatattcttgggagtattgacattaatagaggtgattatttagttggatgggatactgatcaattcccaaacaatgttgaagaacttgttttgcctttttattacatttttaaaaacggaggtttttcatctggaggactcaacatggacgctaagattagaagacaatccattgatcctgaggatcttttttatgctcacattggctcaatggatacatgtgctagaacacttattgctgttgaaaaaatgataaatgatggaagttatgagtcttttttaaaacaaagatatgagtcttggaatgataattctgatctgatgaataaattatcattagaagatattcataataaagttattaaggaaaatattaatccagatcctaaatctggtagacaagaatatcttgaaaatctaatcaactcatttgttgagtaa

SEQ ID NO: 290929 - DNA, 806 bp, Unknown
  Bacterial polypeptide expressing nucleotide sequence isolated from the Sargasso Sea
tgaatttatttcaaaaatgggtttcgattactattgttttcacgattatgatttaatacaggaggggaaatccataaaagaatctgaaaagaggttagagttgatttctgactatcttttattaaaacaaaaagaacacggaattaaacctttgtggggtactgctaattgtttttcaaatcctgtctacatgaatggcgcagcaacaaaccctgaatttgatattgttgcaagagctggtgctcaagttaaactcgctttagatactacaattaagttgggtggattaaattatgttttttggggaggaagagaggggtatttatcacttcttaatactgatatgaaaagagaacttgaccacatggctgagtttttaagaatgtccagagattatgcaagaaataatggttttaaaggaactttttttattgagcccaaacctatggaaccctcaaagcatcaatatgattttgatactgcaacagccattggatttttaaaaaattatggattagaaaaagattttaaaattaatatagaagttaatcatgcaacacttgctcagcatacgtttcagcatgaattaactgtagcagctaacgatgatatgcttggaagtattgatgcgaacagaggagattatcaaaatggatgggataccgatcagtttccgaataatttacaagaaactactttagctatgatggttattcttaaatcatccggcctcaagggaggtggggtaaattttgatgctaaacttcgaagaaattcaacagatttagaagatttatttcacgcac

SEQ ID NO: 290930 - DNA, 838 bp, Unknown
  Bacterial polypeptide expressing nucleotide sequence isolated from the Sargasso Sea
cccggaccccgacgtttttgcatttgccgccgccacagttaaaagctgcatagatgttacccaaaaactaggtggtgaaaactatgtgttatggggcggaagagaaggttacgaaacattactcaacacagatttagaaaaagagctagatcagatgggtcgatttttatcgatggttgtcgattataaacacaaaattggatttccaggtatgatacttgttgagccaaaaccacaagaaccgtcaaaacatcagtatgattttgacgtagcaacctgtatcggatttctgagaaaatataatttggaaaatgatgttaaaataaatattgaacaagggcatgctattttagccggccattcctttgaacacgaaattgcactggctgtttcagaaggtatgcttggttccatcgatatgaatagaaatgattaccaatcgggctgggatactgatcaatttccaaacaatactccagaggttgcactagcctactaccacatcataaaaggaggtggttttcagactggcggaacaaattttgatgccaaactcagaagacaatcaattgatgctgaagatcttattgctgctcacgttggagcaatggatatttgtgcgagaggtttcaaagctgctgccgcaatggttgaagatggatatttggaacagacccttcaagaaaggtatggaggttgggaacatcaggaagcacaggatatgcttaatagcgatttggctaccatcacaacaaaagttatagagaattctattaacccaagacctaaatcaggaaagcaggaagcattggagaactatgtaaatcgttttgtttaa

SEQ ID NO: 290931 - DNA, 649 bp, Unknown
  Bacterial polypeptide expressing nucleotide sequence isolated from the Sargasso Sea
tttaaaggcactttactaatcgaacctaaaccacaggaaccaaccaagcaccagtacgattacgactctgcaactgtgtatggtttcctgaagcagtttggtctggaaaaagagttcgccgtcaatattgaagccaaccacgccaccttggctggtcattcgttccatcatgaagtggccactgcgatttctcttggcatttttggcagcatcgacgcgaaccgtggtgatgcacaaaacggctgggatactgaccaattcccgaacagcgtagaagagctgagcctggtgatgtacgaaattctgaaagctggtggcttcaccactggtggttttaactttgacgccaaattacgccgtcagagtatggaccgcgccgatatgttccatgggcatataggtggtatggatcacctggctatggcactgaaacgtgcagcagtgctggtggaaaaagacttcttaggtaaagcagttgcagagcgttatgccggctggaaaggcgaattaggtggcgccatccaagcaggtggccactccctgcaatcattggccgctatggtcgagcgcgaacagttaagcccgaaagccgtcagcggccgtcaggaattgctggaaaaccaggtgaatttagtgttgttcagatagg

SEQ ID NO: 290932 - DNA, 880 bp, Unknown
  Bacterial polypeptide expressing nucleotide sequence isolated from the Sargasso Sea
gcattaaaaatggcagagttaaaattagatatagcttttgattttttttcaaaaatcaagactccctttttttgttttcatgatcgtgatattgctcctgaaggttctacatataaagaaactcaaaaaaatttttttcacataattgatttaatggaaaaaaaaatggaattaactaatatgcaattactatggggaactgcaaatgctttttctcacaagagatatatgagtggagcttcaacaaatcctaacccagaagtgtttgcgtataaagctgcacaagttaaagattgtatggaagcaacaatgagactaggggggcaaaattatgttttatggggtggaagagaaggatatgagacaatattaaatactaatatgaaattagaaatggaaaaccttaaacgatttcttgaactcgttgttagttataaatataaaattggatttaaaggtcaaatactagtagaacctaaaccgcatgagccaacaaagcatcaatatgattttgactctgcttcttgcttagcattaattagaaaagccggtttagaaggtgaaattaaattaaatattgaagcaaatcatgccactttatctggccatagttatgagcatgaaattgcctacgcaattgcaaataatgctcttggaagtcttgatattaatcgaggagattcactgcttggctgggatactgatcaatttccaaacaatattggggatttattaattgcattttattatatttattcaaatgggggtttaggcaaaggtggattaaattttgatgccaaaataagaagacaatcaatagatccagaagatatcttttacgctcatattggcggaatggatgtatgtgctaaaactctaa

SEQ ID NO: 290933 - DNA, 826 bp, Unknown
  Bacterial polypeptide expressing nucleotide sequence isolated from the Sargasso Sea
ccgtttggaccaggcacacaacagttcccttgggcagaaggttcagatgcagatgagcgtgcgcgtaataagatggatgcagcttttgagttttttacaaaaataggaaccccatactattgcttccatgattttgatctcgttgaagaaggagattcatttgcggagtcatctcgaagacttgacgctattattgcttacgcaaaagaaaaacaagcggcgtcaggggttaagcttctatgggggacggcaaatctttttagtaatcctcgttatatgaatggagctggaacgaatccagacttcaatgtagtcgcatatgcaggagcgcagttaaagaatgcaattgatgcaacaatcgctctcgatggcgagaactatgttttctggggtggacgtgaaggttatatgagcttgctgaatacgaatatgaagcaggagcttgataattttggaaatttcttacgtatggctcgagattatgcgcgtggacaaggttttaagggaacattttttattgaacctaagccagcggagccgagtaagcatcaatatgattttgatgcagctacagtaatcgggtttttacaagcacatggtcttgaagaggactttaagttaaaccttgaagtgaatcatgcaacgttagcaaatcatactttcgagcatgagctacaggtcgccgttgacgcagggatgcttggctcgatcgacgcaaaccgtggtgattatcaaaatggatgggatacagatcagttcccaaataatattctggagactactcagcagatgatgattatccttcaaggcggcggtcttcaaggcg

SEQ ID NO: 290934 - DNA, 901 bp, Unknown
  Bacterial polypeptide expressing nucleotide sequence isolated from the Sargasso Sea
tttgtgaagggtacattcgaccgtccttggatccaacctgtcggcaaccaattagaacttgcggaacaaaaagtaaaagtagcttttgagtttttcgaaaagctaggcgttccttacttttgttttcatgatgttgatattgcccctgaaggtaaaacacttcaagaaagtcacgataacgtaacgcacatagcaaacattatcgaaaaagaaatgcagcgtacaggtgtaaaattactttggggtactgctaacttattctcaaacaaacgtttttgtgcagggggtgcaacaaaccctaatcctaatacgtatgcatatgcagcagcgcaagttaagcatgcaatggaaattacacatcgtttaggcggtgaaaactacgtactttggggtggccgtgaaggttacgatacactactaaatacagaccttgcacaagaaagcgaacagtacgcacgctttttaaaaatggtggtagagcataagaaaaaaattggctttaaaggcacattattaattgagccaaaaccacaagagccaactaaacaccagtacgattacgatacagcaacagtggcaggctttttacataagcatggcttacaaaacgaaattaaagtaaacattgaagcgaaccacgcaacacttgcgggtcatagctttcatcacgaaattgcggttgcttgtgcagaaggcattatgggtagtattgatgctaaccgtggcgacatgcaaaacggatgggatacagaccaattccctaacgatgtagccgagtgcacactcatcatgtatgaaattttaaaaaacggcggttttacaacaggtggctttaactttgatactaagcttcgtcgtcaatcgtgtgaacgcgatgacttattcattggtcacattggcg

SEQ ID NO: 290935 - DNA, 857 bp, Unknown
  Bacterial polypeptide expressing nucleotide sequence isolated from the Sargasso Sea
aaatccagaccttgagatttttgcatttgctgcagcgacagttaagagctgtattgatgccactcaccagcttaaaggtgaaaattatgttttatggggagggcgtgaaggttacgaaactcttttaaatacggatatcaaatcagaaattaaccagcttggaacatttttaaatttagttgttgattataaacataaaattggctttaaaggcacaatacttattgagcctaagccacaagaaccaacgaaacatcaatatgattatgacgttggtaatgtttttgggttcttgaaaaagtatggtttagagaatgaggttaaagtcaatattgaaactggccatgcttttcttgctaaccattcttttgaacatgaaatagctttagcttgcgcattaggtatttttggatcaatagacatgaatagaaacgacgttcaatctggctgggatacagaccagtttcctaataattatttagatgttgctcttgcttattatcatattctattaaatggcggttttaaatctggaggtacaaattttgatgccaaacttaggagacaatcattagatccagaagatttgttattagctcatataggtgcaatggacacttgcgctctaggtttcaaatcagctttaaaacttttaaaaaatggtgatctcaaagaatttattgataataggtactctaattggagcaaaacatttggtaagtcattgatgaatagagaaatggatttagaacaaattactagatggattgaagataataatataaatccaaaacccgtttcagggaaacaagaatatctcgaaaatattttccttcaaaatgtaattatgaaataag

SEQ ID NO: 290936 - DNA, 855 bp, Unknown
  Bacterial polypeptide expressing nucleotide sequence isolated from the Sargasso Sea
aatgtcaaaatattttgcaaatataccagaaataaaatttgaaggatcagaatctactaaccctttatcttttaaattttatgatgaaaaaaaaattgttttaggcaaaacaatgaaagagcatctaagatttgcgacttgttactggcattcatttacttggcctggccttgatccttttggtggtcaaacttttgatagaccttggatgcaagttggtgatgaaattaaaatggctgaaatgaaacttagcgcagcatttgatttttttataaaaatcaaaactccctttttctgctttcacgatcgagatatatctcctgaaggttcaaagtatgctgaaacacaaaaaaatttttttcatattattgatttaatggaacaaaaaattaatgacacaggtataaaattactttgggggactgcaaatgctttttctcacaaaagatacatgagtggtgcttccacaaatccagaccctcaagtttttgcttacaaagctgcacaagtaaaagattgcatggatgctacaatgagattaggtggtcaaaattacgttctttggggtggaagagaaggatatgaaactatactcaacactgatatggcaaaggaaactgctaatcttcaaagatttttagaattagtcgttaattataaacataagataggttttaaaggtcaaattttgttggagccaaaacctcacgagccaaccaaacatcaatatgattttgattctgctagttgtttagcatttttacgaaaagcaggtttagaaaacgaaattaaactaaatattgaggttaatcacgcaactttatctggtcataattttgaacatgaaattgcata

SEQ ID NO: 290937 - DNA, 739 bp, Unknown
  Bacterial polypeptide expressing nucleotide sequence isolated from the Sargasso Sea
agggtatgaaactattcttaacaccaatatgggattagaaattgataacctaaaacggtttcttgagctagtcgttaattataagcacaaaattggttttggtggtcaaattttacttgaaccgaaaccacatgaaccaactaaacatcaatatgattttgactcagcatcttgcttagcatttttacgaaaagcgggattagaaaaggaaatcaaattaaatattgaagctaatcatgcgactttatctggccatagttttgaacatgaaattgcttatgcgatttctaataatgcacttggaagcttagatattaacagaggtgatactttgttaggttgggatactgatcaattccctaatagtgtagctgaattaatactacctttttatcatattttttctaatggagggattggtaatggagggttaaactttgatgcaaaaatccgaagacaatcaatagatcctgaagatttattttatgctcatattggaggtatggatgtgtgcgccagaacacttttagcagttgaaaaaatgataaacgataaaaaactctctgattatgttgcgcaaagatatgaggattggcaaaaaaatcttgggcaatttatccatgataaaagtacttctcttgatgcgattcatcaaaaagtccttgatgataatattgagcctgagccacgatctggtaatcaagagtatttagaaaatattttaaacaagtacttatag

SEQ ID NO: 290938 - DNA, 862 bp, Unknown
  Bacterial polypeptide expressing nucleotide sequence isolated from the Sargasso Sea
tgcgacaatccagaccctgagatttttgcgtttgctgcagcgacagttaaaagctgtattgatgccactcaccagcttaaaggtgaaaattatgttttatggggcggacgtgaaggttacgaaactctcttaaatacggatatcaaatcagaaatcgaccagcttggaacatttttaaatttagttgtggattataaacataaaattggctttaaaggcacaatacttattgagcctaagccacaagaaccaacgaaacatcaatatgattatgacgttggtaatgtttttgggttcttgaaaaaatatggtttagagaatgaggttaaagtcaatattgaaactggtcatgcttttcttgctaaccattcttttgagcatgaaatagctttagcttgcgcattaggtatttttggatcaatagacatgaatagaaatgacgtccaatctggctgggatacagaccagtttcctaataactatttagatgttgctcttgcttattatcatattctattaaacggcggttttaaatctgggggcacaaattttgatgccaaacttaggagacaatcattagatccagaagatctattattagctcatataggcgcaatggatacttgcgctctaggattcaaatctgctttaaaacttttaaaaaatggtgatcttaaagaatttattgataaaaggtactctaattggagcaaaacatttggtaagtcattaatgaatagagaaatgaatttagaacaaattactagatgggttgaagataataatataaatccagaacctgtttcagggaaacaagaatatctcgaaaacatttttattcaaaatgcaattaccaaataag

SEQ ID NO: 290939 - DNA, 553 bp, Unknown
  Bacterial polypeptide expressing nucleotide sequence isolated from the Sargasso Sea
tatgacagaatattttagcaaaataccagagattaaatttgaaggcgaagaaagcacaaatccatttgcttttaagttttatgatgaaaacaagaaagttttaggcaagtctatgaaagagcatttaaggtttgctacttgttattggcatacatttacttggcctggccttgatccatttggtggtcaaacatttgatagaccatggatgcaagcaggtgatgaaatgaaaatggctgaaatgaaacttgatgctgcgtttgattttttcactaaaataaaaacaccttttttctgctttcacgatagagatatttctcctgaaggttcaaattatgctgagacacaaaaaaatttctttcatattatagacttaatggaacaaaaaattaaagactcaggaatgaaattactgtggggaacagcaaatgctttttctcataaaagatatatgagtggtgcttcgaccaatccagacccagaagtttttgcatataaagctgcacaagtaaaagattgtatggatgcaacgatgagattgggtggtcaaaac

SEQ ID NO: 290940 - DNA, 754 bp, Unknown
  Bacterial polypeptide expressing nucleotide sequence isolated from the Sargasso Sea
gagacacaaaaaaatttctttcatattatagacttaatggaacaaaaaattaatgactcaggaatgaaattattgtggggaacagcaaatgctttttctcataaaagatatatgagtggtgcatctaccaatccagacccagaagtttttgcatataaagctgcacaagtaaaagattgtatggatgcaacgatgagattgggcggtcaaaactatgttctttggggtggaagagaaggatacgaaactattctaaatactgacatgactaaggaaacagctaatctaaaaagatttttagaattagtcgttaattataaacacaagataggatttaaaggtcaaattttattggaaccaaaacctcatgaaccaactaaacatcaatatgactttgactctgcaacttgtttagcatttttacgaaaggcaggtttagaaaatgagattaaactaaatgttgaagttaatcatgcaactttatctggtcataattttgaacatgaaattgcttacgcaacttcaaatagcgccttaggaagcattgatattaatagaggtgatactttaataggttgggatacggatcaattcccaaataatcctgccgaattaattatgtccttttattttatttttaagaatggcggcttaggccaaggaggcatgaactttgatgcaaaaataagaagacaatctattgatgcagaagatttattctatgctcatatggaggcatggatgtttgtgcaaa

SEQ ID NO: 290941 - DNA, 712 bp, Unknown
  Bacterial polypeptide expressing nucleotide sequence isolated from the Sargasso Sea
ccatttggccctggcacaatggtccgcccgtgggaaacgaatgatgacccaatgacaatggcactacagcgtgtcgatgttgcttttgaatttcttgaaaaacttggatgcgatttttattgcttccacgacagagacgttgcacctgaagctgcatcccttgctgaatgcaataatcaactggatactattgctgatcggcttgaagaaaaacaaaaggagactggcaaaaaacttctctggggtacagcgaatctctttagtcatccacgatatgtccatggtgcagcaacaagccctcatgttgagtcattcgcgtatgctgcttctcaagtgaaaaaagccatcgaagtaactcatcgccttgacggcgcaggctatgtcttctggggcggccgagaaggatatcagtgtctttggaacacggacatgaaaagagaagttgaccatctagcaacatttatgcacatggctgttgactatgccaaagaaattggattctcagggcagttttactttgagccaaagccccgcgaaccaatgaagcatcagtatgatttcgattccgcgacgtgcattaactttttgagaagttatggactggaaaagcacgtgaaaatgaatatcgaaacaaaccatgccacgctagccggccatgaaatgcagcacgaacttgaatacgctgggatgcaaggctttctgggttcgatcg

SEQ ID NO: 290942 - DNA, 787 bp, Unknown
  Bacterial polypeptide expressing nucleotide sequence isolated from the Sargasso Sea
aatgagtgaatactttaaaaatatatctaaaataaaatatgaaggaatctcaagcgataatccacttagcttcaaatattataatgaaaatcaaactgttatgggtaaaactatgaaggaacatcttcgttttgcaacatgttattggcatacttttacttggccaggacttgatccatttggcggacctactcttgatagaccttggatgctgtcaggagatccagttaaaatggctgaattaaaacttgaagcagcttttgatttttttagtaagattcaaactcctttcttttgttttcatgaccgcgatatagctccagaaggagctacttattctgaaactaaaaaaaacttagatcacattgttaatttaatggaaaaaaagatagaggaaacaggagtcaaattattatggggtacagctaacgccttttctcataagagatatatgggtggagcttccacaaatccagatcctgaagtctttgcttacgttgcagctcaggtcaaagattgtatggatgtcaccatgcgtttgggtggacaaaattatgttttgtggggaggaagagaaggttatgaaacaatacttaatacaaatatgaaacttgaaatgaataatttatcacgttttctagaattagttgtggagtacaaacataaaattggatttactggacaaattttgcttgaaccaaagccgcatgaacctacaaaacaccagtatgattttgatacggcagcatgcctggctcttattaggaaagcaggactagaaaaagaa

SEQ ID NO: 290943 - DNA, 855 bp, Unknown
  Bacterial polypeptide expressing nucleotide sequence isolated from the Sargasso Sea
aattcttcaaatgtcaaactattatggggaacggcaaatgcattttcacataaaagatatatgagtggcgcttcaacaaatcctgacccagaagtttttgcttataaagcggctcaagtaaaagactgtatggatgcaacaaaaagactaggtggtagtaattatgttttatggggtggaagagaaggctatgaaactattcttaatacaaatatgggattagagattgataacttaaaacgatttcttgagcttgtagttgattataaacataaaattggttttgatggtcaaatcttacttgagccaaaaccacatgagccaacaaagcatcaatatgattttgactcagcctcttgtttggcttttttaagaaaagctggcttggagaatgaaattaaattaaatattgaagctaatcatgcgactttatctgggcacagctttgagcatgaaattgcttatgcaattgcaaataatgcacttggaagtttggatattaatagaggtgatactctattgggatgggatactgatcaatttcctaatagtgtgtcagaattgattcttcctttttaccatcttttttcaaatggaggtattggtaaaggtggattgaattttgatgccaaaattcggagacaatcaattgatccagaggacttattttatgctcatattggtggcatggacgtgtgcgctaaaacacttttagctgttgaaaaaatgattaatgacaaaaaactctctgattatgttacaaaaagatatgaggattggcaaaaagatcttggtaatttcattcattccaaagggactaccttagattcaatccatcaaaaagttctcagtgat

SEQ ID NO: 290944 - DNA, 679 bp, Unknown
  Bacterial polypeptide expressing nucleotide sequence isolated from the Sargasso Sea
aatggtggttgagcataagcataaaattggatttaaaggcactttactgatcgaacctaaaccacaggaaccaaccaagcaccagtacgattacgactctgcaactgtgtatggtttcctgaagcagtttggtctggaaaaagagttcgccgtcaatattgaagccaaccacgccaccttggctggtcattcgttccatcatgaagtggccactgcgatttctcttggcatttttggcagcatcgacgcgaaccgtggtgatgcacaaaacggctgggatactgaccaattcccgaacagcgtagaagagctgagcctggtgatgtacgaaattctgaaagctggtggcttcaccactggtggttttaactttgacgccaaattacgccgtcagagtatggaccgcgccgatatgttccatgggcatataggtggtatggatcacctggctatggcactgaaacgtgcagcagtgctggttgaaaaagactttttaggtaaagcagttgcagagcgttatgccggctggaaaggcgaattaggtggcgccatccaaacaggtggccactccctgcaatcattggccgctatggtcgagcgcgaacagttaagcccgaaagccgtcagcggccgtcaggaattgctggaaaaccaggtgaatttagtgttgttcagatag

SEQ ID NO: 290945 - DNA, 523 bp, Unknown
  Bacterial polypeptide expressing nucleotide sequence isolated from the Sargasso Sea
aatgaccgaatcttttttcaaaaacatcgagccaattaaatatgagggaaccgaaactgattcaaatctagctttcagacactataatcctaatgaaatcgttttggggaaacgtttagaagaacatttgcgtttcgctgttgcctattggcatagctttgcatgggaaggcggcgatccttttggtgggcttacatttgaaaggccatggcacccgcaagacagcatggaaaatgcttacttaaaagctgatgtagcttttgatatgttttctattttagggcagccatatttttgttttcatgatgcagacattcggcctgaccaaggtaattttccagacaatttggcgaggcttaatgaaataaccgattactttcttgataaaatgaaaaaccagaaaacaaaattactgtggggaacggcaaatatgttcagccatcgtagatggatggctggtgcatctacgaatccagatccagaagtttttgcttttgcagcagctacggtaaagagttgcata

SEQ ID NO: 290946 - DNA, 878 bp, Unknown
  Bacterial polypeptide expressing nucleotide sequence isolated from the Sargasso Sea
acgttttgccacttgttattggcatacctttacttggccaggtttggatccttttggaggagcaacatttgatagaccttggatgactggtggtgaccctcttaaaatggcagaaatgaaacttaatgaagcttttgatttttttcaaaaaataaaaacaccatttttctgtttccatgacagagatatttctcctgagggtagtacttataaagaaactcaaaataatttttttcatataattgatttaatggaatcaaaaatggaagaaacaggaacacaattgttgtggggtacagcaaatgcgttttcacataaaaggtatatgagtggtgcttcaactaatccagatccagaagtttttgcatacaaagctgctcaagtaaaagattgtatggatgcaactaaaaaattaaggggaagtaattatgttttatggggtggaagagaaggttacgaaactattcttaacactaatatgaagttagaaatggataatttaaggagatttttagaacttgtagttgaatataagcacaagataggctttgcaggtcaaatacttttagaaccaaaacctcatgaaccaacaaagcatcaatatgattttgattctgcttcttgtttagcttttttaagaaaagctggactcgaaaacgaaataaaactaaatattgaagcaaatcatgcaactctgtcaggacatagttttgagcatgaaatttcttatgcaattgcaaatgatgcccttggtagtcttgatataaataggggagatacacttcttggttgggatacagaccaatttcctaatagtgtatcagaattgattttacctttttatcatattttttctaatggagggttaaaaaaaaggt

SEQ ID NO: 290947 - DNA, 667 bp, Unknown
  Bacterial polypeptide expressing nucleotide sequence isolated from the Sargasso Sea
atgagtgactactttaaaaaaattaatgaaataaaatttgaaggagaaaatagcaccaaccctttgagttttagattttatgatgaaaacaaaattgtcatggggaaaaaaatgaaagatcacttacgttttgccacttgttattggcatacctttacttggccaggattagatccttttggaggaccaacctttgataggccttggatgaatagcagcgaccctctcaagatggcagaaatgaaacttaatgaagcttttgatttttttcaaaaaataaaaacaccatttttctgttttcatgacagagatatttctcccgaggggagtaattataaagaaactcaaaataatttttttcatataattgatttaatggaatcaaaaatggaagaaacaggaacacagttgttgtggggtacagcaaatgctttttcacataaaaggtatatgagtggtgcttcaactaatccagatccagaagtttttgcatacaaagccgctcaagtaaaagattgcatggatgcaactaaaaaattagggggaagtaattatgttttatggggtggaagagaaggttacgaaactattcttaacactaatatgaagttagaaatggataatttaagaagatttttagaacttgtagttgaatataaaccataaa

SEQ ID NO: 290948 - DNA, 796 bp, Unknown
  Bacterial polypeptide expressing nucleotide sequence isolated from the Sargasso Sea
tcgccactatgacccaaacgaaatggttattggaaaacgcatggaggaccaccttagattcgcggtcgcctattggcatagttttgcatggcctggaggcgacccgttcggtggccagacttttgaccggccatggtttggggacacaatggaacatgcacgccataaggcagatgttgcctttgagatgtttgagattttgggagctccctacttctgtttccacgacctggacgtccgtcccgaaggcaaaagctttgccgaaagtttgagtaaccttgaagaaattaccgactatattgctgagaaaatggagtcgacgaacatcaagcttctgtggggtactgccaacctgttcacgcaccggcggttcatgtctggtgctgcaacaaaccctgacccggacgtttttgcctattctgccgccacggtgaaatcttgtatggatgcaacagtgaagcttggtggcgaaaactacgtcttgtggggtggccgagaaggctatgaaacgcttctgaacaccgatctaacaagagagtcgcagcaggctgggcgtttcctgcaaatggtcgtcgagtacaagcataagattgggttcaaaggacaggtcctaatagaacctaaaccacaggaaccctcaaagcatcaatatgactacgacgttgcgaccgtttatgggttccttcggcgctttggtcttgagaacgaggtgagggtaaatattgaagcgggtcatgcaatccttgcgggtcatagcttcgaacatgaaatcgctctagccaatgccctgggaata

SEQ ID NO: 290949 - DNA, 553 bp, Unknown
  Bacterial polypeptide expressing nucleotide sequence isolated from the Sargasso Sea
atgagtgactattttaaaaatattaatgaaataatttatgaaggacctaatagtgacaatcctttaagtttcaaatattatgatgaaagcagacaagtgcttggaaaaacgatgaaagaacatcttcgttttgcaacttgttattggcacacatttacttggcctgggttagacccgtttggaggtgcaacatttgaaagaccatggatgtctggggaagaacctcttaaaatggcagaaatgaaacttgatgaagcttttgatttttttgcaaaaataaaaactcctttcttttgttttcatgacagagatatttctcctgaggggacatcgtacaaagagactcaaaaaaactttcttcatattattgatttaatggaatcaaaaatggagttttctaatgttaagcttttatggggaacagcaaacgctttttctcataaaagatatatgagcggtgcttcaacaaatcctgatcctgaagtatttgcttataaagctgctcaagtaaaagactgtatggacgcaactaaaagattaggtggtgctaatt

SEQ ID NO: 290950 - DNA, 821 bp, Unknown
  Bacterial polypeptide expressing nucleotide sequence isolated from the Sargasso Sea
gctgaatgtgccgtactactgcttccatgatgtggatgtctctccggaaggggcatcgttgaaggagtatctggacaattttacccggatggttgacgtactggcggcgaagcaagaacagagcggcgtgaagctgctgtgggggacggcaaactgctttaccaacccgcgttacggcgcaggggcggcgaccaatccggatccggaggttttcagctgggcggcgactcaggtagtgaccgccatgaatgccacacacaaactgggcggggaaaactatgtcctgtggggcggccgcgaaggctacgaaaccctgctcaataccgatctgcgccaggagcgtgagcaaattggccgctttatgcagctggtggtggaacacaaacataaaatcggtttccagggcacgctgctgattgagccaaaaccgcaggagccgaccaaacatcagtacgattatgacgcctctaccgtctatggtttcctcaagcagtttggtctcgaaaaagagatcaaactgaatatcgaagcgaaccatgcgaccctggccggacactctttccaccatgagattgcgactgccattgcgctgggtctgttcggctccgtggatgccaaccgcggcgacccgcagttgggctgggataccgatcagttcccgaacagcgtggaagagaatgccctggtgatgtatgaaattcttaaagcaggtggctttaccaccggcggcctgaattttgatgccaaagttcgtcgtcagagcaccgataaatacgatctgttctatggtcatattggggcgatggatacgatggcgctgt

SEQ ID NO: 290951 - DNA, 784 bp, Unknown
  Bacterial polypeptide expressing nucleotide sequence isolated from the Sargasso Sea
catgcatcttgggggagagaattatgttttgtggggtggtcgagaaggttatgaaacaattttaaatacaaatatgcaattagagatggataatctttcaagattattagaattggttgtaaatcataaacagaaaattggttttaagggacaaatattgttagaacctaaacctcatgaaccaacaaagcatcaatatgattttgattccgcagcttgcttagctctaattcgcaaagcaggattagaaaatgaaattcaattaaatattgaagttaatcatgcaactctttcaggacataattttgaacatgaaatagcatatgcaattgctaacaatgttttaggtagtattgatatcaatagaggagatactttattaggttgggatactgatcaatttccaaataatgttcaggatcttttaatggcattttattttattttttctaaaggtggttttaaaaaaggtggccttaactttgatgcaaaaataagaagacaatcaattgatccagaagatttattttatgctcatattggcggaatggatgtagcagctcgcactttaattgctgtagaaaaaatgattaaagataaaaaactatctgaatatattgaacagcgatatgaaaattggaataatgagcttggtcatttcattttaaataaaaatacagacttaaatgatattgctaataaagttatcaatgaaaatattgaccctcagcctaaatctggccagcaagaatatttagaaaatatcttaaataagtatatttaa

SEQ ID NO: 290952 - DNA, 706 bp, Unknown
  Bacterial polypeptide expressing nucleotide sequence isolated from the Sargasso Sea
atgagcaactattttaaaaatatagatgaaattaattttgaaggtttagatagtgataatcctttgagctttaagtattatgatgaagataaacaagtattaggaaaaacgatgaaagaacatcttcgttttgcaacttgttattggcacacttttacttggccaggattagatccttttggaggagcaacatttgatagaccttggatgtctgcttctgatcctcttgaaatggctgaaatgaaacttaatgaagcttttgatttttttaataaaatcaaaactcccttcttctgttttcatgatagagatattgctcctgaaggatcaaattataaagagacacaaaaaaattttctacatatagttgatctcatggaatcaaaaatgagttcatccgatgttaaacttttatggggaacggcaaatgcattctcacataaaagatatatgagtggtgcttcaacaaatcctgacccagaagtttttgcttataaagcagctcaagtaaaagactgtatggatgcaacaaaaagattaggtggtagcaattatgttttatggggtggaagagagggatatgaaactattcttaataccaatatgggattagagatagataacttaaaacgatttcttgaactcgttatagattataaacacaagattggttttgctggtcaaatcttacttgagccaaaaccac

SEQ ID NO: 290953 - DNA, 847 bp, Unknown
  Bacterial polypeptide expressing nucleotide sequence isolated from the Sargasso Sea
atggcgcacgaaatatttaagcacatcccaacgatagaatatcgaggagaggacaatgacaatcctctagcatataactggtatgacgcagaaaaaattattttaggaaaaagccttaaagagcatcttagatttgcagtatgttattggcactcctttaattggacgggaaatgatgtttttggcgaaggagcttttaatagaccatggcttacaaatcctaagtcgcatcaagcggcactggaaaaacttgatgcggcatttgattttttcagtaaattaggggcgcctttcttctgtttccacgacgtggatgtagcagcacatgcagatacagtcaaagaactgtctgaaaatttaagaaggatttctgatccactcaacgataagatgcaaaaacataatattgaattgttatggggcacagcaaatctattcagccacccgagatacatggcaggtgcagcgaccaatccagatccagaggtgttcaagtgtgctgcttatcaggttaagaacatgcttgagctcacacatcaattaggtggtaagaattatgttctttggggaggaagggaaggatacgatacacttcttaatacagatattaagcaagaattagatcaatatgctaggtttctgagtctaatagtcgagcataaggaaaaaataggcttcagaggtcaactgctaatagagccgaaaccatgcgagccaaccaaacatcaatatgatcgtgatgtatcaaccgttatcgcttttcttgagaaatatggtcttctcgattctataaagctgaatattgaagccaaatcatgcaacattagcaggcttatctttcgagcat

SEQ ID NO: 290954 - DNA, 513 bp, Unknown
  Bacterial polypeptide expressing nucleotide sequence isolated from the Sargasso Sea
tatgagtgaatattttaaaaatatacctcaaataaaatacgaaggattagaaagtaataatccacttagctttaaatattataatgaagatcaaattattttaggtaaaactatgaaagaacattttcgtttttctacttgttactggcacacgtttacttggccaggacttgatccttttggcggccctacctttgagagaccttggatgcaacaaggtgatccactgaaaatggctgaaattaaacttgatgctgcttttgattttttcagtaaaataaaaactccttatttttgttttcatgatcgcgatatagcgccagaaggaaataattatgatgaaactaaaaaaaatttagatcacatagttgatttaatggaaaaaaagatgaatgaggttggtgttaaattattatgggggactgcaaatgctttttcacataaaagatatatgtcaggagcctctaccaatcctgatccagaaatatttgcttttgttgctgctcaagtaaa

SEQ ID NO: 290955 - DNA, 841 bp, Unknown
  Bacterial polypeptide expressing nucleotide sequence isolated from the Sargasso Sea
aatgggcgccgcaaccaatccagattttgatgtggttgcttatgcaggatctcaggtgaaagccgcactagatgccaccataaaattaggaggggagaattatgtattttggggtgggagagagggctacagttcgctgttaaatactaacatgaaaagagaacttgatcatttggcaatgtttttgtcccaagcaagagattatggaaggaacaatggttttagcgggacttttcttattgagccgaagcctatggagccttcaaagcatcagtatgattttgatgttgctgcagtagcagcatttctaaaacattatgatctagataatgatttccggataaatattgaaaacaatcatgctactctggccgggcatacttttgaccatgaaatacaggcagcatacaattatggtctctttggcagccttgatataaaccaaggtgaccctcacaatggctgggatactgatgaatttcttcacaatatctatgatgcagtgcatatcatgctggttcttttagaggagggaggtctcaaaagtggtggtatgaattttgatgcaaaaaccaggcgcaattctacagatctagaggacatttttataggacatattaattcaatggatacacttgcaaggggtttaatgattgcttcaaaaatacttgaagatcccaactacaataagcttaagtccaatagatattcaagctttgatagcggagatggacactcctttgaaaaaggtggagtaaaccttgaacaacttactgaacttgctcagaaaaatatggagccagaacaaataagtggcaagcaggagttatatgaaatgctt

SEQ ID NO: 290956 - DNA, 595 bp, Unknown
  Bacterial polypeptide expressing nucleotide sequence isolated from the Sargasso Sea
tatgtctgactatttcaaagatatacctacaattaaatatgaaggtagagactctacaaatcctctgtcatttaaattttatgatgctaataaaaaaattctaggaaaaacattagaggaacatttgagaatggcagtatgttattggcacacttttaattggccggggagtgaccctttcggaggacagacttttttaagaccatggatggaagcaggagataaaatagaacaagcaaaagataagctcaataatgcattcgatttttttgaaaaattaggaataccatatttctgttttcatgatgtagatgttgctccagagggtgaaagtttttcagagacagaaaaaattcaaaaaactattattgatgaaatttcaaaaaaacttgaaacaagtaaagtaaaacttctttggggaacagcaaatttattcagccatcgcaggtacatgtctggtgctgctactaatcctgatcctgatgtttttcaatatgcagctgctcaagtgaagatgtgtatggaaaatacattgtatttaggtggacaaaattatgttttatggggaggcagagagggttacgaaacattctaa

SEQ ID NO: 290957 - DNA, 793 bp, Unknown
  Bacterial polypeptide expressing nucleotide sequence isolated from the Sargasso Sea
gatattactcatagattaggtggagaaaattatgttttgtggggtggtagagaaggatatgaaacgatattaaataccaatatgcaaatggaaatggagaatttagccagatttttagaattagtagtaaattataaatacaaaattggatttaaaggattaattttattagaacctaaacctcatgaacctacaaaacaccaatatgattttgatgccgcttcgtgtttagctttaattagaaaagcaggattagagcaagaaataaaattaaatatagaagtaaatcacgcaacattatcagggcataattttgaacatgaaatagcttatgcaatagcaaatgactctcttggtagtattgatataaatagaggggatactatgttaggctgggatactgatcagtttccaaataatcctgctgatttaattatggctttttatcacattttttcaaatggaggctttaaaacaggaggttttaacttcgatgctaaaattagaagacagtcaattgatccagaagatttattttatgcccatattggagctatggatgtatgtgctaaaacattaatagctactgaaaaaattataaatgataaaattatttctaaatatatttctgaaagatacaaaaattggaagggtgatctaggaaaatttatttataataaagatactgatttagaaaaaataactaatttagtagataataataatatttatcctagcccaaaatctggacaacaagagttgttagaaaacattttaaataaatatttataat

SEQ ID NO: 290958 - DNA, 1204 bp, Unknown
  Bacterial polypeptide expressing nucleotide sequence isolated from the Sargasso Sea
aatgcaagattattttaaaaatatacctgaaatacaattcgaaggtgaaaatagtgataatccattagcttttaaattttatgatgaaaataaaactattttaggaaaatcgatgaaagagcatttccgctttgctacatgttattggcacacttttacatggcctgggctagatccttttggtggacaaacatttgaaaggccatggatgggtaatggtgatccaataaaaatggcagagcaaaaacttaattgtgcatttgatttttttactaagatcaaaactccttttttttgctttcatgatagagatattgcaccagaaggatcaaattataaagaaacgcaaaaaaattttatgcatattattgatttaatggaaaataaaattgaagaaacaggtatgaaattattgtggggtacagcaaatgctttctctcataaaagatacatgagtggcgcatcaacaaatccagatccagaggtttttgcgtacaaagcagctcaagttaaagattgtatggatgcaacgttaagacttggagggcaaaattacgtattgtggggtggaagagaaggttatgaaacaatactaaatacagatatgtccaaagaaatggataatttaaaaagatttttagaacttgtagttaactacaaacacaaaattggttttaaaggccaaatattaattgagcccaaacctcatgagccaacaaaacatcaatatgattttgactctgctgcttgtctagcgtttatacgtaaggctggccttgaaggtgaaataaaacttaatattgaagcaaaccacgcaacactatcgggacacaattatgagcatgagatagcttatgcaattgcgaatgatgcattaggaagtcttgatataaatagaggagatacattaattggatgggatacagatcaatttccaaataatccagctgatttaataatggctttttattttatttttactaatggaggacttggaaagggaggtttaaattttgatgctaaaattagaagacaatcaattgatccagaagatctattttatgctcacataggaggtatggatgtttgtgcaaaaacattgattgctgttgaaaaattaattgaggataatgtaattcctaagtttaataaagatcgctattctgattgggatggagaattaggtaaatttatacacaacaaa

SEQ ID NO: 290959 - DNA, 1176 bp, Unknown
  Bacterial polypeptide expressing nucleotide sequence isolated from the Sargasso Sea
gttattggcatacatttacttggcctggccttgatccatttggtggtcaaacatttgatagaccttggatgcaagcaggtgatgaaatgaaaatggctgaaatgaaacttgacgctgcatttgattttttcactaaaataaaaacaccctttttctgctttcacgatagagatatttctcctgaaggatcaaattatgctgagacacaaaaaaatttctttcatattatagatttaatggaacaaaaaattaatgactcaggaatgaaattactgtggggaacagcaaatgctttttctcataaaagatatatgagtggtgcatctaccaatccagacccagaagtttttgcatataaagctgcacaagtaaaagattgtatagatgcaacgatgagattgggcggtcaaaactatgttctttggggtggaagagagggatacgaaactattcttaatactgacatgactaaggaaacagctaatcttcaaagatttctcgaattagttgttaattataaacacaagataggatttaaaggtcaaattttattggaaccaaaaccacatgaaccaactaaacatcaatatgactttgattctgcaacttgcttagcatttttacgaaaggcaggtttagaaaatgagattaaactaaatgttgaagttaatcatgcaactttatctggtcataattttgaacatgaaattgcttacgcaacttcaaacagcgccttaggaagcattgatattaatagaggtgacactttaataggttgggatacggatcaattcccaaataatcctgcagacttaattatgtcattttattttatttttaagaatggcggcttaggccaaggaggcatgaactttgatgcaaaaataagaagacaatctattgatgctgaagatttattccatgctcatattggaggcatggatgtttgtgcaaaaacacttattgcagttgaaaaattaatgaatgataatgttattcctaagtttattgaagatagatattcggattggaataaagaattgggtcagcttattcataataaagacactggattagatgatataaataaaaaagtaattgatgataatattgaaccagaacctcgttcaggaagacaagaatatctggaaaatatcttaaataaatatttgtagt

SEQ ID NO: 290960 - DNA, 1120 bp, Unknown
  Bacterial polypeptide expressing nucleotide sequence isolated from the Sargasso Sea
gaaagaccttggatgcaaaaaggagacccaattgaaaaagctgaagaaaaattagacgaagcctttgatttttttgacaaaattactactccatttttttgttttcatgatagagatatttctcctgaaggcaacacttactcagaaacacaaaaaaacttttttcatattatagatttaatggaaaaaaaactgagtcaaagtaaagtaaaattactttggggaacagcaaatgctttttctcacaaaagatatatggctggagcctcaacaaatccagacccagaagtttttgcttataaagctgctcaagtaaaagattgtatggaggcaacaatgagactaggaggccaaaattacgttttgtggggtgggagagaaggttacgaaacaattttaaataccaacatgaaattagaaatggataatcttgctcgttttttagaattagttgttaatcataaacataaaattggatttaaaggacagatattattagaaccaaaaccacacgaaccaactaagcatcaatatgattttgactctgcttcatgtttggctctaattagaaaagcaggacttgaaggtgaaataaaattaaatattgaagttaaccacgcaacattatcaggacataattttgaacatgaaattgcatatgcaattgctaataatgctttaggaagcatagatataaatagaggagacaccttattggggtgggatactgatcagtttccaaatagtcccctagaattattaatgcctttttatttcatattttctaatggaggctttaaacaaggtggattaaattttgatgctaaaataagaagacagtccatagatcctgaggatttattttatgctcatattggtggaatggatgtagctggacgagcattaattgctgtagaaaaaataattaatgataaagaattgtcaaattatattcaaaatcgttacaaaaaatgggatcatgatcttggtaaatttattcatagcaatgaaggaagcttagaatcaatcgccaataaagtcatcagtgaaaaaattgagccagcccctaaatctggacagcaggaatatttagaaaatattttaaacaaatatatttagt

SEQ ID NO: 290961 - DNA, 904 bp, Unknown
  Bacterial polypeptide expressing nucleotide sequence isolated from the Sargasso Sea
atggcagaacatttgcgtatggctgcctgttactggcacaacttctgctggaatggtcaggatgtatttggtcagggcacttttggccgtccatggttagaagccggtgacgctatggcgcaagccaaagctaaagccgatgtagcttttgaattcttcagcaagttgagtattccttattactgcttccacgacatcgatgttgcgcctgaaggcaacagcattaaagagtacatcaataacttctctgctatggtggatgtgcttgagcaaaagcaagctgaaactggcgtgaaactgttatggggcactgccaacttattcagcaacccacgttatgctgcaggtgctgctaccaatccaaatcctgaaatcttcagctacggcgcaacccaagttttccatgcgatgaacgcaactcagcgtttaggcggcgaaaactacgtattgtggggcggtcgtgaaggctacgaaacactgctgaacactgacctgcgtcaggagcgtgagcaactgggccgctttatgcaaatggtggttgagcataagcataaaattggatttaaaggcactttactaatcgaacctaaaccacaggaaccaaccaagcaccagtacgattacgactctgcaactgtgtatggtttcctgaagcagtttggtctggaaaaagagttcgccgtcaatattgaagccaaccacgccaccttggctggtcattcgttccatcatgaagtggccactgcgatttctcttggcatttttggcagcatcgacgcgaaccgtggtgatgcacaaaacggctgggatactgaccaattcccgaacagcgtagaagagctgagcctggtgatgtacgaaattctgaaagctggtggcttcaccactggtggttttaactttg

SEQ ID NO: 290962 - DNA, 1096 bp, Unknown
  Bacterial polypeptide expressing nucleotide sequence isolated from the Sargasso Sea
atgtctgactattttaaagatattccatcgattaaatttgaaggtaaagactctaaaaaccctctcgcgtttaaatactatcaatcagatagaaaaattttaggaaaaacactcgaagaacatctacgtatggcagtatgttactggcatacatttaactggccgggtggagatccttttggaggccagacttttcttcgtccatggatggagtccggggataaattagagcaagcaaaagataaactaaataatgcttttactttttttgaaaaattaggagtcccttttttttgttttcacgatgtcgacgtagctcctgaaggagataatttttcagaaacagagaagttacaaaaaaccatagttgatgaaatttcaaaaaaattagaaactagtaaggttaaacttctttggggaactgctaatctttttagtcatcgaaggtatatgtcaggagctgccactaatcctgatcctgaagtttttcaatatgctgctgctcaagtgaagatgtgtctagaaaatactcaatttcttgggggccaaaactatgttttatggggaggtagagagggttatgaaacaattctcaatacgaatatgaaacaagaatatgatcagctaggtagatttttgaacatggtagctgaacataagcataaaattggtttcaaaggtttacttttgattgaacctaaacctcatgaaccaactaaacaccagtatgattttgactctgcaaatgtttttgcatttctccaaaaatacggtctagagaaagaattcaaactaaatattgagcaaaatcacgctattttggctaaacactcttttgaacatgagatagcctacgctctttccaataatattcttgggagtattgacattaatagaggtgattatttagttggatgggatactgaccaattcccaaacaatgttgaagaacttgtattgcctttttattacatttttaagaacgggggtttttcatcaggagggcttaacatggacgctaagattagaagacaatccattgacccagaggatcttttttatgctcacattggctctcatggatacatgtgctaga

SEQ ID NO: 290963 - DNA, 1324 bp, Unknown
  Bacterial polypeptide expressing nucleotide sequence isolated from the Sargasso Sea
catgtcgtatttcgaacacattcccgcgattcgctacgaaggcccgcaatcggacaacccgcttgcgtatcaccattacgaccccgagaagcgcgtgctcggcaagacgcttgccgagcatctgcggatcgccgtctgctattggcacacgttcgtctggccgggccacgacatcttcgggcaggccgcattccagcggccgtggcagcagccgggcgacgcgctcgaacgcgcacggatgaaggccgatgccgcattcgaattcttcacgaagctcggcacgcctttctatacgttccatgacaccgacgtcgcgccggaaggcgacagcctgcgcgaatacgcggcgaatttcgcgcggatggtcgactatctcggcgagcgccagcaggcaagcggcgtgcggctcctgtggggtacggcgaacctgttctcgcacccgcgcttcgcggccggcgccgcgacgaacccgaaccccgacgtgttcgcgtgggccgcgacccaggtgtgccacgcgctcgacgcgacccaccggctcggcggcgaaaactacgtgctgtggggcggccgcgaaggctacgagacgctgctcaataccgacctgaagcgcgagcgcgaccagttcgcccgcttcctgtcgatggtcgtcgagcacaagcaccggatcggcttcaagggcgcgctgctgatcgagccgaagccgcaggagccgaccaagcaccagtacgactacgacgtcgcgaccgtgcatggcttcctcgtgcagtacggattgcagaacgagatccgcgtgaacatcgaggcgaatcacgcgacgctcgccggccattcgttccatcacgagatcgcgaatgcgttcgcgctcggcgtgttcggcagcgtcgacgcgaaccgcggcgatccgcagaacggctgggacaccgaccagttcccgaacagcgtcgaggagctgacgctcgcgttctacgagatcctgcgccacggcggcttcacgaccggcgggatgaacttcgacgcgaaggtgcgccgccagagcatcgatccggaagacctgttctacggccacgtcggcgcgatcgacgtgcttgcgctcgcgctcgaacgcgcggcggtgctggtcgagaacgaccggctcgacgcgctgcgccggcaacgctatgcgcagtgggacgacgcattcggccgccagatcctgtcgggcggctatacgctggagtcgctcgcggccgatgcgctcgcgcgcggcgtgaacccgcggcacgtgagcggcgcgcaggagcggctggagaacatcgtgaaccaggcgatctacgggctgcgctga

SEQ ID NO: 290964 - DNA, 751 bp, Unknown
  Bacterial polypeptide expressing nucleotide sequence isolated from the Sargasso Sea
tatgccggcttattttgaccaactcgatcgtgttcgttttgaaggtactcaatccaccaacccgctcgcatttcgccattacaatcctgacgaaatcgtgttgggcaaacgtatggaagatcatctgcgttttgctgcctgctactggcataccttctgctggaacggtgcggatatgttcggtatgggcgctttcgatcgtccgtggcagcagcctggtgaagcactggcgctggcgaaacgcaaagcggacgtggcatttgagttcttccacaagctgaacgtgccttactactgcttccatgatgtggatgtctcgcctgaaggggcttcactgaaagagtacaaaaacaactttgcgcagatggttgatgtgctggcggcaaaacaggaacagagcggcgtgaagctgctgtggggaacagcaaactgctttaccaacccacgctacggtgcgggtgcggcaacaaacccggatccagaagtgttcagctgggccgccacgcaggtggttacggccatggatgccacgcacaagttaggcggtgaaaactacgttctgtggggtggtcgtgaaggctatgagacgctgctgaataccgatctgcgtcaggaacgtgagcaaattggtcgcttcatgcaactggtggtggaacacaaacacaaaaccggtttccagggcactttgcttatcgagccgaaaccgcaggaaccgaccaagcaccagtacgactacgatgcggcgctctga

SEQ ID NO: 290965 - DNA, 866 bp, Unknown
  Bacterial polypeptide expressing nucleotide sequence isolated from the Sargasso Sea
tatgagtggtgcttctaccaatccagatccagaagtttttgcttacaaagctgcacaggtcaaagattgcatggatgcaactttaagactaggtggacaaaactatgttctctggggtggaagagagggatacgaaacaatccttaacactgacatggcaagagaaacaaataatcttcaaagatttttagaattagttgttaactacaaacacaagataggatttaaaggtcaaattttattggaaccaaaacctcatgaaccaactaaacatcaatatgattttgattcagcaacttgcttagcttttttacgaaaagctggtttggaaaatgagattaaactcaatgttgaagtaaatcatgctactttatctggccacaattttgaacatgagattgcttatgcaacttcaaataaagcattaggaagtattgatattaatagaggtgatactttattaggatgggataccgatcagtttccaaataatcctgctgatttacttatgtcattttattttatctttaaaaatggaggtttaggtcagggaggtatgaactttgatgcaaaaataagaagacaatctattgatcctgaagatatattttatgctcatatcggaggaatggatgtttgtgccaagacactgatagctactgaaaaacttatgaatgataatgtgattcctaagtttattgaagataggtattctgattggaacgaaaatctaggacaatttattcataataaagatactggattagatgatattaacaaaaaagtaattcatgataatattgagccagaacctcgatcaggtagtcaagaatatctagaaaatatcttaaataaatatttgtagt

SEQ ID NO: 290966 - DNA, 1330 bp, Unknown
  Bacterial polypeptide expressing nucleotide sequence isolated from the Sargasso Sea
atgacaacaataggaaataaagaattttttaaagggatcaataaaattgaatttgaaggtaaagactccaaaaatccattagcctttaaatactataacccaaatcaaatagttgcgggcaagacaatgcgagatcattttaagtttgcagttgcttattggcactcattctgtggacaaggtgcagatccatttggagttggtactcaaaattttccatgggataagtctaaagatccttttgaagcatcaaaggataaggcagatgcagcatttgagttcatatcgaagatgggatttgattatttctgctttcatgattttgatttaattgaagagtcagatgatttttcagaatctgaagatagattgaactttattacagattacgttcaaaacaagatgaaaaaatctggaataaaattactttgggggactgccaactgcttttcaaaaccacactacatgaatggagctgcaacaaatcctgattttgacgtcgtttctagagcgggaggccaaattaaacttgctttagatgcaacaataaaattaaatggcgaaaattatgttttttggggaggacgagaagggtacatgtcattattgaatacagatatgaaaagggagcttgatcacatggctcaatttttaaaaatgtgtagagattacgcaagatcaaagggatttaaaggcactttctttattgaaccaaaaccaatggaaccatctaaacatcaatatgattttgatactgcaacatctataggttttttaaaggaatatggcttagaaaaagattttaagattaacatcgaagttaaccatgctactttagctcaacatacttttcaacatgaattaactgtggctgctaaatcaggaatgttgggaagcattgatgcaaataggggtgattatcaaaatgattgggatactgatcaatttccaacaaacattcaagaaactacagaagcaatgttagtttttttaaaagagggaggtcttcaaggtggtggaattaatttcgatgccaaacttagaagaaattccacagatctcgaagatttatttttggctcatatcggaggggcagatacttttgcaagatcattattgattgcagataaacttttatctgaatcacctttaccagaaattttaaagagtcgatatgaaagctttgactctggaaatggaaaaaagtttgaagaaggaaaattaaagctcgaggacctttatagttttgcaaaactaaatggacatttaagtcttaaaagtggaaagcaggaaatgattgagaatatactattcaattatattagataaa

SEQ ID NO: 290967 - DNA, 754 bp, Unknown
  Bacterial polypeptide expressing nucleotide sequence isolated from the Sargasso Sea
tttgggaggtagggaaggatatgaaacaattctttataccaatatgggattagagattgataacttaaaacgatttcttgaacttgttgtagattataagcataagattggttttgatggtcaaatcttacttgagcctaaaccacatgaacctactaaacatcaatatgattttgatgcagcttcatgtttagcttttcttagaaaagcaggcttagagaatgaaataaaattaaatattgaagctaatcatgcaaccttatcaggacacagctttgaacatgaaattgcttatgcaattgctaacaatgcacttggaagtctagatatcaacagaggtgataccttgttaggatgggatactgatcaatttccaaatagtgttggtgaattaattcttcctttttatcatattttttcaaatgggggtattggtaatggagggttaaacttcgatgcaaaaattcgaagacaatcaatagagcctgaagatttattttacgcccatattggtggtatggatatatgtgctagaacacttttagcagttgaaaaaatgatcaatgataaaacactctctaattatgtttcaaaaagatatggggattggaaaaaagatctaggcaaatttatacatgataaaagtacttctcttgatgctattcatcaaaaagtgcttaatgataatttagaacctcaaccaagatcaggaaatcaagagtatttagaaaatattttaaacaagtacctgtag

SEQ ID NO: 290968 - DNA, 1315 bp, Unknown
  Bacterial polypeptide expressing nucleotide sequence isolated from the Sargasso Sea
tatgacaaattattttaaaaatattcctgaaataaaatttgaaggagaaaatagttcgaacccattagcatttaaattctatgatgaagataaagttgttttaggaaaaacaatgaaagaacatttaagatttgcaacttgttattggcatacatttacttggcctggccttgatccatttggtggtcaaacatttgatagaccgtggatgcaagcaggtgatgaaatgaaaatggctgaaatgaaacttgatgctgcatttgattttttcactaaaataaaaacaccctttttctgctttcacgatagagatatttctcctgaaggttcaaattatgcggagacacaaaaaaatttctttcatattatagatttaatggaacaaaaaattaatgactcgggaatgaagttactttggggaacagcaaatgctttttctcataaaagatatatgagtggtgcttctaccaatccagacccagaagtttttgcatataaagctgcacaagtaaaagattgtatggatgcaacgatgagattgggtggtcaaaactatgttctttggggtggaagagaaggatacgaaactattctaaatactgacatgactaaggaaacagctaatcttcaaagatttttagaattagtcgttaattataaacacaagataggatttaaaggtcaaattttattggaaccaaaacctcatgaaccaactaaacatcaatatgactttgactctgcaacttgtttagcgtttttacgaaaggcaggtttagaaaatgagattaaactaaatgttgaagttaatcatgcaactttatctggtcataattttgaacatgaaattgcttacgcaacttcaaacagcgccttaggaagcattgatattaatagaggtgatactttaataggttgggatacggatcaattcccaaataatcctgccgacttaattatgtccttttattttatttttaaaaatggcggcttaggccaaggaggcatgaactttgatgcaaaaataagaagacaatctattgatgctgaagatttattccatgctcatattggaggcatggatgtttgtgcaaaaacacttattgctgttgaaaaactgatgaatgataatgttattcctaagtttattgaagatagatatgaagactggaataaaaatttgggtcagtttattcataataaagatactggattagatgatataaataaaaaagtaatcgatgataatattgaaccagagcctcgttcaggaagacaagaatatctggaaaatatcttaaataaatatttgtag

SEQ ID NO: 290969 - DNA, 1315 bp, Unknown
  Bacterial polypeptide expressing nucleotide sequence isolated from the Sargasso Sea
atgtcagattatttcaaaaatattagttcaatagaatttgaaggtgagaaaagtgataatccacttgctttcaaattttatgatgaaaataaaattgttcttggaaaaacaatgaaagaacattttagattcgctacttgctattggcatacttttacttggcctggacttgatccatttggaggtaaaacatttgaaagaccttggatggaacaaggagatcaacttaaaatggcagagataaaattagaagcagcttttgattttttttcaaaaataaaaacgccatttttctgttttcatgacagagatgtagcaccagagggtataaattataaagaaagtcaaaaaaattttctacatatagttgatttaatggaaaaaaaaattgaatcatcaggagtaaaattactttggggaactgcaaatgctttttcacataagagatatatgagtggtgcttccaccaatcctgatcctgaagtatttgcgtataaagcggctcaagtaaaagattgtatagatgcaacgatgaggcttggtggacaaaattatgttctatggggcggtagagagggttatgaaacaattttaaatacagatatgaaaaaagaaactgataatttaaaaagatttttagaattagttgtaaattataaacataaaattggatttaaaggtcagatattattagagcctaaacctcacgagcctactaaacatcaatatgattttgattctgcatcatgtttagcatttctaagaaacgcaggacttgaaaatgaaataaaacttaacatagaagttaatcatgcaactttgtctggtcataattttgaacatgaaatagcttatgcagtttgtaataattcgctaggaagtatagatataaatagaggtgatacgttagttggatgggacactgatcaatttcctaataatagcgctgatttgattatggcattttattttatttttaaaaatggaggcttaggacaaggtggaatgaattttgatgctaaaattagaagacaatctcttgatccagaagatttgttctatgcacatattggaggtatggacatttgtgcaaaaacattaatatcagttgaaaaaatgattaatgataatgttattcctaaatttgttgaagatcgatattcagattggaataatgatctaggaaaatttatacataacgaagaaacaggactagatgatattaataaaaaagtactaaatgatgatattgagcctgaaccccgttctggaagacaagaatatttagaaaatatacttaataaatatttatagt

SEQ ID NO: 290970 - DNA, 1315 bp, Unknown
  Bacterial polypeptide expressing nucleotide sequence isolated from the Sargasso Sea
aatgagtagttattttaaagatatttctaaaattcagtatgaaggagttgatagcaataatccgctaagcttcaaatactatgatgaagataaagttgttttaggaaaaaagatgaaagatcatttgcgttttgcaacttgttattggcatacttttacttggccaggtcttgatccatttggaggaccaacttttgaaagaccgtggatgcaacaaggagatcctattgaaaaagcagaagaaaaactagatgaagcatttgatttttttgacaaaattaccactccttttttttgttttcacgatagagatatttctccagaaggaaaaaattattctgaaacacaaaagaatttttttcatattatagatttaatggaaaaaaaattaagtaaaagtaaagtaaaattactttggggaacagcaaatgctttttctcatcgacgatatatggctggagcatccactaatcctgacccagaagtttttgcatataaggctgctcaagtaaaagattgcatggaagctacaatgcgtctcgggggccaaaactatgttctttggggaggcagagaaggatacgaaacaattttgaatactaatatgaaattggaaatgaataatctagctcgttttttagagttagttgttaatcataaacataaaattggatttaaaggtcaaatattattagaaccaaaaccacatgaaccaacaaaacatcaatatgattttgactcagctgcttgtttagcacttattagaaaagcaggacttgaaaatgagatacatttaaatatcgaagttaatcatgctactttatcaggtcataattttgaacatgaaattgcttatgcaattgcaaataatgctttaggaagtgttgatattaatagaggagataccttattgggctgggatacggatcaatttccaaacaatcctctagagttattaatgcctttttattacatattttctaatggtggatttaaacaaggaggattaaattttgatgctaaaatacgaaggcaatcaattgatcctgaagatttattttatgctcatattggcggtatggatgttgctgcacgatcattaattgctgttgaaaaaatgattaaagacaaagaattatcttcctatattcaaaatcgttacaaaaaatgggatctggatcttggtaaatttattcatagtgaggaaggtgatttagaatctatagctaataaagtaattaatgaaaacattgaacccaaaccgcagtctggtcagcaagaatatctagaaaatattttaaacaaatatctttag

SEQ ID NO: 290971 - DNA, 1266 bp, Unknown
  Bacterial polypeptide expressing nucleotide sequence isolated from the Sargasso Sea
agctcaacaaattttcatttaaatattacaatccagacgagatcataaacaacaagagaatggaagatcatttaaggtttgctgcatgttattggcataacttcgtttggccaggtacagatccatttggtggggatacttttgaaaggccttggtttggtaatactataaagcacgccaagctaaaagctgatattgcttttgaaatgtttagtattttaaatatcccttatttttgttttcatgatcatgatgttaggccagaaggtactggatttaaggaaaatacacgtaatttaaatgaaatggttgattactttcaattcaaaatggaggaatgcaaagtaaaattactttggggaactgcaaacttattttcccataaacgttatatggcaggggctgcgacaaatccagaccctgagatttttgcgtttgctgcagcgacagttaagagctgtattgatgccactcaccagcttaaaggtgaaaattatgttttatggggagggcgtgaaggttacgaaactcttttaaatacggatatcaaatcagaaattaaccagcttggaacatttttaaatttagttgtggattataaacataaaattggctttaaaggcacaatacttattgagcctaagccacaagaaccaacgaaacatcaatatgattatgacgttggtaatgtttttgggttcttgaaaaagtatggtttagagaatgaggttaaagtaaatattgaaactggccatgcttttcttgctaaccattcttttgagcatgaaatagctttagcttgcgcattaggtatttttggatcaatagacatgaatagaaacgacgttcaatctggctgggatacagaccagtttcctaataattatttagatgttgctcttgcttattatcatattctattaaacggcggttttaaatctggaggtacaaattttgatgccaaacttaggagacaatcattagatccagaagatttattattagctcatataggcgcaatggacacttgcgctctaggtttcaaatcagctttaaaacttttaaaaaatggtgatcttaaagaatttattgataataggtactctaattggagcaaaacatttggtaagtcattgatgaatagagaaatggatctagaacaaattactagatgggttgaagataataatataaatccaaatccagtttcagggaaacaagaatatctcgaaaacattttccttcaaaatgtaattatgaaataag

SEQ ID NO: 290972 - DNA, 1175 bp, Unknown
  Bacterial polypeptide expressing nucleotide sequence isolated from the Sargasso Sea
tattaggcatacatttacttggcctggtcttgatccatttggtggtcaaacatttgatagaccgtggatgcaagcaggtgatgaaatgaaaatggctgaaatgaagcttgatgctgcatttgattttttcactaaaataaaaacaccatttttctgctttcacgatagagatatttctcctgaaggttcaaattatgctgagacacaaaaaaatttctttcatattatagatttaatggaacaaaaaattaatgaatcaggaatgaaattattgtggggaacagcaaatgctttttctcataaaagatatatgagtggtgcatctaccaatccagacccagaagtttttgcatataaagctgcacaagtaaaagattgtatggatgcaacgatgagattgggtggtcaaaactatgttctttggggtggaagagaaggatacgaaactattcttaatactgacatgactaaggaaatagctaatcttcaaagatttctcgaattagtcgttaattataaacacaagataggatttaaaggtcaaattttattggaaccaaaacctcatgaaccaactaaacatcaatatgattttgactctgctacttgcttagcgtttttacgcaaggcaggtttagaaaatgagataaaattaaatgttgaagttaatcatgcaactttatctggtcataattttgaacatgaaattgcttatgcaacttcaaacagtgccttaggaagtattgatattaataggggcgatactttaataggttgggatacggatcaattcccaaataatcctgcagacttaattatgtcattttattttatttttaagaatggcggcttaggtcaaggaggtatgaactttgatgcaaaaataagaagacaatctattgatgctgaagatttatttcatgctcacattgggggtatggatgtatgtgcaaaaacacttatcgctgtagaaaaattaatgaatgataatgttattcctaagtttattgaaaatagatatgaagactggaataaaaatttgggacagtttattcataataaagatactggattagatgatataaataaaaaagtaatcgatgataatattgaaccagaacctcgttcaggaagacaagaatatctggaaaatatcttaaataaatatttgtagt

SEQ ID NO: 290973 - DNA, 1318 bp, Unknown
  Bacterial polypeptide expressing nucleotide sequence isolated from the Sargasso Sea
atggctgcctttcccgatattcccaaaattcaatacgaggggcctgaatcgaagaatccccttgctttccgctggtacaacccggatgaagtagtggctgggaagaccatgagagaacattttcggttcactgtggtgtattggcacacgtttcggggaacgggtagcgatccatttggggcggcaacgcttcaacgtccttgggacgatggcacggaaagtgtcgacaacgcctgtaaccgagcacgggcggcatttgaattatttgagaaacttgatgcaccgttttacgcgttccatgatcgtgacgttgcgccggaagggcaaacgttggctgagagtcattcaaatctcgatgcagtagcgaaggtgctcaaagaagagcaggaacgatctggtgttgggttattatggggcaccgcgaatctctttagtaatccgcggtatatgcacggtgccgcaacgtcatgtaacgttgaagtgtatgcctatgctgccgctcaggtaaaaaaggccattgaagttacgaacgaacttggtggcgaaaactatgtgttctggggcggtcgtgaaggttaccaatgtttgtataacactgatatgaagcgtgagcttgatcatctggctcaattcttccacatggcagtcgatcatgccaaatcgattggctttagcgggcagtttctcattgaaccaaagccaaaagagcctacaaagcatcagtatgattcagatgtggcagcatgcgtgaactttttacgtgcctatgatctaacagactcattcaagcttaacttggagacaaaccatgccacacttgcgggtcatgaaatgttgcacgagttggaagcagccggcagtcaggggttccttggttcgattgacgccaatacaggtgatctattgcttggttgggacacagaccagttcgcgacaaactactacctgacaacgcagattatgctggctttgttgaaatatggtctcagtccgggtggtgtgaactttgatgccaaggtgcgtcgtgaaagcttcgagccggtcgatctgttctatgcccatatcggaagcatggacgcctttgcccgaggcctgcgagttgccgcggcaattcgcgaagagaacgctctttcaacagtagtaactgaacgatacaagagctgggatggtgatcttggaaagaagattgaagccggcgagtgcagttttgctgaacttgagaagcttatgctggagaagggtgaagctgccgcaaataccagtggtcggcaagagcttcttgaaaatattgtgaatcggtatctcgacaaacgctaga

SEQ ID NO: 290974 - DNA, 823 bp, Unknown
  Bacterial polypeptide expressing nucleotide sequence isolated from the Sargasso Sea
atgttttcaattcttggacaaccctacttttgtttccatgatgctgatgttcgtccagatcaaggtaatttcccagataatttagcaacgcttaacgaaattacggattactttttagataaaatgaaaaatcaaaaaacaaaattactttgggggacggctaatatgttcagtcatcggagatggatcgctggagcatcgaccaatccagatcctgacattttcgcatttgccgtagcgacagttaaaagctgcatggatgttacccaaaaactaggtggtgaaaactatgtgttatggggcggaagagaaggttatgaaacattactcaacacagatttagaaaaagagctagatcagatgggccgatttttatcgatggttgttgattataaacacaaaattggatttccaggtatgatacttgttgagccaaaaccacaagaaccatcaaaacatcagtatgattttgacgtggcaacctgcattgggtttctgagaaaatataatttggaaaatgaagttaaaataaatattgaacaagggcatgctattttggccggccattcctttgaacacgaaattgcattggctgtttcagaaggtatgcttggttcaatcgatatgaatagaaatgattaccaatcgggctgggatactgatcaatttccaaacaatactccagaggttgcactagcttactaccacatcataaaaggaggtggttttcagactggcggaacaaatttgatgccaactcagaaggcatcaattgacgctgaaaccttattgctgctcacgttggagcgatggatgtttgtgc

SEQ ID NO: 290975 - DNA, 1309 bp, Unknown
  Bacterial polypeptide expressing nucleotide sequence isolated from the Sargasso Sea
tatgtctgattatttcaaagatatacctacaattaaatatgaaggtagagactctacaaatccactttcatttaaattttatgatgctaataaaaaaattctaggaaaaacattagaggaacatctgagaatggcagtatgttactggcacacttttaattggccggggggtgacccttttggaggacagacttttttaagaccatggatggaagcaggagataaaatagaacaagcaaaagataagctcaataatgcattcgatttttttgaaaaattaggaataccatatttctgttttcatgatgtagatgttgctccagagggtgaaagtttttcagagacagaaaaaattcaaaaaactattattgatgaaatttcaaaaaaacttgaaacaagtaaagtaaaacttctttggggaacagcaaatttattcagccatcgcaggtacatgtctggtgctgctactaatcctgatcctgatgtttttcaatatgcagctgctcaagtgaagatgtgtatggaaaatacaatgtttttaggtggacaaaattatgttttatggggaggcagagagggttacgaaacaattctaaatactaatatgaaacaagaatatgatcagcttggtagatttttgaacatggtagctgagcataagcacaaaattggtttcaagggtttacttctgattgagccgaaaccccatgagccaacgaaacatcaatatgattttgactctgctaatgttttcgcatttcttcaaaaatatggtttagaaaaagaattcaagctaaatatcgagcaaaatcacgctattttagcaaaacattcattcgagcacgagattgcatatgcactttccaatgacatctttgggagtattgatattaacagaggagactatttagtaggatgggatacagaccaattccctaacaatgtagaagaattagttttgcctttttactatatttttaaaaatggcggtttttcctcaggaggtcttaacatggatgctaagattagaagacaatcaatagatcctgaggatctattctatgcacatattggctctatggatacttgtgctagaactcttattgctgttgaaaaaatgattaatgatggtagttatgagaattttttaaaacaaagatatgaacagtgggcctctgaaaaacaactaatgacttcaatgtctcttgaagatattcataaaaatgtcattgctaaaaatataaaccctcaaccaaagtccggtcgccaagaatatcttgaaaatctaattaattcttttgtcgattaa

SEQ ID NO: 290976 - DNA, 1315 bp, Unknown
  Bacterial polypeptide expressing nucleotide sequence isolated from the Sargasso Sea
aatgagtagttattttaaggatatttctaaaattcagtatgaaggagttgatagcaataatccactaagcttcaaatactatgatgaagataaagttgttttaggaaaaaaaatgaaagatcatttgcgttttgcaacttgttattggcatacttttacttggccaggtcttgatccatttggaggtccaacttttgaaagaccgtggatgcaacaaggagatcctattgaaaaagcagaagaaaagctatatgaagcatttgatttttttgataaaattaccactccttttttctgttttcatgatagagatatttctccagaaggaaaaaattattctgaaacacaaaagaatttttttcatattatagatttaatggaaaagaaattaagtaaaagtaaagtaaaattactttggggaacagcaaatgctttttctcatcgacgatatatggctggagcatccactaatcctgatccagaagtttttgcatataaggctgctcaagtaaaagattgcatggaagctacaatgcgtctcgggggtcaaaactatgttctttggggaggcagagagggatatgaaacaattttaaatacaaatatgaaattggaaatgaataatctagctcgttttttagagttagttgttaatcataaacataaaattggatttaaaggtcaaatattattagaaccaaaacctcacgaaccaactaaacatcaatatgattttgactcagctgcttgtttagcactgattagaaaagcaggacttgaaaatgagatacatttaaatattgaagttaatcatgcaacgttatcaggtcataattttgaacatgaaattgcttatgcaattgcaaataattctttaggtagtattgatattaatagaggggataccttattgggttgggatacggatcaatttccaaataatcctctagagttattaatgcctttttatcatatattttctaatggtggattcaaacaaggaggattaaattttgatgctaaaataagaagacaatcaattgatccggaggatttattttatgctcatattggcggtatggatgttgccgcacgatcattaattgctgttgaaaaaatgattaacgataaagaattatctacatatattcaaaatcgttacaaaaaatgggatcaggctctaggaaaatttattcatagtcaggaaggcaatttagagactatagctaataaagtaattagtgaaaatattgaacccaaaccgcagtcgggtcagcaagaatatctagaaaatattttaaacaaatatctttag

SEQ ID NO: 290977 - DNA, 679 bp, Unknown
  Bacterial polypeptide expressing nucleotide sequence isolated from the Sargasso Sea
aatgtcatttgatgatgccatcaaggcattatctttagatgccttgaaaaatgtaaaagatggacatgttattggtttaggaagtggacgtgcagcaactgcattagttaaatcattatcaaaatatatcaaaacaaaaaaaattacagtaaaatgtgtaccaacctcaatgcagatcaaattaatcgcagaaaaaggaggtttagaattaattgatgcagatcaaattgataaaatagatttagtatttgatggtgcagatcaaattgataaaaataaatttttgataaaaggaggtggcggagcattactaaaagaaaacatactgatcagtgctgcaaaaaaagtaatcataatggcagatagttcaaaatttgtcaaagattttaacagaacaattccaattgaagttcaaccctcagcaagacagattgtttggaaaaaaattgaaaagatagacggtaaaccagaattgagaacactagatagagggtatccatttttcacagaaaattcaaacattattcttgattgtggttttggagtaatcaaaaatccaaaaatactacaacaaaaattactcaacattccaggagtaattgaagtcggaatttttacaagaaaaccagatataatttacaaagcaaaagcaaacggtaaatttgaaattttaacttaa

SEQ ID NO: 290978 - DNA, 283 bp, Unknown
  Bacterial polypeptide expressing nucleotide sequence isolated from the Sargasso Sea
atgaatcaacaaaaaaaacgtgcagcggactccgcattagaatacattaaaccaggaatgatagttggtgtcggaacaggttccacagtcaacttttttattgacgccctatctgaaattaaaaataaaatcgagggcacagttgcaagctctctagcaacggcaaaaagattaaaaaaccacggcatacctgtctatgagctaggtgcagcaggaaaagttgatatctatattgacggtgctgacgaatttactcaacacaaacaccttatcaaaggcggag

SEQ ID NO: 290979 - DNA, 655 bp, Unknown
  Bacterial polypeptide expressing nucleotide sequence isolated from the Sargasso Sea
gttgaacgctgacgagcttaaacgtgccgccgccgccgaggctcttaagtcggttgagagtggaatggcgcttggacttgggacaggaagcacagtccgccatctcgtggatcttcttggtgaagaaatccgtagtggacgcctgtctgatatagttggagtccccacgtcagtgaagactgagaatcaggcagttgaagttgggattccattgatcgaactcggatcacgaactgagctcgatctcacgattgatggagccgacgaggtcgcgcctggacttgatttgatcaagggtctgggagctgcactgctacgtgagaagatggtagctcaggcgtcgcggcgcctgatcattatctctgatgacagtaaaatcgttagtaagctaggaacgagggtccctcttccagtggaggtcgtggattggtcgctagaggctctcaagacgtttatcgaatcgacaggtgcggaagctcaactccgtcttgattcgagtggtaaggcggtacgaagcgacaatggcaatgtctttctcgacgcccgatatccggttgggttggaggatgcggtggcacttgaagcagaacttctccatcgagcgggcatcgtcgacactggactcttcttgggtatggccgaagctgctgtgata

SEQ ID NO: 290980 - DNA, 444 bp, Unknown
  Bacterial polypeptide expressing nucleotide sequence isolated from the Sargasso Sea
tagatccaggattccaattaataaaaggaggaggagcttgccatgtgagagaaaagttagtggcatctaaagcggatcaattgttgattgttgttgatgaaactaaacttgtacaaaatcttaatcaatctttccccttacctatagaagttcttccaaatgcttggaagcaagttcagggaatgatttcagaaatgaatggcagttcttctttaagaatggctactaaaaaagctggcccagttgttactgaccaaggcaatctcatcctagatgtattattcaatgatggtataaagaatccaaaagaaattgaaatgacgattaataatattccaggagtattagaaaatggattattcattgatcttacagataaagtattagttggaaaaattgaaaacaatactccaatggtctactcaccctcaagagctagctaat

SEQ ID NO: 290981 - DNA, 679 bp, Unknown
  Bacterial polypeptide expressing nucleotide sequence isolated from the Sargasso Sea
atgtcatttgatgatgccatcaaggcattatctttagatgccttgaaaaatgtaaaagatggacatgttataggtttaggaagtggacgtgcagcaactgcattagttaaatcattatcaaaatatatcaaaacaaaaaaaattgcagtaaaatgtgtaccaacctcaatgcagatcaaattaatcgcagagaaaggaggtttagaattaatcgatgcagatcaaattgataaaatagatttagtatttgatggtgcagatcaaattgataaaaataaatttttgataaaaggaggtgggggagcattactaaaagaaaacatactgatcagtgctgcaaaaaaagtaatcataatggcagatagttcaaaatttgtcaaagattttaacagaacaattccaattgaagttcaaccctcagcaagacagattgtttggaaaaaaattgaaaaattagatggtaagccagaattgagaacactagatagagggtatccattttttacagaaaattcaaacattatacttgattgtggttttggagtaatcaaaaatccgaaaatcctacaacaaaaattactcaatattccaggagtaattgaagttggaatttttacaagaaaaccagatataatctacaaagcaaaagcaaacggtaaatttgaaattttaacttaat

SEQ ID NO: 290982 - DNA, 677 bp, Unknown
  Bacterial polypeptide expressing nucleotide sequence isolated from the Sargasso Sea
ggctcttaagtcagttgagagtggaatggcgctcggacttgggacgggaagcacagtccgccatctcgtggatcttcttggtgaagaaatccgtagtggacgcttgactgatatagttggagtccccacgtcagtgaagactgagaatcaggcagttgaagttgggatcccattgatagaactcggatcacgaactgagctcgatctcacgattgatggagccgacgaggtcgcgcctggacttgatttaatcaagggtctgggagctgcattgctgcgtgagaagatggtagctcaggcgtcgcggcgcctgatcattatctctgatgacagtaaaatcgttagtaagctaggaacgagagtccctcttcccgtggaggtcgtagactggtcgctagaggctctcaagacgtttatcgaatcgacaggtgcagaagctcaactccgccttgattcgagtggtaaggcggtacgaagcgacaatggcaacgtctttctcgacgcccgatatccggtggggttggaggatgcggtggcgcttgaaggagaacttctccatcgagcgggtatcgtcgacactggactcttcttgggcatggccgaagctgctgtgatagcatctcccgagggcgtctacacgctcactcctgaatcgcacatacctttgctaccatgaa

SEQ ID NO: 290983 - DNA, 289 bp, Unknown
  Bacterial polypeptide expressing nucleotide sequence isolated from the Sargasso Sea
attggttgataaaacaaagatggtggaaaagcttggtgacttccctcttccgatcgaagtaattccagaggcaagaagttctgttgcgagaaaaattgtagctttgggtggactaccaatatatagagaaggttttagtactgatcaaggaaatcatattattgacgtaaaagaaatagatatcagtgaacctgaagccctagaaattttattaaataatattccgggtgttgttgataacggaatctttgcttttaataagccgaaagttgtgttggtatctgactag

SEQ ID NO: 290984 - DNA, 149 bp, Unknown
  Bacterial polypeptide expressing nucleotide sequence isolated from the Sargasso Sea
taatttaaagattcttgatccaattgatcttgaaaatcacatcaacaatatccctggggttgttacaaatgggatatttgcaaaaagatctgccgatgtaatgatcattggtagtgaatcagggccagagaccaagataaaaaactgat

SEQ ID NO: 290985 - DNA, 397 bp, Unknown
  Bacterial polypeptide expressing nucleotide sequence isolated from the Sargasso Sea
ctgaaaaatgtaaaagatggacaggttgtaggtttaggaagtggacgtgcagcaactacattagttaaatcattatcaaaatatatcaaaacaaaaaaaattacagtaaaatgtgtgccaacatcaatgcagattaaattaatcgcagagaaaggtgatttagaattaattgatgcagatcagattgataagatcgatctagtatttgatggtgcagatcagattgataaaaataaatttttgataaaaggaggaggaggtgcactactaaaagaaaacatactgatcagtgctgcaaaaaaagtaatcataatggcagatagttcaaagtttgtcaaagactttaacagaacagtaccaattgaagttcaaccttcagcaagacagatgttggaaa

SEQ ID NO: 290986 - DNA, 415 bp, Unknown
  Bacterial polypeptide expressing nucleotide sequence isolated from the Sargasso Sea
cgattccgaactgaacatgatcaaaggtggtggtggagcacttttgcgagtaaaaatcgtagcttcctctgctaagcgttaccttatcatcatcgattcatcgaagcaggttgatgcccttggaacctttccccttcctttagaggtgattcctttcggatggcaggtggtttccaggaaagtcaaggagatggatgcaagtccggaattaagaaaatcaggccccaagcctttcgtgacggatgaaggaaattacatccttgattgtcgtttcaacagcattctggaagttgagcaattggagacagaattgaatcgaatcccgggagttgttgaaaatgggttgtttgtcgccatgtgtgatcaaatgattatggggaaaggagatcaggtaatcttaaaggaaggacgatga

SEQ ID NO: 290987 - DNA, 322 bp, Unknown
  Bacterial polypeptide expressing nucleotide sequence isolated from the Sargasso Sea
gttgaaccttgagtttaaattgccagtagaggttcttccctctgcttggaaacaagttcaaaaaacactaaaagatcttgaaggagaaggaaatcttagaatggcccagaaaaaggctggacctatagtgactgatcagggaaacttgatacttgatttatcttttaggaatggtattgaaaaacctgaactattggaaagccaaattaataacattccaggtgtgcttgaaaatggactttttgtcaatatgacagatcaagtattagttgggaaagtagaaaatgacgcagtgggagttgaatctcttaataagatttag

SEQ ID NO: 290988 - DNA, 340 bp, Unknown
  Bacterial polypeptide expressing nucleotide sequence isolated from the Sargasso Sea
atgaaggcagaggccggaattgctgcttgtacatttgtcaaggatggaatgacgattggaatcggtaccggatctaccgtgaaatacacgattcttgaattgggtaggagaattcgtgaagagggattgaatgtctctggaatacccacctctgaagccactgaaaaattatctatagaacaaggtatacctctcgttaattggactgaatgctcttctctcgacctcgtgattgacggagcagatgaatttgattcagacttgcatttgattaagggtgggggcggcgcattgttgcgtgaaaaaattgtagccgaatccagtgccgccatggtggtcg

SEQ ID NO: 290989 - DNA, 604 bp, Unknown
  Bacterial polypeptide expressing nucleotide sequence isolated from the Sargasso Sea
tatgcaagttaattccacaaacgtagagccagaaacagcatttcacatgctggtcagtttaaatggtattctacaaaaaccaggtagttctttcactatttcggggtccacaattacgttcgcaagcaacttagttacgaacgacgttattgattttataattttattaggtgatgtattaaatataggtacaccatcggatgacactgttacagcatctactgtaaacaatgattttatttcagggcaaacagctttaactgcagctcctgatgataccgatgaatttttagtatcagatgcaggaacaattaaaagaatagattatagtttaattaaaggtggtggtattacagttgcagatcaatttagagtaacatcaaatattactgcaaatgctgttatatcatcaaatattgagagagttgatacaagtggacaagctggtttaacagataatcaaatgtctgaaagttcaggtgtattcacatttcctttaacaggaatatatttagtttcagcaggtggatcagcagatacacctaacagtgctgataatgtttcattgtcaataaatgtaacaacagataatagtttcatataa

SEQ ID NO: 290990 - DNA, 346 bp, Unknown
  Bacterial polypeptide expressing nucleotide sequence isolated from the Sargasso Sea
caccaagctggtggaacgtctcaacctcggtttcctgcttcccgtggaggttctgcccggcgcctggcgtcaggtgcagcagcagttggcgtcgatgggaggcagcgctgagctgcggatggcgcagcgcaaggccggtccggtggtcaccgatcagggcaatctcgtgctcgacgtgaagatgaacgacggcatcggtgatccggcagccctggagctggcgatcaacaacatccccggagtgctcgagaacggcttattcgtcaacctcaccgatgaagtgctggtcggagagatcaacgatggagtggctggcgtccgcagtctggagaagcgcctcagctga

SEQ ID NO: 290991 - DNA, 655 bp, Unknown
  Bacterial polypeptide expressing nucleotide sequence isolated from the Sargasso Sea
atggaccaagatgataaaaagaacttagttgctgaagctgccttagattatattcaaagcggggatatcctgggaattggttcaggtagtacagtaaataaatttataaatcttctcggttccgttaaaaacaaaatagaagcctgtgtatcgtcctcacaaaagtctacagaattacttcataaaatgaaaataccagtaatagatttgaaagaatgtgacaggatacccctttatattgatggagctgatgaggcaaattctcacaaagagcttattaaaggtggtggtggagcacttacaagagaaaaaatattagctcaatcaagtgaaaaatttatttgcattatagatgaatctaaagttgttgataaacttggtaaatttccacttcctattgaagtgatgcaattggcgcaaagtaagatttctcttgaaatgattaaaattggtggtcgtcctgtttatcgaaatcaatttattactgataatggccatattattattgatgtgcatgatttagatataaacgagccgatggcgctagaaaaaaaaattaatcacatgcctggtgtaatcaccaacggcatattctccataagatctgctgatgagattttgattgctactgatagcggagtgataaaaagataat

SEQ ID NO: 290992 - DNA, 392 bp, Unknown
  Bacterial polypeptide expressing nucleotide sequence isolated from the Sargasso Sea
aaagttagtggcatctaaagctaatcagttgttgattgttgttgatgaaactaaactcgtacaaaatctaaatcaatctttccctttacctgtagaagttcttccaaatgcttggaagcaagttcaggaagtcatttcagaaatgaatggaagttcttccttaagaatggctattaaaaaagctggcccagttgttactgaccaaggcaacctcatcttagatgtattatttaatgatggtattaagaatccaaaagacattgaaatgaagattaataatattccaggagtattagaaaatggattattcgttgatcttacagacaaagtattagttggtaaaattgaagataacattccgatggtttactcaccctcaagagctagctaat

SEQ ID NO: 290993 - DNA, 664 bp, Unknown
  Bacterial polypeptide expressing nucleotide sequence isolated from the Sargasso Sea
atgtcatttgatgatgccatcaaggcattatctttagatgccttgaaaaatgtaaaagatggacatgtgattggtttaggaagtggacgtgcagcaactgcattagttaaatcattatcaaaatatatcaaaacaaaaaaaattacagtaaaatgtgtgccaacctcaatgcagatcaaattaatcgcagaaaaaggaggtttagaattaattgatgcagatcaaattgataaaatagatttagtatttgatggtgcagatcaaattgataaaaataaatttttgataaaaggaggtggcggagcattactaaaagaaaacatactgatcagtgctgcaaaaaaagtaatcataatggcagatagttcaaaatttgtcaaagattttaacagaacaattccaattgaagttcaaccatcagcaagacagattgtttggaaaaaaattgaaaagatagacggtaaaccagaattgagaacactagatagagggtatccatttttcacagaaaattcaaacattatacttgattgtgattttggagtaatcaaaaatccgaaaatcctacaacaaaaattactcaacattccaggagtaattgaagttggaatttttacaagaaaaccagatataatttacaaagcaaaagcaaacggtaaaattt

SEQ ID NO: 290994 - DNA, 453 bp, Unknown
  Bacterial polypeptide expressing nucleotide sequence isolated from the Sargasso Sea
catgagcgaagcaaagataagagcatctcaaaaagctttggactttattttgccaaaaataactcagcagacagtgcttggtattggaactgggtccacagttaattgttttatcgaactcttggcaactcataaaaatgcatttaagggagttgtttcgagttccaaagctagttcagatttgatcgcaaattgtgatattgaagaatttgagttaaatgatgttaactcagtctctttttatatagatggagcggatgaggtctccatggaaaaaaatttaattaaaggtggtggtggagcacatacaagggaaaagattgttgcagctgcatccgagtcatttatttgtattgctgatcaatcaaaatttgtagatcagttgggtcaatttccacttccaatcgaggtagcaaaagttgcaagaagttatgtttcaagacgtattgttgg

SEQ ID NO: 290995 - DNA, 646 bp, Unknown
  Bacterial polypeptide expressing nucleotide sequence isolated from the Sargasso Sea
ttagatgccttgaaaaatgtaaaagatggacatgttattggtttaggaagtggacgtgcagcaactgcactagttaaatcattatcaaaatatatcaaaacaaaaaaaattacagtaaaatgtgtaccaacctcaatgcagatcaaattaatcgcagaaaaaggaggtttagaattaattgatgcagatcaaattgataaaatagatttagtatttgatggtgcagatcaaattgataaaaataaatttttgataaaaggaggtggcggagcattactaaaagaaaacatactgatcagtgctgcaaaaaaagtaatcataatggcagatagttcaaaatttgtcaaagattttaacagaacaattccaattgaagttcaaccctcagcaagacagattgtttggaaaaaaattgaaaagatagacggtaaaccagaattgagaacactagatagagggtatccatttttcacagaaaattcaaacattattcttgattgtggttttggagtaatcaaaaatccaaaaatactacaacaaaaattactcaacattccaggagtaattgaagtcggaatttttacaagaaaaccagatataatttacaaagcaaaagcaaacggtaaatttgaaattttaacttaat

SEQ ID NO: 290996 - DNA, 643 bp, Unknown
  Bacterial polypeptide expressing nucleotide sequence isolated from the Sargasso Sea
ctcagccaaggcagcttttgagctaattaaacccaatcttaataaagacactgtattaggcattggaacaggttcaaccactaattattttattgaggctcttaatgaatctgatatagaaataaaaggcgcagtttgtagttcaatttcttctgaaaaaaatcttaacccatcaattaaagtaatagagttaaatgaagttcattcaattgacttctacgtagatggagcagatgagtttaacgatagatttgagttaataaagggtggtggcggagctcttactagagaaaaaatattagcttattcttctgataaatttttatgtattgttgatgatagtaagcatactgacctgctaggaaagtttcctttgcctatagaagtcttagaaattgctagaagcgcaatttcgagagagatgatgaaaatgggagggaagcctgtatttagaaatgactttatcacagataatggaaatcaaattatagacatacacaatctgataatagaagttccttttgaactagaagaaaagataaataacatacctggcgtagtagaaaatggaatcttttctaatagaaaagctgatgtaattataaaagcaaaatcagaagaagtagaaattttagagctttaa

SEQ ID NO: 290997 - DNA, 505 bp, Unknown
  Bacterial polypeptide expressing nucleotide sequence isolated from the Sargasso Sea
ccgcttattgatttagcttctgtttctcaaattgatttagctattgatggagcatatgaagttgatccaggatttcaattaataaaaggaggaggagcatgtcatgttagagaaaagttagtggcatctaaagctgatcaattgttaattgttgttgatgaaactaaacttgtacaaaatctaaatcaatcgttccctttacccgtagaagttcttccaaatgcttggaaacaagtccaggaagttatttcagaaatgaatggcagttgttctttgagaatggctactaaaaaagctggcccagtcgttaccgaccaaggcaatctcatcctagatgtattatttaatgatggtattaagaatccaaaagatattgaaatgaagattaataatattccgggagtattagaaaatggattgtttgttgatcttacagataaagtacttgttggtaaaattaaagacaacatcccagtggtttactcaccctcaatagctagttaat

SEQ ID NO: 290998 - DNA, 589 bp, Unknown
  Bacterial polypeptide expressing nucleotide sequence isolated from the Sargasso Sea
agagtttgctgttaaaaaattgggggaactcgttcgaaaagggctttcaatcagagggatccctacttcaaacaggacaaaagaaattgctgaggaggaaggaataccattgattgatttttctgagacaatgtttgttgatttaaccattgatggtgcagacgagattgatgggaagttaaatatgattaaaggaggaggagcagcacttcttcaagagaaaattgtcgcatcggtttcaaaggtagaaatcattgttgtaaacaggaccaagctggtggatcatttgggaacattcccattaccagttgaagttatacccttcgggtggcaagttgttttcaatcaacttgaatcacttcacggaaaccctgatttgagaataattaatggtcagcccctagtcactgaccagggtaattacatcattgattgtaattttcgcaaaattgaaaatccaaaactgctcgaaaatcaactgaacactataccaggtgttgtagaaaatggactatttataaatatgtgtacaaaaatgatccttgctgatggagaagaacttcttattaaggatcgtaagaataaataa

SEQ ID NO: 290999 - DNA, 557 bp, Unknown
  Bacterial polypeptide expressing nucleotide sequence isolated from the Sargasso Sea
gtctgtagttggagtcccaaccagcgaagcaactagagaactggcagagagcctaaacatccctctagtgcctttagcagaggccggagttttagatttgataattgatggcgcagatgagtttgattccgatttcgctctaatcaaaggcgggggtggagcgttgacccgcgaaaagatagtcgcacagtctagtaatgctatggtggttgttgcagacgataggaaacaagttgaaattcttggtgatttcgacctacctatcgaagtattaccctttgaatggaagcgaaccgcagataggattgccgaaatttgcccagggcctgtggtcaggagagggggagatgagccattcattagcgataatggaggttacattcttgactgttcatttggctcaactattactaatccaagagaattagaatccgctttattgagtattgccggagttgtcgaggttggcttatttgttgccatctgcgacgcggttgtaatggctgccagcggtggagtagtgactcttgtaaagaaaggtggcagattagcctgat

SEQ ID NO: 291000 - DNA, 694 bp, Unknown
  Bacterial polypeptide expressing nucleotide sequence isolated from the Sargasso Sea
atgattgctgacctatccccatcagatcgcagtaaatatgcttgtgctttgcaggcatcaaaactggtagatagtgggatgaaagtgggtttgggaactggtagcacggcatattggctggtccatcacttagcaaaacgtgtgcgagatgaagatttaaaattcgttggggttccgacttctacgagaacgagagatcaagcacatgctgagggtatacggcttatttcaatggatgatgctggcaagctcgacataacaattgatggcgcagatgagtttgaccaatcaatgaatttaattaaaggaggtggtggagcacacctccaagaaaagatcgtagcttttggatctgaccttatggttgtaatcgctgatgagagtaaaaaggttgagaaacttggaagatttccacttcctgttgaagttctcaaattcggcagcgcttcatcacaaatgaaaatagaagaactgctcattgcgagaaaattcaaagattttgatgtaaaaatgcgcatgaaggatgaaaaacctttcattacggatgaggggaattatatttttgatttaaaattaaatgaaattgaggacccgagaggactttgcggcgacctcaatattattcctggtgttgttgaaaacggtctatttatcgacgtctgtagtgcagttatagtcggatattccgacggaa

SEQ ID NO: 291001 - DNA, 425 bp, Unknown
  Bacterial polypeptide expressing nucleotide sequence isolated from the Sargasso Sea
taatgatgtttaccaaatagatttttatatagatggagcagatgaagttactcctgaaaattttcttatcaaaggaggtggtggagctcatacaaaagaaaaaattgttgcagctgcagcaaaagaatttatttgtattattgatgaaagtaaattggttgataagctaggatccttccctttgcctatagaggtaattcctgagagtagaagtttggtttctagaagaatcattgcgctcggtggagttcctcaatacagagaaggttttataactgatcaaggaaatcaaataatagatgttaaaaacttaaatatagaggagcctgaagcccttgaggctcttttaaataatatacctggagtagttgataacggaatttttgctttcaataaaccgcgtgtagttttagtagcggattgaa

SEQ ID NO: 291002 - DNA, 490 bp, Unknown
  Bacterial polypeptide expressing nucleotide sequence isolated from the Sargasso Sea
tatgattccagaaaaacaactctctgctgaagcggcttgtgattacataaaagacggaatgatagttggacttgggaccggcacatctgcagagtttgccgttagaaaattaggtagcctcgttcgtgaagggctttctatcaggtgcattcctacttcaaatagaacaaaaaaacttgctgaagcagaaggaatacctttgattgatttttctgaatcaatgttcattgatttaactattgatggtgcagacgaaattgatggaaatttaaacatgattaaaggtggaggtgcggcactacttcaggaaaaaattgtggcgtcggtttccagaaaagaaataattgttgggagcaagacaaagatggtagatcgtttgggatcgttcccattacctgtggaagttgtcccctttggctggcaggtgatttttaatcaactggaatcacttaacggtaatccggatttgagattaaacaatggacaaccg

SEQ ID NO: 291003 - DNA, 370 bp, Unknown
  Bacterial polypeptide expressing nucleotide sequence isolated from the Sargasso Sea
ctgaaagaaaaagtcgctgaggccgctttcgagcgggtcgccgcggaacacagcgacaagcttttgctcggtattggaacgggcacgacagccgagtgctttattcgcctgctaccgcaactcaagtcccgcatcgaggccactgtggccagctcggagcgctccgcggcattgctgtcggaactcggcctgcccgttgtcgatcttaacagtgtcggtcctctggacgtttacatcgacggcgccgacgaggccaattcccagcttcacctcatcaaaggtggtggtgcagcgctgacgagggagaagatcgttgcggctgcctcaaggcaatttatctgcatcgccgacgagagtaaaaaagtggaga

SEQ ID NO: 291004 - DNA, 393 bp, Unknown
  Bacterial polypeptide expressing nucleotide sequence isolated from the Sargasso Sea
atggagcagacgaggtgtcaccaaataactttctaatcaaaggtggcggtggagcgcatacaagagaaaagatagtagcagcagcagcacaagaatttatatgcattgttgataaaacaaagatggttgataaacttggggccttccctcttccagtcgaagtaattccagaagcaagaagttctgttgcaagaaaaattgtagctttgggtggtaaaccaatttatagagaaaattttattactgatcaaggaaatcatattattgacgtagaagaaatagatatcagtgaacctgaagccttagaggttttattaaataatattccgggtgttgttgataacggaatctttgcgtttaataaacctgaggttgtgttggtatctgactaga

SEQ ID NO: 291005 - DNA, 529 bp, Unknown
  Bacterial polypeptide expressing nucleotide sequence isolated from the Sargasso Sea
atgagtgacgcaaaggtgcaggttgctaaaaaggcgtttgaggaaatggctcctcaaataaataaagaatctatattaggaattggaaccggatccacagtcaattgcttcatcgagatcttaaaacaaagcaatattcagtttaaaggtgccgtatctagctctgaggcttctaccctacttcttcaagagtttaatgtagagatttttagtcttaatgatgtaaatgaaattcagttttatatcgatggcgctgatgaagttgatccatcacataacttaattaagggtggtggtggagctcatacaacagaaaaattggttgcctcggcttcgaatcagtttatttgtattgtagatcaatcaaagcatgttgaatgtctaggagactttggtgttcctgttgaagttttgatcgaaagtagaagttttgtttcaagagaaattgcaaaactaggaggagttccaacttatagaagcggtgtaattacagatcaaagtaatcatatcatcgacgtttcaaaacttg

SEQ ID NO: 291006 - DNA, 431 bp, Unknown
  Bacterial polypeptide expressing nucleotide sequence isolated from the Sargasso Sea
tatgaatagcaaatataatgctgcacttggtgcttatgagaaggttaaaagtcttgagatagatgatctaagaataggcattggcacaggatctacaagcgatatctttacaggtagctttctcaaagaactttcatcatcgattggaaaaatatattccagctcagatagaacaactgatcgtattaaaagaataggtcttacagctgaggatgctattccaaaggataagtcaatcgatgtttatattgatggtgctgatgaggttgataaagaccttaacctaattaagggaggcggtggagctcataccagggaaaaaatgcttgcggatgccagtaaatattttatttgcatagttgatgagacaaagattgttcagcaattaggaagctttggtattccaatagaaataatgagttttggttttg

SEQ ID NO: 291007 - DNA, 307 bp, Unknown
  Bacterial polypeptide expressing nucleotide sequence isolated from the Sargasso Sea
aatgaaacaaatagttgccgatgcggcaattaatgaagtacaaagtgacatgatacttggattaggatctggatctacagctgcgctaatgataaaaagccttgctgatgaaattagttctggaaaattgcgaaatataagaggtgtcgcaacctcctttcagtcagaagtcttggctcttcaacttgatatccctcttatcgatttaggatctgtttctaaaatcgacttggctattgacggagcagatgaagttgatccaagatttcaaataataaaaggtggaggggcctgccatgtaagagaa

SEQ ID NO: 291008 - DNA, 649 bp, Unknown
  Bacterial polypeptide expressing nucleotide sequence isolated from the Sargasso Sea
gcacgcagcgcggttgatcaaatcgaagacgggatgctggttggcttgggtaccggttcgactgctgcttttgctatcagttatttgggtgaaaaaattcgatcaggtctaaccatttcagctatcccgacttctgaagcatccaaaaagcagtctcaatcagagggaatcccactaatcgattttgaaacttctcccagcatcgatatctgtatcgatggggctgatgagatcgattccgaattgaacatgatcaagggtggtggaggagcacttttgcgagaaaaaatcgtagcttcctctgctaagcgttaccttatcatcatcgattcatcgaagcaggttgaaaccctaggaacctttccccttccggtagaggtgattcctttcggatggcaggtggtttccagaaaacttaaggagatgaatgcgagtccggaattaagaaaatcaggcccccaacctttcgtgacggatgaaggaaattacatccttgattgtcgtttcaacagcattccggaagttgaacaattggaggcagaattgaatcgaatcccgggagttgttgaaaatgggttgtttgtcgcaatgtgtgatcaaatgattatggggaaaggagatcaggtaatcttaaaggaaagacgatgaa

SEQ ID NO: 291009 - DNA, 529 bp, Unknown
  Bacterial polypeptide expressing nucleotide sequence isolated from the Sargasso Sea
atgagcgctgcaaagataagtgttgcaaaaaaagcaattgattatattgaaaaaaaactatcgatagagactgttcttggcataggcactggctcaacagtgaattactttattaaagaattagattcgtataaaaatctttttcgaggagcagtatcaagctcagaagcatcttcaaaacttctcagagaaaaaaatattgaggtatttagtttaaatgatgttaatcaaatagatttttacattgatggagcagacgaggtgtcaccaaataactttcttatcaaaggtggtggtggggctcacacaagagaaaagatagtagcagcagcagcacgagaatttatatgcattgttgataaaacaaaggtggtggataaacttggggccttccctcttccggtcgaagtaattccagaagcaagaagttctgttgcgagaaaaattgtatctttggggggtaaaccagtatatagagaaagttttataactgatcaaggaaatcatattattgatgtgaagaaataga

SEQ ID NO: 291010 - DNA, 670 bp, Unknown
  Bacterial polypeptide expressing nucleotide sequence isolated from the Sargasso Sea
atgaatcaagatagtaaaaaaaagaatgcagctgaagctgcttttgatttgattaaacctaaacttaataaagatactgtattaggtataggaaccggttcaactactaatttttttatacatgcactgaatagtttaaatgtagaaatcaaaggagctgtttgtagttcaatttcttcagaaaaaagcctaagttcttctttaaaaattttaagcttaaatgaagtacattcaattgacttttatatcgacggagcagatgaatacaacgatagatttgaattaataaaaggaggcgggggagctctgactagagaaaaaatattagcttcttcatcagataagtttatctgtattgttgatgatagtaagcatgtagatctgcttggaaaatttcctttaccaatagaagtattagaaatagcgagaagtgccatctctaggcaactcatgaaaatgggcgggaagcctgtttacagaaataactttaagacagacaatggaaatcaaattatagatgtgcacaacttccctatacaagtaccttttgagctagaagaaaagctaaataatattcctggagttgttgaaaatggaatcttttctaatagaaaagcggatattattataaaagcaaaagatactagtatagaagtgttagaaagatagt

SEQ ID NO: 291011 - DNA, 388 bp, Unknown
  Bacterial polypeptide expressing nucleotide sequence isolated from the Sargasso Sea
gatgaattcagaagaacaaaaaaaacaggccgcacttaaatcgttagaattcatagctgatgattgtattctgggtgtcggaactggctcaacagtgaatcatttaatcgcggctttaccgagtgtaaaaaataaaattgaggctgttacatcgagttctaaggcaagcactcagttgcttgaagagaatgggttcagagtcgatgacctctcctctgttggctcacctgatctctatattgacggagcggatgagatcactgagcattttcatatgataaaaggcggtggaggtgcgctcacaagagaaaaaatcattgccgaagcatccaggatgttcgtctgcatcatcgatgactcaaaacttgtcgatcttctgggtaaattt

SEQ ID NO: 291012 - DNA, 385 bp, Unknown
  Bacterial polypeptide expressing nucleotide sequence isolated from the Sargasso Sea
tgatgaagtgtcgcctgataacttcttaattaaagggggtggaggtgcacatacaagagaaaaaattgtagctgcagcagcaaaagaatttatatgtattgttgatgattctaaattagttgaagttcttggatccttccctcttccagtagaggtaattccagaaagtagaagcatggtatcaagaaaaatagttgcaatcggaggtaggccagtttaccgatcaggatttgtaactgatcaaggcaaccagatattagatatacacgatataagaattaacaatcctgaagaaatggaaatacttctaaataatattcctggtgttgttgataatggaatatttgcatttgataaaccagaaattgttttagttggagactaa

SEQ ID NO: 291013 - DNA, 691 bp, Unknown
  Bacterial polypeptide expressing nucleotide sequence isolated from the Sargasso Sea
atgaaaaagaatgtgatttcagagaaacaattctcagctgaagcagcttgcgatcacgtaaaagatggtatgatagtaggtcttggaaccggaacaacagcagagtttgctgtaaaaaaattaggcaaactagttcgtgaaggactttctatcaaaggtattcccacttcaaataggacaaaaaaacttgcaaaggcagaaggaatacctttgattgatttttctgaatcaatgttcattgatttaactattgatggtgcagacgaaattgatggaaacttaaacatgattaaaggcggaggcgctgcactccttcaggaaaaaattgtggcatcagtttccagaaaagaaatcattgttggaagcaagataaagatggtagatcatttgggagcatttccattacctgtagaagttattccctttggctggcaggttgtttttaaccaactagaatcccttcacgcgaatcctgacttgagacttaatgacggacagccactggtgacagaccaaggaaattttataatagactgttctttcagaaaaattacaaaacctaaacttctagaacaccagcttaacatgatcccaggagttgtggaaaatggcctattcataaatttatgtacaaaaatgatacttgctgatggagatcagctaattgttaagaatagtaaaattagataaa

SEQ ID NO: 291014 - DNA, 295 bp, Unknown
  Bacterial polypeptide expressing nucleotide sequence isolated from the Sargasso Sea
aatgagcaattcaaaattaaatgcttcaattgaagcaatagaatatataaaacctaaaattgacatgaattcaattatcggggttggtacaggatcaacggttaattattttattgaagagctggcaaaaattaaacacatgtttaaaggtgcagtatctagttcggaagcatctacagaattattagaaaaatctggaattgaggtatttgaattaaatgatgtaaatgaaattctggtctacgtagatggggctgatgaagtagacacctctaataatctgataaaaggtggg

SEQ ID NO: 291015 - DNA, 364 bp, Unknown
  Bacterial polypeptide expressing nucleotide sequence isolated from the Sargasso Sea
aatggaccaaaatactaagaaacaaagagtagcagaggctgttttagactatatcgataatggtgagtctctagggatcggatctggatcgacagtcaacattctcatagagaatctatcgaaagtaagaaataaaattcgtaacgtagtctccagctcggtaaaatctactcaacttcttgaatcaaatggatttgaggtttctgagttgcgtgatgttgggagacttacaaaatatattgatggtgcggatgaagtcaataaacatcttcaaatgataaaaggtggtggtggggctctaactagagagaaaattttagcgcacaactcaaatcaatttatttgcatagtcgatgattcaaaa

SEQ ID NO: 291016 - DNA, 469 bp, Unknown
  Bacterial polypeptide expressing nucleotide sequence isolated from the Sargasso Sea
tatgaatgaaatcttaaagcgacaagtagctcagcatgcattaaagtatattaaacatggagatattgttggggtagggactggatctactgtgaattttttcattgatcaacttgtccaaataaaaaatgatattgaaggagttgttgcaagttcagaagtatcaaaatccttattattaaacgcaggtattagagtatttgatgctaatgcagttgctgaaatatcagtatacatagatggtgctgatgaagtggataagagagggtattgtattaaaggtggtggtggtgcgcttacacgtgaaaaaattttagcagcactagcgaataattttgtttgtatagtcgatcaaagcaagatagtatcaattcttggcgctaattttcctgttgcaattgaggtattggctgaggcgcgaagttatgttgctagagcttgtgttgcacttggtggtaatccagtttat

SEQ ID NO: 291017 - DNA, 526 bp, Unknown
  Bacterial polypeptide expressing nucleotide sequence isolated from the Sargasso Sea
atgaatcaagagactaaaaaaaagagtgcagctaaagcggcttttgatttgatcgagcctaacctcaataaagatattgtattgggtataggaactggttcaacaacaaattattttatagatgaacttaatgcttcaaatatagaaataaaaggagcggtatgtagctctatttcttctgaaaaaaacttaaatccatccatcaatattttaagtcttaatgaggtacattctattgacttctatgttgatggagcagatgaatttaatgatcgatttgaattaataaaaggtggcggaggagctttaactagggaaaaaatactagcctattcttcaagtaaatttatatgtatcgttgacgatactaaacacgcagatttacttggtaaatttcctttacctatagaagtgcttgaaatagctagaagcgcaatttctagagaaatcatgaaaatgggaggaaggccagtctatagaaacaaatttataactgataatgggaatcaaattatagacgtgcata

SEQ ID NO: 291018 - DNA, 394 bp, Unknown
  Bacterial polypeptide expressing nucleotide sequence isolated from the Sargasso Sea
tatgaacgaaaaatttaatgctgctaagggtgcatttgacttaatatcaaaacacaatgagagcatcaaaattggaataggcaccggaagtacctcagattttttcacaaaaaactttcttcctaaacttagagataaaattaaaagtatttactcaagttcattaaaaacctcggggtatcttgaagagttaggttttgttgttgatgatttagatttaaacccagagttagatttttatgtagatggtgctgacgaagttgatacaaatcatttcttaataaaaggtggtggtggtgcgcactacatggagaaaagagttgcatctaaagcaaataaattcatttgtattgttgattcctcaaaacatgttaataagttaggagcatttcct

SEQ ID NO: 291019 - DNA, 479 bp, Unknown
  Bacterial polypeptide expressing nucleotide sequence isolated from the Sargasso Sea
aatgagccaggaaaagcagaacgctgcacgcaccgcagttgatcaaatcgaacacgggatgctggttggtctgggtactggttcgactgctgcttttgctatcagttatttgggtgaaaaagttcgatcaggtctaacgatttcagctatcccgacttctgaagcttccaaaaagcaggctcaatcagagggaatccctttaatcgattttgaaacttctcccagcatcgatatctgtatcgatggagctgatgagatcgattccgaattgaacatgatcaagggtggtggaggagcacttttgcgagaaaaaatcgtagcttcttctgctaagcgttacctcatcatcattgattcatcgaagcaggttgaaacccttggaacctttccacttcctgtagaggtgattcctttcggatggcatgtggtttccaggaaactcaaagagatgaatgcgagtccggaattaagaaaagcag

SEQ ID NO: 291020 - DNA, 640 bp, Unknown
  Bacterial polypeptide expressing nucleotide sequence isolated from the Sargasso Sea
atgacccaagatataaaaaagaaaaattcagctaaagcagcttttgagataattaaaccaaatcttaataaagacacagtattaggtattggaacaggctcaaccaccaattatttcattgaggtacttaatgaatctgatataaacataaaaggtgcagtttgtagctcaatctcttctgaaaaaaagctcaacccatcaattagagtaatagaattaaatgaagttcattcaattgacttttacgtagatggagcagatgagtttaacgatagatttgaattaataaagggtggtggtggtggagctcttactagagaaaaaatattagcttattcatctgataaatttatatgcattgttgacgatagtaagcatactgatctgctaggtaagtttcccttacctatagaagttctagaaattgctagaagcgcaatttcaagagaaatgatgaaaatgggagggaagcctgtatttagaaatgattttatcactgataacggaaatcaaattatagacatacataatctactaatagaaattcctttcgaactagaaaagaagataaataacatcccaggtgttgttgaaaatggaatcttttctaatagaaaagctgatgtaatcataaagcaaa

SEQ ID NO: 291021 - DNA, 460 bp, Unknown
  Bacterial polypeptide expressing nucleotide sequence isolated from the Sargasso Sea
gatggagcagatgaagtcgatacgaaatttcaattaatcaaaggaggaggatcttgtcatgttagagaaaagttagtggcatccagagctaagaaattattaatagttgttgatgagactaaaatggtaacaaatttaaataaagttttcccactgcctgtagaagttctccctaatgcatggaaacaagttaaagatataatttctgaaatgaaaggacgttctactttaagaatggctacaaaaaaagcaggtcctgtagttacagaccaaggaaatttaatattagatgttttgttcgacaatggtattcaaaatccaaaaaatatagaaatgattattaataatattccaggagtcttagaaaacggattattcgttgaccttactgataaagtcttggtgggcaaaattgagaataatatgccactagtttactcccccactaaagctagctaat

SEQ ID NO: 291022 - DNA, 640 bp, Unknown
  Bacterial polypeptide expressing nucleotide sequence isolated from the Sargasso Sea
tatgagcgcctcaaagataagtgttgcaaaaaaagcaataagccatattgaaaaaaaactgactagtgaagttgttctgggaattggtacaggatctactgtaaatttttttattgaagaattaggaaaatttacaagtcatttccgaggtgctgtctcaagctctgaagcatcaactcgacttttaaaagccaaaaatattgaggtatttagtctcaatgatgttaatgaaatagaattttatatagatggtgctgatgaagtgtcgcctgataacttcttaattaaagggggtggaggtgcacatacaagagaaaaaattgtagctgcagcagcaaaagaatttatatgtattgttgatgattctaaattagttgaagttcttggatccttccctcttccagtagaggtaattccagaaagtagaagcatggtatcaagaaaaatagttgcaatcggaggtaggccagtttaccgatcaggatttgtaactgatcaaggcaaccagatattagatatacatgatataagaattaacaatcctgaagaaatggaaatacttctaaataatattcctggtgttgttgataatggaatatttgcatttgataaaccagaaattgttttagttggagactaa

SEQ ID NO: 291023 - DNA, 679 bp, Unknown
  Bacterial polypeptide expressing nucleotide sequence isolated from the Sargasso Sea
atgattctagaaaaacaactctctgctgaagcggcttgtgattacataaaagacggaatgatagttggacttgggaccggtacatctgcagattttgccgttagaaaattaggtagcctcgttcgtgaaggactttctatcaggggcattcctacttcaaatagaacaaaaaaacttgctgaagcagaaggaatacctttgattgatttttctgaatcaatgttcattgatttaactattgatggtgcagacgaaattgatggtaacttaaatatgattaaaggtggaggtgcggcactacttcaggaaaaaattgtggcgtcggtttccaaaaaagaaatcattgttggtagcaagacaaagatggtagatcatttgggatcattcccattacccgtggaagtcgtaccctttggctggcaggtggtttttaatcaactggaatcacttaacgggaatccggatttgagattaaacaatggacaaccactgttaacagatcaagggaattatattgtagattgtcacttccgaaaaattagtaatcctaaactgctggaaaatcagattaacatgataccaggggttgtggaaaatggtctatttatcaatttgtgtacaaaaatgatccttgctgatggagaaaagctgattgttaaggaccgtaaaattagataaa

SEQ ID NO: 291024 - DNA, 640 bp, Unknown
  Bacterial polypeptide expressing nucleotide sequence isolated from the Sargasso Sea
catgaatactccaaagataaatgttgcaaagcaagcagtcaaattaattgaaaaaaaaataacgccagaaaccattattggaattggtactggatcaactgttaatttttttatagacgagcttaagaaatataaaaatctttttaagggtgcggtttcctcttcaaacgcttcaacaaaactgcttaatgattccggaattcaaacatacaatcttaatgaagtattagaaattgagttctatattgatggggctgacgaagtatctaaagacaattatttaattaaaggtggaggtggtgctcatacaagagaaaaaattgtcgcctcagctgccaattattttatatgtatcgttgattcatcaaaattagtgaatcaacttggggctttccccttgccaatagaagttattcctgagagcagaagccttgtatcaagaaagatagtctctatggggggcattccactttatagaagtggattcttaacagatcaaggtaacgaaattattgatgtaaaaaatttagatatttctgatccaatgaatcttgaaatggaattaaataatatacctggtgttgttgaaaatggaatatttgctgttaataaacctagtgaaatattggttggaaaataa

SEQ ID NO: 291025 - DNA, 636 bp, Unknown
  Bacterial polypeptide expressing nucleotide sequence isolated from the Sargasso Sea
aagaagcttttttagttttattggagaaagatataaaaaaagactcagttattggaattggaacgggaactacaactaatttcttcatcgaagaacttaataaagccagattgcacataaaaggtgttgtgtgcagctcagatgcttcggaaaaattaatagatcggtcatacaaagttttgtcattaaatgaggttcactctatcgatttttatattgatggagcagatgaatacaatgatagaaaggaattgataaaagggggtggtggagctcttaccagagaaaaaatacttgcctattcatcagacatctttgtatgtatcgtagatgaatcaaaatatacagatttattaggtaaatttcctctgccaattgaagtaatagagattgctagaagtgcaatttcaagggagcttatgaaaatgggcgggaagcctatttttagaaatggttttatttcagataatggaaatcaaataatagatatccacaacttgcccatagacataccttatgatctggaggccaaattaaataacattcctggagttgtggagaacggtatatttgcaaacagaaaagcagatgtcattatttgctcgacagattcctctatcgaaataattcaataaa

SEQ ID NO: 291026 - DNA, 664 bp, Unknown
  Bacterial polypeptide expressing nucleotide sequence isolated from the Sargasso Sea
tatgagcgctgcaaagataagtgttgcaaaaaaagcaattgattatattgaaaaaaaactatcaatagagactgttctgggcattggtactggttcaacagtgaattactttattaatgaattagatgcatataaaaatctttttcgaggagcagtatcaagttcggaagcatcttcacaacttctaagagaaaagaatattgaggtctttagtttaaatgatgttaatcaaatagatttttacattgatggagcagacgaggtgtcaccaaataactttctaatcaaaggtggcggtggagcgcatacaagagaaaagatagtagcagcagcggcacaagaatttatatgcattgttgataaaacaaagatggttgataaacttggggccttccctcttccagtcgaagtaattccagaagcaagaagttctgttgcaagaaaaattgtagctttaggtggtaaaccaatttatagagaaaattttattactgatcaaggaaatcatattattgacgtagaagaaatagatatcagtgaacctgaagccttagagattttattaaataatattccgggtgttgttgataacggaatctttgcttttaataaacctgagttgtgttggtatctgactagagactataaaagttcttctatttga

SEQ ID NO: 291027 - DNA, 661 bp, Unknown
  Bacterial polypeptide expressing nucleotide sequence isolated from the Sargasso Sea
tatgtctgaaaaatacaatgctgcactaggagcttttgaaacaataaaacatattgatggtccattagatataggtattggcactggcagcactacagatatatttaccgaaaattttttgcctaagttaagagaaaatataaattctatttattcaagctccgtaagaacaacaaatttattaaaagcgttaaattttaaagtagaagaaaataggcctagtaaaatgttagatctctatattgatggcgcagatgaagttgataaaacacttaatttaattaagggtggtggtggtgctcataccaatgaaaaaatgattgcttcattttctaatcgatttatatgtattgtagacacctctaaattagttgaggttttaggaaaatttcctttacctattgaagtttttgcagcaaataaacaaagcgtaactgatgaatgtaaaaaatatactaataagattacttatagagaaaacttgtctgataatggaaatcttctcctagacctccatgatatggaaattttagaccctcttaaaatagaaaaagaaatcaaaaatatacctggtgtcatcgaagtaggaatatttgctgttgataaaccgcaattagttattgtcggtgaggaagatggctataattcaatagaatcttga

SEQ ID NO: 291028 - DNA, 667 bp, Unknown
  Bacterial polypeptide expressing nucleotide sequence isolated from the Sargasso Sea
atgaatcaagacctaaaaaaggaaaaatcagcaaaggaagcttttagttttatcgagaaagatataaagaaagactcagttattggaattggaacgggaactacaactaatttcttcatcgaagaactaaataaagccagattgcacataaaaggtgttgtgtgcagctcagatgcttcggaaaaattaatagatagctcttacgaagtcttgtcactaaatgaagttcactctatcgatttttatattgacggagcagatgaatacaatgatagaaaggaattgataaaaggaggtggtggagctcttacaagagaaaaaatacttgcatattcatcagacatatttgtttgtatcgtagacgaatcaaaatatacagatttattaggtaaatttcctcttccaattgaagtaatagagattgcaagaagtgctatttcaagagagctcatgaaaatgggagggaagcctatttttagaaatggttttatttcagataatggaaatcaaataatagatatccataacttgcctatagacataccttatgacctagaggccaaattaaataatattcctggcgtcgtggagaacggaatatttgcaaacagaaaggcagacgtcattatttgctcgtcagattcttctatcgaaataatacagtaga

SEQ ID NO: 291029 - DNA, 673 bp, Unknown
  Bacterial polypeptide expressing nucleotide sequence isolated from the Sargasso Sea
aatgagccaggaaaagcagaacgctgcacgcaccgcggttgatcaaatcgaagacgggatgatggttggcctgggtaccggctcgactgctgcttttgctatcagttatttaggtgaaaaagttcgatctgggctaactatttcaactatcccgacttctgaagcttctaaaaagcaggctcaaacagagggaatccctttaatcgattttgaaacttctcccagaatcgatatctgtatcgatggggctgatgagatcgattccgaattgaacatgatcaaaggtggtggaggagcacttttgcgagaaaaaatcgtagcttcctctgctgagcgttacctcatcatcattgattcatcgaagcaggttgaaaccctaggaacctttccccttccggtagaggtgattcctttcggctggcaggtggttttcaggaaactcaaggagatgaatgcgagtccggaattaagaaaattaggcccccaacctttcgtgacggatgaaggaaattacatccttgattgccgtttcaacagtattccggaagttggacaattggagactgaattgaatcgaatctcgggagttgttgaaaatgggttgtttgtcgccatgtgtgatcaaatgattatggggaaaggagatcaggtaattttaaaggaaagacgatga

SEQ ID NO: 291030 - DNA, 640 bp, Unknown
  Bacterial polypeptide expressing nucleotide sequence isolated from the Sargasso Sea
catgagtgctgcaaagataagtgttgcaaaaaaagctgttaaatatattgaaagcaaaatttcaaaagagactgttctaggcattggaacaggttctactgtaaatttttttattgaagagcttggcaatttaaagcatcattttaaaggagttgtttcaagttctaatgcttcttctgaaatcttaaataataaaggtattgaagtatttagtttaaatgatgtcaatgaagttgaattctatatcgatggagcagatgaggtaacgcctgaaaattttttaattaaaggtggtggtggtgctcatacaagagaaaaaatagttgcagctgcatccaatgaatttatttgtatcattgacaagacaaagctggtaagtaaacttggcgccttccctcttccattagaagttatacccgaaagtaggagtatggtagctagaaaaattattgctatgggaggaaggccagtatacagaaataattttcttactgatcaaaaaaatcacatactagatattcatgatatagatattagtgatcctgtaaaacttgaaaagattcttaataatatcccaggagtcgtagataatggcatttttgcaaataataagccagaaatagtcttaatttcagattga

SEQ ID NO: 291031 - DNA, 670 bp, Unknown
  Bacterial polypeptide expressing nucleotide sequence isolated from the Sargasso Sea
aatggaccaaaacgaaaaaaaagagtctgcggcaaaaaaagcactagaactaattgaaaacagcctaaatgaagaatcagttctcggcataggcactggaagcacaactaatttatttatagaaaaacttttagaacttgaaataaagataaaaggggttgtttgcagctcattagcttctgaagatcaatttataggatcttcttatgatattttgagccttaatgaagtatatggtattgatttttatgttgatggggcagatgaatttaatgacagattagaattaattaaaggagggggagccgcattaacaagagaaaaaatacttgctcattcctccaataatttcttttgtatagttgatgatagtaaaaaggtagagaagttagggaaatttccacttcctattgaagttattgaaatagctcgtagtgctatatctagagaaatattgaagatggggggaaagccagtatttaggcagggaataattacagataacggccatcaaattattgatgtacataaccttaatatagaaatcccttatgaccttgagggatttctaaataacattccaggagtagttgaaaatggtattttcgctaaaagaaaagctgacaagataatactctcaacaaatgatggtatagaaatacttgattaa

SEQ ID NO: 291032 - DNA, 661 bp, Unknown
  Bacterial polypeptide expressing nucleotide sequence isolated from the Sargasso Sea
tatgtctgagaaatataatgctgcactaggcgcttttgaaaaaataaaaaatattgatgggccattagatataggtattggaactggtagtactacagatatatttacagaaaattttttaacaaaaattagaggcaagattggctctatatattcaagctctaaaagaacaacaaatttattaaatgcattagatttttatgttgaagtaggcaaacctaataaggtgctagatctatatattgatggtgctgatgaagtagataaaaatcttaatctaataaaaggtggtggtggtgctcacacaaatgaaaaaataattgctgcatcttctaggagttttatatgtattgtagatacttccaaattagttgaggttctaggtaaatttcctcttccagttgaagttattttgaaaaataaagacagtgtaattaaagcatgtaaaaaatatactcaacaaattactattagagaaaaattgtctgacaatggaaatattctacttgatctgcatgggatagaaattttagagcctcttaaaattgaaaaagaaattaataatataactggagtagttgaagtaggaattttcgctatcaataaaccagaattggttattgttggcaaagaggatagctacaattcaatagaatcttga

SEQ ID NO: 291033 - DNA, 673 bp, Unknown
  Bacterial polypeptide expressing nucleotide sequence isolated from the Sargasso Sea
aatgagccaggaaaagcagaacgctgcacgcaccgcggttgatcaaatcgaagacgggatgatggttggtctgggtaccggttcgactgctgcttttgctatcagttatttgggtgaaaaagttcgatcagggttaagtatttcagctatcccgacttctgaagcttccaaaaaccaggctcaatcagagggaatccctttaatcgattttgaaacttctcccagcatcgatatctgtatcgatggggctgatgagatcgattccgaattgaacatgatcaagggtggtggaggagcacttttgcgagaaaaaatcgtagcttcctctgctaaacgttacctcatcatcattgattcatcgaagcaggttcaaacccttggaacctttccccttccggtagaggtgattcctttcggatggcaggtggtttccagaaaactcaaggagatggatgcaagtccagaattaagaaaatcaggcccccaacctttcgtgacggatgaagggaattacatccttgattgtcgtttcaacaggattccggaagttgagcaactggaggcagaattgaatcgaatcccgggagttgttgaaaatgggttgtttgtcgcgatgtgtgatcaaatgattatggggaaaggagatcagctaatcttaaaggaaagacgatga

SEQ ID NO: 291034 - DNA, 664 bp, Unknown
  Bacterial polypeptide expressing nucleotide sequence isolated from the Sargasso Sea
atgaaccaagacttaaaaaaggaaaattctgccaaagaagcttttaatctaattgaaccgaagctcaggaaagactcggtaattggaattggtacaggatctactacaaatttttttatacaagagctgaatcaagccaaaattcaaatcaaaggtgtggtttgcagttctaatgcctcagaagatctaattgataattcatatgataagttctcgcttaatgaagttcacaccatagatttttatatagacggagcagatgaattcaatgatagaaaagagctaataaaaggtgggggtggagctcttacaagagaaaagattcttgcctattcttctgatcaatttatttgtattgttgacgaatcaaagcacgtaggacttctaggtgaatttcctctccctatagaggtgattgagttggctagaagtgctgtctctagagaactaatgaagatgggtgggaagcccatttatagaaatggatttataacagataacggtaaccaaataattgatattcacaacctccccattgaagtgccctatgaattagaagctaagatcaacaatatacctggcgtggtggagaatggaatttttgcaaatagaaaggcagacactataatctgcgcaaaagccaacagtatagaaataatctagt

SEQ ID NO: 291035 - DNA, 706 bp, Unknown
  Bacterial polypeptide expressing nucleotide sequence isolated from the Sargasso Sea
gatgtatcagaaagatcaagacaaacaaaaatccttgttggcaaagagcgcgatcgactacttggaaaagggcatggtcttggggctgggtactggatcgacagttgatttgtttatttcggagctaagcaagtttgaaaacctctttagcagtttgaaaattgttgcaacctcaaaagtcagcgcaaagaaggctatcgataatcgcatgaacgtcgtgggtcctgataaatggattgagccagatatctgcatagatggcgcagatgaggtagatagaagtctttcaatgataaaaggtggtggaggcgcattattatgggaaaaaataatcgcttatagggccagcaagcgtatttatttggcagatgaaagcaagcaagtcgcgcgtttaggcgctttccccctgcctgtagaaatcatagagtatggacatgagtggactgcagctgcgattgagccgctttttaagagcgtccaacttcggaaagagactactggcaacatattcaaaacagactcaaacaatgtgatttatgattgttttataaaagatgaagaagataccgccaacttggattttaatttgtcggcagttcctggagttgtgacctctggtttattttgtagtttcattgatatattactaacctgccgggatggtgaagttgcggaaattggtggcaaagaaaatgtcttttggtga

SEQ ID NO: 291036 - DNA, 691 bp, Unknown
  Bacterial polypeptide expressing nucleotide sequence isolated from the Sargasso Sea
aatgtctaaagaaaaaaaaattatagctgccaaaaaagcttttgaatatgttgaagagggaatgaagctaggtttaggcacaggaagtactgcagatgaatttacaaagatattatcagataatgtaaaggatggttttcaaattacatgtgttcctacatcagaaaatacaaaaaaattagctgaatcattggaaatacctcttggaaccctagaagattacaatattcttgatcttacaattgatggagcagatgaaattgacgataatctttcacttttaaaaggtggtggaggtgctttgttaagagaaaaaattatagcttttaactccaaaaaaatgattgttattgcggacgattcaaaaaaagtaagtaaattaggtgacttcaaattacctattgaaattataacttttgagcatgacacaacgataaagcgtgttttagagaagcttgatgcaataggctactctggaacagcaaatttaagaatggaaaatgacaaaccttttcagacagatagcaaaaatttaatttatgatttgtcaatcggtttaataaaagagccttctattattaatgatttattaaattcaattccgggagtagtcgaaaacggtttatttgttgatatggcgaatattgtaatattaggtgagatggatggagtaaaaattattgaaaaataa

SEQ ID NO: 291037 - DNA, 640 bp, Unknown
  Bacterial polypeptide expressing nucleotide sequence isolated from the Sargasso Sea
catgagtgctgcaaagataagtgttgcaaaaaaagctatcaaatatattgaaagcaaaatttcaaaagagactgttctcggcattggaacaggttctactgtaaatttttttattgaagagcttggcagtttaaaacatcattttaaaggagctgtttcgagttctaatgcttcatctgagcttttaaataataaaggtattgaagtgtttagtttaaatgatgtcaatgaagttgcattctatatcgatggagcagatgaagtaacacctgagaattttttaattaaaggcggtggtggcgctcatacaagagaaaaaattgttgctgctgcatctaatgaatttatttgtattgtagataaaacaaagttggtcaataaacttggagccttccctcttccattagaagttatacccgaaagtaggagcatggtagccagaaaaattattgctatgggaggtaggccagtatacagaaataattttcttactgaccaaaaaaatcacatacttgatattcatgaaatagatattagtgatcccgtcaaacttgaagagattcttaatagtatcccaggagtcgtagacaacggtatttttgcaaataacaagccagaaatggtcttgatatcagactaa

SEQ ID NO: 291038 - DNA, 331 bp, Unknown
  Bacterial polypeptide expressing nucleotide sequence isolated from the Sargasso Sea
atgtatcagagagatcaagacaaacaaaaatccctactggcgaaggctgcgatcaaatacttggaaaaaggcatggttctggggttgggtactggatcgacaattgacatatttattttggagctgagtaagtttgaaagcctgttcagcagtctaaaaatcgttgctacttctaaaatcagtgccaagaaagctcgagataatcgcatgaacgttgtggctcctgataaatatttagagctagatatctgcatagatggtgcagatgaggttgatagaaacctttcaatgataaaaggtggtggaggtgcattgcttgggaaaaaataga

SEQ ID NO: 291039 - DNA, 661 bp, Unknown
  Bacterial polypeptide expressing nucleotide sequence isolated from the Sargasso Sea
tatgtctgagaaatataatgctgcactaggtgcttttgaaaaaataaaaaatattgatgggccattaaatataggtattggaactggtagtaccacagatatatttaccgaaaattttttaccaaaacttagagaaaatattggctctgtttattcaagctctataagaacaacaaatttattaaaggcattagattttactgttgaaaaaggaaagcctaataagatgctagatctatatattgatggggctgatgaagtagataagaatcttaatttaattaaaggtggtggtggcgctcatacaaatgaaaaaatgattgctgcgtcttctaatcaatttatatgtattgtagatacttctaaattagttgaaattctaggtaaatttcctcttccagttgaggctcttttaaaaaataaagaaagtgtaattcaagcatgtaaaaaatattctcaacaaattacttctagagaaggattatctgataatgggaatattctgcttgatcttcatggaatagagattctagagcctcttaaaattgaaaaagaaatcaataatatacctggagttattgaagtaggaattttcgctatcaataaaccagaattagttattgttggtaaagaagatggctataatttaatagaatcttga

SEQ ID NO: 291040 - DNA, 641 bp, Unknown
  Bacterial polypeptide expressing nucleotide sequence isolated from the Sargasso Sea
tgaaggtgcgtttgatgagataaatgattcaaatggcaagataaatataggtatagggacagggtccacaacaactatttttataaacgaatttcttccaaatttaaaaaacagaataaacactattttttcaagctcaaatgaatcaacagagttattagaaaatttacaatttgaagttactcaaggagcgccagagaacttttttttagattactacattgatggagcggatgagatagataaaaattattatcttattaaaggcggtggaggtgcacataccaaagaaaaaatactcgctgcagcttcaaaaaaatttatatgtattgttgatgattcaaaacgagttgaaattcttggcacttttccattaccaatagaagtaattccatttgcagaacattcggtaagaagaaatttaggaaaaatgagtgaaaagataacgaagagaagtgtttcatctgatagtggaaatattattcttgacatgcatgggatgttaatttctgatccagaaaaaatggaggcagaactaatatctgttccaggaattgtagaagtaggtatatttgcaaaaaataagcctacctcaataaagataggaagagattcatattacgagtctatagattgttgaa

SEQ ID NO: 291041 - DNA, 703 bp, Unknown
  Bacterial polypeptide expressing nucleotide sequence isolated from the Sargasso Sea
catgtccgatgtagagctcttgaaggagcaagcaggcatcgcagcatgccgcttcgtcaaagatggcatgttactcggactaggtaccggctctactgtgaggtattctatcatagagatagcaaggctgatcaccgaggaagggatgaacctcgttggagtccctactagtgaagatacgaggatgctttcggaagagctgggtattcctttgttgaagatcgaggactcgagaactctagatctaacaatagatggagccgatgagttcgatcaaaacttcgatctgattaagggagggggaggcgctctaactagggagaaggtagtcgctctgaaatccaaatccatggttgttgtggcagaccacaccaagaaagtggaagttctgggctcattcgacctaccagttgaggttgactcggacctctgggaaggagttggagaggccatttctcgaatttgtcccggacaagtcagcctgaggacaaacggttcagaaccgttcgagacagataaccacggcttcatcttggattgctccttcggcccaacaatctccgatccaacatctctggagagagctatttccgatattcccggagtggtcgaggtagggctcttcgtaggcatatgcgatgcagtaatcgtcgcttcgagtgatggaatcgaagagctgatcaagtctgatggaagaatttag

SEQ ID NO: 291042 - DNA, 640 bp, Unknown
  Bacterial polypeptide expressing nucleotide sequence isolated from the Sargasso Sea
atgagcgacgcaaagataagtgtttcaaaaaaagcaataggccatatagaaaaaaaacttaccaaagatatggttttaggaattgggactggctcaacagtaaacttctttatttcagagttagctaaatataaaggtcatttttatggtgctgtatctagttcagaggcatcaacaaaattattgcaagagataggtattgatgtttttagcctaaatgatattaatgaagttgcttattatattgatggtgctgatgaggtttctcctgaaaattacttaattaaaggaggtggtggcgctcatactagggaaaaaataatagcatcagcttctaataaattcatatgcatagtagataaatcaaaattagttaaaaaacttggagaattccctcttccagttgaggtaatacctgaaagcaggagcttggttgcaagaaaaataacctcattgggagggacgcctatttatagaaaaggttttactacagatcagggcaatcaaatattagatgttaaggatattgatatatctcaaccagaatcattggaagcattaattaataatattcctggtgttgttgataatggaatctttgcatttaacaagcctgagcttgtgcttgtttctgattaat

SEQ ID NO: 291043 - DNA, 661 bp, Unknown
  Bacterial polypeptide expressing nucleotide sequence isolated from the Sargasso Sea
atgtctgaaaaatataacgcagcacttggggcttatgaattaattgcgaaagaagaaagcccccttgttttgggcataggcactggaagcacgactgattattttactaaaaactttttaccaaatttaagcaataaattgaaatgcatttattcaagctcttataggacgactagcttattaaatgatttaggtttcatggtaaaggattatgatcaaaatgctgtcatagatatttatgttgatggagccgatgaagttgatgaaaatcttaatttaataaaaggtggtggtggcgcgcacactaatgagaaaaggcttgccaaaatagcaaatcagtttatttgtgttgtggatgaatctaaaatcgttaaaactctaggaaactttccactaccagttgaaatacgtacctcacataaagaagaagcacttttggaactcaaaaaatattcagaaaacatcactgttagagactccctgagtgataacaaaaattatatttttgatattcataattttaaaattacagaaccacaaaaaactgagaaggacatgcttgcaatcaatggagtaatagatgttggtatattttctgacaacaaaccacaaattgttatagtcggtaacgaatcttcttatagattaattgagtcttgaa

SEQ ID NO: 291044 - DNA, 519 bp, Unknown
  Bacterial polypeptide expressing nucleotide sequence isolated from the Sargasso Sea
ttaataatttaaaacatcattttaaaggagctgtttcgagttctaatgcttcttctgaacttttaagtaataaaggcatagaagtatttagtttaaatgatgttaatgaagttgaattctatatcgatggggcagatgaggtaacgcctgagaactttttaattaaaggtggtggtggtgctcatacacgagaaaagatagttgcggctgcatctaatgaatttatttgtattgtagataagacaaaactggtcaataaacttggggccttccctcttccagtggaagttataccagaaagtaggagtatggtagctagaaaaattattgctatgggaggtaggccagtatatagaaataattttctgactgatcagaataatcatatacttgatattcatgaaatagacattagtgatcctacaaaacttgaagagattcttaacaatattccaggtgttgtagacaacggtatttttgcaagtaacaagccagagattgtcttgatttcagattaaa

SEQ ID NO: 291045 - DNA, 580 bp, Unknown
  Bacterial polypeptide expressing nucleotide sequence isolated from the Sargasso Sea
atcgacagtcaacattctcatagataatctatccaaagtaaaaaacaaaattcgtaacgtggtctctagctccgtaaaatccactgaacttcttgaagcaaatggatttgaggtatctgaattacgtgatgttgggaaactcacaaaatacattgatggtgcggatgaagttaataaacatcttcaaatggtgaaaggtggtggtggagccctaactagggagaagatcttagcgcataactcaaatcaattcatttgcatagttgatgagtcaaagaaagttgacattctcggaaagtttccccttccaatagaagtcattccactttctagaagtgcagtatcccttgaacttataaaacttggcggcagacctgttctcagagaaaattttgtatcagataatggtaacttgatcctagatgttcataatctgcagattatggaacctattaaattagagcaaaccatcaacaatataccaggagtagtcactaatggaatattcgctttagatcatgcaaacatacttttgtgtgctagcgatagtggtatagataaaacagatcttaacgcttag

SEQ ID NO: 291046 - DNA, 505 bp, Unknown
  Bacterial polypeptide expressing nucleotide sequence isolated from the Sargasso Sea
aatgaaaaaaatagttgctgatgcagcaataaaggaagtaaagagtgacatgattcttggattaggttccggatctacagctgcgttaatgataaaaagccttgcggatgaaatgcgttctgggaaactccaaaatataagaggtgttgcaacttcttttcaatcagaagttttagcgcttgaactggatatcccacttatcgatctagcttctgtatctcaaattgatctagctattgatggagcagatgaagttgatccaggatttcaattaataaaaggaggaggagcatgccatgttagagaaaagttagtggcatctaaagctaatcagttgttgattgttgttgatgaaactaaactcgtacaaaatctaaatcaatctttccctttacctgtagaagttcttccaaatgcttggaagcaagttcaggaagtcatttcagaaatgaatggcagttcttctttaagaatggctactaaaaaagctggccctgttgtaact

SEQ ID NO: 291047 - DNA, 664 bp, Unknown
  Bacterial polypeptide expressing nucleotide sequence isolated from the Sargasso Sea
atgaattcagaagaacaaaaaaaacaggccgcacttaaatcgttagaattcatagctgatgattgtgttctgggtgtcggaactggctcaacagtgaatcatttaatcgcggctttaccgagtgtaaaaaataaaattgaggccgtcacatcgagttctaaggcaagcacgcagttgcttgaagagaatgggttcagagtcgatgacctctcctctgttggctcacccgatctctatattgacggagcggatgagatcactgagcattttcatatgataaaaggcggtggaggtgcactcacaagagaaaaaatcattgccgaagcatccaggatgttcgtctgcatcatcgatgactcaaaacttgtcgatcttctgggtaaatttccactcccggttgaggtaatcccaatggcaaaatcattggttgcaagggaattgaccaaactgggcggtttgcccgagctcagacatgattttgtcaccgacaatggcaatttaatcttggatgttcacaatttaaaaattcttgatccagttgatctagaaaatcacatcaataacatcccaggcgttgttacaaatggaatatttgctcaaagatctgccgatgtaatgatcattggcaatgaatcagggccagagaccaagattaaaaactgat

SEQ ID NO: 291048 - DNA, 697 bp, Unknown
  Bacterial polypeptide expressing nucleotide sequence isolated from the Sargasso Sea
atgaaacaagtagttgctgatgcagcaatacgagaagtgaagagtgacatgattctcggattaggatccggatctacagctgcgttgatgataaaacgccttgcggatgaaatacgttctgaaaaacttcaaaatataagaggtgtagcgacttcttttcaatcagaagtattggcgcttgaattggatatcccacttatcgatttagcttctgtatcacaaattgatttagctattgatggagcagatgaagttgatccaagatttcaattaataaaaggaggaggagcatgccatgttagagaaaagttagtggcatctaaggctaatcaattgttgatagttgttgatgaaactaaacttgtacaaaatctaaatcaatctttccctttacctgtagaagttcttcctaatgcttggaagcaagttcaggaagtcatttcagaaatgaatggcagttcttctttaagaatggctactaaaaaagctggtccagttgttactgaccaagggaaccttatcctagatatattattcaataatggtattgagaatccaaaagacattgaaatgaagattaataatattccaggagtattagaaaatggattatttgttgatcttacagacaaagtattagttggtaaaattgaagacaacgttccagtggtttactccccctcgagagctagctaat

SEQ ID NO: 291049 - DNA, 400 bp, Unknown
  Bacterial polypeptide expressing nucleotide sequence isolated from the Sargasso Sea
atgaaacaagtagttgctgatgcagcaataagggaagtcaaaagtgacatgattattggattaggatctggatctacagctgcgttaatgataaaaagtctcgccaatgaaattcgtcttggaaaacttcaaaatataagaggtgttgcaacttcttttcaatcagaagttttagcgcttgaacttgatatcccgcttatcgatttagcttctgtttctcaaattgatttagctattgatggagcggatgaagtcgatccaggatttcaactaataaaaggaggaggagcatgccatgttagagaaaagttagtggcatctaaagctgatctattattgattgttgttgatgaaactaaacttgtacaaaatctaaatcaatctttccctttacctgtag

SEQ ID NO: 291050 - DNA, 641 bp, Unknown
  Bacterial polypeptide expressing nucleotide sequence isolated from the Sargasso Sea
gggattagggtctggatctacagctgcgttaatgataaaaagccttgcggatgaaatacgttctggcaaactccaaaatattagaggtgttgcaacttcttttcaatcagaagttttagcacttgaactggatatacctcttatcgatttagcttctgtatctcaaattgatttagctattgatggagcagatgaagttgatccaggatttcaattaataaaaggaggtggcgcatgccatgttagagaaaagttagtggcatcaaaagctaatcgattattgattgttgttgatgaaactaaacttgtacaaaatctcaatcaatctttccctttacctgtagaagttcttcctaatgcttggaagcaagtacaggaagccatttcagaaatgaatggcagttcttatttaagaatggctactaaaaaagctggcccagttgttactgaccaaggcaacctcatcctagatgtattatttaatgaaggtattaagcatccaaaagacattgaaatgaagattaataatattccgggcgtattagaaaatggattattcgttgatctcacagacaaagtattagttggtaagattgaaaacgaaaatccagtggtttactcaccctcaagagctagttaat

SEQ ID NO: 291051 - DNA, 464 bp, Unknown
  Bacterial polypeptide expressing nucleotide sequence isolated from the Sargasso Sea
ggttttcgatctgaacagcgtggaccgcctggggatctatgttgatggcgccgacgagattaatggccatatgcagatgatcaaaggcggtggggcggcgttaactcgcgaaaagattatcgcctcggtagcagataagtttatctgcatcgccgatgcctccaagcaggtggatattctgggcaaattcccgctgccggtcgaagtcattccgatggcgcgtagcgctgtcgcgcgcgagctggtgaagctgggcggccgtccggagtatcgccagggggtggtgaccgataacggtaacgtgattcttgacgtcttcggcctggaaattcttgatgccatcgctctggaaaacaaaattaacggtattcctggcgtcgtcaccgtcggcctgtttgccaaccgcggagcggatgtggcactgattggaaccgccgatggcgtaaaaaccatcgtaaaataat

SEQ ID NO: 291052 - DNA, 478 bp, Unknown
  Bacterial polypeptide expressing nucleotide sequence isolated from the Sargasso Sea
atgacccaggacgaactgaaacaagccgttgccaaagctgccgtagaccacattgccccgcacctggagccgaaaagcatcgtaggcgtcggcactggcagtacggccaactttttcatcgattacctggccgagtacaaaaacgatttcgacggcgccgtagcgagctccgaagccaccgccgaacgcctgaaaaaacacggcattccggtgtatgacctgaacgccgttaacgaaatcgagttctatgtcgacggtgccgacgaaaccaacgagcgcctggaactgatcaagggcggcggcggcgccctgacccgggaaaagattgtggctgccgtcgccaagacgtttatctgtattgccgacgaatcgaagatggtgggcattctgggcgaattcccgctgccagtggaagtcattcccatggctcgcagccatgtgggccgggaaatcgtcaaactcggtggcgacccggtta

SEQ ID NO: 291053 - DNA, 572 bp, Unknown
  Bacterial polypeptide expressing nucleotide sequence isolated from the Sargasso Sea
agtgaatcatttaatcgcggctttaccgagtgtaaaaaataaaattgaggccgtcacatcgagttctaaggcaagcacgaagttgcttgaagagaatgggttcagagtcgacgacctctcctctgttggctcacccgatctctatattgacggagcggatgagatcactgagcattttcatatgataaaaggcggtggaggtgcactcacaagagaaaaaatcattgccgaagcatccaggatgttcgtctgcatcatcgatgactcaaaacttgtcgatcttctgggtaaatttccactcccggttgaggtaatcccaatggcaaaatcattggttgcaagagaagtgaccaaactgggcggtttgcccgaactcagacatgattttgtcaccgacaatggcaatttaatcttggatgttcacaatttaaaaattcttgatccagttgatctagaaaatcacatcaataacatcccaggcgttgttacaaatggaatatttgctcaaagatccgccgatgtaatgatcattggcaatgaatcagggccagaaaccaagattaaaaactgat

SEQ ID NO: 291054 - DNA, 697 bp, Unknown
  Bacterial polypeptide expressing nucleotide sequence isolated from the Sargasso Sea
aatgaaacaagtagttgctgatgcaccaataagggaagtaaagagtgacatgattctaggattaggatctggttctacagctgcgttaatgataaaaagcctcgccaatgaaattcgtcttggaaaacttcaaaacataagtggtgttgcaacttcttttcaatcagaagttttagctcttgaactgaatattccgcttatagatttagcttccgtatctcaaattgatttagctattgatggtgcagatgaagttgatccaagatttcaattaattaaaggaggaggagcatgccatgttagagaaaagttagtagcatccaaagctgatcaattgttaattgttgttgatgaaactaaacttgtacaagatctaaatcaatctttccctttacctgtagaagttcttccaaatgcttggaagcaagttcaggaagtaatttcagaaatgaatggcagttctactttaagaatggctacaaaaaaagctggcccagttgttactgaccaaggtaacctcgttctagatgtactttttaatgctggtattaagaatccaaaagacgttgaaatgacgattaataatattccgggagtattagaaaatggattattcgttgatcttacagacaaagtattagttggtaaatttgaaaacaactctccagtggtttactcaccatcaagagctagctaa

SEQ ID NO: 291055 - DNA, 421 bp, Unknown
  Bacterial polypeptide expressing nucleotide sequence isolated from the Sargasso Sea
tattgacggcgcagatgaagtaaataagtataagcaacttattaaaggtgggggaggagcgttaacaagagaaaaaattatcgcagaagcttctgaaaactttatatgtattgctgatgaaacaaaaatggtagatgttttaggaagatttcctttacctattgaggttattcctatggcaagatcatttgtttcaaggaaaattgttgctatgaaaggatttcctgtttggcgaagagattttgttactgataatggaaataatattattgatgtaagtaaccttgaaataagtgagccaataaaacttgagcaagaattaaatgctatccctggcgtagttactaacggtttatttgcgaatagaccagctgataaggtaatacttgggtatcataaagatgaagtaaagattttttaa

SEQ ID NO: 291056 - DNA, 459 bp, Unknown
  Bacterial polypeptide expressing nucleotide sequence isolated from the Sargasso Sea
aatgaaacaaatagttgctgatgcagctattaaagaaatagaagatggaatgattgtaggtttaggttctggttcaactgcagcacttatgataaagagtcttgctgaggaaattaaatcaggcaaattaaaaaatattattggagtaccaacttcttttcagtcagaggttcttgcactagaattaaatattcctttaattgatttagcttcagttagtcaaattgatttagctattgatggagcagatgaagtggatcctcactttcaacttatcaagggtggaggagcttgccatgtccgagagaaattggttgcttctaaagcaaataaattattaattgttgtagatgaaacaaaactagtgcaacatttaaacctagtttttcctctacctatagaagttctacctactgcttggaagcaggtgaaggatatagtttcagaaatgagtgggag

SEQ ID NO: 291057 - DNA, 575 bp, Unknown
  Bacterial polypeptide expressing nucleotide sequence isolated from the Sargasso Sea
aacagtgaatcacttaatctcagccttaccgagtgttaaaaataaaatagatgctgtcacatcgagttctgaggcgagcaccaagttgcttgaagagaatgggttcagagttgatgacctctcctctgttggctcacctgatctctatattgacggagcagatgaaatcactgagcatttccatatgattaagggtggtggaggcgcactcacaagagagaaaatcattgctgaagcatcgagaaagtttgtatgtattattgataactcaaaacttgttgatcttctaggtaagtttccactgccggttgaggtgattccgatggcaaagtcgttggttgctcgtgaattaactaaactgggtggtttacctgagctcaggcatgattttataactgataacggcaatctaatcttggatgttcataatttaaagattctcgatccagttgatcttgaaaatcacatcaacaatatccctggggttgttacgaatgggatatttgcaaaaagatctgccgatgtaatgatcattggaaatgaatcagggccagagaccaagataaaaaactgat

SEQ ID NO: 291058 - DNA, 321 bp, Unknown
  Bacterial polypeptide expressing nucleotide sequence isolated from the Sargasso Sea
aatgaatcaggatgtgctgaaaaagcaggtagcagaagccgcgctgcgtttcgtcccagaaggggacatcatcggcgtgggcaccggctccaccgccaacttttttatcgacgcactagctaccctgaaagaccgaatcaagggtaccgtcgccagctcggaggccaccgccgagcggctcaagcaacacggcatcgaagtattctcactgaatgatgtgggcagcctatcggtttacgtcgacggcgccgatgaggtgaaccagcaccgggaaatgatcaagggcgggggcggcgcgcttacccgcgaaaaaattgtcgc

SEQ ID NO: 291059 - DNA, 721 bp, Unknown
  Bacterial polypeptide expressing nucleotide sequence isolated from the Sargasso Sea
atggcggatctccagacccagatgaagcaggcggtggccgacgctgccgttcagcagatccgggacagcatggtccttggtctgggttccggatccacggcggctctgatgatcaaggcgctgggcgccaagctggccagcggcgaactcaaggacatcgtcgccgtcacgacctcgtttcagggagaggtgctggcggctgagctgaacattcccctgctcagcctgaatgcggtgcaacgcatcgatctggccatcgatggtgccgatgaagtggatcccggttttcagctgatcaagggcggtggagcttgccacgtgcaggagaagctggtggctgccagagccgagacgttcgtggtggtggtggattccaccaaactggtggaccgtctcaacctcggttttctgcttccggtggaggttctgcccggtgcctggcgtcaggtgcagcagcagttggcgtcgatgggaggaaccgctgagctgcggatggcgcagcgcaaggccggtccggtggtcaccgatcagggcaatctcgtcctcgatgtccgcatggatggcggcattgccgatccagtcgagctggaacgcgctgttaacaacattcccggcgtgctcgagaacggcctgttcgtcaacctggccgatgaggtgctcgtgggtgaaatcaccgatggcacagctggtgtgcgcagtctggagaagcgcctcagctgag

SEQ ID NO: 291060 - DNA, 664 bp, Unknown
  Bacterial polypeptide expressing nucleotide sequence isolated from the Sargasso Sea
atgaattcagaagaacaaaaaaaacaggccgcacttaaatcgttagaattcatagctgatgattgtgttctgggtgtcggaactggctcaacagtgaatcatttaatcgcggctttaccgagtgttaaaaataaaattgaggccgtcacatcgagttctaaggcaagcacgcagttgcttgaagagaatgggttcagagtcgatgacctctcctctgttggatcacccgatctctatattgacggagcggatgagatcactgagcattttcatatgataaaaggcggtggaggcgcactcacaagagaaaaaatcattgccgaagcatccaggatgttcgtctgcatcatcgatgactcaaaacttgtcgatcttctgggtaaatttccacttccggttgaggtaatcccaatggcaaaatcattggttgcaagggaattgaccaaactgggcggtttgcccgagctcagacatgattttgtcaccgacaatggcaatttaatcttggatgttcacaatttaaaaattcttgatccagttgatcttgaaaatcacatcaataacatcccaggcgttgttacaaatggaatatttgctcaaagatccgccgatgtaatgatcattggcaatgaatcagagccagagaccaagattaaaaactgat

SEQ ID NO: 291061 - DNA, 575 bp, Unknown
  Bacterial polypeptide expressing nucleotide sequence isolated from the Sargasso Sea
aaaaatcaaaaatataagaggtgttgcaacttcttttcaatcagaagttttagcgcttgaactggatatcccgcttatcgatttagcttctgtatctcaaattgatttagctattgatggagcagatgaagttgatccaggatttcaattaataaaaggaggaggagcatgtcatgttagagaaaagttagtggcatctaaagctgatcaattgttgattgttgttgatgaaactaaacttgtacaaaatctaaatcattctttccctttacctgtagaagtccttccaaatgcttggaagcaagttcagggagtgatttcagaaatgaatggcagttctcatttaaggatggctactaaaaaagctggtccagttgttactgaccaaggcaacctcatcctggatgtattatttgatgatggtattaagaatccaaaggatattgagatgacaattaataatatcccaggagtattagaaaatggtttattcgtcgatctcgcagacaaagtattagttggtaagattgaaaacaatattccaatggtttactccccctcaaaagtcaactaat

SEQ ID NO: 291062 - DNA, 715 bp, Unknown
  Bacterial polypeptide expressing nucleotide sequence isolated from the Sargasso Sea
gatggctgacctgcagacccagatgaagcaggccgtggcgttggcggccaccgatcaggtcaaggacggaatggtgctgggcctgggttctggttccaccgcagccctgatgattcaggaggttggagcccggctgaaggatggccgcctcagcgacatcgttggcgtgactacgtcgtttcaaggagaagtcctggccgccgagctgggtattcccctgcagtcgctcaacgccattgatcggatcgatctggccatcgatggtgccgatgaggtggatccccgttttgaactgatcaaaggtggtggtgcctgccacgttcaagaaaagttggtggcccgccgggctgagcgttttgtggtggtggtcgatagcaccaagttggtggatcggctcaacctcggctttctcttgccggttgaggtgttggctggtgcctggcggcaggtacaggccgagctccagcaactgggaggtgccgctgaattgcgcatggctcagcgcaaagccggccctgtggttactgaccaaggcaacttggtgcttgatgtgagctttgccggtggcatcgatgatccagcagagctggaatccagcatcaacaacatccctggagtcctggaaaacggtctgtttgtggggctagctgatcaggtcttggttggagagatcaaagagggtgtggctggcgtgagggatttggctaaagcgtga

SEQ ID NO: 291063 - DNA, 583 bp, Unknown
  Bacterial polypeptide expressing nucleotide sequence isolated from the Sargasso Sea
acgttctggaaaactccaaaatataagaggagttgcaacttcttttcaatcagaagttttagcacttgaactgggtattccgcttatcgatttagcttctctatctcaaattgatttagctattgatggagcagatgaagttgatccaggatttcaattgattaaaggaggaggagcatgccatgtaagagaaaagttagtcgcatctaaagctaatcaattgttgattgttgttgatgaaactaaactcgtacaaaatctaaataaatctttccccttacctgtagaagttcttccaaatgcttggaagcaagttcaggaaaccatttcagaaatgaatggcaattccattttaagaatggctactaaaaaagctggcccagttgttactgaccaaggcaacctcatccttgatgtattatttaatgatggtattaagaatccaaaagacatagaaatgaagattaataatatcccaggggtattagaaaatggattattcgttgatctcacagacaaagtattagttggtaaaattgaaaataacattccagtggtctactcaccctcaagagcaagctga

SEQ ID NO: 291064 - DNA, 627 bp, Unknown
  Bacterial polypeptide expressing nucleotide sequence isolated from the Sargasso Sea
aatgaaaaaaatagttgctgatgcagcaataaaggaagtaaagagtgacatgattcttggattaggttccggatctacagctgcgttagtgataaaaagccttgcggatgaaatgcgttctgggaaactccaaaatataagaggtgttgcaacttcttttcaatcagaagttttagcgcttgaactggatatcccacttatcgatctagcttctgtatctcaaattgatctagctattgatggagcagatgaagttgatcctggatttcaattaataaaaggaggaggagcatgccatgttagagaaaagttagtggcatccaaagctaatcagttgttgattgttgttgatgaaactaaactcgtacaaaatcttaatcaatctttccctttacctgtagaagttcttccaaatgcttggaagcaagttcaggaagtcatttcagaaatgaatggcagttcttctttaagaatggctactaaaaaagctggccctgttgtaactgaccaaggcaaccttatcatagatgtattatttaaagacggtattaagaatccaaaagacatagaaatgaagattaataatattccaggagtattagaaaatggattattcgttgatcttac

SEQ ID NO: 291065 - DNA, 614 bp, Unknown
  Bacterial polypeptide expressing nucleotide sequence isolated from the Sargasso Sea
acatatccataatgattgtttattgggaatgggtacaggctctaccgttaactttcttatagacttgctaccagagataaaaaataaaatttcagctgttgcctcaagctcagttcagacagagaatctccttaaaatgaatggattcgaggttcaagcattgaatcaactcggtatgcttgatctttatattgatggagcagacgaagcgaccaaaaatcttcatcttattaagggtggcggtggcgctttaacgcgtgaaaagatcttagcagaaaattcaaaaaaatttatatgcatcgcagatgaaacaaagctcgttaaaagattaggtatttttcctctcccaatagaagtgatacccatggcaagatcattcgtatcaagagaaataatcaaatatcacggcaaaccagtctatagagagaactttgtcacagacaatggaaacgaaataattgatatacacaatttagatattatagatccaattcaattagaaaatgatcttaatcaaattcctggcgtagtaacagtgggaatatttgctcgcagaaaagcagatgttcttctcattgctggtgaacatggtgtagatgaaatgtacccttgat

SEQ ID NO: 291066 - DNA, 640 bp, Unknown
  Bacterial polypeptide expressing nucleotide sequence isolated from the Sargasso Sea
atgagtgctgcaaagataactgttgcaaagaaagcaataggccatatagaaaaaaaacttgatcgaaatatggttcttggtattggcacaggatcaactgttaacttttttattgaagagttagcaaaatttaaaaatctttttaaaggtgctgtttcaagttctgaagcatcaacaaaattacttcaagatataggtattgaagtttttaacttaaatgatgttaatgaggtttcatattacattgatggagctgacgaagtatctccagagaattttctgataaaaggtggtggaggagctcacaccagagaaaagatagttgcagctgcatcaaaaaatttcatatgtattgttgatagttctaaattagtcgatcagcttggtttatttcccctaccgattgaagttataccagaaagtagaagcatggttgcaagaaaaattattgagctaggtgggttgccagaatatagatctggatttatcactgatcaagggaatcaaatcattgatgtgaaaaatttaattataaaagatcctaaagagcttgagtcttatttgaacaatataccaggagtggttgaaaacggaatattttcttataataagccagatttggtattaacagaaatttagg

SEQ ID NO: 291067 - DNA, 564 bp, Unknown
  Bacterial polypeptide expressing nucleotide sequence isolated from the Sargasso Sea
aatgaaaaaagttgttgctgatgcagcaataagggaagtaaaaagtgacatgattcttggattaggttctggatctacagctgcgttaatgataaaaagccttgcggatgaaatgcgttctggaaaactccaaaatataaaaggtgttgctacttcttttcaatcagaagttttagcgcttgaactgaatatcccgcttatcgatttagcttctgtatctcaaattgatttagctattgatggagcagatgaagttgatccaggatttcaattaatcaaaggaggaggagcatgccatgtgagagaaaagttagtagcatcaaaatctgatcaattgctgattgttgttgatgaaactaaacttgtacaaaatttaaatctatcttttcctttacctgtagaagttcttccaaatgcttggaagcaagttcaggaagttatctcggagatgaaaggtagttctactttaagaatggctactaaaaaagctggcccagttgttactgatcaaggtaacctaatcttagatgtattatttgatgatggcattaataatccaaaaga

SEQ ID NO: 291068 - DNA, 601 bp, Unknown
  Bacterial polypeptide expressing nucleotide sequence isolated from the Sargasso Sea
tatgagcgatgcaaagataagtgtttcaaaaaaagcaattaaatatattgaaaacaaacttacacgtgatatggttttgggaattggaactggctcaactgtaaactattttatttctgaattatccaaatttaagaataattttcttggagctgtatctagttctgaaacatcaacaaagctattagaagatataggaattgaagtatttaacttaaatgatgtaaatgaagtttcatattatgttgatggtgcagatgaagtatctcctgagaattatttaataaaaggtggtggtggagctcatactagagaaaaaattattgcatcagcatcaaaagaatttatatgtattgtagataagtcaaagttggttgaaaatcttggttcgttccctcttcctattgaggtaatacctgaaagtaggagtttggtttcacgaaaaattatggcacttggcgggacacctatttatagagaaggttttgtaacagatcagggcaatcaaataatagatattgaaggcatcgacatatctgatccagaagcattagaagaactaattaataatatacctggtgtggtagataacggaatattg

SEQ ID NO: 291069 - DNA, 423 bp, Unknown
  Bacterial polypeptide expressing nucleotide sequence isolated from the Sargasso Sea
catgacccaggatcaactcaaacaggcagtggcccaggccgctgtcgatttaatccttcctaagctcgacgacaagagcatcgtcggtgtcggcaccggttccaccgccaactgctttatcgacgcactggcccggcacaagggcgcgttcgacggcgccgtggccagttccgaagccaccgccgcccgcctcaagggccatggcattccagtgtacgagctcaacaccgtgagcgacctggagttctacgtcgacggcgccgatgaaagcgacgagcacctgaacctgatcaaaggcggcggcgcggccctgacccgcgagaagattgtcgcggccgtggccaagaccttcatttgcatcgccgacgccagcaagctggttcccgtgctgggcacgttcccactgccggtggaagtcatccc

SEQ ID NO: 291070 - DNA, 643 bp, Unknown
  Bacterial polypeptide expressing nucleotide sequence isolated from the Sargasso Sea
tgtcggattagggtctggatctacagctgcgttaatgataaaaagccttgcatatgagatacgttgtggaaaactcaaaaatatcaaaggtgttgctacttcttttcaatcagaagttttagcgcttgaactggatatcccgcttatcgatttagcttctgtatctcaaattgatttagctattgatggagcagatgaagttgatccaggatttcaattaataaaaggaggaggagcatgccatgttagagaaaagttagtggcatctaaagccaatcaattgttgattgttgttgatgaaactaaacttgtaaaaaatctaaatcaagcttttcctttacctgtagaagttcttccaaatgcttggaagcaagttcaggaagttatttcagaaatgaatggaagttcttctttaagaatggctattaaaaaagctggaccagttgttactgaccaaggaaacctaatcctagatgtattatttaatgatggtattaagaatccaaaagaaattgaaatgaagattaataatattccaggagtattagaaaatggattattcgttgatcttacagacaaagtattagttggtaaaattgaagagaccattccagtagtttactcaccctcaagaaccagctaa

SEQ ID NO: 291071 - DNA, 526 bp, Unknown
  Bacterial polypeptide expressing nucleotide sequence isolated from the Sargasso Sea
attagagggtgccgttgccagttctaaggaaaccgcccgcaggctcaaatctattggtattccggtctttgacttaaacactgttggagaagttcagatctatgttgatggagctgatgaagcgaatgaatatctgcacttaattaaaggtggtggtgcagctttaacccgagaaaaaattatagcggccgcttcaaaggaatttatttgcatagcagacgaaagtaagcttgtccccatactaggcaaatttccgctgccagtggaggttatacccatgtctcgaagctttgttggcaggcaaattgtaaaattgggcggagatccggtatatcgcgagggttgtgtaaccgataacggcaatcacatcatagatatcttcaatctggtcatagaccatccaaaagaaatggaacagcgtcttaatcaaatcaccggtgtggtaactaacggactttttgccaaccgccgcgctgaccagctatttttgggcacttcatctgaagtcaaaattattaactcctaa

SEQ ID NO: 291072 - DNA, 595 bp, Unknown
  Bacterial polypeptide expressing nucleotide sequence isolated from the Sargasso Sea
atcgttggcgtcggtaccggctccaccgccaacttcttcatcgacgcgctggccaagcacaagatggacttcgatggcgccgtcgccagctccgaagccaccgctgcacgcctgaagggccacggcatcccggtctacgacctcaacagcaccgccgagctggagttctacgtcgatggcgccgacgaaagcgacgagcgcctgcacctgatcaagggcggcggcgcggcgctgacccgcgagaagatcgtcgccgccgtggccaagaccttcatctgcatcgccgacgccagcaagctggtgccggtgctgggcgccttcccgctgccggtggaggtcatccccatggcgcgcagccatgtcgcccgcgagctggtgaaactaggcggcgacccggtgtaccgcgaaggtgtgctgaccgacaacggcaacgtcattctcgacgtgcacaacctgtcgatcaccgacccggtgaagctggaggcggacatcaacgccatcgtcggcgtggtcaccaacggcctgttcgccgcccgcccggccgacctgctgctgctcggcaccgccgaaggcgtgaaaacactcaaacgctgaa

SEQ ID NO: 291073 - DNA, 543 bp, Unknown
  Bacterial polypeptide expressing nucleotide sequence isolated from the Sargasso Sea
cctttcaatcagaagttttagcgcttgaactcgatatcccgcttatcgacttagcttctgtttctaaaatagatttagctattgatggtgcagatgaagttgatcctggatttcaattaataaaaggaggaggagcatgccatgttagagaaaagttagtagcatctaaagctgagcaattgttgatagttgttgacgaaactaaactcgtacaagaattaaatcaatcttttcctttacctgtagaagtccttccaaatgcttggaagcaagttcaggatgtgatttcagaaatgaatggcaactctacattaagaatggctactaaaaaagctggcccagttgttactgatcagggcaacctaattctagatgtattatttaatgatggtattaagaatccaaaagacattgaaatgagtattaataatattccaggagtattagaaaatggattattcgttgatcttacaagtaaagtattggttggaaaaattgaaaacagtcttccggttgtttactctccttcaaaagttggctaat

SEQ ID NO: 291074 - DNA, 658 bp, Unknown
  Bacterial polypeptide expressing nucleotide sequence isolated from the Sargasso Sea
gctgaagcagcaagccggaataatagcttgtgatttcgttcaggaaggtatgaaaattggccttggaactggctcaaccgtccgctacacggtgctagagttgggacggagaatgcaagaagaaggcttgtctatcgtcggagttccaacaagtgaggcaactagagaacttgccgaaagtctgaacatcccactagttcctttagccgatgctggagtattggatttggtaatcgacggagcagatgagtttgattctgattataatctaatcaaaggtggcggtggggcattaactcgcgaaaagattgtcgcccagtctagtaatggaatgattgtggttgctgatgataggaaacaggtagaactcctaggtgcatttgacctacctatcgaagtattaccatttgaatgggagagaacagcagatagagtcgcggaaatatgtccaggtaacgtgcatagaagaggtggcgatgaaccattcattagcgataatggaggttacattctggactgttcttttggttctacgattactaatccaagtgaattagaatcctctttattggaaatcgcaggagtagttgaagttggcttatttgtaggcatttgtgatgcggttgtaatggctgctagtggtggagtttccctctag

SEQ ID NO: 291075 - DNA, 667 bp, Unknown
  Bacterial polypeptide expressing nucleotide sequence isolated from the Sargasso Sea
atggatgaactgaaattgaaggtagcaaaggaggcattcaactacgtcgaaaattcaatagaacgtgacacaattatcggagtcggtaccggctcgacagctaacttttttattgaggagttagggaaaattgccagcagattagagggtgccgttgccagctccgaggaaaccgcccgcaggctgaaatctattggtattcctgtctttgacttaaacactgttggagaagttcaggtctatgttgatggagctgatgaagtgaatgagtacctgcacttaatcaaaggtggtggagcagctttaacccgagaaaaaattattgcggccgcttcaagggagtttatttgcatagcagacgaaagtaagcttgtccccatactcggtaaatttccgctgccagtggaggttatacccatgtctcgaagctttgttggcaggcaaattgtaaaagtgggcggagatccggtatatcgcgagggctgtgtaaccgataacggcaatcacatcatagatatcttcaatctggtcatagatcagccaacagaaatggagcagcgtcttaatcaaatcaccggtgtggtaactaacggacttttcgccaaccgcggcgctgaccagctatttttgggcacttcatctggagtcaaagtttttaactcctaag

SEQ ID NO: 291076 - DNA, 421 bp, Unknown
  Bacterial polypeptide expressing nucleotide sequence isolated from the Sargasso Sea
atgaaacaaatagttgctgatgcggcaattaaggaagtcaagagtgacatgatcctgggattaggttctggatctacagctgcgcttatgataaaaagcctcgctgatgagattcattctggcaagttgcaaaatataaaaggtgtaccaacttcctttcaatcagaagttttagctcttgaacttaatatcccgcttatcgatttagcttctgtctcccaaattgatttagctattgatggagcagatgaagttgatccgggatttcaattaatcaaaggaggaggagcatgccatgttagagaaaagttagtagcatcaaaagctaataaattattaattgttgttgacgaaactaaacttgtacaaagcttaaatcaatcttttcctttaccagtggagatcctcccaaattcttgaa

SEQ ID NO: 291077 - DNA, 610 bp, Unknown
  Bacterial polypeptide expressing nucleotide sequence isolated from the Sargasso Sea
gatgataaaaagccttgctaacgaaattcgtcttggaaaccttaaaaatataagaggtgttgcaacttcttttcaatcagaagttttagcgcttgaactggatattccgcttatcgatttagcttctgtatcccaaattgatttagctattgatggagcagatgaggttgatccaggttttcaattaataaaagggggaggagcatgccatgttagagaaaagttagtggcatcaaaagctgatcaattactaattgttgttgatgaaactaaacttgtacaaaatttaaatcaatctttccctttacccgtagaagttcttccaaatgcttggaagcaagttaaggatgttatttcagagatgaatggcatttcttctttaagaatggctactaaaaaagctggcccagttgtaactgaccaaggtaatctcatcttagatgttgtatttaatgatggtattaagaatccaaaagaaattgaaatgtcgattaataatattccaggagtattagaaaatggattatttgttgatcttacagacaaagtattagttggtaaaattgaaaacaactctccaatggtttactcaccctcaagagctagttaa

SEQ ID NO: 291078 - DNA, 694 bp, Unknown
  Bacterial polypeptide expressing nucleotide sequence isolated from the Sargasso Sea
ttagtgtcaaagcacgcactaaagtatgtaaaaaaagaaatgatcatcggacttggcaccggatcaactgccggaatttttattaaggaattagcgaagttaaacagacgtgaggcgcttagaataactggagtaccaacctcagatgtctcaatgcggttggctaaagatttgggaataaatattgcaagtccagatgaaataaattcgattgatattgcttttgatggcgcggatgaggtcgatccgtctttaaacttaattaaaggtggcggtggtgcgttgctgaaagaaaaaattgtggcagaaaatgctaaacaaatgatagttttggttgatgaatcaaaaatagttcaaattcttggaaagttccctctgcctattgaaatagtcaagtttggtagtgaaaaaactatttcactaataagaaattattttaaagaatgttttggccaaataccagaaatgtatttacgaaagaataagggttctaattttgttactgaagaggagcattttattttggacatttttcaaaccaaaatcactaacccagagaaattagatattgagttaaatgcaatagtaggtgtagttgagactggtctatttgtgaatactgcaaatacattgatagttggtaatagggatggatctgtcaaaattgatcacagagtagaaaatgcaatttgat

SEQ ID NO: 291079 - DNA, 559 bp, Unknown
  Bacterial polypeptide expressing nucleotide sequence isolated from the Sargasso Sea
tggtgtcaccacctccttccaaggtgaggttcttgccgccgagctcaacattcctttgctcagcctcaatgcggtggatcgcatcgatctggccatcgatggcgccgatgaagtggatccaggctttcaactgatcaaaggcggcggtgcctgtcacgttcaggagaagttggtggcggcccgcgccgatcggttcgtagtggtggtggattccaccaagctcgtggagcggttgaacctggaatttctgttgccggtggaagtcttgcccggtgcctggcgtcaggttcagcagcagctggcagctctcggcggcaaagccgaactgcgcatggcccagcgcaaagctggtccggtggtgaccgatcagggcaatctcgttctcgatgtgacgatgaacggtgggatttctgatccggcggcactggaatcaacggtgaacaacattcccggagttctggagaacggcctgttcgttgatctcgttgatgaggtgctggttggtgagatcaccgatgggtctgcgggggttcgcagcctggagaagcggctcagctga

SEQ ID NO: 291080 - DNA, 256 bp, Unknown
  Bacterial polypeptide expressing nucleotide sequence isolated from the Sargasso Sea
gaagttatcccaatggcgcgttcatatgtggctagagaaattgtgaaactgggaggcgaccccgcttaccgctctggcgttgttactgacaatggcaacgtaattttagatgttcacaatctcgacattctcaacccagttgaactggaagacaagcttaacaatatcgtcggagttgtcacaaacgggcttttcgctgccagaggcgccgacattgtgttgaccggaacagaaaacggcgtggtaaaaaattaat

SEQ ID NO: 291081 - DNA, 598 bp, Unknown
  Bacterial polypeptide expressing nucleotide sequence isolated from the Sargasso Sea
catggcgctctcccaggatgagctcaagaagctcgtggggtacaagtccgtcgacgatcacgtccagtccggcatggtcgtcggtctcggtaccggatccacggcgtacttcgcggtcgagcgcgtgggccaaaagctcgcgagcggtgagctcaaggatgtgatttgcatcccgacgagcgagcgtacccgcgaacaagccgagtcgttgaacatcccgttgtgcacgttgaacgaaaagtccgagttggacgtcgcgatcgatggtgccgatgaggttgacccggccctcgctctcgtcaagggcggtggtggtgcgttgcttcgtgaaaagatggtggaagtgatggcaaagaagttcatcgtcattgtcgacgagtccaagctctgcaagggtctcggtccgggcttcccgttgccggttgagatcacgccgttctgccacatgcacacgttgcgaacggtcggcaaactcccgtccctcgctggctgcgaaccgatcttgcgtttgggttcctcctccaacaacaagatcgacggcgacgaaccggccgtcacggataacggcaactacatcgttgaccttcactttcaggag

SEQ ID NO: 291082 - DNA, 664 bp, Unknown
  Bacterial polypeptide expressing nucleotide sequence isolated from the Sargasso Sea
gatgaattcagaagaacaaaaaaaacaggccgcacttaaatcattagaattcatagctgatgattgtgttctgggtgtcggaactggctcaacagtgaatcatttaatcgcggctttaccgagtgtaaaaaataaaattgaggccgtcacatcgagttctaaggcaagtaccaagttgcttgaagagaatgggttcagagtcgatgacctctcctctgttggctcacccgatctctatattgacggagcggatgagatcactgagcattttcatatgataaaaggcggtggaggcgcactcacaagagaaaaaatcattgctgaagcatccaggatgttcgtctgcatcatcgatgactcaaaacttgtcgatcttctgggtaaatttccacttccggttgaggtaatcccaatggcaaaatcattggttgcaagggaggtgaccaaactgggtggtttgcccgagctcagacatgattttgtcaccgacaatggcaatttaatcttggatgttcacaatttaaaaattcttgatccggttgatctagaaaatcacatcaataacatcccaggggttgtcacaaatggaatatttgctcaaagatccgccgatgtaatgatcattggcaatgaatcagggccagagaccaagattaaaaactga

SEQ ID NO: 291083 - DNA, 697 bp, Unknown
  Bacterial polypeptide expressing nucleotide sequence isolated from the Sargasso Sea
atgaaacaaatagttgctgatgtagctgttaaggaagtaaagagtgaaatgataatcggattaggatctggatctacagctgcgcttatgataaaaagccttgctgatgaaattcgttctggaagattaaaaaatataagaggtgttgcaacttcctttcagtcagaagttttagcgctagaactcgatatcccgcttatcgatttagcttctgtctctcaaatcgatttagctattgatggcgcagatgaagttgatccaggatttcaactaataaaagggggaggagcatgccatgttagagaaaagttagttgctacaaaagctaatcaattgttgattgttgttgaccagactaaactggtacaaaatttaaatcaatcttttccattacctgtagaagtccttccaaatgcttggaagcaagttcaggatgttatctcagaaatgaatggcagatctactttaagaatggctacaaaaaaagcaggacctgttgttactgaccagggcaacttaatcttagacgtattgtttaatgatggtattaagaatccaaaagatattgaaatgagtattaataatattccaggagtattagaaaacggattatttattgatctgacagacaaagtattggttggtaaaattgaaaacaacattccagttgtttacactccttcaaaagttgggtaat

SEQ ID NO: 291084 - DNA, 688 bp, Unknown
  Bacterial polypeptide expressing nucleotide sequence isolated from the Sargasso Sea
atgacgcaggatgaactgaaggcgttggtggcacaggccgccgcagactacgtattggccaacgtgcccgagggcgccgtgctgggtgtcggcaccggctcgacggccaacctgttcatcgacgcgatggcgccgcacaaggcgcggttcgccggcgcggtgtccagctcggaggcgtcgactcgccgcctgcagggccacggcttcacggtgctcgatttgaatgaggtcgatactattcccgtgtacgtggatggcgccgacgagatcgacgcttccggcgccatgatcaagggcggcggcggtgcgctcacgcgtgaaaagattgttgcctcggtggccaacgtgttcgtttgcatcgctgacggcagcaagctcgttgagacgatgggtgctttcccgttgccggtggaagtggtgccgatggcgcgcgccgccgtggcccgccaactggctgcgctgggcggtcagccgcgcctgcgcatgaccaaggagggccagatctacaagaccgataacggcaacgtgattctcgacgtgatgggcctgcgcattgccgatccgaagggcctggaatcggtggtcaacgagattccgggcgtggtgacggtcggcctgtttgccaagcgcggcgccaatgtgctgctgctggggaccgaagcgggcgtgcagcgtcgcgatttctgat

SEQ ID NO: 291085 - DNA, 562 bp, Unknown
  Bacterial polypeptide expressing nucleotide sequence isolated from the Sargasso Sea
catggatcagaacgcaaagaaacaagccgtagccaaagcagctatcgactacgttgaatcagacagtattgtcggtgtgggtacgggttctaccgtgaatttctttattgaagagctcggtaaaattaaacacaaaattgaaggggcagtatcaagctcagaagcatcaacagcgcgtttaaaagctttgggcattgaagtatttgcgctaaacgaagtaagcaacctttctgtttatatcgacggtgccgatgaagttaccgaacacaagcatatgattaaggggggcggtgccgcacttactcgtgaaaagattgttgcaggcgctgccactacgtttgtttgtattgtagatgaaagcaaacgggtgccagtactgggcgcattccccctccctgttgaagtgatacctatggcccgttctttcgtagcccgtgaactggttaagcttggcggcgacccagagtaccgtcagggagtgatcaccgacaatggcaacgttatcttggatgttcataaccttgagatacttaatccacgggaactagaacaaaagataaat

SEQ ID NO: 291086 - DNA, 697 bp, Unknown
  Bacterial polypeptide expressing nucleotide sequence isolated from the Sargasso Sea
catgactcaagacgaactcaagcaactggtcggccaggccgccgccgactatgtgaacgccaacgtgccggaaggctccgtgatcggcgtcggcaccggctccaccgcgaactgtttcatcgacgcgctggccgccagcaaaacccgttatcgcggcgcggtgtcgagctcgctcgccaccaccgcgcgtttgcaagcgcacggtttcaaggtgctcgatctcaacgaaatcgattcgctgccggtgtatgtggacggcgccgatgagatcgaccacggcggcgcgatgatcaagggcggcggcggcgcgctgacgcgcgagaagatcgtcgcctcggtgtcggatgtattcgtttgcatcgccgacgcgagcaagctggtcgacacgctcggcaacttcccgctgccgatcgaagtcgtgccgatggcgcgcacggcgatcggccgccgcgtgacggcgctcggcggcgtgccggtggtgcgcgtgaccaaagagggcgtgccgttcatcaccgataacggcaacgagatcatcgacgtcaagggtctgcgcatcagcgacccgcgcacgctggaaatgcacatcaatgcatggccgggcgtagtgacggtgggcctgttcgcgggccgcggcgccaatctgtgcatgctcggcacggacaccggcgtcgagacgatcgactacaacaagaactga

SEQ ID NO: 291087 - DNA, 667 bp, Unknown
  Bacterial polypeptide expressing nucleotide sequence isolated from the Sargasso Sea
atggaccaaaatactaaaaaacaaagagtagctgaggctgtattagattatatcgataatggtgagtctcttgggattggatctggatcgacggtcaacattctcatagagaatctatcgaaagtaaaaaataaaattcgtaacgtggtctctagctctgtaaaatctacagaacttcttgaagcaaatgggtttgaggtttctgagttgcgtgatgttggtagacttacaaaatatattgatggcgctgatgaagtcaacaaagatcttcaaatgataaaaggtggtggtggagctttaactagagagaaaatcttagcgcacaattcaaatcaattcatttgtatagttgatgattctaaaaaagtcgacatgctcggtaagtttccccttccgatagaagtcattccgctttctagaagttcagtatctcttgaacttataaaacatggcggcagacctgttcttagagaaaattttttaacagataatggtaatgtgatcctagatattcataatctagagattatggagcctattaaattagagaaaaccattaacaacatacctggggtggtcactaatggcatattcgcattagatcatgctaatgtacttttgtgtgctagtgatagtggaatagataaaacagatcttaacgcttaga

SEQ ID NO: 291088 - DNA, 655 bp, Unknown
  Bacterial polypeptide expressing nucleotide sequence isolated from the Sargasso Sea
tatgtcacaagaacagaaaaaaagaaatgctgcaaaggcggcaatcgaacatataaataataatgccgttattggtgttggtacagggagcactgtcaattttttcatagaagaactcgctaaaaataaaggccttattgatggagcagtatcaagttccgtagccacagaaaatctactcaaacaacataacataccggtagttccgttaaatagtgttattgagttaccgatttacatagacggtgctgatgaagcaacaaaaaataagcaccttattaaaggtgggggtggtgcgctgacccgtgaaaaaattattgcggcggcaagtaaacaattcgtgtgtattattgatgacacaaaactcgtacccctattaggtaacttccccttgccagttgaagttgtgccgatggcacaaagttatgttgcaagggaaattacgaaacttggagggcaacctgaattaaggcagaattttacaaccgataatggcaatgtcattcttgatatacataacatgaaaatagaaaatccatcagaaattgaaaacaaattaaatcagattacaggtgtcgtgactaatggtctgtttgcaaaaagaccggcagatgtgcttattattgcgtcagacaatgaagttataaaaaaataa

SEQ ID NO: 291089 - DNA, 697 bp, Unknown
  Bacterial polypeptide expressing nucleotide sequence isolated from the Sargasso Sea
catgactcaagacgaactcaaacgcctcgtcggccaggccgccgctgattacgtgatccagaacgtgccggaaggcgccgtgatcggtgtcggcaccggctcgaccgccaactgcttcatcgacgcgctcgccgtcgtcaaggcgcgctatcgcggcgccgtgtcgagctccgtcgccacgaccgaacgcctgaagtcgcacggcatcaaggtgttcgacctgaacgaggtcgactcgctgcaggtgtacgtcgacggcgccgacgagatcgacgcgagcggcgcgatgatcaagggcggcggcggcgcgctgacgcgcgagaagatcgtcgcgtcggtggccgatacgttcgtctgcatcgcggacgccagcaagcgcgtgccggtgctcggcgcgttcccgctgccgatcgaagtcgtgccgatggcgcgcacggcgatcggccggcgcgtgaccgcgctcggcggtgtgccggtgctgcgcgtgacgaaggacggtgcaccgtacatcacggacaacggcaacgagatcatcgacgtgaagggcctgcagatcgccgatccgcgcggtttcgaagcgcaggtgaacgcatggccgggcgtcgtgacggtcggcctgttcgccgagcgcggtgcgaatctgtgcttgctcggcacggaaaacggcgttgaaacgatcgtgtattcggccaattga

SEQ ID NO: 291090 - DNA, 640 bp, Unknown
  Bacterial polypeptide expressing nucleotide sequence isolated from the Sargasso Sea
atgagcaccgcaaagataagtgttgcaagaaaagcaataaatcatatagagaaaaaacttagtaaagatatggtgttaggcattggaactggttcaactgttaatttctttattgatgaattatcaaattttaaaaattattttaaaggtgcggtatcaagctcagaggcatcaacaatacttttagagagtaatggaattgatgtatttagtttaaatgatgtgaacggacttgagttttatattgatggggctgatgaagtttcacctgacaatgttctaataaaaggtgggggtggagcacatacaagagaaaaaatagtggcatctgcttctagagagtttatttgtattgtagatcaatcaaagttagttgataaacttggtgacttccctcttccaattgaggtaattccagaaagtagaagtcttgttgctaggaaaattatctctttaggaggaacaccaatatatagaagtggtttcgtgacagatcaagggaatcatatattagatataaaagatattgatatttcacaaccagaaaagctagagtctttgattaacaatatacctggagttgttgataatggaatttttgcttttaataaaccaaatatagtttttgtatcagattaaa

SEQ ID NO: 291091 - DNA, 370 bp, Unknown
  Bacterial polypeptide expressing nucleotide sequence isolated from the Sargasso Sea
atgacccaggacgaactgaaacaagccgttgccaaagctgcagtggatcacatcgcccctcacctggaaccgagcagcattgtcggggtgggcaccggcagcaccgccaactttttcatcgactacctggcggaataccgcaacgacttcgacggcgccgtcgcaagctccgaggcaaccgccgaacgactgaaaaagcacggcatcccggtatacgacctcaacgccgtcaacgaaatcgagttttacgtcgacggtgccgacgaaaccaacgagagcctggaactgatcaaaggcggtggcggtgccctgacccgggaaaagattgtggccgccgtcgccaagacctttatctgcatcgccgatgagt

SEQ ID NO: 291092 - DNA, 661 bp, Unknown
  Bacterial polypeptide expressing nucleotide sequence isolated from the Sargasso Sea
catgactcaagatgaaatgaaaaaagccgctggctgggctgctctcaaatacgttgagaaagacagcattgtgggtgtaggcacaggctcaaccgtcaatcactttatcgatgccctcgccaccatgaaggccgatattgaaggtgcggtatcaagctctgaagcctcaacccaaaagatgaaagcccttggcatcccagtttatgacttaaacagcgtcgataaattatctgtgtatgtcgatggtgccgatgaaatcaacggccatatggacatgatcaaaggcggcggcgcggcattaacccgcgagaaaatcgttgcggctgtggctgaaaagtttgtctgtatcgtggataacactaaacaagtggatattttgggtgaattcccactgcccgttgaagtgatcccaatggcgcgctcttacgtggcccgtgaactggtcaaactcggcggcgaccctgtgtaccgtgaaggcgttgtcacggataacggcaacgtgatcctcgacgtttacaaccttaagatcatcaatcctaaggaattagaagagaagatcaacgccatcgtcggcgtagtcaccaacggcctgttcgcaaaacgcggcgccgatgtgttattggttggcacccctgaaggtgtaaaaacctttaccgcttaa

SEQ ID NO: 291093 - DNA, 700 bp, Unknown
  Bacterial polypeptide expressing nucleotide sequence isolated from the Sargasso Sea
gatgaagcacgcggtggccgatgccgccgttgagcagatcaaggacggcatggtcctgggactggggtccggatccacggcggccctgatgatcaaggctctcggggcgaagctggccagcggtgcgctgaaagacatcgtcggtgtcaccacctcctttcagggtgaggtcctcgccgccgagctgaacatccctcttctcagcctcaatgcggtggatcgcatcgatctggccattgatggcgccgatgaggtggaccccggttttcagctgatcaaaggcggcggcgcctgccacgttcaggagaagttggtggcggcacgcgccgagcggttcgtggtggtggtggattccaccaaattggtggagcgtctgaaccttggatttctgctgcccgtggaagtgctgcccggggcctggcgtcaggttcagcagcagctgtctgcccttggaggccaagccgagctgcgcatggcgcagcgcaaagccggcccggtggtcaccgatcagggcaacctcgtcctcgatgtgacgatgaacggtggcatctctgatcccgcggctctggaatcaacggtgaacaacatccccggcgtgctcgagaacggcctgtttgttgatctcgtcgatgaggtgctggttggagagatcaccgatgggaaggctggcgtccgcagcctggagaagcggctcagctga

SEQ ID NO: 291094 - DNA, 638 bp, Unknown
  Bacterial polypeptide expressing nucleotide sequence isolated from the Sargasso Sea
tgcaaagcaactggacattatattgccaaaactttacgaggactcaatcatcggtattgggacaggctctactgttgatttgtttatcgaaatgttagctgagaaaaatcctgtctttaaagcagtggtttcaagctctgaaagaagctcaaaacttcttgaacagaaaggcattgaagtttcgttgctaaacgatgtcggtgggccagatatatatgttgatggagctgatgagtatgatgataagaagcagcttataaaaggcggaggcggagctcttacgagagaaaaaataatagcttactctgcaagagaatttatttgtatcgtggatgaatcaaaaaaagtaaataggcttggcgcttttccgctagcaatagaggttttggaatatgcacgaagctatgttgcgagagaaatagttaagctaggcgggaagccaacctacagaacaggatttgtcactgatcagggaaaccaaatactagatatattaaatttggattacgctgttccctatgaattagaaattagattaaacagaatcccaggagtagttgagaacggaatctttgcccagaagacagctaccaagattgtagtagcaactcaaaacggtgtagaagtaatagattaaa

SEQ ID NO: 291095 - DNA, 661 bp, Unknown
  Bacterial polypeptide expressing nucleotide sequence isolated from the Sargasso Sea
atgactcaagatgaaatgaaaaaagccgcaggctgggctgctctcaaatacgttgagaaggacagcattgtaggtgtgggcacaggctcaaccgttaaccactttatcgatgctttggcgaccatgaaggccgatattgaaggtgcggtatcaagctcagaagcctctacccaaaagatgaaagcccttggcatcccggtttatgacttaaacagcgtcgataaattatccgtgtatgtcgatggagccgatgaaatcaacgaccatatggacatgatcaaaggcggcggcgcggcattaacccgcgagaaaatcgttgcggctgtggctgaaaagtttatctgtatcgtggataacactaaacaagtggatattttgggtgaattcccactccccatcgaagtgatcccaatggcgcgttcttacgtggcccgtgaactcgtcaaactcggcggcgacccagtgtaccgtgaaggcgttatcacggataacggcaacgtgatcctcgacgtttataatcttaagatcatcaatcctaaggaattagaagataagatcaacgccatcgtcggcgtagtgaccaacggtctattcgcaaaacgcggcgccgatgtgttactggttggcacccctgaaggcgtgaaaacctttaccgcttaag

SEQ ID NO: 291096 - DNA, 658 bp, Unknown
  Bacterial polypeptide expressing nucleotide sequence isolated from the Sargasso Sea
catggatcagaacgcaaaaaaacaagccgtagccaaagcagccatcgaatatgttgaagcagacagcattgtcggtgtgggtacaggttctaccgtaaacttctttattgaagaactcggtaaaattaagcacaaaattgaaggtgcagtatcaagttcagaagcctctaccgagcgtttaaaagccttgggcattgaggtattcgagttaaacgaagtcagcaatctatcggtttatatcgacggtgctgatgaagtgaccgaacacaagcatatgattaaaggcggaggcgcagcactcactcgcgagaaaattgtagccggtgcggcgaccacgtttgtgtgtattgttgatgaaagtaagcgcgttcctgtgttgggctcgttcccccttcccgttgaagttattcccatggctcgctctttcgtagcacgagagctagtaaagcttggtggcgatcctgaatatagacaaggtgttgtcaccgataacggcaacgttattttagatgttcacaaccttgagattctgaatcctcgtgagctagaacaaaaaataaataatattcctggcgtggtaacgaacggcatttttgcactacgaggcgcggacatagtgctaagtgctacagatagtggtgttgaaacctttaagtga

SEQ ID NO: 291097 - DNA, 697 bp, Unknown
  Bacterial polypeptide expressing nucleotide sequence isolated from the Sargasso Sea
atgaaacaaatagttgctgatgcggctgttaaagaagtagaagatggaatgatcttgggtttaggatctggatcaacagctgcacttatgataaaaagtcttgctgaacaaattagatcaggcaaattaaaaaatattaaaggagttccaacttcctttcaatcagaggtgcttgcattagaacttaatatccctttaattgatttagcttcagttcctcacatagatttagccattgatggagcggatgaagtagatcctgactttcaactcatcaagggtggaggagcttgtcatgtccgagaaaaattggttgcatctaaagcaaataaattattaattgttattgatgaatcaaagttagtgcaaaatttaaaccaagttttccctctccctgtggaggttatgccttctgcgtggaagcaggtgaaggatataatttcagaaatgagtggagtttctaatttaaggatggcaacaaaaaaagcaggcccagttgtcacagatcaaggtaatttgattttggatgttttatttgatgctggtataaaagatccaaaagatttagaaatgcgtattaataatattcctggagtcttggaaaatggattatttgttgatttagtagataaggttttggtgggtagaattgaggatgacgttccagtattattttcaccttctaggaaaagttaat

SEQ ID NO: 291098 - DNA, 609 bp, Unknown
  Bacterial polypeptide expressing nucleotide sequence isolated from the Sargasso Sea
tatgtcacaggacaataaaaaaagaaatgtcgctaaggcggcaatcgaatacataaaaaatagcactattattggtgttggcacaggaagcactgtgaatttttttgttgaagagctcgccaaaaataaaggattgattgaaggtgctgtatcgagctcaattgctacggaaaaactgcttaaagataataatataccggtagtcacattaaatagcgtcaccgaattatctgtctatattgatggagcagatgaggcaacaaaaaataaacaccttattaaaggcggtggaggtgcgctaactcgtgaaaagattatagcggctgcaagtaaagagtttatctgcataatagatgattcaaaacttgtacccctacttggaagttttcctcttcctgtagaggtcatacctatggcacagagctatgttgcaagagaaattgtaaaaataggtggtcagcctgaactaagacaagactttcaaacagacaatggcaatataattcttgatatacataatcttaaaatagaaaatccaattgaacttgaaaatcaattgaatcaaataacaggggtggttacaaacggcttatttgcaaaaagggctgc

SEQ ID NO: 291099 - DNA, 787 bp, Unknown
  Bacterial polypeptide expressing nucleotide sequence isolated from the Sargasso Sea
ctggtgaaagcggagtctctttcgccaaatcataaaccttcgacgagagaatcttctttacataggtttcaagcatcggcaacatcctttaatttaagagcaccaaacatcacaaacgttgatcaaaatcacttaaaaagaagtgtagcagaagcgactatagaacatattgaatccagattaacgaaagatacgattctgggtatcggtacaggcagtactgtgaacttcttcattgaagaactgataaaaatcagacataaattcgattgcgcagtatcttccagcacagcatctacgcttctactagaaaacggaggaattaaagtaatcgatttaaacgcagctccgactctcgaaatctacgtagacggcgcagacgaggctgaccactcgaaacaactaatcaaaggcggcggcggggctctcactagagaaaaaatagtagctcaagccgccgatgaatttgtatgcatgatcgacgagacaaaactggtcaacaatcttggaggatttccgctgccggtcgaggttattcctctagcccgcgggctagtcgcaagacagctaaaacaattttcatcaacacccatttggcgtcagggttttgtaactgataacggaaatataatattagatgttcatgacttaaaaatcgcagacggagaagaattagagagaaaaattaacgacatcccaggagtagtgtctaatggattattcactcttagaacggccgataccctgctagtctccggttcgaaaggaatctctgttattaattgat

SEQ ID NO: 291100 - DNA, 490 bp, Unknown
  Bacterial polypeptide expressing nucleotide sequence isolated from the Sargasso Sea
gctgcttgaagagaatgggttcagagtcgacgacctctcctctgttggctcacctgatctctatattgacggagcggatgagatcactgagcattttcatatgataaaaggcggtggaggcgcactcacaagagaaaaaatcattgccgaagcatccaggatgttcgtctgcatcatcgatgaatcaaaacttgtcgatcttctgggtaaatttccactcccggttgaggtaatcccaatggcaaaatcattggttgcaagagaagtgaccaaactgggcggtttgcccgaactcagacatgattttgtcaccgacaatggcaatttaatcttggatgttcacaatttaaaaattcttgatccagttgatctagaaaatcacatcaataacatcccaggcgttgttacaaatggaatatttgctcaaagatccgccgatgtaatgatcattggcaatgaatcagggccagagaccaagattaaaaactga

SEQ ID NO: 291101 - DNA, 661 bp, Unknown
  Bacterial polypeptide expressing nucleotide sequence isolated from the Sargasso Sea
atggatcagaatgaaaaaaaacttaatgtcgcaaaagctgccgtaaaacatatccataatgattgtttattgggaatgggtacaggctctaccgttaactttcttatagacttgctaccagagataaaaaataaaatttcagctgttgcctcaagttcagttcagacagagaatctccttaaaatgaatggattcgaggttcaagcattgaatcaactcggtatgcttgatctttatattgacggagcagacgaagcgaccaaaaatcttcatcttattaagggtggcggtggcgctttaacacgtgaaaagatcttagcagaaaattcaaaaaaatttatatgcatcgcagatgaaacaaagctcgttaaaagattaggtatttttcctctccctatagaagtcatacccatggcaagatcattcgtatcaagagaaataatcaaatatcacggcaaaccagtctatagagagaactttgtcacagataatggaaacgaaataattgatatacacaatttagatattgtagatccaattcaattagaaaatgaacttaatcagattcctggcgtagtaacagtgggaatatttgctcgcagaaaagcagatgttcttctcattgctggtgaacatggtgtagatgaaattcacccttgat

SEQ ID NO: 291102 - DNA, 697 bp, Unknown
  Bacterial polypeptide expressing nucleotide sequence isolated from the Sargasso Sea
atgaaaaaagtagttgctgatgctgcaataagggaagtaaagagtgacatgattctcggattaggatctggatctacagctgcattaatgataaaaagtctcgccgatgaaattcgtcttggaaaacttcaaaatataaaaggtgttgcaacttcttttcaatcagaagttttagcccttgaactggatatcccgcttatcgatttagcttctgtatctcaaattgatctagctattgatggtgcagatgaagttgatccaagatatcaattaataaaaggaggaggagcatgccatgttagagaaaagttagtagcttctaaagctgatcaattgttgattgttgttgatgaaactaaacttgtacaaaatctaaataaatctttccctttgcctgtagaagttcttccaaatgcttggaagcaagttcaggaagtgatttcagaaatgaatggcagttcttctttaagaatggctacaaaaaaagctggcccagttgttactgaccaaggcaacctagtcctagatgtattatttaatgatggtattaagaatccaaaagaagttgaaatgacgattaataatattccaggagtattagaaaatggattattcgttgatcttacagacaaagtattagttggtaagattgaaaacaacactccagtggtttactcaccctcaaaagttagctaat

SEQ ID NO: 291103 - DNA, 640 bp, Unknown
  Bacterial polypeptide expressing nucleotide sequence isolated from the Sargasso Sea
atgagtgctgcaaagataactgttgcaaagaaagcaataggccatatagaaaaaaaacttgatcgaaatatggttcttggtattggcacaggatcaactgttaacttttttattgaagagttagcaaaatttaaaaatctttttaaaggtgctgtttcaagttctgaagcatcaacaaaattacttcaagatataggtattgaagtttttaacttaaatgatgttaatgaggtttcatattacattgatggagctgacgaagtatctccagagaattttctgataaaaggtggtggaggagctcacactagagaaaagattgttgcagctgcatcaacaagtttcatatgtattgttgatagttccaagttagtcgatcagcttggtttatttcccctgccgattgaagttataccagaaagtagaagcatggttgcaagaaaaattattgagctaggtgggttgccaaaatatagatctggatttatcactgatcaagggaatcaaatcattgatgtgaaaaatttaattataaaagatcctaaagagcttgagtcttatttgaacaatatacccggagtggttgaaaacggaatattttcttttaataagccagatttggtattaacagaaatttagg

SEQ ID NO: 291104 - DNA, 664 bp, Unknown
  Bacterial polypeptide expressing nucleotide sequence isolated from the Sargasso Sea
gatgaattcagaagaacaaaaaaaacaggccgcacttaaatcgttagaattcatagctgatgattgtgttctgggtgtcggaactggctcaacagtgaatcatttaatcgcggctttaccgagtgtaaaaaataaaattgaggccgtcacatcgagttctaaggcaagcacacagttgcttgaagagaatgggtttagagtcgatgacctctcctctgttggctcacccgatctctatattgacggagcggatgagatcactgagcattttcatatgataaaaggcggtggaggcgcactcacaagagaaaaaatcattgctgaagcatccaggatgttcgtctgcatcatcgatgactcaaaacttgtcgatcttctgggtaaatttccacttccggttgaggtaatcccaatggcaaaatcattggttgcaagggaggtgaccaaactgggtggtttgcccgagctcagacatgattttgtcaccgacaatggcaatttaatcttggatgttcacaatttaaaaattcttgatccagttgatctagaaaatcacatcaataacatcccaggcgttgttacaaatggaatatttgctcaaagatccgccgatgtaatgatcatcggcaatgagtcggggccagagatcaagattaaaaactga

SEQ ID NO: 291105 - DNA, 664 bp, Unknown
  Bacterial polypeptide expressing nucleotide sequence isolated from the Sargasso Sea
catgaatccagaagaacaaaaaaaacaagcagctttaaaatccttagaattcatagatgatgattgcattctgggcgtcggtaccggctcaacagtgaatcacttaatctcagccttaccgagagttaaaaataaaatagatgctgtcacatcgagctctgaggcgagcaccaagttgcttgaagagaatgggttcagagttgatgacctctcctctgttggctcacctgatctctatattgacggagcagatgagatcactgagcatttccatatgattaagggtggtggaggcgcactcacaagagagaaaatcattgctgaagcatcgagaaagtttgtatgcatcattgataactcaaaacttgttgatcttctcggtaagtttccactgccggttgaggtgattccgatggcaaagtcgttggttgctcgtgaattaactaaactgggtggtttacctgagctcaggcatgattttataactgataacggcaatctaatcttggatgttcataatttaaagattctcgatccagttgatcttgaaaatcacatcaacaatatccctggggttattacgaatgggatatttgcaaaaagatctgccgatgtaatgatcattggaaatgaatcagggccagagaccaagataaaaaactga

SEQ ID NO: 291106 - DNA, 659 bp, Unknown
  Bacterial polypeptide expressing nucleotide sequence isolated from the Sargasso Sea
tatggatgaactgaaattgaaggtagcgaaggaggcattcaactacgttgaaaattcaatagaacgtgacacaattatcggagtcggtaccggctcgacagctaacttttttattgaggagttagggaaaattgccagcagattagagggtgccgttgccagctccgaggaaaccgcccgcaggctgaaatctattggtattcctgtctttgacttaaacactgttggagaagttcaggtctatgttgatggagctgatgaagcgaatgagtacctgcacttaatcaaaggtggtggagcagctttaacccgagaaaaaattattgcggccgcttcaagggagtttatttgcatagcagacgaaagtaagcttgtccccatactcggcaaatttccgctgccagtggaggttatacccatgtctcgaagctttgttggcaggcaaattgtaaaattgggcggagatccggtatatcgcgagggctgtgtaaccgataacggcaatcacatcatagatatcttcaatctggtcatagatcatccaacagaaatggaacagcgtcttaatcaaatcaccggtgtggttaccaacggacttttcgccaaccgccgcgctgaccagctatttttgagcacttcatctggagtcaaagttttaa

SEQ ID NO: 291107 - DNA, 658 bp, Unknown
  Bacterial polypeptide expressing nucleotide sequence isolated from the Sargasso Sea
atgactcaagatcagatgaaaaaagccgctgcctgggcagctttagattacgtaacagctggcactattgtcggtgtaggcacaggttctaccgttaatcactttattgacgcgctcgctaccatcaaagatcagatcaaaggggcggtttccagttcagtgcaatcgactgaaaaaatgcgtgctttaggcattactgtgctggatttaaacgaagtggaaagttttgcggtgtacgtcgatggcgcagacgaaattaactcgcgaaagcatatgattaaaggcggtggcgcagcgcttacccgtgaaaaaattgtcgctgctgtggcccaaaagtttgtttgtattgtcgatcaaaccaaacaagtggacgtactgggcaaattccctttacctgtcgaagtcattcctatggcccgtgcttatgtagcgcgcgagctggaaaaattgggtggtcgcccggtgtggcgcgaaaacgtagtgactgacaacggcaatatcattttagatgtgcatggccttagcattgcagagccagaagaattagaacaacaaataaacaacctggtcggcgtagtcaccaacggtatttttgcccgccgcgcggcggacatcgtattagttggaactgcacagggtacacaggtcttaaactgaa

SEQ ID NO: 291108 - DNA, 670 bp, Unknown
  Bacterial polypeptide expressing nucleotide sequence isolated from the Sargasso Sea
tatgaatcaagagactaaaaaaaagaatgcagctaaagcggcttttaatttgattaagcctaacctcaataaagatattgtattgggtataggaactggttcaacaacaaattattttatagatgaacttaatgcttcaaatatagaaataaaaggagcggtatgtagttctatttcttctgaaaaaaacttaaatccatccatcaatattttaagtcttaatgaggtacattctattgacttctatgttgatggagcagatgaatttaatgatcgatttgaattaataaaaggtggcggaggagctttaacaagggaaaaaatactagcctattcttctagtaaatttatatgtatcgttgatgatactaaacacgcagatttacttggtaaatttcctttacctatagaagtgcttgaaatagctagaagcgcaatttctagagaaatcatgaaaatgggaggaaggccagtctatagaaacaaatttataactgataatgggaatcaaattatagacgtgcataattttcctatacggatccctttagaattggaggagcagcttaataatattcccggtgttgttgaaaatggaattttttctaatagaaaagctgacattattattaatgcaaataaaaatggtttacaaattttagaaaggtaa

SEQ ID NO: 291109 - DNA, 697 bp, Unknown
  Bacterial polypeptide expressing nucleotide sequence isolated from the Sargasso Sea
atgaaacaaatagttgctgatgcagcaattcaggaagttaagagtgacatgattctcggattaggctccggatctacagctgcgcttatgattaaaagcctcgctgatgaaattcattctggaaaactgcaaaatataagaggtgtcgcaacttcctttcaatcagaagttttagctcttgagctaaatatcccgcttatcgatttagcttctgtttctcaaattgacttagctattgatggagcagatgaagttgatccaaaatttcaattaataaaaggaggaggagcatgccatgtcagagaaaagttagtggcatctaaagctaatcaattgttgattgttgttgatgaaactaaacttgtacaaaaattaaatcaatcttttcctttacctgtagaggtccttccaaatgcttggaagcaagtaaaggacgtgatttcagaaataaatggcagttctactttaagaatggcaactaaaaaagctggcccagttgttactgaccagggcaacctaatcctagatgtattgtttgatgatggtatcaagaatccaaaagatattgaaatgagtattaacaatattccaggagtattagaaaatggattattcgtggatcttacagacaaagtattggtaggtaaaattgaaaacaattttccagttgtttactccccctcaaaagtcggctgat

SEQ ID NO: 291110 - DNA, 661 bp, Unknown
  Bacterial polypeptide expressing nucleotide sequence isolated from the Sargasso Sea
atgagccctaaaaaacaagcagccgaatatgcttttgaatcagtaaaaaatctgctggataagaattttgttctaggaatcggcacaggctcaacaactaattatttcattgaactactgaaagaaaaaaaacctgaaattaagtgttttgtctctagctcggtagctagcaccgagcttctaaaagatgccggttactcagaggccgaattgaacgatgttggcggaccagatttatatattgacggagctgatgaggtgaactcaaaattagaattgataaaaggcggaggtggcgctcttaccagagaaaaaatcattgcatcagcttcaaaaactttcatctgtatagttgataagtcaaaaattgtggacagatttggtaaatttcctgtcgcgatagaagttattccaatggccagaagttttgtttcaaggcaggtcgtggctatgggaggaaggccagcctatagagttggttttataactgacaacggaaatcagattatcgatgttagtaatttaaactttgatgtcccttttgaaacagaaagtagaattaatagaattcctggggttgttgaaaatgggatttttgctgcacgcaaggcagataagattattgttgcagatgggcagaaagtgtccgaattaaagtaat

SEQ ID NO: 291111 - DNA, 658 bp, Unknown
  Bacterial polypeptide expressing nucleotide sequence isolated from the Sargasso Sea
atgactcaagatcagatgaaaaaaaatgccgcttgggcagcattggattatgtagcgcctcagactattgtcggtgtgggcactggctcaactgtcaatcactttattgacgcgctggccactatcaaagatcagatcaaaggtgcagtgtccagttcagtgcaatccactgaaaaaatgcgtgctttaggtattactgtgctggacttaaacgatgtggaaagttttggggtgtacgtcgatggtgctgacgaaattaacccgcaaaaccatatgattaaaggcggtggcgcagcgcttacccgcgaaaaaattgtcgcagctgtggctgaaaagtttgtttgtattgttgatcaaaccaaacaagtgaatgtactgggcaaatttcctttacctgttgaagtgatccctatggcccgtgcttatgtcactcgtgagctggaaaaattaggtggtcgccctgtctggcgtgaaaatgtagtgacagacaacggcaatattattttagatgtgcatggccttagcattactaagccagaagaattagaacaacaaataaacaacctggtcggcgtagtaacaaacggtatttttgcccgtcgcgcggcagatatagttctggtcggtactgccgaaggcacaaaaatcttaaactgag

SEQ ID NO: 291112 - DNA, 487 bp, Unknown
  Bacterial polypeptide expressing nucleotide sequence isolated from the Sargasso Sea
atggctgatctacagactcagatgaagcaggcggtggctgatgccgctgtggaacagatcaaggacggcatggtgctgggcctgggatcaggctccaccgctgccctgatgattcagggcctgggggccaagctcgccagcggcgaactcaaagacatcgtcggtgtcaccacttccttccagggagaggtgctggccgctgagctcaacattcctctgctcagcctcaacgccgtcagccggattgatctggccatcgatggtgcagacgaagtcgaccctggcttccaattgatcaagggtggtggcgcctgcccacgtgcaggaaaaactcgtggcggcacgggcggatcgttttgttgtggtggtggactccaccaaactggtggaccgtctcaacctcggttttctgctgccggtggaagtgcttcccggggcctggcgccaggtgcagcagcagctggaagccctcgggggcagcgctgag

SEQ ID NO: 291113 - DNA, 655 bp, Unknown
  Bacterial polypeptide expressing nucleotide sequence isolated from the Sargasso Sea
atgaaccaagatgaaaaaaagatgagagttgctgaagctgcattagattatatcgaacatggacagattgttggtattggttctgggacaacagtacatgcgtttattaaacaattgacaaaagtaaaaaataaaatagatgctgtagtctcatcatctgaattaactactcaattgattcttgattgtaatataagagtaattgatcttaaagagtcaggtgggctccctatatacatagatggtgctgatgagtctaacgctaataaacagctcataaaagggggtggtggtgcattgactcgcgagaaaatcattgccggtgcaagtaaaaaatttgtttgtatgattgatgatagtaaatatgtacagactctaggtaaatttcctttacctattgaagtaataccaatgtctcaaagcatagttgctctagaaataataaaacttggcggcaggccagtttatagggaaaatttcgtcactgataatggaaatataatcttagatattcataacttagaaatatccgagcctttaacattggaacaggcaatcaacaatataccaggcgtcgtgactaatggactgtttgctatgcgtcctgcagataatttgcttatttctaatggagatgaaataaaagtgatgtagt

SEQ ID NO: 291114 - DNA, 584 bp, Unknown
  Bacterial polypeptide expressing nucleotide sequence isolated from the Sargasso Sea
gctgcacgcgcagtaccctggcgacgtgggtgtcttctgcgtctatctgctccagcacgtcgtgctccagccgggcgaggccatgtacctcgccgccaacgaaccgcacgcgtacatctgcggcgactgcgccgaggtgatggcaacctcggacaacgtcgtgcgcgcggggctcacgcccaagctgcgcgacgtcgacacactcgtcgagatgctcacctacaccgacggcgacgtccaccgcgtcgagccgacgcagcgcgagggcgagcccaatgtgtggcggtaccgcaccccggctcccgagttcatgatggaccggatggagctgcccgccggcgggcgcgccatgctgccggccgtggcggggctctcggtgatggtggttgtcgagggcgaggcagtggtcgagcaggtgccgcagggcagcagctcggccgaggcgttgccgggcacggggctgacgcgcaccctcaagccgggcacggttgagctcatctgccccggcaccgccttgcgcgtcgagccgaggtcgcagagaccgttgctgctctaccgctccgccgtaagggaggacgagtgat

SEQ ID NO: 291115 - DNA, 790 bp, Unknown
  Bacterial polypeptide expressing nucleotide sequence isolated from the Sargasso Sea
catgtgcaggttacttccctcagggtttcttggtttaatagccgtagaaaattcaacattgaaacagggcttgataatgcaaaaactcatcaactcagtgcaaaactacgcctggggaagtaaaacggcgttaacggaactctatggcattgccaaccccactcagcaaccgatggctgagctgtggatgggtgcgcatccgaaaagcagttcgcaggttctgggcgctgacggccagacggtcgctctgcgcgacgttatcgagcacgataaatccgccctgctgggcgatgccgttgcgcagcgttttggtgagctgcccttcctgtttaaagtgctctgcgctgcacaaccgctttcgattcaggttcatcctaacaagcacaactctgaaattggatttgccaaagaaaacgccgcagggatcccgatggatgcggctgagcgcaactacaaagatcctaaccacaaaccagaactggtttttgctttgacgcctttcctggcgatgaacgcattccgcgagttctctgacattgttgcattgttacaacccgtctccgccgcacatccggctattgcgcatttcctggaagagccgagtgcagaacgtctgagctatcttttcgccagcttgctgaatatgcaggctgaggagaaatcccatgcgttggcgatcctgaaatcagcgctgaacagccagcagggtgaaccctggcaaaccatccgtctgatcgccgacgtctacccgaacgacagtgggctcttctccccgctgctgctcaatgtg

SEQ ID NO: 291116 - DNA, 1201 bp, Unknown
  Bacterial polypeptide expressing nucleotide sequence isolated from the Sargasso Sea
atgagcagtcgcgatctgccctcttttttgtcaatgcaaaatccgattcaaggctacgactggggcagccatgacgccctcaccaccctgttcggcatccccaatccggcgggcaagccccaggccgaactctggatgggagcccaccccaatggctgctccgaggtagtactggccgggcaggcgcaaaagctctcgaccctgatagagagcgcccccgccgccgtgctgggcgaggccacccgggcccgttttggcagcctgccgttcctgttcaaggtgctgtgcgccgagaaggccctctccattcaggtgcacccgagcaaggcgcaggccgaagccggctttgccaaggaagaggccgctggcatctcgcccaaggccgccaatcgcaattacaaggatcccaaccacaagcccgagctggtgtttgccctcaccccctatcaggcgatgaacggctttcgcgccatcccggccatcctggcgctgttcgagcgggtcaagctgcccgcccttgccgagctggtcgccgccctcgccgccagccagaacgaagcgggtctgcagcacttcttccaccagctgctggtgctggaaggggcgcgcaaggcggaggcactggcgggcctgctggcctacgcaggtgagtatcaggatgaagagaccttcgccctcatcacctgcctggccgcccagtacccgggggatgtgggcctgttctcgccgctcttgctcaacgtggtgaccctgcagcccggtcaggcgatgtatctggacgcctgcaccccgcacgcctatgtgcgcggcaccggccttgagatcatggccaactccgacaacgtgctgcgcgccgggctcactcccaagtacatagacgtggcagagctgttggcctgcacccgctgcttacctaagccggacgatcagatcctgctgatcccccgcatggaaggggcggtgcagcacttcgaggtgccggtgccggacttcaccttcagcgtctacccggcgggcgagcaccagctcaccaccgccagcgccgagatcctgtttgccatcgacgaggccgtgatcctcaagcgcgatgacgacaccctgcgtctcgagaagggtcagtccgccttcatcccggccgccaccggccgctaccagctgctggccgagggccgggtcgcccgcgccggcaaccgctgctaaa

SEQ ID NO: 291117 - DNA, 999 bp, Unknown
  Bacterial polypeptide expressing nucleotide sequence isolated from the Sargasso Sea
taaaaaaaacgccgaaccgggcgatgtcgtgacgacaaaaaaagcaggcgggttaacatttgattttagttttcagcgcttctcagaaacatatcttgattcattcatagagcatgtaaaagaagcaaaagtcattgaaagatttgacgcaatttattcaggacaacaagcaaacacaacagaaaacaaaccagttgaccactttggttacagaaaagaagacagcgctagagagcaaagggttttagatgaacaagagaaagcattggttctgagcgaacatatcaataagcaagaatatgaagcaatcatcttttttggtatcggcggctcacaacttgggcccgagctaattcaacaaacactctgctataacaaaaacaaaaaaatcgtttttataactggaagcgatccactggaggctgaatttaaaacaaaaggcttaaaccttgatgcatgcgcttttatcttggcgtcaaaatctttttccaccatagagacattaaaatcatttgagctggtaacccaaaaaacacacatgcaaaacacatatgcaattacatcaaacatcgctggagcagaagccttcggcgtttcgcgcaaaaatatactgacctttagtgaggcaactggaggcaggttttcgatttggtctccaatcaacctgcttttcttgatacagttgggcgaacaatccatagaagagttctatttgggaggacgagaggcagatgaaagccttttaaacaccagaacaccagacactcctgcaagtgtttatctgtctgcccaagacattctacacaacaacattttggacaatgaaacaacggcaatcctcgcatatgattggccactcagaggtttttataagtacgctcaacagcttgagatggagtcaaatggtaaacgagtagatcaaaacgggaataatatagattatcaaacaaacccaattgtttggggtggttacggcccggtatcacagcactctttacc

SEQ ID NO: 291118 - DNA, 941 bp, Unknown
  Bacterial polypeptide expressing nucleotide sequence isolated from the Sargasso Sea
tgcaattaccagagaaaacagtcagcttgctaagcttgcctcaaaagagaattggctggcatgctttccaatgtgggactgggtaggaggacgcacttcaattctctccgcagtaggactgcttccagcagctttacttggtgaaaatgtcagcagtattttgaaaggtgcaaaaattatggatgagctgaccaaatgtacaaaaattaaggaaaatcctgctgccatactggcttggatgttgcatcatgccggcgaaggtaaaggcaaaaaatcaatggtaatacttccttacaaagacagattgatttctttaagtccatacctgcagcaactatttatggagtcgctgggtaaggaaaaagatcttaaaggtaaaactgtaaattacgggttgacggtttacggtagcaagggatcaactgaccagcactccattggtcaacaactgctagatggtccagacgatttttttgtaacattcattgaagttctgaaggaccgtgaaaatgaaagtattgaggttgaacctcaagttacctctggagattaccttcagggttttatgcttggtactcgcgacgctctttttcaaaaaggacgcgcatctctaacaataacgctggaagagttaaattctcaaacacttggagccttgattgcactttttgagcgtgccgtaggcctttatgcaaatctaattggactcaacgcatatcaccagccgggtgtagaggttggaaaacacgccgcaggcgatgtaataaaactttcggttaaaatacaaaactatctcaagtcaaactctgggcaaaagttcgattcagttacaatttctggtgcacttggagaaagcggaaaagaagaaactgtttacaaaatcctacaacaccttgctgcaaacagaaggattctcaaatttccaggaaatgaccagtttt

SEQ ID NO: 291119 - DNA, 793 bp, Unknown
  Bacterial polypeptide expressing nucleotide sequence isolated from the Sargasso Sea
aatgcagaaaatttattgggatttgttaaaaaaaaatcataaagaatcaaaaaaaagaagaattgaatccctatttgaatcagatgaaaatcgatttagaaaatttagtttaaatatagaagatctttattttgattactcaaaaacaaatatagatccactaacactttcaaaccttataaaatttgctgaaaactcagaaattattaaaaacgttaatgcaatgtttgatggtgataaaattaatgttactgaaaatagatcggttttacatacagcacttaggaattttaaaactaaaaaatttaataatttagattcaataaataaaaaattgcaagttaggttcaaatctatttctaatttttgcaatcaaattagaagtggcaaaaaaaaatcgtgctcaggagattatttcacagatgtagttaacattggaataggaggttccgaacttggacctaaattagttactagtgctttatcagaatatcatgatggtccaaaaattcattttgtttcaaatattgactcttctgatataaataaaattgtaaaaaaattagatccacgtaaaactctttttgtcttatcttctaagtcttttactaccatagaaactatttataattcaaagacagctattgaatgggtttgttcaaaacttggttctgatggaatgaaacattttgtggcagtttgtacatctaaggaaaaagcattagatcttggtgtttttgaagaaaatatctttgaatttgaagaatgggtaggaggacgattttcagtttgg

SEQ ID NO: 291120 - DNA, 455 bp, Unknown
  Bacterial polypeptide expressing nucleotide sequence isolated from the Sargasso Sea
gatgagttttccagtacagggtggtggcacttcctatgacaacggaaatagcatcagctccctgagtgatggcagctccattgttactggctatttcagcggcacagcaaccttcggcagcaccaccctcaccagtgctggaagtgatgatgtctttattgccaagctcaatgctgatggtagttatgcgtgggccaaaagtgctggtgggactggggatgactacggatctggcatcagctccctgagtgatggcagctccattgttactggctatttcagcggcacagcaacctttggcagcaccaccctcaccagttctggaaatgctgatgtctttattgccaagctcgatgctgatggtagttatgcgtgggccaaacgcgctggtggcactagcgatgacaacggaaatagcatcagctccctgagtgatggcagctccattgttactg

SEQ ID NO: 291121 - DNA, 319 bp, Unknown
  Bacterial polypeptide expressing nucleotide sequence isolated from the Sargasso Sea
gatgggcaagcccggtcgttcctcgataccttcagtcggagtgcaccatcagggcccgatgagcttcccggatttcagcgccagtgacgctcagattcaatggcagcgcttctgtgacctgctctggtatcacgaagatctcggcatctggttggacatcagccgcatgcatgtcaacccatcccatctcgagcagctgcaaccgggattcgataaagccttcgcggccatggccgagctcgaagctggtgccattgccaaccctgatgagcagcgtcaggtgggtcactattggctgaggaccccgcagttggcgcct

SEQ ID NO: 291122 - DNA, 268 bp, Unknown
  Bacterial polypeptide expressing nucleotide sequence isolated from the Sargasso Sea
ttcatttgcaggaaatcgcccttcaacaatgtttctattcaaacaattgaccccgaatatcctaggacaattgatagctatttatgaacacaaagctttcgtccagggggcgctttggaacatcaatagctttgatcagtggggtgtcgagctaggcaaggaactgactaaagaaatattgccgcttttacaaaacaaaaccctcgcctctaatttagacccatctacagcaaatttgatggaagaagtttttagattacgaaaataa

SEQ ID NO: 291123 - DNA, 910 bp, Unknown
  Bacterial polypeptide expressing nucleotide sequence isolated from the Sargasso Sea
ttgtctcttggaatgggtggctccgcactagggcctcagttaattaacagtgctcttggcccacaaaacgaatccatgcgattttattttttagacaacactgaccctgaaggaatagaccgtgtgattgcctcaatagacaccggtttggcagagacactgatacttattatttccaaatcaggtagtactgtggaaacgcggaattctatgattgaggttcgagaatactacagaaaagtcggacttgattttgccagacatgcggttgcaatcaccagagaaaacagtcagcttgctcagcttgcctcaaaagagaattggctggcatgctttccaatgtgggactgggtaggaggacgtacttcaattctctccgcagtaggactgcttccagcagcattacttggtgaaaatgtcagcagtattttgaaaggtgcaaaaatgatggatgaactgacaaaatgtacaaaaattgaggaaaatcctgctgctatactggcttggatgttgtactctgccggcggagacaagggcaataagtcaatggtaatacttccttacaaagacagacttatttttctaagtccatacctacagcaactagttatggagtcgttgggtaaggaaaaagactttaaaggtaaaactgtaaataacggtttgacagtttacggtagcaagggatcaactgaccagcactccattggccaacaactgctagatggtcccaacgatttttttgtaacattcattgaagtcctcaaagaccgggaacatggcagtattgagatcgaacctcaagttacctctggagattaccttcagggttttatgcttggtactcgcgacgctctttttcaaaaaggacgggcatctcttacgataactctggaagagttaaatctca

SEQ ID NO: 291124 - DNA, 481 bp, Unknown
  Bacterial polypeptide expressing nucleotide sequence isolated from the Sargasso Sea
ctccgctcacttccaaattattttcaacaacttgaaatggaatctttagggaaaagactaaatccagactctgaatttaaaaaaactggtcagatagtttttggagggtatggtccaaccgctcaacattcttactttcaattaatgcatcaagggacacaagatttatgtgcagatattattgcctcagctgaggatctggataatttagcttatgtacaagcaattacacaggcaaaaatcctttcttctggagaaagcgaaattaagttagaaaatgagtcaaaaatcaatggaaatgttccaattaatttattcattttaaatgaattgaactcttatagtcttggttatctgatagctacttgggaatataggacatatgttactgctgtaattttaggaataaatccatttgatcagtttggtgtaaatgcaggcaagatttatactaagaaatatctagctgaaaaagattgac

SEQ ID NO: 291125 - DNA, 760 bp, Unknown
  Bacterial polypeptide expressing nucleotide sequence isolated from the Sargasso Sea
cagagaaaacagtcagcttgctcaacttgcctctaaagagaattggctggcatgctttccaatgtgggattgggtaggtggacgtacttcaattctttcctcggtaggactgcttccagcagctttacttggtgaaaatgtcagcagtattttgaaaggtgcaaaaattatggatgagctgaccaaatgtacaaaaattaaggaaaatcctgctgccatactggcttggatgttgcaccatgccggcgaatacaagggcaaaaagtcaatggtaatacttccttacaaagacagattgatttcgttaagtccatacctacagcaactatttatggagtcgctgggtaaggaaaaagatcttaaaggtaaaactgtaaataacgggttgacagtttacggtagcaagggatcaactgaccagcactccattggtcaacaactgctagacggtccagacgatttttttgtaacattcattgaagtcctcaaggaccgggaacatgacagtattgaggttgaacctcaagttacctctggagattatcttcagggttttatgcttggtactcgcgacgctctttttcaaaaaggacgcgcatctctaacaataacgctggaagagttaaattctcaaacacttggggccttgattgcactttttgagcgtgccgtaggcctttatgcaaatctaattggactcaacgcatatcaccagccgggtgtagaggttggaaaacaagccgcaggcgatgtaataaaa

SEQ ID NO: 291126 - DNA, 655 bp, Unknown
  Bacterial polypeptide expressing nucleotide sequence isolated from the Sargasso Sea
tgtcttttagcagcgttaattggggtatgggaacgctctattttgggatatcaggctaaggcgattattccgtataactcgtccttaagtcgttttgttgcacatctccagcaagtggactgtgagagtaatgggaaacgtgtttgtgttgagggaaaagaattaaactatgagacagcccctattatttttggtgaaccgggaacaaatgctcagcatgccttctttcaaatgcttcatcaaggaacaacgattacaccggtacaatttattggtgtaaaaaaatcacatcaagaagaccctctatcacaagaagcacaaaccttactcaaccataatttagtcgcacaaatgattgcgcttgcacaaggtaaggaagacctggatccgaataaatattttcctggaaaccgcccgtctacgcttgttttactagacgctataacccccgaatcgatcggggccctactcgcgttttatgaaaacgtgattatgtttcaaggctttttatggaatataaactcgtttgatcaagaaggagttcagctgggtaaaactttggcctcatctttgggtggagatacatctgagtccgattctaattctaaatcttgctctgacttgctttttgctttgagtaagatttttttataat

SEQ ID NO: 291127 - DNA, 774 bp, Unknown
  Bacterial polypeptide expressing nucleotide sequence isolated from the Sargasso Sea
aagcaaaaatcttaattttgccggacaggcggtggcagtgacaggagagggtagtcttttggctcagcttgcccatactgaagagtggttagaggtttttccgatgtgggattgggtcggggggagaacttcggtgacttctgcagtaggactattgccggccttgcttcaggggattgatattgatgcatttctggaaggcgccagaatcatggacggacacacaaggaatcctgacatcaggaagaaccctgcggccatgttagccttgatgtggcatcatgcaggagcgggacgaggagaccgtgcaatggtggtccttccttaccgtgatcggctggattgcctggcccgatacctccagcagttggtgatggaatcccttggtaaagaaaaggatctcatgggaaaaattgtggagcagggcatgaccgtttttggaaacaaaggttcaaccgatcagcatgcctacgttcagcagttgagagaaggacgatcggattttttctcaacctttattgaagttcaagaagaaggtgttgaagattcaattgaggtggaaccgggaattcattccggagatttccttcagggatttctgctcgggaccagggaagcgctttctgaaaaaaagaggccttccctcaccttgactctggaacgacttaacgcgaaaacgcttggttcattgatcgccctttttgaacgtagtgtcggcctttatgcatttttgatcggaatcaatgcttactatcagccgggtgtagaatctgg

SEQ ID NO: 291128 - DNA, 739 bp, Unknown
  Bacterial polypeptide expressing nucleotide sequence isolated from the Sargasso Sea
ttcaacatcaactttgtatcaagttctgatacaaaagaactacttgatgctataaaagatctagatttagaagaaaccatttttattttttcatcgaaaagttttgttacaaaagaaatacttattaacctagattatataaagggagttttaaaatctaaatttgcctcatctgatattgtgtcccgacatttatttgcaataacttcagataaatctacagctatgaagaaaggtattgatgccagcaaaattcttatcttctcaaagaatattcctggaaggttttcagtcacaagcgctctaagttttataattctaattcaaattggtaaggctaattttaagaaattttataaagggattatcaaaatggacaatcattttaagaggactaaaataagtaataatattcctatgatattagctcttatttcgatatggaatataaatttcttttcaataagaaatttttgtgtctgtccatacaattatagattgaaagatgccattgagtatatccaacagattgaaatggagagtaacggaaaatccagcgatatacatagtagtgaaattaacatagatacgtcacctatcgtttttggtcaatcaggaacagattgtcaacattctttttttcagatgattcaccaaggcagtcaggatattgctttagattttattggcgtaatagacagtaatgataataaagtgtcatctaattttctgatatcta

SEQ ID NO: 291129 - DNA, 535 bp, Unknown
  Bacterial polypeptide expressing nucleotide sequence isolated from the Sargasso Sea
catgtcttatccgcttgctattgctgtatcttctgttcaggctgcactgaatgactcccaatgggatgctttgattattattgcgtctgattttactgctgtgcctgaattacagtttgaaattaatgctgccgccgctattgatagccgtattggtaaagaaactgtgttgctgttatctgcaaaagcgccgggtcaacgtctggtactttcacctacaggcccgcttgacagagattatgatgatattcgcagtttttatgatgccgccaaacaaggtattactcaggtcaaagccgctggcgctaaatctccggctttgtatgtgatagcgccagaaacagatgcctatcaatatgcagcagaagtagcttatttaggtgcgtgtcaggccttatggcaaccgctcgaaggtcgtgaagcccggggggaggccacgatagaacctgtgacccagattggcgtcattggtgtctcagaacatcagtctcgttacatggaggctgttgaagccggtaaacgtgtggctcgtgat

SEQ ID NO: 291130 - DNA, 490 bp, Unknown
  Bacterial polypeptide expressing nucleotide sequence isolated from the Sargasso Sea
atgacgctccctaataaaaatcctactgaattaaaagcatgggaaaaattaatttctcattataattccatttctaataaatctatctattcccattttaaaaatgaaaaagataaaagagattattgttttataaactgggaagatttttatgtagatgtctcaaaaaatagatggaataaaaaaacttttgatttattaatcgatcttgctaaagaagctgggctaaaagaagcaatagaaaaatattttaatgggaccaaaattaatgaaactgaaaatagagccgttcttcatacagcaataagaaaaaaaagtaactcagaaattttaattgacaataaaaatattattgaaattataaaatacaataaatctaaaatgtattcattttgtgatgaggttatttctggaaaatggaaagggtttagtggtaaaaaaattaaaagtatagttaatattggaattggaggatcagatcttggtccat

SEQ ID NO: 291131 - DNA, 868 bp, Unknown
  Bacterial polypeptide expressing nucleotide sequence isolated from the Sargasso Sea
ggggacgacaccatctccatcaacaccaatgccaacagcaatggcggctggtggaggtggaaccgtggcggcaatgccgattccgtcggcatcgacaacaactcctccatcaacactggcgctggcaacgactccgttgtcgtcaactccttcgcgtcaggtgctaacaccaatgcctgggccatccgtgacagctccattgatgtcggcaaaggcgacgactacgtcagcctcaatgccacaactttccaaactcaacgccggtacgaccccgcctacggatcagaaaacagctccattgatctaggcagcggcaacgaccgcctcaacatcaatgccaatgcttccggtcaaggcgacatccgtgctttcggtgcactcgattccaccatcgatgccagctctggtgatgactccgtcaacatcaatgcctccgcgaacagctgggggtggaatgacccagcaactgctaagggcctagccaactcagacgttgacctcggcacaggcaatgaccgcctgtcggtcaacgcttccagcagtggcggcaactctcaagccactgccgttgaaaactccgatatcgataccggctccggtaacgattccgtctccattaacgccaactccaacagcaatggcggtggttggtggtggggtggcggcggctccgctgacgccaaaggtctcgataactccaatctcgatacaggcgctggggacgacaccatctccatcaacacaagcgcaaccagcaatggtggctggcgctggtggaaccgtggcggcaatgccgattccgtcggcatcgacaacaactcctccatcaacactggcgctggcaacgactccgtttcgtcaactcctt

SEQ ID NO: 291132 - DNA, 88 bp, Unknown
  Bacterial polypeptide expressing nucleotide sequence isolated from the Sargasso Sea
actgccgtatgcggcgggtgaattcatcttcggagaacccgggacgaacggccagcactctttctaccagctgctgcaccaggtgtga

SEQ ID NO: 291133 - DNA, 421 bp, Unknown
  Bacterial polypeptide expressing nucleotide sequence isolated from the Sargasso Sea
attgacacacagccttgccgttcggcgcatgcaggggcggcctgcgaactgtgaattcatcggctatgccaaatcaccacagcccatgtcggttgacggatgtgtcgcaaatcacgacgagctcatgtcgaatttcttcgcccagccggtaagacaattggacatcgcgatagctaccgaacaggatacttgtgttccaaaacttgcacgttcggattgcttgacaatcagcagaagacaccagcatagtctgagacggctgcgtccgcagcaccagctgctgaccgtgttgatcgttttccgttgcaggatgcgcttgcgttcggtaagacggaagcgcagtgtttggcggagggtgtgccaccagagctcgtttctcacaaggtttttgagggcaaccgcccttcaacgcaacttctga

SEQ ID NO: 291134 - DNA, 523 bp, Unknown
  Bacterial polypeptide expressing nucleotide sequence isolated from the Sargasso Sea
gaaaataattttcttaacttcaataatagaattttactctcttattcttggccgcttaggtctttccctaattacgcacaacaacttgaaatggaatcccttggaaaaccagctaatccaaaatccatttttaaaaaaacgagtcaaactatatttggaggttttggacctaaagcacaacattcttatttccaacaattacatcagggaacagaaaactatagtgttgattttttttcaaacattgaggatcgcgttgataagaaacttatatcaaagcaattacaggctcaattaactctttttaaaaactgtcccgaagaattaaagggctcgaaagaggaagtaaaagctaatgtaaaccttaaccacttcgaattagccaaaattgatccttttcatttaggttacttaatagctttatgggaatatagaacttttataacagctaagatactgcaaataaatccatttgatcaattcggagtagaggcaggaaaaaagcttactgaaaaactttaat

SEQ ID NO: 291135 - DNA, 466 bp, Unknown
  Bacterial polypeptide expressing nucleotide sequence isolated from the Sargasso Sea
atggccttatcaaaaattaatcctacaagactatcttcatggaaaaaacttattcagcaatttgataaagaaaacaatcaccatattagtgacttttttaaagaaggagataacaggctcgatgagtttactattaattggaataacttttacgttgacttctcaaaaaatagattaagcaaaaatacctttaagcttttaacaagcttatgtaaggaaactaatcttaaagataatattgataaatattttaatggagccattataaatgagaccgaaggtagatctgtacttcacactgccctgagatcatcaggaaatgatgaggttgataaaacactagataagataattaatatttcagatgaacttaataatgcaaagaggttaggatataccggcaaaaaaattacagacgttgtaaatattggaattggagggtctcatttaggtccagagatataac

SEQ ID NO: 291136 - DNA, 538 bp, Unknown
  Bacterial polypeptide expressing nucleotide sequence isolated from the Sargasso Sea
atgcaattagctgataacccaatcacaaaaattatattagaaaagttaaaacgcaaagattttagaaacttaaatcatcttatttttaatgaaaaaaggtcttctgaattccaatatgaacttaaagatttaaaaatcgatataacaaggcaatcccttgacaatgagataaaggaagatttgatagaccttgctaaagaaattaatataaagtcaaaaataagtgaacttctgtcaggtgcaaaagtcaacttatctgaaaatcgttctgttgatcattttaatctaagaaaagaagaacgtttcaaaacacaagaatggaagaaacttcgcaattttgttcaaaatatttcaagcaaaaataattttaaacatattgtgaatattggcattggtggatctgacttaggacctttaatggttaacaaagcgttgaaaagtttttataaagatcctgatatcttatatgtatccaatattgacccaaccaagatctatgaaatatttataaaatgtaatcccaaagaaactttattga

SEQ ID NO: 291137 - DNA, 394 bp, Unknown
  Bacterial polypeptide expressing nucleotide sequence isolated from the Sargasso Sea
aacatttcaatggttaatgcaaggcaaaacagagacaacgtgtgactttattggaattaatgatggtcactacgacaatattgattctcatgaaatgctcttatcacaagttttggcaatgacctatggacttgatgataaaaaaaatccttacaaatctgttaaagggaacaacccctgtaatatcatgcagttacatagcttagatctgaaaagcctaggatttttattagctttatatgaacacaagatatttattgaagcactaatattaggaattaatccttttgatcaatggggagtgcagttaggaaagaaattagcttctgacattaaaggtaatcaagaattcttgaaggattatttttcctcgagtgtacttcctaaatcctag

SEQ ID NO: 291138 - DNA, 663 bp, Unknown
  Bacterial polypeptide expressing nucleotide sequence isolated from the Sargasso Sea
aggtattggaggttcatttgagggaccaaaacttttgcttgaaagcctaaatgatcccataagctcagtaaaatcaatttttgacacggttaattatgaatttattactggatctgatccaaatgaatttgttaataaaacaaaaccgttacatccaggaaatactttttttatagtttcctcaaaatcatttaaaaccgatgaaactattataaatttaaggaaagcttttaaatggtctggagataaagataagtttatagcaatttctgctaatccagatgaagtaaaaaaatatgacattgaacatgtaatttcttttgataaagaaattggaggtcgatattctatatggtcaccaataactcagttccatttatatggagaaaatagaaatttttttttgaaaggaggtcatcaagctgacttagatattcttgaaaatgaagattacatcaatttcattaaaagaatttcttttactgatatatttttaaataatagtggaagaaatgtaagagctgtattgtcttacatatggaatttacgctcacttccaacttattttcagcaattggaaatggaatctcttggaaagcaacgaagtccttcatcaaattataaaaatactggacagattattttcggtggatatggacccaa

SEQ ID NO: 291139 - DNA, 841 bp, Unknown
  Bacterial polypeptide expressing nucleotide sequence isolated from the Sargasso Sea
gacgagatagacttgagcctagatttaagccgggttgattttgccgacgatttttttgagcagaaaaccgagagcatcaataaagccttcgccgcaatggccgagctggaacaaggcgccattgcgaatccggatgaaaaccgaatggtcggccattattggttgcggaatccggagctggctccgtccgccgagatcagccagcaaatcacttcgacaatcgaaaatgtgaaggcttttgctgcggccattcattctggagaggtctcgggggcagatggtttgtttgaaaatgtcatcgtcatcggcatcggtggatccgccttgggcccgcaatttgtctcacacgcactaggtaaaccaaaaggggatcgcatgaaaatgtggttttttgacaatactgaccctgacggtatcgataaagtactggataaaattgagtcaaatctcgataaaacgctttgtatcgtcatttcaaaatctggtggaaccaaagaaacgcgcaatggaatgatggaggcgaaggttgcctatgagcgtgctggcctaaactttggtgaacacgcctgtgcggtgacgggggagggttcggctttggatcaagttgcagagagtgagggctggctgaaacgttttccaatgtgggattgggttggtggccgtaccagtgaaacttcggcggtgggattgttgccggccgcgctgcaaggtttggatatcgaccaattgctggccggggcggccgcctgcgacgaattaactcgccagccggatgcgggggcaaatccggctgctcgcctggcattagcatggatgcattgctgtaacggtaaagggaaaa

SEQ ID NO: 291140 - DNA, 793 bp, Unknown
  Bacterial polypeptide expressing nucleotide sequence isolated from the Sargasso Sea
cataaaagaaagcaatcaatttttattattggattctttaggaggaagatattctatctggtcatctataagcttacccgcttttataaactctgactttagttcctatcttgatttgctggaaggcgcacaactagctgataggcatacaaattcagcttcatgggaatctaatatccctgtaataatggcactgttgagcatatggaatacaagtgcattaaacattaataatcatggtattttcacttataacttcagactaagatcactcacaaaatatatcgctcaaatgtctatggagagtaatggaaaatctataaatttcgaatctcaaccatctccctttttaacttctcctttaatctggggaggttatggcattgagtctcaacactctacttttcagtggcttatgcagggtaaaacagagacttcatgtgactttattgggctaaatagtggagaaaaagaaacagtagattcgtacaagatgcttttatctcaggttcttgcccttagccacgggaatgaagataaagtaaatccctataaatcagtaaagggcaataatccttgctctattctcaaactgaactctttagatatcaagagtttagggtttttgttggctatatatgaacataaagtttttatcgaagcttctattctcggcatagacccttttgatcaatggggagtacaactcgggaaaaagttagctttagaggcagaaagcaataaagagtttttgaaagattatttttcttcaattcttctttccaaatcctag

SEQ ID NO: 291141 - DNA, 751 bp, Unknown
  Bacterial polypeptide expressing nucleotide sequence isolated from the Sargasso Sea
gctcttattaatgaaaatatatttgaattcattaaaggcgcatcattgatggatgaggctacacgctcaagtgattttaaaaataatcctgcagcattattatcatctgcatggtatttaacaggggatggccttggaaagagagatatggtcgttttaccttatagagataggttacaggtatttagtaaatatcttcaacaattagtaatggaatcattaggtaagaaatttaataggaatggtgaaatagttaatcaaggtatttcagtttttggtaataaaggatctacagatcaacatgcttatgttcagcaactgagagatggtattgacaatttcttttgtatttttattgaattattagattctccaacgaccaatatttttgatgaaaaagagaatcctaaggaatatctttctggttttttgcaaggaaccagatccgcactttctagtgaaaatagacagagtattaccataacactagataagttaaattgtttatcactaggtgccttaatcgcattatttgaaagggctgtatccttctacgctgaattagtaaatataaatgcatacgatcaacctggagttgaagctggaaagaaagcagccgcaaatattattaagtatcaacaaaaaataagaaatttattagacgaaggaggagaatattctatgagtgacctaacgtcattatttgataattcagttaatgaacctatatttttcataatacgtgaaatgt

SEQ ID NO: 291142 - DNA, 751 bp, Unknown
  Bacterial polypeptide expressing nucleotide sequence isolated from the Sargasso Sea
tttgggactttagaaacgctatcatcatataaggaggtttgcggtaataatttttatcataattcttttgcaattacggcaaacaaatctaaagccttagattttggtattcatgaagaaaatattgtttcttttgactcctcaacagggggaagattctcaatttggagtcctataaatttagttttatgtttattggagggagaacaaggatataaagattttttaaagggcggcaaggaaatggataacgcatgcttaaaaagcccagaagataatcctgcttttcagctttcagttcaagatattatttataacaatttattaaatgtagaaacaacccttgtagcgaactatgactataaacttagaaattttataaggtttgcacaacaggttgaaatggaatcaaatggaaaaagcattaattcaagcaacaataaagttgattatcaaactggatcaattatttggggtggttatggccctgaatcacaacactcattcttccaacatgtttttcaaggaacaaagcaatcaaataaatattttatttgctctcagtccaataagcttaattacaaacagatggttgctcaaattgaatccttggttcaagggaatgagcaagaaacagacaatcataaaaaaaccaatatttctggagctaccaaaattgagcttaaagatttatctccttattcaatagggcagctattatccctatgggaaaataaaactatcttcaata

SEQ ID NO: 291143 - DNA, 487 bp, Unknown
  Bacterial polypeptide expressing nucleotide sequence isolated from the Sargasso Sea
atggcaataactgacatcttccagatgaataacaacgataaatggggaaggtattgcgaccttttgtatagcgatgattcattaggtttttggcttgatataagcagaatggatgtagcgataaatgattttgaagattttaatgaaatttattccaaagcttttgatgccttagatagtctcgagaatggttccattgccaatattgatgaaggtaggcaagttggtcattactggcttaggaatccaaaagttgctccaagcgcagagatttcagattctattacgatggaaattcaaaacatatccaagtttggggcttcaatattaaatggtgaactcacaaacagcgatggaaaaaaatatacagatgttttttggattggaatcggtggtagtggtttaggtccactactcattaaggagtccttcaagagagaatcaatcggattaaatctacattttctagacaacgtagatcctgagg

SEQ ID NO: 291144 - DNA, 467 bp, Unknown
  Bacterial polypeptide expressing nucleotide sequence isolated from the Sargasso Sea
aatgtcattaactaaattagatcctacagaattaaatgcttggaagaagttaagttctcaatttaaaaatgagaagctgacaactattgaaaaactaatgggtgagcctgatagattagagaacttttctgttgagtgggaaagttttattttagattttacaaaaaaccgaataagcaaaggcactctagatcaattggttaatttatgtcatgaaagtaagttaaaaaataatattgagtgttattttaatggcgatgaaattaatgagactgaaaaaagatcagttcttcatacggcattaagatctccaaaacatgaatctaatgaaataaataaaacagtaaaagagataagagaaaaaattataaatattgccgatgaaataaatagtggagttagaaccgggtatacaggaagaaaaattacagatatagttaatataggaattggcggatctcatttag

SEQ ID NO: 291145 - DNA, 781 bp, Unknown
  Bacterial polypeptide expressing nucleotide sequence isolated from the Sargasso Sea
tatgaccagtatcatcgcaaccgacgcatggcgggccctcgcgggccatcgcgacaccactgcatccgacactatagctgatctgtttgccgccgatcgggaccgattcaagaacaattcgtgggagcttgacggggttctacttgatctctccaagaaccgtatcgactacgccgcttgggacggcttactggcgttggcggaagacgccagggtggccgcggcgcgcgatgccatgtacgccggggaaaccatcaacaccacagaaggccggaaagttctgcatgtggcactgcgcgatggcacgggcatcgccgacgccggcgtcgcggaagacgtgacggcaaccatggcgcgcctggcggcgttcgcccaagcggtccacgacggatccttgacaggcaaaacaggtaaaccctttcgccatgtgatcaacatcggcatcggcggttcccacctaggacccatgctgaccgcagaggctctggggcgctcggcttgcccggaggttcggtttgcagccaacgtagacggccacgacctggccgcggcgctggcagatgtcgatccggaaaaaaccctttttttggttggctcgaaaagcttcaccacacaggaaacattgaccaatgccgcctccgccgcgcgatggctgaccgaggcggtgggctcgaatgccgtcagcgatcattttgccgcgctaaccgcgaaaccggacgcggccaaggccttagggattgcagctcaacacatcttcccccatttgggattgggtcggcgg

SEQ ID NO: 291146 - DNA, 747 bp, Unknown
  Bacterial polypeptide expressing nucleotide sequence isolated from the Sargasso Sea
aatggtgcggaagacgttcgaggcgttgggggcgacgtatgtgaagttgggacagtttatcgcgagcgcgccgagcgtctttccgaaggagtacgtcgacgagtttcaaaagtgtttagacgccaccgaaccgacggattttagcgtcatcaagcgcacgatcgaaaaggatttgggacgttccatcgatgatgtgttcgcgacgatcgatccggtgcccctggcgagcgcgagcgtggcgcaggtgcaccgcgcgacgctcttgaagagcgacaaacaagtcgtcgtcaaggttttaaaaccgaacgtcgaggacacgctcaaggcggatctgagcttcgtgttgatcgtgagcaaggttttacaatttttaaacccagagctctcgcgaacgtccctcgtggacatcgtcggggacatcagggagtccatgttggaggagacggatttcagaaaagaggcggcgaacgtcgacgcgtttcgtcgatacctggaggactcgaacctgacctccatcgctaaggcgccgtacgtgtacaaacagtttagcggaaagcgagtcatggtgatggaatacttttcgggagtgcctctgacggatttggacgcgattcgatcggtgagtcgcgacgcgaatcctgagacgacgctcgtcgacgcgctcaacgtgtggttcggaagcgtcttggcgtgcgagagtttccacgccgacgttcacgcgggaaatttgatcgtgtgcgacgatgg

SEQ ID NO: 291147 - DNA, 895 bp, Unknown
  Bacterial polypeptide expressing nucleotide sequence isolated from the Sargasso Sea
tctctatgaatcaaatctaaaaaatctaaaagaggctgctaataaaattagagataaaaaaactattatattttttggtattggcggctcttatttggcgccaagtttactcaatgaggtatttagtagcctagataaggaaattatttttgtcactggtagtgatccagatgaatataaggacttagaaagcaatacactaaaagatgcggcattcattctggcatctaaatccctttcaactaccgagacattaacaagttatgaatctgttacaaaaagagaatttttattagatacatatgcaataacttcaaatattgatggagcaaaaaattatggcattagtgatgaaaatattattcctatggatatctctatgggaggacgtttttctatttggggtccaataaatttgcttttttatttgattcatggagaaagcaaatataaagaatttttaaaaggagcagaaaaatcagataaattatctttaagcaataatgtaaatgaaaatccttcattaagtttatctattcaagatgtgatcatgaataatgtatttgagatagaatctacccttgtaatcaactatgactggaagttaagaaacttttatcaatatgttcagcaattagaaatggaatcaacaggaaaatctgttgatcaaaatggaaaagagctaaattatcaaactggaatgatagtttggggtggttttggtcctagatctcaacattcctttttccagcaagtttatcaaggtaccaaggattacaatctatattttatcactactaaatcggaccaattaaattacaaacaatttttgggccaatcaaaatcactgaaagatggaaatgataaagaatctgatctaaataagagagttcaa

SEQ ID NO: 291148 - DNA, 527 bp, Unknown
  Bacterial polypeptide expressing nucleotide sequence isolated from the Sargasso Sea
atcaataacaaaatatatcgctcaaatgtctatggagagtaacggaaaatccattaattttgaatcacaactatctccctttttaacttctcctttaatttggggaggttatggtattgagtctcaacattctatttttcagtggcttatgcagggcaaaacggaaacttcatgcgactttatagggctaaatagtgaagaaaaagggtcattagattcttacgaaatgcttttatctcaggtgcttgccatgagtcatggaaaagaagataaacaagatccttacaaatctgttaaaggaaataatccttgctctattctaaagctcaactctctggatcttaaaggtttagggtttttattagctatatatgaacataaagtttttattgaagctcttattctaggcatagatccctttgatcaatggggagtgcaacttgggaagaatttagctttagaaacaaaaagcaataaacagtttttaggagattatttttctgaaacttttctcccaaaatcctagt

SEQ ID NO: 291149 - DNA, 724 bp, Unknown
  Bacterial polypeptide expressing nucleotide sequence isolated from the Sargasso Sea
atgaatggagatttaaactcttgggataaattttgtaattatctttggtttgataaaaaattaaatatttggttagacataagcaaaattaatttcacaagtaaagaaataaaaaatttagaagataaatttatagatgttttttcatcaataaaagaattagaaaatggtgcaatctctaacattgatgaaaataggcaagttggacattattggcttagaaatccatcaatttcaccctcctcaaaaataggagaggaaattagagcagatattaatgcaatctctgaatttggaaaacaaattttaaatggagatattaagaataagaatagtcagcactatactgatgttctatggataggaattggtggaagtgggttaggaccattacttattacagagtcactacagaagtgttctagaggcttaaatttttcttatatcgataatgttgatccttttttaattagcgaaaagttagaagagttatctgaaaaattatcaacaacattatttgtagtagtaagcaaatcaggtggtacacctgaacctagaattgctatggaaattattaaaagtcactgcgaaaataattctcttgaatggaattctaatgctatagctataactatgaaagatagtaagttatttaaaaaagccatttctgaaaattggttaaaaatatttaatttgcaagattgggttggtggaagaacttagt

SEQ ID NO: 291150 - DNA, 847 bp, Unknown
  Bacterial polypeptide expressing nucleotide sequence isolated from the Sargasso Sea
ttgaaaagtttttcatcaatttatttaggagaacaggcaaacacaacagagaaaaaagcagcggaccactttagttacagaaaaacagatatttccagagaccaaaaggttttagaagagcaggaaagaatgtcaacagtgagcgatcaaatcaataaacaaaactatgagacaatcattttttttggcatcggcggctcacaactaggccctgagctgattcaacaaacgctttgttatggctccaatcaaaaaatcatcttcataactggcagtgatccaaaagagattgagaataaaacaaaaggcctgtgtcttgaagagtgtgctttcatattggcatccaaatctttttccaccattgagacactaaggtcttatgagatagtcaccaaaaaagagtatatggaaaacacctatgcaattacatcaaacaagtccggagcagaggctttgggggtcccaagtaaaaacatactgacttttagcaaagcaacaggcggaagattttcaatttggtcgccaatcaacctactttttttgatacaaatgggcaaaaaagcagtccaagatttttatttaggcggacatgaggcagacgaaaacatcttgagctcaggaaggttggaagatgttgctagtatatatatgtgcgcccaagacattatgcacaacaatattttagataaccaaacaagcgcaattttagcatatgactggccactaagagggttttataagtatgcacaacaactagagatggagtctaatggaaagcaagtagaccaaaacggagaaagggtagactatcaaacaaattcaattgtttggggtggctatggcccgg

SEQ ID NO: 291151 - DNA, 819 bp, Unknown
  Bacterial polypeptide expressing nucleotide sequence isolated from the Sargasso Sea
caagattggacaggatttgctggtgataatcgaaacctgccggcatcattagccccattttatgaaaattcagactttgtttcttttttatctggaacatttgatcagcttctagatgcaggaagaaattttggtggtcaatgggcaccagttaatgaatcattgccagctaactttggcgtagattttacatatggaaataattatgaaaataattttggtagatttggagtattattttcagccggttatgactcttccaattcatttattcctgatattgaaagaacaaatttcgttcgtggatcaggtgaaacattagtaccttacgatacttacataggcgaaaaaagcaacaaacaaattgatagcaacttgcttgcaaccattggatgggatttagatggtttaaattatcttcaatttacaaacttaactgttaggaaaactgataataggcttacgcttcttcaaggtagaaatcctgaggccgatttttttgctagtaatacaaaaatggagtgggttgagagacaaattaattccgcgactctttcaggcaatcatgatctcacatcaggacttacaatcgattggagaataagtcatgcagatggaaaaagacagtctccgtttgaacgagaatatttttacgaatgtggtgcatcaattatttcagattgtgatggccaatatgagttttcaagaaggtccgatagtaatgctactcaattctcatggctagacgataactcggatgaattagctattgatttcgtttacccattttctacaactgcaagaaattatgaaattaag

SEQ ID NO: 291152 - DNA, 721 bp, Unknown
  Bacterial polypeptide expressing nucleotide sequence isolated from the Sargasso Sea
ggtccacagttgctttatcaggctctcgagggtattcccgaaaaagaaaaatcttcatcaggattggagacttattttattgacaataccgatcctgaggggatggctcggatttttaaaaaaatgggggattcccttaaagaaactctggttctcgtcatttcgaaatcgggaggcacggtggagacccgcaacgggatgctggaaacccggaatgtatttaaaagcaaaaatcttaattttgccggacaggcggtggcagttacaggagagggtagtcttttggctcagcttgcccaaactgaagagtggttagaggtttttcctatgtgggattgggttggaggcagaacttcggtgacttctgcagtaggactattgccggccttgcttcaggggattgatattgatgcatttctggaaggcgccagaatcatggacggacacacaaggaatcctgacatcaggaagaaccccgcggccatgttagccttgatgtggcatcatgcaggatcgggaagaggagaccgtgcaatggtggttcttccttatcgtgatcggctggattgtctggcccgatacctccagcagttggtgatggaatcccttggtaaagaaaaagatctcatgggaaagattgtggagcagggcttgaccgtttttggaaacaaaggttcaaccgatcagcatgcctacgttcagcagttgagagaaggacgct

SEQ ID NO: 291153 - DNA, 842 bp, Unknown
  Bacterial polypeptide expressing nucleotide sequence isolated from the Sargasso Sea
taaccttaagtcgaaaataaaaaaactatttttaaataaacatagaagcatatcggaaaataaattagtctcttttatctataataggcatgacaagaaaaactatgaaaaaaaaataagcgaaatgtacttacttcatgatggtattaaatcaggagaaattgtaagttgttcaaatgaaaagtttaaacatattgttcatataggtataggcggatctatattaggttcaaaggctttaagtcatgcgttagctagctactctgatcatctactagatattcattatgtctctagtgcagattcatccgagataaattatgttctgggtaagtgtgatatttcgagaacattattcattttcatgtctaaaagttttcaaactagagaagtacttctaaattatgaatatataaaaaataagttacaaaaattaaattatggaaataaaatatataagaatttttttgctgtcacagctaatgtatctaatgcgcttaaatataaaatacctaaaaataatattataacattttctaaaaatatcccaggaaggttttctattacatcacctatcagttttactttattactagaagtaggtaaaaaaaattatagacaatttattaatggtgttctaaagatagatagtcattttaagaataaaaaaattgaaaaaaatatacctatattattgggtctactctctgtgtggaatattaattatctcaatataactacgcactgtgttaacgcatatgcttacaaacttaggtctttgtctgattatatacagcagattgaaatggaaagtaatggtaaatctgttaataataataatc

SEQ ID NO: 291154 - DNA, 726 bp, Unknown
  Bacterial polypeptide expressing nucleotide sequence isolated from the Sargasso Sea
gatgggcaagcccggtcgttcctcgataccttcagtcggtgtgcaccatcagggcccgatgagcttcccggatttcagcgccagtgacgctcagattcaatggcagcgcttctgtgacctcctctggtatcacgaagatctcggcatctggttggacatcagccgcatgcatgtcaacccatcccatctcgagcagctgcaaccgggattcgataaagccttcgcggccatggccgagctcgaagctggtgccattgccaaccctgatgagcagcgtcaggtgggtcactattggctgaggaccccgcagttggcgcctaatgaggcggggcgagaccaaatcgccacagaaatcgatcagatcgatcagttcggtcgggatgtgatcagcggcgagatcaaagctcccggaggacagccctttacggatgttctctggatcggcatcggcggtagcggtctgggacccctgttgatgatcagagcgctgcagggccacggctctggtctgccgtttcacttcttcgacaacgtcgatccaaatggcatgagtgccgttctggctgagctggacgatcgactggcgacaacccttgtggtcaccgtgagcaagtccggcggcaccccggagccccatctgggtatggagcaggctcgccatcgtgtggagtcccgtggtggccgctgggccgatcaggctgtggctatcaccatggtcgacagcaa

SEQ ID NO: 291155 - DNA, 330 bp, Unknown
  Bacterial polypeptide expressing nucleotide sequence isolated from the Sargasso Sea
aaggccaggtgatgatgtcaggtgtacatgctgaggatcctcgacaatctatcgctggcaataccccaagtaatacaatagtcatgaaggatctgtctccttactcactaggtgctttattagcgctatatgagcataaagtatttgtgcagggtgaattgctgggaattaatgtgtttgaccaatggggtgtagagcgtggtaagcatgtagccaaccaattgcggtgtcgttttgcggggcagtcgttagttcatgttgacgacgtggcgacgcagggattattgaattacattgatgaatccacaattactgaggggcttatatagg

SEQ ID NO: 291156 - DNA, 712 bp, Unknown
  Bacterial polypeptide expressing nucleotide sequence isolated from the Sargasso Sea
gatgggcaagcccggtcgttcctcgataccttcagtcggagtgcaccatcagggcccgatgagcttcccggatttcagcgccagtgacgctcagattcaatggcagcgcttctgtgacctgctctggtatcacgaagatctcggcatctggttggacatcagccgcatgcatgtcaacccatcccatctcgagcagctgcaaccgggattcgataaagccttcgcggccatggccgagctcgaagctggtgccattgccaaccctgatgagcagcgtcaggtgggtcactattggctgaggaccccgcagttggcgcctaatgaggcggtccgagaccaaatcgccacagaaatcgatcagatcgatcagttcggtcgggatgtgatcagcggcgtgatcaaagctcccggaggacagccctttacggatgttctctggatcggcatcggcggtagcggtctggggcccctgttgatgatcagagcgctgcagggccacggctccggtctgccgtttcacttcttcgacaacgtcgatccaaatggcatgagtgccgttctggctgagctggacgatcgactggcgacaacccttgtggtcaccgtgagcaagtccggcggcacgccggagccccatctgggtatggagcaggctcgccatcgtgtggagtcccgtggtggccgctgggccgatcaggctgtggctatcacc

SEQ ID NO: 291157 - DNA, 400 bp, Unknown
  Bacterial polypeptide expressing nucleotide sequence isolated from the Sargasso Sea
gctgaccgcctgcgtcgcgccgggttactacggcgcgcaaccggggtatccgcagcagcagcaatacgcgacgcccggctacgcacagcccgcgtattcgcaaccgggctacgtgcagcagcaacagccgtatccgaaccaggcgccgcagccgtacgatcagtacggcaaccagcagcaatacgggtcgcagccgtatgaccagtacggcaatcagcagcaatacggcaaccagtacggcaacggctacggcacgcaatacggcacggtctcgaacatccagccggtcaacggctcggtcggcccgtcgggcgtcgccggcaccgtcgtcggcgcgctggtcggcggcctggtgggcaaccagttcggccgcggtcacggccgcgatgcggccaccgtg

SEQ ID NO: 291158 - DNA, 1125 bp, Unknown
  Bacterial polypeptide expressing nucleotide sequence isolated from the Sargasso Sea
tatggctgaagaaaatgcagtaattcaaaagtttaaaaatattgttattggagaaatagccaactttacagaaaaaaaatcagtaactcattttgaatataaaaaaagaagtaaaaaaaactttgtagaagaccaaaggaatatcttatatatagcagaaaaaataaaaagaaattttaaaagagttattatttttagtattggtggatcgaatcttgggccgtcgttaatgaatgatatttttaacaagcatgatttagaaattatcttcataacaggaagcgaccctgacgaatattctaatatccaaatacaagataaagatgctttagtaatctcatcaaagtcttttgaaacattagaaacactatcatcatataaagaggtttgcggtaatgatttttatcataatacttttgcaattacggcaaacagatttaatgccttagattttggtgttcatgaagaaaatatagcttctttttgttcatcaacagggggaagattctcaatttggagtcctataaatctagttttatgtttattggagggagagaaaggatataaagattttttgcagggcggcaaggaaatggatgatgcatgcttaaaaagccctaaagataatccagcttttcaactttcagtccaagatattatttataacaatctattaaatgtagaaacaactctagtagtgaactatgactataagctgagaaattttataagttttgcgcaacaggttgaaatggaatcaaatggaaaaagcattgattcaaacaacaataaagttgattatcaaacaggatcaattatttggggcggctatggccctgaatcacagcattcattcttccaacatgtatttcaaggaacaaagcagtcaaataaatattttatttgctctcggtccaataagctcaattacaaacagatggttgctcaaattgaatccttagttcaagggaatgaacaagaaacagatattcataaaaaaacaaatatttctggagctaccaaaattgagcttaaagatttatctccttattcaatagggcagctattatccctgtggaaaaataaaactatcttcaatagcattttttggaatacaacatgcat

SEQ ID NO: 291159 - DNA, 1003 bp, Unknown
  Bacterial polypeptide expressing nucleotide sequence isolated from the Sargasso Sea
atgccctcatttaggaacataatcgcagataaaaaatacgcaaaaaaaggcgaagcaaccccagttaaaaaaataggcggcttaaccattgattttagcgcacaaagattttctcaagaatatctggattcatttctggggcacattgaacaagaaaaaatcattgaaaggttttcatcaatttatttaggagaacaggcaaacacaacagagaaaaaagcagcggaccactttagttacagaaaaaaagatatttccagagaccaaaaggttttagaagagcaggaaagaatgtcaaaagtaagtgagcacattaataaacaaaactatgaggcaatcattttttttggcatcggtggctcacaactaggccctgagctgattcaacaaacgctttgttatgactccaatcaaaaaatcatcttcataaccggcagtgatccaatagagatcgagaataaaacaaaaggcctgtgtcttgaagggtgcgctttcatattggcatccaaatctttttccaccattgagacactaaggtcttatgagatagtcaccaaaaaagagtatatggaaaacacctatgcaattacatcaaacaagtccggagcagaggctttgggggtcccaagtaaaaacatactgacttttagcaaagcaacaggcggaagattttcaatttggtcgccaatcaacctactttttttgatacaaatgggaaaaaaagcagtccaagatttttatttaggcggacatgaggcagacgaaaacatcttgagctcaggaaggttggaagatgttgctagtatatatatgtgtgcccaagacattatgcacaacaatattttagataatcaaacaagtgcaattttagcatatgactggcccctaagagggttttataagtatgcacaacaactagagatggagtctaatggaaagcaagtagaccaaaacggagaaagggtagactatcaaacaaattcaattatttggggcggctatg

SEQ ID NO: 291160 - DNA, 1018 bp, Unknown
  Bacterial polypeptide expressing nucleotide sequence isolated from the Sargasso Sea
aaagctggtttaaattatgattttggattatcttataataatcaatctgatgacaggcaaagatttatgaatgattctggattaaagaagggtcaggtcatgggtcaaaatgaaaattatgataacatcagcttatatttttttggatcaaaaagtattgaaaaattaaacttttcgactggtgctagacttgaaaaaaattcgatatcactagataattattttggatcaacagatgaaaaaataaaaaaaattaattcttttaatccatcattaaatatttcttatgaatttgataaaatcgatttttttacaaatttttcaactggatatgaaacaccaacactcaatgaactttctgcaacatcaagtcaatcaggatttaatgatgatttaaattcaattaaatctataacctttgaatttggtgtagctaactttgataaagaaagtaaattaaattttagtttaaggttgttcaacattttaactaaaaatgagatcacaccctatcaaacaagtactggtttagtactctataacaatgcaggaaaaacaataaagaaaggtttggaacttgagctcaaaaccacaattttcaaaaaccttaatatagattatacactaactagcgggagctataaatttgattcatttaaatttttagaaaatgactattcaaaaaactatatgcctggcattccaaaaagtaatcagaatttaaagtttagctatagtaataacaataacctaaatattatttttaatttaaaaagcgttggtaaaatatatgctgataatgctaataatactgaaattgcaggctataattccattggttttaaaatgtctaaagacttaacactatttcaacagaacgtaactccatttatttcaattgacaatttattaaatgaggattattttgataatattcgaataaatgcatttggatctagattttatgaacccgcaagtggaatcaattttatatgtggactaaaacttcagttatgaa

SEQ ID NO: 291161 - DNA, 2716 bp, Unknown
  Bacterial polypeptide expressing nucleotide sequence isolated from the Sargasso Sea
catgagaatagtggccttgctgctgacggtcacaatgtcgatgctgccgatccatacatacgccaccgatggtcagaatccggatatttcctctgttgggaaagaagctcagacctttgggcaggacctagccaattcgttcagagccaactcgggttcggtccaaaacggcacgatctcgatgccgacgctgaaagacggtcaattccagatgaatggtggaagccagataaatgtgaatgacctgtttccaggaaccagcggtggtgacggccaacccgatagctactatttcccggatgccaacaaaccagatgtaggcggtctacagggaatttatgactccggtgacaacatggacagcgttgggaatacggctaaagggtcactttggaacgatgccaatagcgcaaatccatctatatctggggctgcatacaaggtacttcttgatgcgtctaaccgctcacgtccagatttcagcaacgacccaattctcaacctaagtaacaaaacttatgaggatatggatcttattgccgatggatttggagattgctccgcagagacgacaattagcgaggggactataaacgcccatgttcctgaatacgagcgatgccagagggtaattaaaccaacaggggactgcgatataattcactctcttggggtcagcagtaccgtagaaaacgtatatgtcgcctctaaaggtagaacatggtacacggttcaatttgacttaaaaaatgggtcatggaaggcaatatctccatcagatggggaacaaaaggttgcccaaatcccgactgttgattacaacgctatgtgcagcggggctgtaaatttcagaacagatctcattggttcgtgggactggcctgaacacggcatccctgggaagatagattccacagttatttatagggtaaagcaatatccctcctgcgataatgggttagtaggcattgtccaaatacaagatacaacggcctcagatgaccttgattgggttcttgggggaagattttcctttagattcacaaagcaagaagaagataaatggataccacaatcttgtattgatgatgctcaaaaactacaagacggtttttgcaccggctcaatgaatgtggttgaaggcgctcagaatgacgttgattgcattgttgttaatggcgcaacgatatgtcctggcgactccttttacaacacgttaaaaccctctccacttccaggtgtaccgaggttggcccaaaaagttcgtctatctaaattgcagtgcgattttaacgtcggccaaatggaatgttggactgatcctcaaggtgttgagcattgtccaagtaatgacggatctaacttaaactcttgtgctgcactggaaagcaaccctcagtgtggtttcattagctctgaatgtgttgatggtgcagcaggatcttcggggcaatgttacgtattcaaagatacctatgattgcggtactgatattgatgttcctacattagagaaaaacactgaatttcagtgtggcggccctatacgctgcatgggggatgattgtcttgacgtaacgaaatctcaaagcacagattttgcaagggctactgcattattgaatgctgcacagttcttaactcaagatatgagttgtactgacagtgcaaccgaggaaggcggtgacggtaacgttgaccaaggatgtacagtatttggtggagaacctggtgaatgtaaaattgctgtaggcggggtatctgattgctgtgaaaagcccaccaacatctctcttgctgattatctaaacctaataatggcagttcctaagcttgatggtgcaatcatggccttaggctcggactcaaacccatcagcagtcaaaggcgcatatcagatccttcgcgagccagtattagacggttggacggaggtgacccaaccatttactagttacgttgaaaacctgtccggtgctgttgattcttttactcagccggtcgaacagtttgttgatgaatttattcaacaacttaaagatcaggtaaaagatgtgatgatggatatccttaaatccacaggggaggatgctgcaaccgaagccgcagcagaatcagctgcatcaaaagcagctgaaagtatgatgaatacagccacaacatggctcagtactgcaatgacagtttacacagtatatgttgttgcgatggtgatgatccaaatgatttatgcgtgcgaggaagaagagtttacgatgaatgccaaaagagcattaaagaactgctcttatgtcggttcatactgtaaaaccaaggtgcttggtgcttgtattgaagaaagggaatcttactgttgcttcaattcaccgctttctcgaatcgttcaagaacaaattcgtcttcaattgggagaatcattcggtaatcctcaagcccctcaatgcggagggattcctcttgaaaaagttgccgaaattgactggagcaaggtcaatctagacgagtggcttggtattctgcaacagaatggcaagttcccgaacccgagctcgctaaacctcgacagccttactggtgccggtaacgacttcaacatagacggtagtcgtaagaatgcccaggaacgaacactggaacgcttgaacggcatcgatgtcgataaggcacggcgcgacttggcgtctgagatctttccagactgggacggtaagcagtag

SEQ ID NO: 291162 - DNA, 1032 bp, Unknown
  Bacterial polypeptide expressing nucleotide sequence isolated from the Sargasso Sea
agccccatctcggcatgatccagagccgggagcagctggagcgcattggctgccgctggagtcagcacgccgttgctgtgaccatgaaagacagcaagctcgatcaggaagctgctgctgaaggctggctcaatcgcttcgacatgttcgattgggttggtgggcgtacgtccatcaccagcgccgttggtctgttgcctgctgtgctggctggtatcgacagcgatgctttcctgcgcggtgccgctgttatggatgccgccactcggcgccccagcctgcgtgaaaaccccgcagccttgatggctgcctcttggtatgtggctggagatggcaaaggcaaacgcgacatggtcgtgctgccctatcgcgaccgcctcgaggtcttcagtcgctatctccagcaactggtgatggaatccctgggtaagcgcttagaccgtcaaggtcgcgttgctcaccaaggcattgctgtttatggcaacaaaggctcgaccgaccaacacgcctacgttcagcagctgcgtgatggcgtcgataacttctttgccaccttcattgaggtgcttgaggatccaactgaaatccccgtgctggaggactccctccccggtgacttcctcgatggcttcctgcagggcacccgcgctgcccttgcagaaggtggtcgccagagcatgacgttgaccctgcgtcagttcaatcccaccaccctgggtgcattgattgcgctgtttgaacgcgccgttggcttctacggcgaattggtcgatatcaatgcgtatcaccagcctggtgtggaggccggcaaaaaagcggcagcggcaatccttgatctacaaaagcaggtggagcagctccttagtgatggcaacgctcgcagcgtgcaacagatcgctcaggagttgggtgattcagcccatcaagaggctgtctttttcattcttcgccacctcagtggcaatccacgcggcattcaggccagtggcaactgggctgatccgttgagcttgcagttccgcaaggtttgag

SEQ ID NO: 291163 - DNA, 907 bp, Unknown
  Bacterial polypeptide expressing nucleotide sequence isolated from the Sargasso Sea
atgaagagagacgatagaccatcttgtgtgttcaagaatgataaagttaatttcagatcttacattaatgaattcacaaacgatctttataaagcatttgatcttagtgcaaaaaaaataggattagattcaaagatagatgatttatttgatggtaaattagtaaattttacagaggatttggccgcatggcatcctaagtatagagctcaatataatcctaaaaaatcagatactttttcacacaaaatgcagcaaaatgaactcactagtttttatgatctatgtgctcgagcaaaaaatatagtaacaattgggattggaggttcgtatgaaggaccaaaaatgtttcttgaaattatggacttaacaaatactgtaactaactttttatttataactggttctgatctgtctgaatttaggatgaaaatcaataacatagtgccgaaagacacaatatttattgtttcgtcaaagtcttttaaaactttggaaaccctaacgcttttaagagaagctcttaaatggtctggtgatattagtaagtttgttgcaattactgcaaataaagatgaagcgcaaaagcataatataaattgtattattgaatttgatcaagagattggaggaagatactcaatttggtcagaaatttctactctcttttactggctcaaccaagaaaattttaatgattttatggcaggaggcagacaagctgatattgacttacagagcgatgaagcttatttgaaatttgtaaaaaatttatcatatagtgatatttggcttcataatttcaataacaaaaactcaagagctgttctttcttatatttggacatggagatcattacctgattacattcaacaacttgaaatggagtctcttggtaagcaacctt

SEQ ID NO: 291164 - DNA, 814 bp, Unknown
  Bacterial polypeptide expressing nucleotide sequence isolated from the Sargasso Sea
atgagcaaaaccatatcctggaattactatcagcaacattgccttcaaatgcccgagctgagaatgtctattgatacttcgagaatgaatgttccggacaagctttctgattcactgaaagcaaaattcagtgttgccttcaagaaaatgcaggagcttgaaaaaggagcaattgcaaatcctgatgaaaatcagatggttgggcattattggcttcgaaatcctgacttagctccaacaaaaaaatttcaaaatcaaataaaaaatacattgcaaaaaatacagcaatttgcagcagatattcatcagaaaaagattaaaccacagaaatctgtacaattccgtaatgtcctatctattggaatgggaggttcagcacttggtccacagctaattcaaagtgctcttgcccctcaagaagaacatatacgattttattttattgacaacacagaccctgatgggatggaccgggtaataaactcaatcggcaaaggtttgtcagagacactgatactcattatttctaaatcaggtagtactgtggaaacacgaaacaccatgattgaggttcgagaatgctacagcaaactcggacttgattttgccaggcattccgttgcagtaaccggagaaaacagtcaacttgcaaagcttgcctcaaaagaaaactggctaggatgctttccgatgtgggattgggtaggtggacggacttcaattctttcctcagtaggccttcttccagcagctttaatgggtgaaaatatcagcagttttttaaacggtgcaaaagttatggatgagctgactc

SEQ ID NO: 291165 - DNA, 978 bp, Unknown
  Bacterial polypeptide expressing nucleotide sequence isolated from the Sargasso Sea
gccagtgggcgggtcaggccgtcgcgatcaccatgctggacagcaagctcgatgtcgaggcccggcagcagggctggctgcagcggttcgacatgttcgactgggtcggcggacggaccagcatcaccagcgccgtcggcctgctcccaggagcactgatcggatgcgatatccgcgagtttctgggtggtgccgctcagatggatgaagccacgcgggtggccgatcttcgtcgcaatcctgctgcgctgatggcagcgtcctggttcgttgccggcgacggcaagggcaagcgcgacatggtggtgcttccctaccgcgatcgtctcgaggtgttcagccgctatctgcagcagctggtgatggagtccctcggcaagcgtctcgaccgcgacggcaacgtggtgcatcagggcatcgcggtttacggcaacaagggatccaccgaccagcacgcttacgtgcagcagctgagagacggagtcgacaacttcttcgccaccttcatcgagtgtctcgaggatgttgaggacattcctgagatcaaggaggagcgcccaggggatttcctcgatggattcctacagggcacccgatcggcactgacggaaggaggtcgtcagaacatgagcatcaccatgcgccgtttcgatgcccgccgtctcggcgcgctgatcggtctgtttgaacgggcggtcggcttctacggagagctggtgaacatcaatgcctatcaccagcctggggtggaagccggcaagaaagcagctgccgccgtgctggatcttcaaagccgtgtggagggcgtgctcaaggacggtgcatcccgttccgtcacggagatccgtcaggccctcggggagggttccgacgaatcagtcttctggatcatgcggcacctcaccggcaacaagcgcggctacaccgctgaaggcgactggtccagtcccgccagcatgcgattcagcaaggtctgaa

SEQ ID NO: 291166 - DNA, 961 bp, Unknown
  Bacterial polypeptide expressing nucleotide sequence isolated from the Sargasso Sea
atgcaattagctgataacccaatcacaaaaattatattagaaaagttaaaacacaaagattttcgaaacttaaatcatcttatttttgatgaaaaaagaccttctgaattccaatatgaacttcaagatttaaaaattgatattacaaggcaatcccttgataaagagataaaggaagatttgataaatcttgctaaagaaactaaaattaaaaaaaaaataagtgaacttatttcaggtgtaaaagtaaacttatctgaaaatcgttctgttgatcattttagtctaagaaaagaagaacgtttcaaaacacaagaatggaagaaacttcgaaattttgttcaaaatatttcaagcaaaaataattttaaacatattgtgaacattggcattggtggatctgacttaggacctttaatggttaacaaagcattgaaaagtttttataaagttcctgatattttatatgtatccaatattgacccaaccaagatctctgaaatatttataaaatgtaatcccaaagaaactctatttatagttacatctaaaagcttcagtacacttgaaactcttgaaaacgcaaagattgtggcagaatggttatccaaacataaagtttctttaaattattctatggttgcggttacatcagtgagaaaaaaagcattagattggggatttaaagattcaaacatctttgaaatatcagaaaatgttggaggacgttactctctttggtcatcagtaggtatgtcaatatttattggtttaggggaagataattataaaaattttcttcttggggcaaggacaatggatgagcatttcataaatgaagaagttgaaaataatattccgattatccttgctttactgagaatatggaaccgaaattttttaaatagaaataatcattgcatagttccttatactgacaatctttctaaattccctgcat

SEQ ID NO: 291167 - DNA, 460 bp, Unknown
  Bacterial polypeptide expressing nucleotide sequence isolated from the Sargasso Sea
tgttgaggcagttcattatccaccagaaggtatacgaggagttggactcgctcgcgcacaggaatatggcacaaatttagaatcttatatgaaatggctaaaagatgagtcaataataatagtgcaaattgaagatattagtgcagtcgaaaatctagaggaaatattttctgtaagtaacatagatgggtatattattggtccttatgatttatcggcatctatgggtatgcctggcgaattcgataatccagagtttatagatgtagtaaacaaaataaaatctactgcaagtcaatgtaaagtatgcggtgggatccatattatcgaaccaaaaccagaagaattagaaaaaaggatagatgatggatatcgttttcttgcatatagtctagacattcgaatgcttgatgtttcttgcaaaaacggcattcaacatattaaagagttaaaaatataa

SEQ ID NO: 291168 - DNA, 1078 bp, Unknown
  Bacterial polypeptide expressing nucleotide sequence isolated from the Sargasso Sea
atgaaaaatagatctattaaaaatattttctcagagcttaagaaactttccaagtctgaagcaactgagagaaaactttcatttaaatttcaatcagaacttctaaattatcaaccctatttaaaggatttttctgcaagtcactatgaattatttgatgagcttgcaagtcaattagatcttcaaggctccattaatgatctctttgatgggaagattattaacaagacagaaaatagggaagctctacatcatcaatatcgatttaatcacaaagcatcagagtttgattttaaaaaaattacagagccttttatcaatagaattaaaaaagatggctttaagaatattattactttcggtattgggggttcctatgaggggccaaaattacttcaagaatttacagataagcagtcattaaaattaaattactattttatatctgggcctgatagagacgaatttgattcaatattaaaaccactaagaggggcaaagaatttttatattttttcatcaaaatctctatcaacagatgaaactctgttatgtttgaaatggttaggacgagagcgaaactctaagaattcaatagttataactgcaaattcaaaaaaagccattgcaattggtttctctgaaaattgcattgttccatttccagaatctgtaggaggaagatactcaatttggtcaccaatatctcttagcgtaggaatagaaaataatttttcaacgtttctcaaaggtggctcaactgcagataaaatgatcttaggcgcttctagggaagataagcagtatcaaaaatttattaaaatattagcattttcagatttgtggtttagtaattttaaaaacaagaagaacagaattatactttcttataattggaaactaagatcactgactaattatatccaacagcttgagatggagtcactcggaaagcaacctaatcctaaatctatgtttaaagagacaggacaatcaatatttggaggttttggatctactgcacaacactcttactttcaattattacacccaaggtacagcagagttttgtactgat

SEQ ID NO: 291169 - DNA, 595 bp, Unknown
  Bacterial polypeptide expressing nucleotide sequence isolated from the Sargasso Sea
ctgaccgcctgcgtcgcgccgggttactacggcgcgcaaccggggtatccgcagcagcagcaatacgcgacgcccggctacgcacagcccgcgtattcgcaaccgggctacgtgcagcagcaacagccgtatccgaaccaggcgccgcagccgtacgatcagtacggcaaccagcagcaatacgggtcgcagccgtatgaccagtacggcaatcagcagcaatacggcaaccagtacggcaacggctacggcacgcaatacggcacggtctcgaacatccagccggtcaacggctcggtcggcccgtcgggcgtcgccggcaccgtcgtcggcgcgctggtcggcggcctggtgggcaaccagttcggccgcggtcacggccgcgatgcggccaccgtgatcggtgcgctcggcggtgcggtggccggcaaccagatcggccagcagatgggcgcagcacaaggcccgagcagctaccggatcgacgtgcaggtcagcgacggctcgatgcgctcgttcgacgtgcaatcgccgggcaacctgcgtccgggcgatcgcgtgcagatcaacggcaatcagctcgcgcgctattgat

SEQ ID NO: 291170 - DNA, 185 bp, Unknown
  Bacterial polypeptide expressing nucleotide sequence isolated from the Sargasso Sea
tcggagcttgggttttcttatcgctctttatgagcataaaacatttatagaatcattaatactaggcatagatccctttgatcaatggggagtagaattaggaaagaaattagcatctagaagcgaagataatcaaaattttttttcaaaattctttgcaagagatattcttccaaaaaattaga

SEQ ID NO: 291171 - DNA, 961 bp, Unknown
  Bacterial polypeptide expressing nucleotide sequence isolated from the Sargasso Sea
agatgccatcatttaaaaactttagttgatgataaaaaaaacgccgaaccgggcgatgtcgtgacgacaaaaaaagcaggcgggttaacatttgattttagttttcagcgcttctccgaaacataccttgattcatttatagagcatgtaaaagaagcaaaagtcattgaaagatttgacgcaatttattcaggagaacaagcaaacacaacagaaaacagaccagttgaccactttggttacagaaaagaagacaacgctagagagcaaagggttttagatgaacaagagaaagcgttggttctgagcgagcatatcaataagcaagaatatgaagcaatcatcttttttggtatcggcggctcacaacttggacccgagctaattcaacaaacactctgttataacaaaaacaaaaaaatcgtttttataactggaagcgatccactggaggctgaatttaaaacaaaaggcttaaaccttgatacatgcgcttttatcttggcgtcaaaatctttttccaccatagagacattaaaatcatttgagctggtgacccaaaaaacacacatgcaaaacacatatgcaattacatcaaacatcgctggagcagaagctttcggcgtttcgcgcaaaaatatactgacctttagcgaggcaactggaggtaggttttcgatttggtctccaatcaacctgcttttcttgatacagttgggcgaacaatccatagaagagttctatctgggaggacgagaggcagacgaaaaccttttaaacgccagaacactagacactcctgcaagtgtttatatgtctgcccaagacattctacacaacaacattttggacaatgaaacaacagcaatcctcgcatacgattggccactcagaggtttttataagtacgctcaacagcttgagatggagtcaaatggtaaacgagtagatcaaaatggga

SEQ ID NO: 291172 - DNA, 976 bp, Unknown
  Bacterial polypeptide expressing nucleotide sequence isolated from the Sargasso Sea
ggaattggtggaagtgggttaggcccattacttattacggagtcactacaaaagtgcactgaaggattaaatttttcttatatcgataatgttgatccttttttaattagcgaaaagttagaagaattatctgaaaaattatctacaacattattcgtagttgtaagcaaatcaggtggtacgcctgaacctagaattgctatggaaattattaaaagtcattgtgagaacaattctcttgaatggaattcaaatgctatagcaataactatgaaagatagtaagttatttaaaaaagccacttctgaaaattggttaaaaatatttaatttacaagattgggtaggtggaagaacgagtatcaccagctctgttggattacttccattagcactaattaatgaaaatatatttgaatttattagaggtgcatcattaatggatgaggccacacgtacaagggattttaaaaataatccagcagcattattatcatctgcatggtttttaactggggatggctctggtaagagagatatggtcgttttaccttatagagataggttacaggtatttagtaaatatcttcagcaattagtaatggaatcattaggtaagaaatttaatagaaatggtgaagtagttaatcaaggtatttcagtttttggtaataaaggatctacagatcaacatgcttatgttcagcagctgagggatggtattgataacttcttttgtgtttttattgaattattagattctccatcgactaatatttttgatgaaaaagagaatcccaaagaatatctttctggtttcttgcaaggaaccagatccgcactttctagtgaaaaaagacaaagtatcaccataacattagaaaagttaaattgtttttcactaggtgccttaatcgctttatttgagagggctgtatccttctacgctgaattagtaaatattaatgcatatgatc

SEQ ID NO: 291173 - DNA, 412 bp, Unknown
  Bacterial polypeptide expressing nucleotide sequence isolated from the Sargasso Sea
attttttcaacttatgcacctagggacaaagctaattccagctgattttattgcctttaaaaaacccctgtacaatgatacagaacaacataaaattttaacttcaaatttcttagctcagacaaatgctttgttggtaggtaataaaaagtctggagatgaaattcataaaaatattgacggtaacagaccctccaacacaatacttatcaacaagttaactccacataaccttggctctttaatagctatgtatgaaagtaaaatttttgttataggttccattttgaatatttatagttttgatcaatggggtgttgagttaggaaaatcaatagctaaacaaattttgaataatggcaaatctaacctagacgagtcatcctctcaaatttatgacaagcttcaatag

SEQ ID NO: 291174 - DNA, 724 bp, Unknown
  Bacterial polypeptide expressing nucleotide sequence isolated from the Sargasso Sea
ctggcaaagaaatttaaaataaagaaaattatagaatttgataaagaaattggcggtaggtattcaatttggtcagaaatttctatactaatgcattggttaaatatagatggcttcaataaatttatggctggtggaaaacaagccgatattgatttaaatgaaaatagttcttacattaattttataaaaaatttatcctatagtgacatctggtttcataattataaaaataaaaatgcaagagtaattctttcctatatctggaatttaagatcttttgcagattatgcccaacagttagaaatggagtcgcttggaaagcaaccatcaaaagaatctgaatttaaaaaaacaggccaaataatctttggaggttatggtcccactgctcaacattcatattttcaattactccatcagggcactcaaaatatatgcgctgatattattgtaagtagtaaagatataaaaagcttgtcttatgctcaagctatttctcaaacgaaacttctatcagagggaaccaatgaacttaaaggctatgagagcataaatggaggtactccaactaatttatttataattaacaaacctgatttatatgatcttggttatttaatagcaacttgggaacacagggtatacattacagctttaatgttagatattaatccttttgatcagtttggcgtaaatgctggcaagatttatactaaaaaat

SEQ ID NO: 291175 - DNA, 769 bp, Unknown
  Bacterial polypeptide expressing nucleotide sequence isolated from the Sargasso Sea
catgaccagtatcatcgcaaccgacgcatggctggccgtgatgggccatcgcgacactactgcatccgatactatcgctgatctgttcgcctccgatgggtgccggttcaagaccaattcgtgggagcttgagggaattctgctcgatctctccaagaacagaattgatgatgccgcttgggactacttgctagcgttggccgagcacgccggggtggctgcggcgcgcgatgccatgtacgccggagaacccatcaatatcacggaaggtcgaaaagttctgcatgtggcgctacgcgacagcacgggcatcgcagactccagcgtcgcggatgacgtgacagctaccatggcgcgcctggccgagttcaccaaagcggtccgcgatgggtccttgaccggcaaaacgggaaaaccctttcgccatgtgatcaatatcggtatcggcggttcccacctgggacccatgctgactgcggaggccttgggggacgcggcctgcccggaggttcggtttgctgccaacttagacggccacgacctggccgcagcgctggctgatgccgatccggaaacaaccctttttttggtttgctcaaaaagcttcaccacacaggaaacgttgaccaacgccacctcagccttgcgatggctgaccggggcactaggctcggatgccgtcttcggtcattttgccgcgctaaccgcgaaaccagaagcggccaaggcattcggaattgcagctcaacacatctttcctatgtgggat

SEQ ID NO: 291176 - DNA, 844 bp, Unknown
  Bacterial polypeptide expressing nucleotide sequence isolated from the Sargasso Sea
ttaaaaaaagctacttctgaaaattggttaaaaatatttaatttgcaagattgggttggtggaagaactagtattacaagctctgtgggattacttccattagctcttattaatgaaaatatctctgaatttatcagaggtgcatcattaatggatgaagccacacgtataagtgattttaaaaataatccagcagctctattatcatccgcatggtatttaactggggatggtattggaaagagagatatggtggtattaccttatagagataggttacaggtttttagtaaatatcttcagcaattagtaatggaatcattaggaaagaaatttaataggaatggtcaagtagttaatcaaggtatttccgtgtttggtaataaaggatctacagatcagcatgcttatgttcagcaactgagagatggtattgataatttcttttgtatttttattgaattattagattctccatctactaatatatttgatgaaaaagagaatcctaaagaatatctttctggttttttacaaggaaccagatcagcactctctagtgaaaacagacaaagtatcactattacgttagaaaagttaaattgtttttcactaggtgccttaatcgctttatttgagagggctgtatccttctacgctgaattagtaaatataaatgcatatgatcaacctggagttgaagccggaaagaaagcagctgcaaatattattgagtatcaacaaaaagtaagtaatttattagatgaaggtggagaatattctataaatgacataacatcattatttgataattcagttagtgaacctatattttttatactcc

SEQ ID NO: 291177 - DNA, 939 bp, Unknown
  Bacterial polypeptide expressing nucleotide sequence isolated from the Sargasso Sea
gtatgaaaggaccaaaactattaattgaaagccttggtcatggtgaggtactctccacttataaacatcattttgtaactggttcagatagaattgagttggatgaaacactgaaaaaactagatccaaaaaaaactgtttttatagtctcttctaaatcatttactacagatgaaacaattgagagcctaaaagatgcaattcattggtcaggagacattaataaatttattgcaataacagcaaataagaacgaagctcaaaaatataatttcaaacatatatctgaatttgataaagaaattggtgggagatattcaatatggtctaggatatcttttgcagctgctttttatgctatgcgagccgatagcgaaaatacttttgataatttttgtttaggcggctcaattgcagatagttatctttctgatgttgaagattatcaaaaatttgtaaagatgttagccttttcagatatttggtttcataacttcaaagaaaaaaatactagagcgatcctatcctatgattggaagcttagatctctgcctaactactttcaacaacttgaaatggaatcgcttggaaaaagacctaataaaaattctgaattcaaaaaaactggtcaaattattttcggaggatatggcccaacagcacaacactcatattttcaattattacatcagggaactcaaaatatatgtgcagacataattttaaacaaagataatgaatttaatggcttagcttattctcaaggaataactcaagcaaggcttctgtcagagggagcttcaactctactaaaaaatgaagaaattattaatggcaatgttcccgttaatcttttcatttttgatggtattgatgcaaaaaaaaaaggatttctaattgcaacttgggaacaccagagtttttataacctccagtaat

SEQ ID NO: 291178 - DNA, 499 bp, Unknown
  Bacterial polypeptide expressing nucleotide sequence isolated from the Sargasso Sea
tatgtctcgcctatctctggattttagcaatctaaagacctttatttctgaaaaagatttagaagacatatacccaaaagttctttcctgtcacgaaatgttggaaaatgggcgaggtattggatcgcgctttttgggctggaaaaaaccagagacttctaaaacagttttaactgaaattaatgaggtggccaaatctgtacgcgaactatgccaggtttttatagtaattggaatcggtggctcctatattggttcgcaagctgggattacttttttaaaaccctcttttccaaatcaactttataaagagggtttgccggagatctatttttctggccacaatattagttctgactaccactcagatctgcttgaccttgttgaaaaatatgatgtttgtttgaatgttatttccaagtcaggaacgacaacagaacctgctattgcttttcggttatttaagcaattaattgaaaaaaaatatgggggtggatgg

SEQ ID NO: 291179 - DNA, 865 bp, Unknown
  Bacterial polypeptide expressing nucleotide sequence isolated from the Sargasso Sea
atcggaggttcttttgaaggtcccaagatgcttattgaaattgctgaattagcaaatgaagaaactaattttatatttatcactggctctgattcatctgagttcatggtaaaaactaaaaaattaaatccaaaagatacaatctttatagtttcatcaaaatcatttacaactctggaaactatttcactgctaaaggatgccatatattggtctggagaaatgagtagatttattgcaattacagcaaatagaaaagaggcagaaaaatatagtataaataatatcattgaattcgatcaggaaattggaggaagatattctatttggtcagagatttctgtattgatgctttgtttaaaaaaagatgaatatgatgcttttatggctggcggcaaacaggctgatttagatttaaaacagaatgaccactatttaaaatttgttaagactttagcttatagcgatatttggctccacaatagtaaaaataaaaactcaagagtagttctttcatatatttggaatttgagatcattccctgattatattcagcagctcgaaatggaatcactcggcaagcaaccaccaaagaattcagagtttagaaaaacaggtcaaataatttttggaggttatggaccaacagcgcaacattcgtattttcaattgttgcatcagggcattcaagatatatgcgtagatattattgcaagcaaagaagataagaaaagtttagcttatgcgcaagccattactcaatcaaagcttttatcaaaaggagctgaagatttaaaaaatcaagaaaaaattaatggcaatatgccaactaatctttttttgattaatagaacatcttcatacg

SEQ ID NO: 291180 - DNA, 667 bp, Unknown
  Bacterial polypeptide expressing nucleotide sequence isolated from the Sargasso Sea
atttggagtcctataaatctagttttatgtttattggagggagaaaaaggatataaagattttttaaagggaggcaaggatatggatgatgcatgcttgaaaagaccacaagataatccagctttccaactttcagttcaagatattatttataacaatttattaaatatggaaacaactcttgtggtgaactatgactataaacttagaaattttataggttttgcacaacaggttgaaatggaatcaaacggaaaaagcattgattcaaacaacaataaagttgattatcaaacaggatcaattatttggggtggctatggtcctgaatcacaacactcattcttccaacatgtgtttcaaggaacgaagcagtcaaataaatattttatttgctctcagtccaataagctcaactacaaacagatgattgctcaaattgaatccttagttcaagggaatgagcaagaaacagatattcataagaaaacaaatatttctggggctaccaaaattgagcttaaagatttatctccttattcaatagggcagctattatccctgtgggaaaataaaactatcttcaatagcattttttggaatacaaatgcatttgaccaatggggcgtcgaattaggtaaaattaataccaaaaagcaattataag

SEQ ID NO: 291181 - DNA, 259 bp, Unknown
  Bacterial polypeptide expressing nucleotide sequence isolated from the Sargasso Sea
caaacctagcaatactttaatgtttgatagccttacgcctaagacacttggcgcgctagttgctatgtatgaacataaggtattcgttcagggtgttatctggaaccttaactcattcgaccaatggggcgtagagttaggtaaagtactgggcaaccaagtactggcaggcattcagggaaatgcaaaagaagatagttttgatgcatctacccaacaattgattgcccgtttcagagcagcgaatgcaccaaaataa

SEQ ID NO: 291182 - DNA, 844 bp, Unknown
  Bacterial polypeptide expressing nucleotide sequence isolated from the Sargasso Sea
acctattattcagaggataaaaaaaggtggcttcaaaaatattattacttttggaataggtggctcatatgaagggccaaaattattgcaggaatttacaaaaaatcaatcttcaagttttaactattattttatatctggacctgataaagatgaattcaactcggtaataaaaccattaatcggccaaaagaacttttatattttttcatctaaatctttatctactgatgaaaccttgttatgtttaaaatggatagcacaggaaagaagcccaaataattcaattgtcataacagcaaacatagataaggctatttcattgggatttgagcgcgatagtattgtgccattccctgattccattggaggaaggtactccatatggtcaccaatatcactcagtgttgcattagagaataatttttcttcatttttaaaaggcggctccattgcagataaaatgatgctaggcaattctaaagaagataagagatatcaaaaatttattaaaatcttagcattttcagatatatggtttagtaactttaaaggtaaaaagaatagaattattttatcctataattggaaattaaggtcaattgctagctatattcaacagctagaaatggaatcacttggtaaacaatcaaatccaatttctctctttgatgaaactggtcaatcaatttttggaggttttggttctactgctcagcattcttattttcaattgcttcatcaaggtacagcacaattctgcactgacataatttatcacccagtaaaacatagtcctttaagctctgctcaggctatcgcacaagcaaaattacttgctctg

SEQ ID NO: 291183 - DNA, 484 bp, Unknown
  Bacterial polypeptide expressing nucleotide sequence isolated from the Sargasso Sea
gtagttaactatgactataaacttaggaattttataagttttgcacaacaggttgaaatggaatcaaacggtaaaagtattgactcaagcaacaaaaaagttgattaccaaacaggctcaattatttggggaggctatggccctgaatcacaacactctttcttccaacatgtgtttcaaggaacgaagcagttaaataaatattttatttgctctaagtccaataaacttaattacaaacagatgattgctcaaatcgaatctttaatccaaggtaatgagcaagaagtagatattcataaaaaaactaacatttctggagttactaaaattgaattaagcgatttatctccttattcaataggacagctattatctttatgggaaaacaaaactattttcaacagcattttttggaatacgaacgcatttgaccaatggggtgtcgaattaggtaaaattaataccaaaaagcaattgtaag

SEQ ID NO: 291184 - DNA, 482 bp, Unknown
  Bacterial polypeptide expressing nucleotide sequence isolated from the Sargasso Sea
ggggaccgatgaggtctgcagcgacatcatccttgcggcccgaccgacgtcttgggatgggcagtccggtggccagatcgccgaccaacacgacgtccttgtcgcgcacgcgttggcccaggcctctgttctgtccgttggcctaacgcgtgaagaactggccgcagcaggtgtcagcgaggctctcgtcccccacaaggtgatgccgggaaacaggccggtcagcgtgatcatgatggatcaactcacgccctttgcactcggagcgttgctggccgcctacgagcacagcgttttcgtgcaggccgctgtgtggcagatcaatcccttcgaccagtggggcgtggaacttggcaagaaggtcgccagcggaatcgtggacgacattcaccaacggcaggtggacgatccggcactcgacccgtctacccgcgcgtccctggccgccatcctgcaacgtcgggaccaacctcggttctaga

SEQ ID NO: 291185 - DNA, 562 bp, Unknown
  Bacterial polypeptide expressing nucleotide sequence isolated from the Sargasso Sea
gatgaataattttaatcataaacatataagagtaattctttcatatttttggaaattgaggtcttttcctgcttatgctcaacagcttgagatggaatcgttaggaaagcccgcaagtgcttcttcaaaatataaaaataccgggcaagttatctttggaggatatggaccaaaagctgagcactcatatcttcagttacttcatcagggtacacaggaaatatgtgcagatattattgcttgtgataaagacaaaaacgatcttgaatatataaaagccataacgcagacaaggctgttaagcaaaggagctgaggacttggaagagaaggaaaaaattaatggaaatgtcccagtaaatttatttatagtcaaagaagggggtcttgagcgaattggtcaaaagaatattgtcgaatctcttggatatttcattgctacttgggaacacagaaccttcataacagcaacaatgttgggaataaacccttttgatcaatttggtgtaaatgctggaaaaaaatatactttggcaagacaatttatcaaagacagttcatag

SEQ ID NO: 291186 - DNA, 673 bp, Unknown
  Bacterial polypeptide expressing nucleotide sequence isolated from the Sargasso Sea
ggcattgggggatctgacttaggaccattgatgattaatcaagcactaaaaagtttttataaaggacctaaggttttttatatttcaaatattgatccaataactctaattgaagtatttgagaaatgtgaccctaaaactactttatttataataacgtctaaaagctttggaactcttgaaactcttgaaaatgcaaaaattatatataattggctcacagagagtaacgttagtttgaatgatgcaatggtggctgttacttcatctgaaaaaaaagctaagaaatggggatttaaaaaatctaatatttttcatatttctgaaaatgttggaggaagatactcattatggtcttcagtaggaatgtcgattttgtgtggtttaggagaagataattacaagaaatttttgaatggcgccgagataatggatcagcattttgttaatgaggaaattgagagcaatattccgattattttagctttacttagaatatggaatcgaaattttttgaatttgaataaccactgtattgttccatatactgatagtctttctaaattgcccgcctgggcacaacagttagaaatggaaagtaatgggaaaagtgttgatgtagaaggtcaacctttacaaatgccagctagtccaattatttggggagaagttg

SEQ ID NO: 291187 - DNA, 808 bp, Unknown
  Bacterial polypeptide expressing nucleotide sequence isolated from the Sargasso Sea
gccaatcccgacgaaaaccgcatggtagggcactactggctacgggactccaaacttgctccgaacgcagaactgtcctctgctattcgagaaaccttggacaaagtcaaggagatcgcccgccaagtgcatactggggaactgcaggcccctcaaggccggttcacggatctgctcgtcattggaatcggaggatccgccctaggtcctcaattcgtgggcaaagcactcggtcacccggaaaccgaccgacttcgagttcattttttcgataataccgatcccgatgggatcgacctgacattggccgaaatcggaaaggctctacccacgactcttgctttggtgatttccaaatctggaggaacccccgagacccgaaacgggatgctcgaagcagttcatgctttctccgaaaaaggtttggacttttccaaacaggcgatcgcggtgaccggagatggaagcaagctccatcaatattcccaggaaaatcagtggctagattttctgccaatgtgggactgggtgggcggacgaaccagtgagaccgcagcagtcggccttcttcccgcggcccttcagggtcttaacattgacgaactccttgccggagccaagcaaatggacggcttgacccgttcttccgagttccgtaataaccctgcagctatgctcgccttagcctggtattacctgactggcggcaagggctccaaggatatggtcatcctaccctacaaggatcgcctggatctgttcgcaaagtatcttcagcaattaattatggaatccttggggaaagaaa

SEQ ID NO: 291188 - DNA, 817 bp, Unknown
  Bacterial polypeptide expressing nucleotide sequence isolated from the Sargasso Sea
tttgaataatccaatagtagctgaaaattttactaaaccaattaaagttaattttgattttataactggatcagatccctctgagtttgactataaaacaaaatttttagaatctgaaaatactgtttttatagtttcttcaaaatcatttactacagatgagacaattataaatttaaaaaaagcttttgaatggtctggtgataaaagcaagtttattgcaattaccgcaaatcctgacgaggcagataagtatggcattaaaaatattgtaacttttgataaagaagttggaggcagatattctatttggtctcctataactcagttccatttatatggagaaaaaagatgtgctttcttaagcggaggtcatcaagcagatatagatataattgaaaatcaagattatatagattttgtaaaaaggttatcttttaaggatattcttatgaataataaaggcagaaatgttagaaccatcctctcatatatatggcatttacggtctctgccatgttatttacaacaactagagatggaatcacttggaaaacattccaacccaaattcaaactataagaacactggacaaataatttttggtggatatggtccaactgcacaacattcatattttcaacttttacatcaaggtactcaaaacctttgtgctgatataattaccactttagaagacaaaaaaagcttagcattcgctcaagcaattactcagtctgaacttcttgcagttggtgaatctgaaattcaattaaaaaatgaatcaaagataaacggtaacgtacctgtaaactta

SEQ ID NO: 291189 - DNA, 957 bp, Unknown
  Bacterial polypeptide expressing nucleotide sequence isolated from the Sargasso Sea
tggaaatttttctattgagtgggaagaatttattttagattttagcaaaaataggataagtaaaggaacgctagatcaattagtcaatttatgtaatgaaagtaaattaaaacataatattgaaagttattttaaaggcgatataataaatgaaaccgaaaaaagatcggtgctccattcagctttaagatctcaaaaacacgaatccaatgagattagtcaaatagtaaatgagttaagaggacaaatcataaatacagctgataaaataaatagtggggataaagttggttattctggaaaaaaatttactgatgtagtgaatataggaattggcgggtctcatttaggccaagaaatggtagtagaggcactttctttttgttctaaaagcataaaaccacattttatatccaacatcgatcctgattatacttcacaggtattagaagagcttgatccagaaactacactttttattatagtttcaaagagttttaaaactattgagactattgaaaacgcaaaaaaaagtaaagagtggttcgttgcagaatcaaaaggtcaaaatattaaagataattttattggaatctctaataatacttctgcagctaaagaatttggaattgatggcgacagtatctttcgaattccagaatgggtaggaggtagattttctctatggggatctgcaggcttaataattgctatatcaattggttcagaaaattatagagaattgttaaatggtgctaatagtatggataggcattttagagagagtagttttgaaaataatatacccgtattattagctttaataagtatttggtataataacttttttaaatgtgagacagaagcgataattccttatagtgaattactaaacaaattgccaaagtatttgcagcaagctagtatggaaagcaatggaaagtcaacagacaagaa

SEQ ID NO: 291190 - DNA, 760 bp, Unknown
  Bacterial polypeptide expressing nucleotide sequence isolated from the Sargasso Sea
ttacccgattgggttggtggcaggacaagtattactggtgctgttggattattacctgccgctttaattggcgctgatataaacaaattcttaaatggggcatctcaaatggatgaattaacaagagtcaaagacattaaaaataatccagcagcacttttgtctttagcttggttcaaatccggaaatggaaaagggttaagagatatggttgtacttccctatagagacagattagaagtattcagtagatatcttcaacaacttgtgatggaatctttaggcaagaagtttgatagagatgaaaatcaagttaatcaaggtatagcagtctatggaaacaaaggctctacagatcagcatgcatatgtgcagcaattaagagatgggattgataatttctttgttaatttcattgaaattcttcacgatcctttagagattgttgaagtaaaaaataaaagaccaggtgactatttgtctggatttcttcaaggaactcgttcagcattgactgaaggtggtagacagaatatgactatcacttttaagtcatttgatgaatcaagtcttggtgctttaattgcattatttgagcgagctgtaagtctatatgccgaattgattaatgttaatgcctacaaccaaccgggagttgaagcaggtaaaaaagcggctacaaagataattaaacttcaaaaagagattgaggaattattagatgatggaaagcaaagaacattaaatgaaataaatgatg

SEQ ID NO: 291191 - DNA, 796 bp, Unknown
  Bacterial polypeptide expressing nucleotide sequence isolated from the Sargasso Sea
tttgaatggtcttggtgataaaagtaagtttattgcaattactgcaaatcctgacgaggcagataagtatggcattaaaaatattgtaacttttgataaagaagttggaggcagatattctatttggtctcctataactcagttccatttgtacggagaaaaaaggtgtgctttcttaagcggaggtcatcaagcagatatagatataattgaaaatcaagattatgtaggttttgtaaaaaggttatcttttaaggatattcttatgcataataaaggcagaaatgttagagctattctttcatatatatggcatttacggtctctgccaagttatttacaacaactagagatggaatcactcggaaaacattctaacccaaattcaaattataagaatactggacaaataatttttggtggatatggtccaactgcacaacattcatattttcaacttttacatcaaggtactcaaaacctttgtgctgatataattactaccatagaagacaaaaaaagcttagcattcgctcaggcaattactcagtctgaacttcttgcagttggtgaatctgaaattcaattaaaaaatgaatcaaagataaacggtaacgtacctgtaaacttatttcttcttaacaattttaatgcatttaatttaggttatcttattgctacatgggaatatagaacctttattactgcagcaattttaggtataaatccatttgatcaatttggcgtaaatgctggcaagatttatactaagaaatatttatctaataacgattaa

SEQ ID NO: 291192 - DNA, 712 bp, Unknown
  Bacterial polypeptide expressing nucleotide sequence isolated from the Sargasso Sea
tatactgacctttagcgaggcaaccggaggcaggttttcgatttggtctccaatcaacctgctttccttgatacagttgggcgaacaatccatagaagagttctatttgggaggacgagaggcagacgaaagccttttaaacgccagaacgctggacactcctgcaagtgtttatatgtctgcccaagacattctacacaacaacattttggacaatgaaacaacagcaatcctctcatatgattggccactcagaggtttttataagtacgctcaacagcttgagatggagtcaaatggtaaacgagtagatcaaaacgggaataatatagattatcaaacaaacccaattgtttggggtggttacggcccggtatcgcagcactctttttaccagcaaatctttcagggtacaaaagacatgaacctatactttcttgcctcaacagagaatgaaaagaaactcaacacggcacaataccaagggcaaacacatagtttatcagaaggaacaaaaaccaatgtcccaccacataaacaggtaagcacaaggcgcttcaccaccatagaaatggaaagcatatctcctagaacagtaggcaatctaattgctacatgggaaaataaaaccattcttaatagccttctttggaacgtcaatgcatttgaccagtggggtgtcgagctaggaaaagcaaacacaaaaaaatac

SEQ ID NO: 291193 - DNA, 444 bp, Unknown
  Bacterial polypeptide expressing nucleotide sequence isolated from the Sargasso Sea
cggtgggcgctattcgttatggtcatccgttggtttgtccgtcatgatcgctatcggtagtgaaaatttttcccacatgttggccggtgcccatgcaatggattgtcatgtcaggcacgctgacttgccgcaaaatattggcgtgattatggggctgatccgtgtatggtgtcgtcgctatttgcaactgccagcttatggattgattccttatgaccagcgtttagtcgcgtttccagcatgggcacaacagctggaaatggagagcaacggcaaatctgttgatcggcagggtcatactttgcagttgcctgctggtcctttaatctggggcgcggtggggaccagtgcccagcatagtttttttcaatggctgcatcagtcggttgatatcaccccgatcgatattttggtagctatgaagctacccgttggactggatga

SEQ ID NO: 291194 - DNA, 262 bp, Unknown
  Bacterial polypeptide expressing nucleotide sequence isolated from the Sargasso Sea
agaagacaaagaaaatccttttaagtcagtcaaaggaaataacccatgttcaattttaaaaattaaatctatcgatctcaagagtttaggatttttaatagctttatatgaacataaagtctttattgaagcttctatacttggcatagatccttttgaccaatggggtgttcaattaggcaaaaagttagctttggaagcgaaaagtaataaaaaccttctggaagataatttttcttcaagtcttctccctaaatcctag

SEQ ID NO: 291195 - DNA, 505 bp, Unknown
  Bacterial polypeptide expressing nucleotide sequence isolated from the Sargasso Sea
tagagcagttttgtcatatatatggaaaatgcgctcatttccagattatgtccaacagcttgagatggaatctctaggaaaacaagctaatccaacttcagagtttaaaaatactggccaaataatttttggtggatatgggccaacagcccaacattcatattttcagctactccatcaaggcactcaagaagtatgtgcagacattatttcaagtaaagaaaatttaaaaagtttagcttatgctcaggcaattactcagtcaaaacttctttcaaatggagccaaagacttaaaagaagaagaaactataaatggcaatattccagtaaacctctttttgctaaaaaaagtagaccctttttcaataggatatttgttagccacatgggaacatagagtatatataacatcaataatgttaggaataaatgcatttgatcaatttggagttaacgcaggtaaaatccataccaagaagtatcttaaagaaaatggcggttaa

SEQ ID NO: 291196 - DNA, 946 bp, Unknown
  Bacterial polypeptide expressing nucleotide sequence isolated from the Sargasso Sea
tttctcaaaagacgacataaatactttagaacataaatttatagatgttttctcatcaatccaagaattagaaaatggagcaatctcaaatattgatgaaaatagacaagttggacattattggcttagaaatccagaaatttctccatcctctaaaataagagaggagattagttcagaaattaatgatatttctgaatttggtgaacaaattttaaatggaaatattaagaataagaataatcagaactatactgatgttctatggataggcattggtggaagtgggttaggcccattactcattacagagtcacttcaaaattgcactgaaggattaaatttttcttatatcgataatgttgatccttttttaattagcgaaaagttagaagaattatccgaaaaattatctacaacattattcgtagtagtaagcaaatcaggtggtactcctgaacctagaattgctatggaaattattaaaagtcattgtgagaacaattctcttgaatggaattctaatgccatagctataactatgaaagatagtaagttatttaaaaaagccactgctgaaaattggttaaaaatatttaatttgcaagattgggtaggtggaagaacgagcattaccagctcagttggattacttccattagcactaattaatgaaaacatatttgaatttattagaggtgcagctttaatggatgaggccacccgttcaaatgattttaaaaataatcccgcagcattattatcatctgcatggtacttaagtggtgatggtattggaaaaagggatatggtcgttttaccttatagagataggttacaggtatttagtaaatatcttcaacaattagtaatggagtcattaggaaagaaatttaataggaatggtgaagtagttaatcaagggatttccggtttttggcaataa

SEQ ID NO: 291197 - DNA, 368 bp, Unknown
  Bacterial polypeptide expressing nucleotide sequence isolated from the Sargasso Sea
aattgtttggggtgggtatggtcctcgagctcaacactccttttttcaacatttatttcaaggaaacagagaaaccaatagctactttattgcttcaaaaaatgacgacttgaacttcaaacaatttaaagggcaaactaaatctcttagagatggcacttttgacgaatctgactctcataagaaagttttacctaaaaggtatacaacgatactgttaaaaaatttatcaccaggatctttaggcgaattaatttcaatctgggaaaataaaaccatatttatgagtatgttttggaacattaatccattcgatcaatggggagttgaattaggtaaattaaatacaaagaaagaaattgaataaa

SEQ ID NO: 291198 - DNA, 586 bp, Unknown
  Bacterial polypeptide expressing nucleotide sequence isolated from the Sargasso Sea
atggctttatcaaagattaatcctacgaaactatcttcatggaaaaaacttgttcaacaatttgataaagagaataatttgcatattaatgacttttttaaagaagaaaataacagacttgacaagttttgtattagttgggaaaacttctacgttgacttctcaaaaaatagattaagtaataattcgtttaagcttttaactgatctatgcaaagaaaccaacctaaaaaataatattaagaaatattttaatggatctattattaatgaaactgagaatagagctgtccttcatactgccttaagatcatcagaaaatgatgaggtaaataaaactttaaataagataattaatatttcagatgaaataaataacgcaaagagattagggtattctggaaagaaaattacagacgttgttaatattggaattggaggttcacacttaggccctgagatggtaacagaagcacttttaaattatagccaaggaattaagccacatttcatctctaatatagatcctgatttcacatcaatactcttggaaaagttaaatccagaaactaccatttttataatag

SEQ ID NO: 291199 - DNA, 808 bp, Unknown
  Bacterial polypeptide expressing nucleotide sequence isolated from the Sargasso Sea
tatcaaaagaattaaaaaagacggctttaagaatattatttctttcggtattgggggttcatatgaaggaccaaaattacttcaagaatttacaaataagcagtcattaaaattaaattactattttgtatctgggcctgatagagatgaattcgattcaatattaaagccattaagaggggagaagaatttttatattttttcatcgaaatctctatcaacagatgaaactctgttatgtttgaaatggttaggacgagagagaaactcaaagaattcaatagttataactgcaaattcaaaaaaagctgtttcaattggtttctcggaaaattgcgttgtcccatttccagaatctgtaggtggaagatattctatttggtcgccaatatctttgagcgttggaatagaaaatgatttttcgaaattcttaaaaggtggctcagctgcagataaaatgatccttggcaattctagagaagataaacaatatcaaaagtttattaaagtattagcattttcagatttgtggttcagcaattttaaaaataagaagaacagaatagtgctttcatataactggaaattacgatcactaactaattatatccaacaacttgaaatggagtcacttggcaagagacccaatcctaaatctttgcttaaagagacaggacagtcaatatttggaggctttggatctactgcccaacactcttactttcaacttttacatcaaggtacagcagagttttgtactgatatagtttattcaaattccaaaattagtcccttatcatctgcgcag

SEQ ID NO: 291200 - DNA, 646 bp, Unknown
  Bacterial polypeptide expressing nucleotide sequence isolated from the Sargasso Sea
aatgggcaaaaaagcaatccaagatttttatttaggcggacatgaggcagacgaaaacatcttgagctcagaaagattagatgatgttgctagtatatatatgtgcgcccaagacattatgcacaacaatattttagataatcaaacaagtgcaattttagcatatgactggcccctaagagggttttataagtatgcacaacaactagagatggagtctaatggaaagcaagtagaccaaaacggagaaaggctagactatcaaacaaattcaattatttggggcggctatggcccggtttctcaacactctttttatcaacaaattttccaggggacaaaggatatgaacctatatttcatagcctcaagagaggaggaaaacaagcttaatacagcacaatactttgggcaaacacaaagcctgctagaaggcacagaaacagaaaaaacaccttacaagcaaaccaacagaagacgatttaccaccctggaaatggaaaaaatatcaccaagaacaatgggaaaccttatcgctacatgggaaaataaaaccatactcaacagccttatttggaagataaatgcatttgaccaatggggcgtggagcttggcaaggcaaacacaaagaaatacctaaagtaa

SEQ ID NO: 291201 - DNA, 900 bp, Unknown
  Bacterial polypeptide expressing nucleotide sequence isolated from the Sargasso Sea
ttcaagatctaaaaattgatattacaaggcaatcccttgataaagagataaaggaagatttgatagatcttgctaaagaaactaaaataaaaacaaaaataagtgaacttatgtcaggtgcaaaagtcaacttatctgaaaatcgttctgttgatcattttagtctaagaaaagaagaacgtttcaaaacacaagaatggaagaaacttctaaattttgttcaaaatatttcaagcaaaaataattttaaacatattgtgaacattggcattggtggatctgacttaggacctttaatggttaacaaagcgttgaaaagtttttataaagatcctgatatcttatatgtatccaatattgacccaacaaagatctctgaaatatttataaaatgtaatcccaaagaaactttatttataattacatctaaaagtttcaatacacttgaaactcttgaaaatgcaaaaattgtggcagaatggctatccaagcataaagttgctttaaatgattctatggttgcggttacatcccttacaaaaaaagcattagagtggggatttaacgattcaaatatctttgaaatatcagaaaatgttggaggacgttactctctttggtcatcagttggtatgtcaatatttattggtttgggggaagataattataaaaattttcttcttggggcaaggacaatggatgagcatttcataaatgaagaagttgaaaataatattccaattatccttgctttactgagaatatggaaccgaaattttttaaatagaaataatcattgcatagtaccttatactgacaatctttctaaattgcctgcatgggcgcaacaattagaaatggaaagcaatggaaaaggtgttgatattaaccggtgctaat

SEQ ID NO: 291202 - DNA, 692 bp, Unknown
  Bacterial polypeptide expressing nucleotide sequence isolated from the Sargasso Sea
tgaaaattggttaaaaatatttaatttgcaagattgggttggaggaagaacaagtattacaagctctgtgggattacttccattagctcttattaatgaaaatatatttgaattcattagaggtgcatcattaatggatgaggccacgcgtataagtgattttaaaaataatcccgcagcattattgtcatctgcttggtatttaactggagatggcgttgggaagagagatatggtcgtattaccatatagagataggttacaggtatttagtaaatatcttcagcaattagtaatggaatcattaggtaagaaatttaataggaatggtgaagtagttaatcaaggtatttccgtttttggtaataaaggatctacagatcagcatgcttatgttcagcaactgagagatggtattgataatttcttttgtatttttattgaattattagattctccatctactaatatttttgatgaaaaagagaatcctaaagaatatctttctggttttttgcaaggaaccagatcagcactctctagtgaagacagacaaagtatcactattactttagaaaagttaaattgtttttcactaggggccttaatcgctttatttgagagggctgtatccttctacgctgaattggtaaatataaatgcatatgatcaacctggagttgaagctggaa

SEQ ID NO: 291203 - DNA, 526 bp, Unknown
  Bacterial polypeptide expressing nucleotide sequence isolated from the Sargasso Sea
agtattgattatccaacagcaccagtaatatggggccaaataggcacaaatagccagcacgccttttttcaatttttacatcaaagcaatcagataattccatgtgaatttttgttaagtgctaactgtatagatgatggttattatgaaaagcatcatttgcaattaataataaattgtttggcacaatctgaagctcttatgcttgggataaaaaatgaagaaatagttgaagaaaaaaggaatcttcatcatcattgttatggaaatagaccttcaacaattttagtatacaaacaattaaccccaaaaatcttaggaaaattactcgctctttttgagcaccgaacatttgctgagggcttattatggaatgtaaactcttttgatcagtggggtgttgaattaggtaaaaaattagctacaaaactaactgaacattttaataaccaaaatcaaaatcaaaatttcagtaactctactttaaatttattgcacgaaataagaaaacttaaaaacttttgaa

SEQ ID NO: 291204 - DNA, 890 bp, Unknown
  Bacterial polypeptide expressing nucleotide sequence isolated from the Sargasso Sea
tggattaaatttttcatacatagataacattgatccgttccttataagcgagagattagatcaattatcagataaattatctacgactttatttgtaattgtaagcaaatctggaggaactcctgagcctaagattgcaatgaatataatcaagaatcatatagaaaataagaatcttgactggaactcaaatgctattgctataacaatgaaagatagtcaattatacaaaaaagctcaattagaaaaatggttaaaaatatttaatcttcctgattgggttggtggaaggaccagtattactagttcagttggcttgcttcctttaacttttattaatcaagatatttctgaatttattagtggtgcagcaataatggatgagttaactcgaaaaacaaatattaaggataatcctgctgctttattagcatctgcctggtttttctctggggatggggtaggcaaaagagatatggtcgttttaccttacagagacaggttacaagtatttagtaaatatcttcaacagttagttatggaatcactaggtaagaaatttaatagaaagggagaaatagttcatcaaggtatttctgtttttggcaataaaggttccactgatcagcatgcatatgttcaacagttaagagatggtatagataatttcttttgtatttttatcgaattattagattctcctgatatcaataactattttggctctgaaaatcctaaagaatttttatcaggctttttacaaggtacaagatctgcactatctaatgaaaatagacaaagtatcacaattaccctagataaattaaattgtttaactcttggagcattaatagctttgtttgagagagccagtttctttttatgctgaa

SEQ ID NO: 291205 - DNA, 892 bp, Unknown
  Bacterial polypeptide expressing nucleotide sequence isolated from the Sargasso Sea
agatagtaagttatttaaaaaagccaattccgaaaattggttaaaaatatttaatttacaagattgggttggaggaagaactagtattacaagctctgtgggattacttccattagctcttattaatgaaaatatatttgaatttattagaggtgcatcattaatggatgaggtcacacgtaaaagtgattttaaaaataatcccgcagcattattatcatctgcatggtatttaactggggatggcgctggcaagagagatatggttgttttgccttatagagataggttacaggtatttagtaaatatcttcagcaattagtaatggaatcattaggaaagaaattcaataggaatggtgaagtagttaatcaaggcatttcagtttttggtaataaaggatctacagatcaacatgcttatgttcagcagctgagagatggtattgataacttcttttgtatttttattgaattattagattctccatcgactaatatttttgatgaaaaagagaatcctaaagaatatctttctggttttttgcaaggaaccagatcagcactttctagtgaaaaaagacagagtatcaccattacattagaaaagttagattgtttttcactaggtgccttaatcgctttatttgagagagctgtttccttctacgctgaattagtaaatataaatgcatatgatcaacctggagttgaagccggaaagaaagcagccgcaaatattattgagtatcaacaaaaagtaagtaatttattagacgaaggaggagaatatactataaatgacataacttcactatttgatcattcagtgaatgaacctatatttttcatacttcgtgaaatgtgttttggtaatgatgattatttagtt

SEQ ID NO: 291206 - DNA, 742 bp, Unknown
  Bacterial polypeptide expressing nucleotide sequence isolated from the Sargasso Sea
aatgttgatccttttttaattagcgaaaagttagaggagttatctgaaaaattatcaacaactttatttgtagtagtaagcaaatcaggtggtacgcctgaacctagaattgctatggaaattattaaaagtcactgcgaaaacaattctcttgaatggaattctaatgctatagctataactatgaaagatagtaagttatttaaaaaagctacttctgaaaattggttaaaaatatttaatttgcaagattgggttggaggaagaacaagtattacaagctctgtgggattacttccattagctcttattaatgaaaatatatttgaatttattaaaggtgcatcattaatggatgaggccacgcgtttaagtgattttaaaaataatcccgcagcattattgtcatctgcttggtatttaactggggatggcgttgggaagagagatatggtcgtattaccatatagagataggttacaggtatttagtaaatatcttcagcaattagtaatggaatcattaggtaagaaatttaataggaatggtgaagtagttaatcaaggtatttccgtttttggtaataaaggatctacagatcaacatgcttatgttcagcagctgagagatggtattgataatttcttttgtatttttattgaattattagattctccatctactaatatttttgatgaaaaagagaatccaaaagaatatctttctggtttttgcaaggaac

SEQ ID NO: 291207 - DNA, 610 bp, Unknown
  Bacterial polypeptide expressing nucleotide sequence isolated from the Sargasso Sea
aggacgagaggcagacgaaaaccttttaaacgccagaacaccagacactcctgcaagtgtttatatgtctgcccaagacattctacacaacaacattttggacaatgaaacaacagcaatcctcgcatacgattggccactcagaggtttttataagtacgctcaacagcttgagatggagtcaaatggtaaacgagtagatcaaaatgggaataatatagattatcaaacaaacccaattgtttggggtggttacggcccggtatcgcagcactccttttaccagcaaatctttcagggtacaaaagacatgaacctatactttcttgcctcaagagagaatgaaaagaaactcaacacggcacaataccaagggcaaacaaatagtttatcagaaggaacaaaaaccaatgtcccaccacacaaacaggtaagcacaaggcgcttcaccaccatagaaatggaaagcatatcacctaggacagtaggcaatctaattgccacatgggagaataaaaccatacttaatagccttctttggaacgtcaatgcatttgaccagtggggtgtcgagctaggaaaagcaaacacaaaaaaatacttaaaataa

SEQ ID NO: 291208 - DNA, 598 bp, Unknown
  Bacterial polypeptide expressing nucleotide sequence isolated from the Sargasso Sea
tagttaccggctacgttatcttcctgcacatcttcagcagttaatgatggagagtttaggcaagtctgtttctactgaaggagagcctttgaaaataaagagtggtgttgccgttttgggggcaagtggaaccgatgctcagcattctttttttcaaatgctgcatcaaggtacagaagctataccagtagacctaattggctttgctcatctatcagatgaaaccagtcaggaacttatagccaatctaattgcccaagcagaaactctggcatttggacaagatgttgatgaaataggaaacccacttttgcctcataaaattctttccggagacaaaccctcgacagtgattctggctcctagcctttccccgtcaattcttgggcaattagttgctctttatgagcaccgaacagttagtgctgctgtgactttgggaattaacccttttgatcaatggggagttgaatttggtaagcagtctgcaatagaaatagcgaatgaactagcaactccagaaattgtttcaaatcgcgatagttcaactaaagctttaatggcgcgatataggcattggagagacgctactccctag

SEQ ID NO: 291209 - DNA, 442 bp, Unknown
  Bacterial polypeptide expressing nucleotide sequence isolated from the Sargasso Sea
attctgccggccaaagtcagccacgagctcaaagatcatcaccacagattagcagcgcactgctttgctcaaactcaggcattgatgcaaggcaaaacctttgatgaagccaaggctgaagtgttggcaagcggtgcatcagaagctgaagctattgctttggcaccacataaagtctcgccaggtaataagccaagcaataccttattgctgccggaattatcaccttattacttaggcgccttaatagcgctttatgagcagaaggtgttttgtcagggtgttttgtggaatatcaattcgtttgatcagtggggtgttgagctgggtaaacagctgtcgacgcctatttatcaggtgttatctgatcaacaaaaaaataactttgatgcgtccacagaggcacttatcgcaaaatttaagcagttgaacttgggctaac

SEQ ID NO: 291210 - DNA, 706 bp, Unknown
  Bacterial polypeptide expressing nucleotide sequence isolated from the Sargasso Sea
atggatagctccatgggggggcgtttttctatttggggaccaataaatttacttttttatctaatccatggaaaagataaatataaagaatttttaaaaggcgcagaaaaatcagatcaattgtctttgaataaagatattaatcaaaatccatcgctaactttatctattcaagatgtagttatgaataatgtatgtgaaattgaatctactcttgtaattaattatgactggaagctaagaaacttttatcaatatgtgcaacaagtagaaatggaatcaacaggcaaatctgtcgatcaaaatgggaaagagcttgattatcagactggcatgatagtttggggcggttttgggcctagatctcaacattctttctttcaacaagtttatcaaggcaccaaaaactataatctatattttgtggctactaaatcagatcaactaaattacaaacagtttcttggacaatcaaagtcattgaaatatggcaatgatcaggaatcagatataaataaaagagtttcaaaaagaaattttacaactattgagttaaattctttaactcctgaaaccttaggagaacttatggccatgtgggagaacaaagttatatttaatagcttcttctgggatataaacccatttgatcaatggggagtcgagctaggaaaaacgaatacaaaatctgaacttgataaataag

SEQ ID NO: 291211 - DNA, 1318 bp, Unknown
  Bacterial polypeptide expressing nucleotide sequence isolated from the Sargasso Sea
atgaaatttaactcatttattaaaagcttaagagaaaaaggcaattctcaattcagcaataatcaattatctactgatgtaatttgtatagatcagatttctcatccggtaaataatgatagaagggacttattttataaatatgctgaagcaaatgaattaattcaaaaatttaataatattgttattggagaaataggtaactttacagaaaaaaaatcagtaacccactttgaatataaaaaaggaactaaaaaaaactttgtagaagaccaaaggaatgtcttatctataactgaaaaaatcaaaagaaattttaaaagagttattatttttagtatcggcgggtcgaatcttggaccgtcgctaatgaatgatatttttaataagaatgatttagaaattatcttcataacaggaagcgatcctgatgaatattctagtatccaaatacaagaagatgatgctctagttatatcttcaaagtcctttggaacgctagaaacactatcatcatataaagaggtttgtggtaataatttttttcataatacttttgcaattacggcaaacaaatctaaagccttagattttggtgttcatgaagaaaatattgtttcttttgacccctcaacagggggcagattctcaatttggagtccaataaatctagttttatgtttattggagggagaaagaggatataaagattttttaaagggcggcaaggaaatggatgatgcgtgcttgaaaagcccagaggtaaatccagctttccagctttcagttcaagatattatttataacaatttattaaatgtagaaacgacccttgttgtgaattatgactataaacttagaaattttataagttttgcgcaacaggttgaaatggaatcaaatggtaaaagtattgattcaagtaatagtaaagttgattatcaaacaggctcaattatttggggtggttatggtcctgaatcacaacactcattcttccaacacgtatttcaaggaacaaaaaagtcaaataaatactttatttgctctcagtcaaataagctaaattacaaacagatggttgctcaaattgaatctttagttcaagggaatgagcaggaaacagacattcataaaaaaacaaatatttctggggctaccaaaattgagcttaaagatttatctccttattcaatagggcagctattatccctgtgggaaaataaaactatcttcaatagcattttttggaatacaaatgcatttgaccaatggggtgtcgaattaggtaaaattaataccaaaaagcaattgtaag

SEQ ID NO: 291212 - DNA, 906 bp, Unknown
  Bacterial polypeptide expressing nucleotide sequence isolated from the Sargasso Sea
agaaacttgatccaaaaaagactgtttttatagtctcttctaaatcatttaaaacagatgaaacaattgagagccttaaaaatgcaattaattggtcaggagatatgaataaatttattgcaataacagcaaataagaacgaagctcaaaaatttaatttcaaacatatcactgaatttgataaagaaattggtggaagatattcaatatggtctagaatatcttttgctgctgctttttttgctatgccagccaatcatgaaaaatcttttgacaatttctgcctaggtggctcaattgcagatagttatcttactgacgataaagattatcaaaaatttgtaaagatgttagccttttcagatatttggcttcataacgtcaaagaaaaaaatactagagcgatcttatcctatgactggaaacttagatcactgcctaattattttcaacaacttgagatggaatctctaggaaaaagatccaataaagattctgaattcaaaaaaactggtcagattatttttggaggatatggcccaatagcacaacactcatattttcaattattacatcaaggaactcaaaatatttgcgcagatataattttaaattcacaaaataaatatgataccttagcttattctcaaggaataacccaagcaagacttctatcagtgggagcaacaatccctctaaaagatgaagaaactattaatggcaatgttcctgttaatcttttcatttttgatggtattgatgcaaaaaaattaggatttctaattgcaacttgggaacatagagtttttataacctcagttatgttgcaaataaatccttttgatcagtttggtgtaaatgctggcaagatttatactaagaaatatttagctgataaagattaaa

SEQ ID NO: 291213 - DNA, 490 bp, Unknown
  Bacterial polypeptide expressing nucleotide sequence isolated from the Sargasso Sea
ttgtggaatttacgttcccttccagactatttccaacaattagaaatggaatcacttggaaaacctgctaatcaaggttcagattatgatcatacaggacaaataatacttggcggatatggaccaatagtacaacattcatattttcaacttctacatcaaggcactcaagagatttgcgcagatattatttcttcaaaagacgatgaaaaaagtttatcttatgctcaagcaatgactcagtctgaacttcttgcaaatggcgaaagtgatattcaattaaaaaatgaattcaagataaatggtaatattcctgtaaatttatttcttcttaataaatttgatgcattcaatttaggatatttaatagctacatgggaacatagaacatttgttacagcaacattgttagatataaatccctttgatcagtttggcgtaaatgctggcaagatttatactaagaaatatctagctgactcagattaga

SEQ ID NO: 291214 - DNA, 615 bp, Unknown
  Bacterial polypeptide expressing nucleotide sequence isolated from the Sargasso Sea
ttattaaatttcttgaaggaggtaatcaggctgatattgaaatacaagacagcaaagaatatcttgagtttattaaaaaactttctttttgcgacttataccttaataacaaaggtgtaaattctcgagttatattatcttatatttggaatttacggtcattgcctaattattttcaacaattagagatggaatctcttggtaagtcagccaatatagactctgaatttaaaaaaactggtcaaattatttttggtggttatggtcctactgcacagcattcttactttcaattattacatcaaggaacgcaaaacatttgtgcagacattattgcatgcagtcaaaacaaagatagtttggcctatgctcaagctataacacaatcaaaacttctatcgagaggagccgaagacttaaaaaaagaagagagaattaatggaaatgttccagtaaacttatttcttctaaaaagtctggatccttatactcttggttatttgattgcaacttgggaacatcgaacttacattacttcaacaatgttacaaattaatgcttttgatcaattcggagttcaagctggtaaacactttacaagaaaatttcattaaa

SEQ ID NO: 291215 - DNA, 1074 bp, Unknown
  Bacterial polypeptide expressing nucleotide sequence isolated from the Sargasso Sea
aatgcacaatatttattggaatttattaaaaaaaaatagagtaaaaagcaatgatagaagaatcgaaacactttttcattcagataagaatagattcaaaaaatttgctatagaaattgaggatttatattttgattattcaaaaacgaatatcgattcagaaacattaaaaaaccttatcgcctacgccaaaaatttaaaaataatggatagtattaatgctatgtttgagggtgaaaaaataaatgtcacagaaaaaagatctgctctacatactgcacttaggaattttaaagctaataatttaactaatttatatcaaataaacaaaaagttgttagttaggtttaaagacttatccaaattttgtaatcaaattagaaatggacaaaaaaaatcaggctcaggattgaaatttacagatgtagttaacatcggtataggaggatctgaacttggtccaaaattagttacagctgctttgtctgaatatcataacggtccaaaaattcattttgtttctaatatagattcttcggacatattaaaaatcattaaaaatttagatcctaataaaacacttttcataatatcatccaaatcttttactacgactgaaactattaataatgcaaaaaaagctttaaaatgggtttgtgaaattcttggatcaaatggtttaaaaaactttgtagcggtttgttctgcaaaagaaaaagcattagattttggtattttaaaagaaaatatttttgaatttgatgaatgggtgggtggaagattttcagtttggggccctattggtttgcccgtaatgttatcaataggaactgatcagttcaaaaatttcttggagggtgcttctcaaattgataatcattttaaaaatgaagagatatcttataatattccaataattttagcattaattggtttttggcattcttcaatatgtcagtattcttcaagagcaattctaccttatgatagtaaacttgaatatttaccaacatatttgcaacaacttgatatggaaagtaatggcaaatcagttaatcttaaggagaaagaata

SEQ ID NO: 291216 - DNA, 1330 bp, Unknown
  Bacterial polypeptide expressing nucleotide sequence isolated from the Sargasso Sea
aatgaattttttaaattttataaagactattgataaaaataagctatttaatgagtcagaacacaagataaaaacttcaaatatcttaatagatcaatcaaatcagaatatatctaaagaaacttataaaaattttcaaaaatttatcgatgacaataattttattgggcgttttcaaaaaattttagaaggagaaatatgtaatgccagtgaaaataaaccagcaacgcattttcagtatagggcagaaggaaataatttatatgaatcaaatctaaaaaatctaaaagctgtctctagtaaattaaaagataagaagattattgtattttttggtataggcggctcttatcttgctcctaatctacttaatgaagtgtttggcagttcaaataagaaaattatttttattactggaagtgatccagatgaatataaagatttagaaaaaaataatctaaatgatgctgcatttattttagccactaaatctttttctactacagagacattaacaagctatcaatcagtaacaaatggagaatttttatcagatacatttgcaataacttcaaatattgatgatgcaaaacattatggcattagtgatgaaaatattattcctatggatagctcgatgggagggcgtttttctatttggggaccaataaatttacttttttatctaatccatggagaagataaatataaagaatttttaaaaggcgcagaaaaatcagatcaattgtctttgaataaagatattagtcaaaatccatcactaactttatctattcaagatgtagttatgaataatgtatgtgaaattgagtctactcttgtaattaattatgactggaaactaagaaacttttatcaatatgtgcagcaagtagaaatggaatcaacaggaaaatctgttgatcaaaatgggaaagagcttgattatcagactggcatgatagtttggggtggttttgggcctagatctcaacattctttctttcaacaagtttatcaaggtaccaaaaactataatctgtactttgtgaccactaaatcagatcaactaaattacaaacagtttcttggacaatcaaagtcattaaaagatggcaatgatcgggaatcagatataaataaaagagtttcaaaaagaaattttacaactattgagttaaattctttaactcctgaaactttaggagagcttatggctatgtgggagaacaaagttatattcaatagcttcttctggaatataaacccatttgatcaatggggggttgagttaggaaaaacgaatacaaaatctgaacttgataaatag

SEQ ID NO: 291217 - DNA, 411 bp, Unknown
  Bacterial polypeptide expressing nucleotide sequence isolated from the Sargasso Sea
tttttcaacttatgcaccaaggaacaaaactaattccagcagattttattgcctttaaagagcccttatacaatgataaagaacaacataaaattttaacttcaaatttcttagctcagacaaatgctctattagttggtaatataaaatcgggtaatgaaattcataaaaatattgatggtaataaaccttctaatacaatacttattaacaggttaactcctcaaagccttggctcattaatagctatgtatgaaagtaaaatttttgtaataggttccattttgaacatttatagttttgatcaatggggtgttgagttaggaaaatcaatagctaaacagattttaaataatggcaaatctaacctagacgagtcatcttctcaaacttatgacaagctccaataaa

SEQ ID NO: 291218 - DNA, 1453 bp, Unknown
  Bacterial polypeptide expressing nucleotide sequence isolated from the Sargasso Sea
ctgaatcataagaatcgaaagtcgcaaaaagacaatctaatctataagaatgatcatataacaatagatgtaagtcgtaattttatagataaacagacgttgtctagactgtttaagttattaaaagatattgaaatcaaaaaagagataactaaattattttcaaataaattcaaaagtaaatcagaaaacaaatatgtctctcatatctttcttagaaactcacaacaaggtgcaaaaactataaatgatatgtgtaatatgtatgatagtataagaaaaaattcattaaaaaattttaccactagaaaaataaaaaatattgtacatattggtataggtggttctaatcttggacccaaatttgtatgtaatgctcttaaggattattctactaaagatttcaatatcaactttgtatcaagctctgatacaaaagaactagatgatgctataaaaaatctcgatttagaagaaactatttttattttttcatcgaaaagttttgttacaaaagaaatacttattaacctagattacataaagaaaattttgatatctaaatttgcttcttctgagattgtgtcccgacatttatttgcaataacttcagataaatctacagctatcaagaaaggtattgatgcgaacaaaattcttatcttctcaaagaatattcctggaaggttttcagtcacaagtgctctaagttttataattctacttcaaattggcaaggctaatttcaagaaattttataaagggataatcaaaatggacaatcatttcaagaggactaaaataagtaacaatattcctatgatattagctattatttcgatatggaatattaatttcttttcaataagaaatttttgtgtttgtccatacaattatagattgaaagatgccattgagtacatccagcagattgaaatggagagtaacggaaaatccagtgatatctatagcaatgaaattaatatagatacatcacctatcgtttttggccaagcaggaacagattgtcaacattctttttttcagatgattcaccaaggcagtcaggatattgctttagattttgttggcgtaatagacagcaatgataataaagtgtcatctaattttctgatatcgaatcttatcgctcaagccaatctttgcttttatggaaaagggagtcaaaaaaataacaagaaaattagaggtaataatccctcaaatataattctaatgaacagcgtgaatcctcatagtgttggtaatctgatatcaatgtacgagcataaaatattcgttgaaggtattttatggaatattaatagttttgatcaatggggcgttgaagagggaaagttactcgcatctaagtttattaataaaattaatcaatccaatagaaaagataccgataaaataatattacaacttcttaagactaagttttaat

SEQ ID NO: 291219 - DNA, 517 bp, Unknown
  Bacterial polypeptide expressing nucleotide sequence isolated from the Sargasso Sea
aaaaaaacaaaaatagatggcagccccgttaatgttaatacaggcaatgttatatggggtggatccggatcagatggacagcattcctattttcagttactccatcaaggatcatacacgataccgattgactttattgttgatgctggtgttagtgatgaccaaatggatacatacagtcttgcaaattgtttggcacaaagcgaatcattgatggctggaatgcaagaggcagatcctgagaagtctattgatggtgataagccaaacaatgttgttcttgttaataaaatttcccctcagtccattggccaattagtaagtctatatgagcataaagtatttgttcagagtgttatatatggtatcaatgccttcgatcagtatggtgttgagcttgggaaacaaattgcccaatcccttagtaaagtaatttctaagtcatcaagatacacaggaaaaaacctctcaactcgagctcttctttcgaaaataagagagtatagaaaaggctaaa

SEQ ID NO: 291220 - DNA, 502 bp, Unknown
  Bacterial polypeptide expressing nucleotide sequence isolated from the Sargasso Sea
aagaacagaattatactttcttataattggaaattacgatcactgactaattatatccaacagcttgaaatggaatcactaggaaagcagcctaatcctaaatctgtgtttaaagagacaggacagtctatatttggaggttttggatctactgcccaacactcctattttcaattgttacatcaaggtacagcagatttttgtacggatattatttattcaacttcaaaaattagtcctttattatccgcgcaggcacgaggccaagcttctttactttcttctgatttgtatgattctaataatttgctcgaaaaaactaatagtaattcaccggtgaatatgttccatttaaataatctatctcttgctagtcttggctttttgcttgcaacctgggagcatcgtgttttcacaacagcttgtatgctagaaatcaatccatttgatcaatatggagtttctgcaggaaaggttgctgcaaaaaaatttcttagttgat

SEQ ID NO: 291221 - DNA, 1404 bp, Unknown
  Bacterial polypeptide expressing nucleotide sequence isolated from the Sargasso Sea
catgcaaggtcaatcctggataccttcgggcggtgtgcaccatcagggcccgatgagcttcccggatttcagcgccagtgacgctcagattcaatggcagcgattctgtgacctcctttggtaccacgaggatctcggcatctggttggacatcagtcgcatgcatctcaatccgtctgatctggagcagctgcagccgaaattcgacaaagcgttcacggccatggcggagcttgaagccggtgccatcgccaaccctgatgaagagcgacaggtggggcattactggctgcggtctccgcaactggcgccaagtgaccaggtccgtgaccacatcgcctcggaaatcgatcagatcgagcagttcggtcaggatgtgatcaacggcgtgatcaaagcgcccggggggcaagccttcacggatgttctctggatcggcatcggcggcagtggtctgggcccactgctgatgatcagagctctccagaaacagggcgcagggctgccgtttcacttcttcgacaacgttgaccccaacggcatgagtgccgttctggctgatcttgacgatcgtctggcaaccactctcgtggtcaccgtgagcaaatcaggcggcacaccggagccccatctgggcatggagcaggcacgccatcgacttgagagccgcggtggccaatggtctgctcaggctgtcgccatcaccatggtcgacagcaaactcgatcgggaagccaaacaggacggatggctcaaacgcttcgacatgttcgattgggtcggcggcaggaccagcatcaccagtgctgtgggcctgctccccggcgctctgatcggtgctgatatccgcgattttctcgccggtgctgcgcagatggacgaagcgacccgtctggccgatctgcgtcgtaacccagctgcactgatggcggcttcatggtttgtcgccggcgacggcaagggactccgcgacatggtggtgctgccctaccgcgatcgtctcgaggtgttcagccgctatctgcagcagttggtgatggaatccctcggaaagcgtcttgatcgcgatggcaacgaggtcaaccaaggcattgccgtttatggcaacaagggttccacagaccagcacgcctacgtacaacagctccgggacggcgttgacaatttctttgccacgttcatcgaggttcttgaggatgtagatgatattccggtgatcaaggacgaattccccggtgatttcctcgatgggttcctgcagggaacgcggtccgctttgacggaaggaggccgtcagagtctcagtatcagcatgcgtcgctttgattcccgtcgacttggagcactgattgctctgtttgagcgcgctgtggggttctacggcgatctggtcaacatcaacgc

SEQ ID NO: 291222 - DNA, 1273 bp, Unknown
  Bacterial polypeptide expressing nucleotide sequence isolated from the Sargasso Sea
tttatctttgagaacgaaaatgtttcttttaggtcatatatagacgaatttactcaggaactatataaagaatttgatatgaaagctgaaagtttgggtttggattcaaaaatagaggatttattaagtggtaaaaaagtgaactatacagagcacttagctgcatggcatccaaaatatagaaataaatataatccaacttcaacagatactccttcaaacaaaaatcagcaaattaatctatccaatttgtataacttatgtatgaccgctaaaaatgtagttaccatagggataggcggttcatatgagggccctaaattgcttctcgaagctatagacctatctaattttgacaatagttttatatttataactggttccgatccatcagaatttcaactaaaaactaaaaaattagatccaaaagaaacaatttttataatttcatcaaaatcgttcaaaactgatgaaactatttcattgttacaagatgcaatgacttggtctggagatagcagcaaattcattgcaattacagctaatagtgaagaggcagaaaaatataatttaaataacattattgaatttgatcatgaaattggaggaagatattcaatttggtcagaaatttcatcattgatttattgcttaaaaaatgatgaatataatgcattcatggcgggtggcaaacaagctgataaagatttaaaagcagatgattcctacttaaattttataaaaaatttatcatacagtgacatttggtaccataattcaaaaaataagaattgtagagttattctctcatatatatggaagtacagatcatttgctaattatgctcaacaacttgaaatggaatctctaggtaagcagccttcaaaaaattctgaatttgataaaactggccaaataatttttggtggttatggtccaaccgcacaacattcatattttcaattgttacatcaaggtacacagaatatttgtgctgatatcattgcaaacaaagaagatgaaaaaagcttagcttatgctcaagcagtcacacaaatgcagcttttaacaaaaggcactaagtctttaaaaggacatcaaaaaatcaacggtaatacaccaaccaatctttttttatttaataaaataggcttatatgaacttggatatttaattgcaacctgggagcatagaacatttataacatctgttattttaaatattaatccttttgatcaatttggcgtaaatgctggcacagatttatactaag

SEQ ID NO: 291223 - DNA, 1030 bp, Unknown
  Bacterial polypeptide expressing nucleotide sequence isolated from the Sargasso Sea
atgtcacttcacaagataaatcctacagaaacgaaagcttggaagaaactaattgacgaaaaacataatttatcaactgaaacattaaatagtcttttctcaaaagaaagtaatagattaaattatttatcgattaaatgggattgttttgatgttgatttctctaaaaatattttaaatgagaagacatttaatcttcttaccgaacttgctgaagaatgtaaaatttctgattcaattaaaatgttgtttaatggtgataaaataaatgagacggaaggaagatcagtacttcatactgagttaagaaacttcaaaacatcaaattcatcaattgtgggagacagagaaaagattaaaagtttttcatccaaaattattaatggaacaattaagggttatacaggtaaaaaatttacagatgttgttaatataggtattggaggatccgacttaggtccaaaaatggcagttgaagcattaaagttttataaaaactcattaaatattcattttatttctaatgtagatggagaccacaataaggaggtattaaaagccttaaatccagagacaactttttttattgttgtttccaaaacatttacaactcaagaaactcttactaatgcaaatcttgctaaaaattggattcaaaaaaaattagacaccaaagaaattcaaaatcatttttgtgcgatctctacaaatattgatgcagtaaaggattttggaattgacgaagagtatatctttaaaatgtatgattttgtcggtggaagattttctatgtggggttctgttggactatctatttcaatttcaattggatacgataacttcaaaaagtttttaataggtgctgagaaaatggatatgcattttaaagaatctccaattgaaaaaaatattccgatatgtttagcgttagttggtatttggaatagtaattttttgggttcacatacacaaggaattatcccatatacagaatacctcaatctactgccaagttatttacagcagtcta

SEQ ID NO: 291224 - DNA, 1357 bp, Unknown
  Bacterial polypeptide expressing nucleotide sequence isolated from the Sargasso Sea
atgccatcatttaaaaacttagttgatgataaaaaaaacgccgaaccgggcgatgtcgtgacgacaaaaaaagcaggcgggttaatatttgattttagtggccagcgcttctccgaaacatatcttgattcatttatacagcatgtaaaagaagcaaaagtcattgaaaggtttgacgcaatttattcaggagaacaagcaaacacaacagaaaacagaccggttgaccactttggttacagaaaagaagacatcgccagagagcaaagggttttagatgaacaagagaaagcattggttctgagtgaacatatcaataagcaagaatatgaagcaatcatcttttttggtatcggcggctcacaacttgggcctgagctaattcaacaaacactctgttataacaaaaacaaaaaaatcgtttttataactggaagcgacccattagaggccgagcttaaaacaaaggacttagaccttgatgcatgcgcttttatcttggcgtcaaaatctttttgcaccatagagacattaaaatcatttgagctggtgacccaaaaaacacacatgcaaaacacatatgcaattacatcaaacatcgctggagcagaagccttcggcgtatcgcgcaaaaatatactgacctttagtgaggcaacaggaggcaggttttcgatttggtctccaatcaacctgcttttcttgatacagttgggcgaacaatccatagaagagttctatttgggaggacgagaggcagacgaaagccttttaaacgccagaacactagacactcctgcaagtgtttatatgtctgcccaagacattctacacaacaacattttggacaatgaaacaacagcaatcctcgcatatgattggccactcagaggtttttataagtacgctcaacagcttgagatggagtcaaatggtaaacgagtagatcaaaacgggaataatatagattatcaaacaaacccaattgtttggggtggttacggcccggtatcgcagcactctttttaccagcaaatctttcagggtacaaaagacatgaacctatactttcttgcctcaagagagaatgaaaagaaactcaacacggcacaataccaagggcaaacacatagtttatcagaaggaacaaaaaccaatgtcccaccacataaacaggtaagcacaaggcgcttcaccaccatagaaatggaaagcatatcacctaggacagtaggcaatctaattgctacatgggagaataaaaccattcttaatagccttctttggaacgtcaatgcatttgaccagtggggtgtcgagctaggaaaagcaaacacaaaaaaatacttaaaataac

SEQ ID NO: 291225 - DNA, 1390 bp, Unknown
  Bacterial polypeptide expressing nucleotide sequence isolated from the Sargasso Sea
tatgagcaacaaaaagtctgagattaaatttaattttaaaaatcatttaatagattaccaatctaatttaaaaggctttgatgaaaagatttttaataagtttgataaaaaatctaaagatttaaatttatttgaaaaaataaaagaactcaaagatggtaaaaaggttaatttaacagaaaataagtctgcaagacatatgcagcaaagagaggaatactcttttcctaattttggactagagacatttgcagacattaatgaccctcctgaattatatcaaagagatataaaatgggattcttctttagataataaaaaaccaaatacagtcaaccactatctttctgatattgataaaacatataaatataagaatattattgtcattggaattggcggatcttatgaaggaccaaaattaattctcgaagctcttagaggccctgaattaaattacaaaattgaatttattactggttcagaccctgaggaatttagatacaaaacatataatttgaaacctgaggagacttgtttttttatttcttccaagtctttcacaactgatgaaactattgaaaatttaaaaaccgcaataagttggtctaaagacattactaactttattgctattacatcaaatagaactgaggctgcaaaatatggaataaaaaatatattagagtttaataatgatattggaggcagatattcaatttggtccgttatttctcaaccagtttttgctggaaccaatggcgaattcttttcatttaatgaaggaggtcatctagcagataaagaccttcttgaaaatgataagtatctcgaatttattaaatatctatcttttagcgatatatattttaataacgagttaaataaaaattcaagagtagtgctttcttataattggagattaagatcttttgcagattatgtacaacaacttgaaatggagtcacttggtaagactccatgtaaagactctgaatttcaaaaaactggacaagttatatttggtggttatggaccaattgcacagcattcattttttcaattaatgcatcaaggaactcaagaactttgtgcggatattattgctgtcaaaaatgactctcttgcatatgcacaagcaatcacacaatcaaaactattatcagaaggatctgatgatttaaaagaaatagaaaaaattaacggcaatatacctacaaatctttttatattaaaagaactagatccatcaactttaggttatttaattgcaacatgggaacatcgagtttatgtaacttcggtgatgttacaaattaatgcgtttgatcaatttggtgtaaatgctggcaagatttatactaagaaatatttagctgataaagattag

SEQ ID NO: 291226 - DNA, 517 bp, Unknown
  Bacterial polypeptide expressing nucleotide sequence isolated from the Sargasso Sea
attttagataatcaaacaagtgcaattttagcatatgactggcccctaagagggttttataagtacgcacaacaactagagatggagtctaatggaaagcaagtagaccaaaacggagaaagggtagactatcaaacaaattcaattatttggggcggctatggcccggtttcacaacactctttttatcaacaaattttccaagggacaaaggatatgaacctatatttcatagcctcaagagcggaggaaaacaagcttaatacagcacaatactttgggcaaacacaaagcttgctagaaggcacagaaacagaaaaaacaccttacaagcaaaccaatagaagacgttttaccaccctggaaatggaaaaaatatcaccaagaacaatgggaaaccttatcgctacatgggaaaataaaaccatactcaacagccttatttggaagataaacgcatttgaccaatggggcgtggagcttggcaaggcaaacacaaagaaatacctaaagtaat

SEQ ID NO: 291227 - DNA, 973 bp, Unknown
  Bacterial polypeptide expressing nucleotide sequence isolated from the Sargasso Sea
aaattaattctagaagctctcagaggacctgatctaaattatagaattgaatttattactggttcagatcctgaggaatttagatacaaaacatataacttgaaacctgaggagacttgtttttttatttcttccaagtctttcacaactgatgaaactatagaaaatttaaagacagcaataaattggtctaaagaccttggtaattttattgcaataacgtcaaatagaattgaagctgaaaaatatggaatagaaaatatattagagtttaataatgatattggaggccgatattcaatttggtccattatttctcaaccagtttttgctggaaccaatggtgaatttttttcatttaatgaaggtggccacacagcagataaagaccttctggaaaatgataaatatcttgagtttattaaatatttatcttttagtgatatatattttaataatcagttaaataaaaattcaagagtagtgctttcttataactggagattaagatcttttgcagattatgtacaacaacttgaaatggagtcactaggtaagattccttttaaagattctgaatttcaaaaaactggacaagttatttttggtggttatggaccaatcgcacaacattcattttttcaattaatgcatcaaggaactcaagaactttgtgcagatattattgcagtaaaagataactctcttgcatatgcacaagcaatcacacaatcaaaactattatcagaaggggctgatgatttaaaagaaatagaaaaaattaatggcaatatacctacaaatctttttatattgaacgaactaactccaacggccttgggttatttaattgcgacatgggaacatagagtttatgtgacttccgtgatgttgcaaattaatgcgtttgatcaatttggtgtaaatgctggcaagatttatactaagaaatatctagctgataaagattaga

SEQ ID NO: 291228 - DNA, 922 bp, Unknown
  Bacterial polypeptide expressing nucleotide sequence isolated from the Sargasso Sea
tatgaatggagatttaaactcatgggataaattttgtaattatctttggtttgataaaaaattaaatatttggttagacataagcaaaattaatttcacaaatgaagaaataaaaaatttagaagagaaatttgtagatgtattttcatcaataaaagaattagaaaatggtgcaatctcaaatattgatgaaaatagacaagttggacattattggcttagaaatccatcaatttcaccatcttcaaaaataggtgaggaaattagcgcagatattgattcaatctctgaatttgggaaacaaattttaaatggagatattaagaataagaatcaacagaactatactgatgttctatggataggaattggtggaagtggtttaggaccattacttattacagagtcactgcagaagtgctctagaggcttaaatttttcttatatcgataatgttgatccttttttaattagcgaaaagttagaagagttatctgaaaaattatccacaacattatttgtagtagtaagtaaatcaggtggtacgcctgaacctagaattgctatggaaattattaaaagtcattgtgaaaataattctcttgaatggaattctaatgctatagctataacgatgaaagatagtaaattatttaaaaaggccacttctgaaaattggttaaaaatatttaatttgcaagattgggttggaggaagaacaagtattacaagctctgtgggattacttccattagctcttattaatgaaaatatatttgaattcattagaggtgcatcattaatggatgaggccacgcgtataagtgattttaaaaataatcccgcagcattattgtcatctgcttggtatttaactgggagatggcgttgggaagagagatatggtcgtattaccatatag

SEQ ID NO: 291229 - DNA, 1330 bp, Unknown
  Bacterial polypeptide expressing nucleotide sequence isolated from the Sargasso Sea
atgaattttatagaatttttaaaaaacattgataaggatagattatttgattcatcaaaacataaaatagagacttcaaatattttaatagatcaatcaaatcagagcatatctgaagagacttatagaagtttccaaaaatttattgatgataataattttgttcaacgtcttaaaaaagttcagaaaggagaagtatcgaatattagtgaaaataagccagcaactcattttcaatataggacagagggaagcagtctatatacatcaaacctaaataaccttagggatatatctaataaacttagagataggaaaactataattttctttggtattggagggtcatatcttgctccaaatttacttaatcaagtatttggcagtttagataaagaaattattttcattactggaagtgatcctgatgaatataaatatttagaagaaaaaagtttagaggacgctgcctttattttagctactaagtccttttctactacagaaacattaaatagttatgagtctgtaactaatagaaattttttatcaaatacatttgtagtcacttcaaatatcgatgaagcaaaactttatggtattagtgatgaaaatataattccgatggatagctcgatgggagggcgtttttctatctggggaccaattaatttgcttttttatttagtgcatggtgaagagaaatataaagaatttttgaaaggagcagaaaattcagatcaattatctttaaattcagatatcaatcaaaacccctcgctaactttatctattcaagatgtgatcatgaataatatatgcgggattgaatctacactcgtagttaattatgactggaaactaaggaacttctatcaatatgtacagcaagtagaaatggaatctacaggtaaatctgttgatcaaaatggaaaagatctagattatgagactggaatgattgtttggggtggtttcggacctagatcacaacattcttttttccaacaagtctatcagggcactaaaaattataatttatattttatcgttactagatcagaccagttaaattacaaacaattccttgggcagtcaaagtcattaaaagaaggcaatgaaggagaatcaaatacaaataagaaagtttcaagaagaagttttacaactattgaactaaattccttaacacctgaagctattggtgaacttatggctatgtgggaaaacaaagtgctatttaatagtttcttttggaacataaatccatttgaccaatggggcgtcgagctaggaaaaaccaatacgaaatctgaacttgataaataag

SEQ ID NO: 291230 - DNA, 866 bp, Unknown
  Bacterial polypeptide expressing nucleotide sequence isolated from the Sargasso Sea
tgccgcatttattttagccaccaaatctttttctactacagagacattaacaagctatcaatcagtaacaaatggagaatttttatcggatacatttgcaataacttcaaatattgatgatgcaaaacattatggcattagtgatgaaaatattattcctatggatagctccatcggagggcgtttttctatttggggaccaataaatttacttttttatctaacccatggagaagataaatataaagaatttttaaaaggcgcagaaaaatcagatcaattgtctttgaataaagatattagtcaaaatccatcgctaactttatctattcaagatgtagttatgaacaatatatgtgaaattgaatctactcttgtaattaattatgactggaagctaagaaacttttatcaatatgtacagcaagtagaaatggaatcaacaggcaagtctgtcgatcaagatgggaaagagcttgattatcagactggcatgatagtttggggtggttttggtcctagatctcaacattctttctttcagcaagtttatcaaggtaccaaaaactataatttatactttgtgatcactaaatcagatcaactaaattacaaacaatttcttggacaatcaaagtcattaaaaaatgccaatgatcgggaatcagatataaataaaagagtttcaaaaagaaattttacaactattgagttaaattctttaactcctgaaactttgggagagcttatggctatgtgggagaacaaagttatattcaatagcttcttctggaatataaacccatttgatcaatggggggttgagttaggaaaaacaaatacaaaatctgaacttgataaataag

SEQ ID NO: 291231 - DNA, 1564 bp, Unknown
  Bacterial polypeptide expressing nucleotide sequence isolated from the Sargasso Sea
attcaatggcagcgcttctgtgacctcctctggtatcacgaagatctcggcatctggttggacatcagccgcatgcacgtcaacccatcccatctcgagcaactgcaaccgggattcgacaaggccttcgcggccatggccgagcttgaagctggggccatggccaaccctgatgagcagcgtcaggtgggtcactactggctgagggcccctcagttggcgcccagtgaatcagtccgagaccatatcgccacggaaatcgatcagatcgagcagttcggtcgggatgtggtcagcggcgtcatcaaagctcccggggggcagcccttcacagacgttctctggatcggtatcggcggcagtggtcttggccctctgttgatgatcaaagctctgcagggccatggcgctggtctgccgtttcacttcttcgacaacgttgacccaaatggcatgagtgccgttctggctggcctggacgatcgactggcaacgacccttgtggtcactgtgagcaagtccggcgggacgcctgagccacacctgggcatggagcaggcccgccatcgggtggagtcccgtggtggccgctgggccgatcaggctgtcgccatcaccatgggcgacagcaagctcgatcgggaagccaagcaggacggctggctcaagcgcttcgacatgttcgattgggtgggaggacgcacaagcatcaccagtgcggtgggcttgctgccgggcgccctgatcggtgctgatatacgcgattttctcgctggtgctgcccagatggacgattccactcgtctggctgatctccgtcgcaatccagcagcattgatggcggcctcatggttcgttgccggggacggcaaaggacgtcgcgacatggtggtgcttccctatcgcgatcgcctcgaggtgttcagccgctatctccagcagctggtgatggagtccctgggcaagcgactcgaccgtgacggcaacgaggtgaatcaaggcatcgccgtctacggcaacaagggatccacagaccagcacgcttatgtgcagcagctgcgggacggtgttgacaacttctttgccaccttcatcgaggtgcttgaggatgtctccgatatcccgttggtcaaagacgaatgtcccggcgatttccttgatggtttcttgcagggaacgcggtcagcgttgacggaaagagggcgccagagcctcagcatcagcatgcgtcgctttgatgcgcgtcgtcttggtgcgttgatagctctgttcgaacgggctgttggcttctacggcgatctggtcaacatcaacgcttaccaccagcctggcgtggaagctggaaagaaagctgccgcggcaatccttgatctgcagagccggattgaagctgttctcaaagacggcgcaccacggaccgtcagtgaaatcaggcaggccgttggtgacgggagcgatgaggcgatcttctggatcatgcgtcatctcgctggcaatgatcggggctaccgggctgagggggattgggccaacccagccagcatgcggttcagttgcagctgat

SEQ ID NO: 291232 - DNA, 1429 bp, Unknown
  Bacterial polypeptide expressing nucleotide sequence isolated from the Sargasso Sea
gaattagaaaatggtgcaatctcaaatattgatgaaaatagacaagttggacattattggcttagaaatccatcaatttcaccctcttcaaaaataggagaagaaattagagcagatattaattcaatctctgaatttggaaaacaaattttaaatggggatattaagaataagaataatcagcagtatactgatgttctatggataggaattggtggaagcgggttaggaccattacttattacagagtcactgcagaagtgttctagaggcttaaatttttcttatatcgataatgttgatccttttttaattagcgaaaagttagaagagttatctgaaaaattatcaacaacattatttgtagtagtaagcaaatcaggtggtacgcctgaacctagaattgctatggaaattattaaaagtcactgcgaaaacaattctcttgaatggaattctaatgctatagctataactatgaaaggtagtaagttatttaaaaaagccacttctgaaaattggttaaaaatatttaatttgcaagattgggttggtggaagaactagtattacaagctctgtgggattacttccattagctcttattaatgaaaatatctctgaatttattagaggtgcatcattaatggatgaagccacacgtataagtgattttaaaaataatccagcagcactattatcatccgcatggtatttaactggggatggtattggaaagagagatatggtcgtattaccttatagagataggttacaggtttttagtaaatatcttcagcaattagtaatggaatcattaggaaagaaatttaataggaatggtgaagtagttaatcaaggtatttccgtttttggtaataaaggatctacagatcaacatgcttatgttcagcaactgagagatggtattgataatttcttttgtatttttattgaattattagattctccatctactaatatttttgatgaaaaagagaatcctaaagaatatctttctggttttttgcaaggaaccagatcagcactctctagtgaaaacagacaaagtatcactattacgttagaaaagttaaattgtttttcactaggtgccttaatcgctttatttgagagggctgtatccttctacgctgaattggtaaatataaatgcatatgatcaacctggagttgaagctggaaagaaagcagccgcaaatattattgagtatcaacaaaaagtaagtactttattagatgaaggaggtgaatattctataaatgacataacatcactatttgatagttcagtaagtgaacctatatttttcatactacgtgaaatgtgtttcggtaatgataattatttagttagaggcgattggtcaaatccaaattcattaattattcaaaaaataaattcttaaa

SEQ ID NO: 291233 - DNA, 1357 bp, Unknown
  Bacterial polypeptide expressing nucleotide sequence isolated from the Sargasso Sea
gatgccagcatttaaaaacttagttgatgataaaaaaaacgccgaacctggcgatgtcgtaatgacaaaaaaagcaggggggctaacatttgattttagtggtcagcgcttctctgaagcgtatcttgattcatttatagagcatttaaaagaagcaaaagtcattgaaaggtttgacgcaatatattccggagaacaagcaaacacaacagaaaacagaccggttgaccactttggttacagaaaaaaagacatcgctagagagcaaagggttttagatgaacaagagagggcattggttctgagcgaacatatcaataagcaagaatatgaagcaatcatcttttttggtatcggcggctcacaacttgggcccgagctaattcaacaaacactctgctataacaaaaacaaaaaaattgtttttataactggaagcgatccactagaggctgaatttaaaacaaaaggtttaaaccttgatgcatgcgcttttatcttggcgtcaaaatctttttccaccatagagacattaaaatcatttgagctggtgacccaaaaagcacacatgcaaaacacatatgcaattacatcaaacatagctggagcagaagccttcggcgtttcaagtaaaaatatactgacctttagcgaggcaaccggaggcaggttttcgatttggtctccaatcaacctgcttttcttgatacagttgggcgaacaatccatagaagagttctatttgggaggacgagaggcagacgaaagccttttaaacaccagaacactagacactcctgcaagtgtttatatgtctgcccaagacattctacacaacaacattttggacaatgaaacaacagcaatcctcgcatatgattggccactcagaggtttttataagtacgcacaacagcttgagatggagtcaaatggtaaacgagtagatcaaaacgggaataatatagattatcaaacaaacccaattgtttggggtggttacggcccggtatcgcagcactctttttatcagcaaatctttcagggtacaaaagacatgaacctatactttcttgcctcaagagagaatgaaaagaaactcaacacggcacaataccaagggcaaacacatagtttatcagaaggaacaaaaaccaatgtcccaccacataaacaggtaagcacaaggcgcttcaccaccatagaaatggaaagcatatcacctagaacagtaggcaatctaattgctacatgggaaaataaaaccattcttaatagccttctttggaacgtcaatgcatttgaccagtggggtgtcgagctaggaaaagtaaacacaaaaaaatacttaaaataa

SEQ ID NO: 291234 - DNA, 991 bp, Unknown
  Bacterial polypeptide expressing nucleotide sequence isolated from the Sargasso Sea
tttgaagatcgtcaggttttgcatactgctctccgtatactttccaatgagaatccacataatgaagttaaaaattgcctccaacgtatggaggtaatagtcaatcgtattcattcaggaaagtggaagggatttagtggtaaaaatatcaaggacatagttaacataggaatcggtggttcggatctaggtcctcgactcgtatgtgatgccttagaggacttcaaagttggtgagcataaaatgcattttgtgtcaaacgtagacccctcacactttgatgaggtaataagtgaactcaatcctgaaaccacaatctttatagttgcctcaaaatcatttaacacaccagaaactgcactgaatgccgcgattgcaaaaaaatggctcttgagagcctctgacgcgccggttgcaattgaaaggcatttcatagcaataacaggcaacaaaaatagtgctattaattttggcatggcggaagataacgtttttccagtttgggactgggttggaggcagatattcggtgtggtctgcgattggtctccctgtcgcgctttcagtcggtatggagagtttcattgcattccacgcgggtgcgcattcaatggacaggcattttcaagaagaatccgctgaaaagaacatgcctgtaatcatggccttgatcacagtttggtataacgcattttttaattgccaaagcagcgctgttgttccttatagtcatcggttaaaggaactgcccttttatctccaacagctaagtatggaaagcctgggcaaaagcgtaacaaaggaaaacgaccaggtttcaattaatacaggtgagattctatggggaacggttggaaccaatagccaacattcttatttccaattgctacaccaaggaactcaatttgtcccagtagattttgtagccatagctaaaacgcgcagcaaaagcgtgaccataaagagatgcacgatcatctccttgctaattg

SEQ ID NO: 291235 - DNA, 811 bp, Unknown
  Bacterial polypeptide expressing nucleotide sequence isolated from the Sargasso Sea
gtagcgttgcagttgggcatggagcagtttcaacaactgctcaaaggtgcccgtgatatggaccagcattttatcaatgcgccgcttgagcagaatatgccggtgattttggctttgttgggtgtttggtatatcaatgccaaaggctgtcaggctcaggctttgttgccatacagccattatttacgtttcctgccctcgtacgtgcagcaactggatatggaaagtaatggtaaaggagtggatcttgatggcaagccactcacagatgccacagctccggtaatttggggggatgcaggtaccaatggtcaacatgcttaccaccagttattgcaccaaagtgtattggctgtgccgtcagactttattctgcccgccaaagtcagtcacgagctcaaagatcatcaccacagattagcggcgcactgttttgctcaaactcaggctttgatgcaaggcaaaacctttgaagaagccaaggccgaagtactggcaagtggcgcatcagaagcagaagctattgctttggctccacataaagtgtcgcctggtaataagccaagcaacactttattgttgccagaattatcaccttattacttaggcgccttaattgcgctttatgagcagaaggtgttttgtcagggggttttgtggaatatcaactcttttgatcagtggggtgttgagctgggcaaacagctgtcgacgcctatttatcaggtgttatctgatcaacaaaaaaataactttgatgcgtccacagaggcacttatcgcaaaatttaagcagttgaacttgggctaac

SEQ ID NO: 291236 - DNA, 721 bp, Unknown
  Bacterial polypeptide expressing nucleotide sequence isolated from the Sargasso Sea
aaccttcacgacgctcgagacgatgacgaacgcgcgctcgctgcgcgactggttcatcgcacgcggctgccccgaggaagcgctcgcgaagcacttcgtcggcgtgtcggcgaacccggccgaagtcgtgaagttcggcatcgccgcggacaacgtgttcgaaatgtgggactgggtcggcggccgctattcgctgtggtcggcagtcggcctgtcgatcatgatcgcgatcggccccgagcagttcgacgagctgctggccggcgcgaacgacatggaccgtcatttccgcgaagcgccgctcgagcgcaacctgcccgtgctgctcggcctgatcggtatctggtaccggaatttcttcggttcgcagagctatctcgtcgcaccgtattcggaagcgctgcactacctgccgtcatacctgcagcagctcgaaatggagagcaacggcaaatccgcgcgcctggacggcaccttcgtcgactacccgacctccgcggtcacgtggggcgagccgggcaccaacggccagcacgcgttcttccagatgctgcaccagggcccgacgatcgtgccgatcgacttcatcgcggtgctgacacccgagcatccgctcgcgagccatcatccgaagctgctggcgaactgctttgcgcagagcgaggcgctgatgctcggccgcacgctcgatgaagcgcgcaaggtcgcggggccgggcaag

SEQ ID NO: 291237 - DNA, 853 bp, Unknown
  Bacterial polypeptide expressing nucleotide sequence isolated from the Sargasso Sea
aattcagtaagtaataccaaagccttcggtattccaaaggagcgtgtttttgattttgcggattgggttggaggaaggtactcgatttggggccctattggattatcattgatgcttgcaattggggtaaagaacttcgacgaatttcttgagggagcctttgaaatggaccagcatttcatggatgctcccgcggaaagaaatatgccaattatgcttgctttagtaggcatttggcataaccagatttgtggttaccacacgagagcagttttgccttacgagcaaagattatccaaattacctgcctacttgcaacagttagagatggaaagtaatggaaaaaatgtttccatggagggtaaaaaattaaattatcacacgggtccgattgtctggggcgagcctggcacaaacgggcaacatgctttttttcaattaattcatcagggaaccaggattgttccatgcgagtttttggtaggtgccatgggaaatgaaagctatcttgtcaaacatcatgatattttggttgcgaattgccttgcccagtcggaggcattaatgctcggactttctttatcggaggttatcgaaagaatgacccaaaaaaagggaaataatcaagaacttgaagctattgcatctcatcgagtatttccaggaaaccgaccctcgaccacactagtttattctaaacttagcccatcaactctaggaaaaattatagcactctacgaacatcgcgtctttgttgagggaataatacttggaattaacagctttgatcaatggggtgtcgagttaggtaaagttttggcggaagaacttactcaaattatgcgggaaaaaa

SEQ ID NO: 291238 - DNA, 805 bp, Unknown
  Bacterial polypeptide expressing nucleotide sequence isolated from the Sargasso Sea
caacactttgccaacgcgccgttcgaagaaaacttgccgttgacgcttggtatgttgtcggtatggaacgtctccttcttgggatgcccggcgcgcgccatcctgccgtactgccaagcgctcgccaagctcgcgccgcacattcagcaagtcgccatggagtccaacggtaagggcgtcgccatcgacggcacgccgctcgattacgagacgggtgagattgactttggtgaaccgggcacgaacggacagcactcgttttaccagctcatccaccaaggccgcaccattccgtgcgatttcatcggcatcgtcaagtcgcaacagagcgtctacctcaagggtgagatcgtgtccaaccacgatgaattgatgtgcaactttttcgcccaagccgacgcgcttgccgtgggtaaatccgccatcgagctccgcgccgagtccacgccggacgcgctcattccgcacaagacgttcaccggtaaccgtccatcgttatccatcatgctccccgaactcaacgcttacaccaccggccaactcttggcgctctacgaacaccgcgtcgcgacacaaggtttcgtctggggcatcaactcattcgatcagtggggcgtcgagctcggcaaggtgctcgcgtctcgcgtgcgcacctccatgaacgccaagcgcaccaagggcgacacgatgaccccggctgacggtttcaacccatctaccaccgcgctcctcaaccgctacctcgccggtaaggcggctttgatttacccagagcccaaggatgtgttcccgtgcgatttgatga

SEQ ID NO: 291239 - DNA, 825 bp, Unknown
  Bacterial polypeptide expressing nucleotide sequence isolated from the Sargasso Sea
cagagctgtcttgcacacagcgctcaggaatgtagaaagtaccccaatttatgtaaataaactagatgttatgccttctattttgcaaacgttggaaaaaatgaaagtattttctgaccgtatcaggtcgggtcagttttctggtcaaggtggtactataacagatgtggttaatattggtataggagggtctgatttaggaccagccatggttgttaaagctttagcaccatatcaagatggaccaaactgtcattttatttctaatgtggatgggtcacacattcacgacgtattatcaaaattaaaccctgaaaagaccttggttattgttgcttccaaaacattcaccacttcggaaactatcaaaaatgctcgaactgcctatgactggatgtctggaacagtgaatgagccgtctttgcaatttgctgctgtatctacagcagttcaaaaaaccgatgaatttggtatctctcgcgatcatgtttttggatttggagattgggttgggggtcgttactcactttggggtccaataggcctatcgataattatagctttaggagcagaagcctttgagacacttttaaatggtgctcatgaaatggatattcattttaaaactgctgagatgggaaaaaacttacccatattactggcgttaattggagtctggcacaatcaaatttgcaattattcaaccagagcagtgctgccctatgatcaaaggcttaacaaacttccagcctatttgcagcaattggaaatggaaagtaatggtaagagcgtagatcttgatggaaacctattgggttttcattc

SEQ ID NO: 291240 - DNA, 742 bp, Unknown
  Bacterial polypeptide expressing nucleotide sequence isolated from the Sargasso Sea
aacatcaatccaacgcagacctcagcctggcaggcactacaaaaacactttgaagaaatgaaagacgttactatcgcggatcttttcgcgaaagatagcgatcgtttcactaagttttccgcgacgtttgacgatctgatgctggtggatttctccaaaaaccgcatcactgaagagacgctggctaaactgcaggatctggcgaaagaaaccgatttggcgggtgccatcaagtccatgttctccggtgagaaaatcaaccgtactgaagaccgtgccgtgttgcacgtggcgctgcgtaaccgtagcaatacgccgatcatcgttgacggcaaagatgtgatgccggaagtgaatgcggtactggagaagatgaaatctttctctgaagcgatcatctccggaagctggaaaggctataccggcaaagccatcactgatgtagtaaacatcggtatcggcggttctgaccttggcccgttcatggtgaccgaagcgctgcgtccgtataaaaatcacctgaacatgcactttgtgtcgaacgtcgatggtacgcacatcgccgaagtgctgaaaaaagtgaacccggaaaccacgctgttcctggtcgcttccaaaaccttcaccacccaggaaaccatgaccaacgcccacagcgcgcgcgactggttcctggcgaccgctggcgacaacaagcacgtagccaaacacttcgcagcgctttccactaacggtaaagcgg

SEQ ID NO: 291241 - DNA, 709 bp, Unknown
  Bacterial polypeptide expressing nucleotide sequence isolated from the Sargasso Sea
tttgtgcgaagaaacaaatcttaaaaataatattaatcaatattttaacggagctattataaatgaaactgaaggtagagctgtacttcatactgctttgagatcatcaggaaatgatgaggttgacaagaccttaaataagataattaatatttcagatgaaataaatagtgcaaagaggtcagggtatagtggtaaaagaattacagatgttgtaaatattggaattggaggatcccatttaggcccagagatggtaacagaagcgctagcatattatagtaagggtgttaaaccacattttatctcaaatatagatcctgactttacatcaaagctcctgaaagacctaaatccagaaactacactttttataattgtttcaaaaacctttacaaccattgaaacacttgaaaatgcaaataaagtaagagcttggtttattgataattcaagtgaaattgcaataaaagatcattttatagctatttcaaataatactaaagctcctaaaaagtttggtatttctccagataatattctttcaatacctgactgggttgggggaagattttcattgtgggggtctgtaggacttattatttcaattgtcataggctctaaaaattttaaagattttcttaaaggtgcacatgaaatggatattcattttgaaaattctccatttgaaaaaaatattccagtagtc

SEQ ID NO: 291242 - DNA, 908 bp, Unknown
  Bacterial polypeptide expressing nucleotide sequence isolated from the Sargasso Sea
aaaacaaatcaaagattttttaatttctagatccattgaagatgtatcaaagcatttcataggtgttacgtcaaatattaaaagtgccgttgaatttgggttagataaagagaatatttttaacatgtatgattttgttggagggagattttctgtctggggttcagttggattatcagtttcattagcaattgggtatgaaaattttgaaaagtttcttaaaggggcaaataaaatggatgaacattttaaggtttctcgtctaaatcagaatattcccgtttgccttgcactcattagtatttggtataataattttatgaactgtgaaacagaggctgtattgccctacagtgaataccttaagtttttacccaactatttacaacaaatgttcatggagagtaatggaaaatacatagatagatcttctaaaaaagttgactatcaaacgggcacgattgtttgggggggcacaggaactaattcacaacacgcattttttcaattacttcatcagggaacaaaattaataccttgtgattttattggttttaaatcttcattacacggcaataatgaagctcataataaacttatgtcaaactttattgcgcaaactcaagcattaatgattggtggttcaatgggtgatagtccatttagaaaatttgaaggaaataacccttcaaatacaattttatttgataaagtcagtccagagtctttggggatgatattgtcaatgtatgaacataaagtttttgttcaaggaattatactcaatatattcagttttgatcaatggggtgttgagcttggtaaatcattggctaatacattattaacagaaatcgaatcaaaaaatatccttgatcatgatccttcgactgaaaatcttcttgata

SEQ ID NO: 291243 - DNA, 568 bp, Unknown
  Bacterial polypeptide expressing nucleotide sequence isolated from the Sargasso Sea
gacaaattgacgtcactagttgactacatccagcaattagaaatggagagcaatggcaaatcccatactaacgaaaatgaaaacctcaactattccacatcgccaataatttggggcggtgtcggcaccaacgggcaacattcgtaccaccagctattacaccagggtaccaatgcattttccgcgaacttctaccttgtagctgatcagggagaggagctcttagagcatcaagagtggctcatagctaatgctttagctcaagcaaaggttctaaaacatggaaacaaagcagaggaacaaagtcttaattacaaatcgctgatgggcaaccatccgtcctctacgatcttactcgataaaatcactccagaaaccataggtgcattactagctgtccacgagcataaagttttttgcgaaggcgctttatggcatataaactcttttgatcaatggggagtcgaacatggcaaaaatatcgcgcaagcaattcacgcaaaaatagttactagccgaggcgaatcgcaccggtcattttatgactcatacggtgagtttatttgag

SEQ ID NO: 291244 - DNA, 808 bp, Unknown
  Bacterial polypeptide expressing nucleotide sequence isolated from the Sargasso Sea
attttaggcattggtaccgaaaactttaaacagtttttacaaggggcccgcacgatagatgaacattttcttaacactgcaccagaaaataatttacccctcgttctcggaatgctcgaaatctggtatacatccgttttgaaatttggatcgcgtgcgataattccatatgatcatcgccttgaaggtttcgtatcgtatattcagcagttagaaatggaatcaaacggcaaatctgtagacaaagatggccagaaaatgacccaaaaaaccgcagccgttgtttggggctcagagggaacaaatgctcaacattccttcttccaacttcttcatcaaggcacgtcagttattccctgtgatttcttgatagctgctgtttccgatgaggaatttgccggacatcaagaggtgcttctggctaattgtctcgcacaagccagagctttgatgactggccgcagtctccaaaaaacaacaaaaaggctgagtgacctcgggctttccacccaaaatgcccgccgtcttgcaccgcattccacattcatcggcaatcgcccttcaacaatttttctattcaaacaactgacccctaatatattggggcaattgatagctatttatgagcacaaaactttcgttcaaggggctatttggaacatcaatagctttgatcaatggggtgttgaactaggcaaggaattaacaaatgaaatactgccgcttttaaagaacaaaattatcgaccctaacttagatcgatctacggctaatttgatagaagaagtttttaaattccgtaaataat

SEQ ID NO: 291245 - DNA, 851 bp, Unknown
  Bacterial polypeptide expressing nucleotide sequence isolated from the Sargasso Sea
tatgtttccaaaaaatcgacctacagggttgccctcttggcaagctcttaccagccattatgccaagctccaaaacaaaagcataagaagtctttttgatgcccacccagatcgggcaaacgcattctctttagaaaaatgtggcctctatctcgattattcaaagaatctgatagatgagagaggcttgaaactactaatggatcttgcgagagactcagcgctaggcacggccaaaaaagccatggaaacaggcgaaaaaatcaatgaaagagaggacaggtcggtgctgcattatgcgctaaggagccacaggcagtccattttgatggaaggtgaaaacataatgcctttggtcaaagacgagctggctaaaatcgaaaccattgcaaacgccattaccagcggtcactgggcaggtcacacaggcaaagaaattaaatacgtcgtgaatatcggtattggtggctcggatctaggaccacaaatggtgtgcaatgcacttaggccctattggagtggaattactccctactttctatccaatattgatgccgcccaatgggaggaaattcgcggggaaattgtagccgaagaaaccgtatttatcgtggcttctaaaaccttcactacagatgaaaccatgaccaatgcccgcaccgtgagatcatggtttatagaggaaatgggcacggatgaagcgcttaaaaagcacttttttgccgtttccactaacatcacggaagtggagaacttcggtataccgaagcaaaacatagtcggtttctgggattgggtgggtggacgcttctccctgtggtcgtccatcggcttgagtgtagcgttggcgg

SEQ ID NO: 291246 - DNA, 901 bp, Unknown
  Bacterial polypeptide expressing nucleotide sequence isolated from the Sargasso Sea
cgccatttaattgacgaagatgttatggtggcattgctgcaccttgctgaaagctgtaatttacagggccggattaacgatatgttttctggcgcaccaataaatatttccgaagatcgaccggtgcagcacatggctattcgcacttctgaataccggaaatctgaagcttatcaaacattggccgcctttgcagactcagtgcgacgagaccgtgacataacagcggtggtaaatttggggatcggtggatcagatttaggtccaaaaatggtcacgcaggcactcgccggttatcatgatgggccagtctgtcactttgttggtaatatttgcccaacagatttgcatgatgtactggtcacgtgtgaccccaaaaaaacattattcattatcacatccaaaacctttaccacagcagagacacttgccaatgccatggtggccaaacattggcttggccagcatggcattgatgctggcactgccatggtggcggtaaccggcgctgagacgctggcgcgagcatggggcattagaccagatcatatctttacttttgccgacggtattggcgggcgctattcgttatggtcatccgttggtttgtccgtcatgatcgctatcggcaatgaaaacttttcccgtatgttggccggtgcccatgcaatggattgccacgtgtggcaagctgatttgcagcaaaatattggcgtgattatggggttgatccgtgtttggtgccgtcgctatttacaactgccggcctatggattgatcccttatgaccagcgtttagttgcctttccagcatgggcgcaacagctggaaatggagagcaatggcaaatctgttgatcggcagggccatactttgcagttgcctgccggcccattaatct

SEQ ID NO: 291247 - DNA, 827 bp, Unknown
  Bacterial polypeptide expressing nucleotide sequence isolated from the Sargasso Sea
tttttggagggggcgtggaacgtggacgagcacttcgccaccgcgccgttcgagaagaacctgccggtgacgctgggcatgctcagcctctggaacgtctccttcctgaactgcccggcgagggccatcctgccgtacacccaggccctcgcgaagctcgcgccgcacatccaacaggtggcgatggagtccaacggcaagggcgtgagcatcgacgggcagcccctggattacgagacgggggagatcgacttcggcgagccgggcaccaacggccagcacagcttctaccagctcatccaccagggccgcacgatcccgtgcgacttcatcggcatcatcaagtcgcagcagagcgtgtacctgaagggcgagatcgtctccaaccacgacgagctcatgtgcaacttcttcgcgcaggcggatgcgctcgcggtgggcaagacggacgtgcagctccgctcggagaacgtcccggactcgctcatcccccacaagacgttcacggggaaccgacccagcctctcgatcatgctccccgcgctgaacgcgtacaccaccggtcagctcctcgccatctacgagcaccgcgtcgcggtgcaggggttcatctggggcctcaactcgttcgaccagtggggcgtcgagctcgggaaggtgttggcgagtaaggtgcggtcgagcatgaacgagaagcgcaccaagggcgagatgatgagcgactcggacggattcaacccgtcgacgaccgccatgctcaacaggtacctcgaggggaaggcgcagctcaagtacgatcagccggaggacgtcttcccgtgcgatct

SEQ ID NO: 291248 - DNA, 690 bp, Unknown
  Bacterial polypeptide expressing nucleotide sequence isolated from the Sargasso Sea
ctgttttaatggggcttattagtttgtggtataacaactttttttgttgtgagtctgaagcgatcatatcatactctgaatatttacaaaaattaccctcctacttgcaacaagcgtctatggaaagtaatggcaaaaatgttgacagaaatggtaaaaaagtaacacaccaaactggaaatattatatggggagggacagggacaaactctcaacacgcattttttcaattactacaccaaggaacgaaattaattccatgtgattttattggatttaaaacacctctctactgtgagaatgatcaacatgatattttaatgtccaactttttcgctcaaacccaagcacttttgaatgggaagagctacaagattgtcaaaagtgagttagagaaaaactctcaaaacgaagatttggcgccttttaaatcgtttgatggaaacagaccatctaattccatattaattgataagctaacacctgaagcattaggaagtttaatcgctttttacgaacacaaaatttttgtgttaggaattatttggaatatctatagttttgatcaatggggggttgaacttggaaaagagctggcttcatcacttttagatgatataagaacaaaaaaatctacatcgaaagatctttccactaaatccctaattaataattacaataaaggataat

SEQ ID NO: 291249 - DNA, 544 bp, Unknown
  Bacterial polypeptide expressing nucleotide sequence isolated from the Sargasso Sea
catatcgttgcaattggtatcggcggctcgttcttaggccctaagatcatgactgaggcgcttaagcctcacactgttgacgccgttaaagtacacttcgttgctaacgttgatggctgtcacattcacgacgtgctctcaagtgtagattttgaagaaacccttgttgttatgtcttccaagtcattcacgacacaagaaacgatacaaaatacactcactgcaaaagattggttcttaaaatcaggcggcacgcagcaagacatagctaaacatttcgttgcggtatcttcaaatgttaaagcggccactgacttcggaattagcgaagataacatcttcccaatgtgggactgggttggcgggcgctattcattgtggtctgctatcggccttcctatttcattagcacttgggtttgataactacaaagcactgcttgaaggtgcttttgaaatggatacccatttcaccaccgcgcctcttgaagagaacatgccggtactattaggccttcttggcgtttggtatcgcaacttctttg

SEQ ID NO: 291250 - DNA, 904 bp, Unknown
  Bacterial polypeptide expressing nucleotide sequence isolated from the Sargasso Sea
atgtctcgcctatctctcgattttagcaatctaacgacctttgtttctgaaaaagatctagaagccatatatccaaaagttctttcctgccacgaaatgttggagaatgcccaggggcctggatcgcattttttaggctggagaaagccagaaatttctaaaacagttttatctgaaattcatgaggtagcggaatctgtacgcgaactatgccaggtttttatagtaattgggattggtggctcctatattggttcgcaagctgggatttcttttttgaaatcctctttccctaatcaattatataaagagggtttgcctgagatctatttttctggtcacaatatcagctcggattatcacgcagacctgctagaattaattgaagatcgtgatatttgtataaatgtaatttcgaaatctggaacaacaacagaacctgcgattgcttttcgtttatttaaggagttaattgaaagaaaatatggcccggagaatgcaaagcaaagaataataattacaacagatgggagtcagggtgctttaaataatctagccatggcacagggctaccgtaaatttgttatacctgaagatattggcggtagattctcggttttgtctcctgttggtcttctgcctatgtcagtaactggaattgatatagcagaattaatatctggtgcttgtgtaggtcaaaaactgtattctgaaaattttaataatgatgcttatcaatacgcgggatttcgatacttgctttataaaaatggaatgacgactgaaattcttgcgacttttcatcctgcttttcattatttttcggaatggtggaaacaattagtagcagaaagcgagggaaaagacttgaaaggaatatttccagcatcggttagttcaccaa

SEQ ID NO: 291251 - DNA, 733 bp, Unknown
  Bacterial polypeptide expressing nucleotide sequence isolated from the Sargasso Sea
atgagcctttctaaaatcaatccaaaaaacactgaagcatggaaaatgttaattaaaaaaagggaagaaattgctggtatacaaattattgacctttttgattcgtcaaaaaataggataaaaaaattttctattgaatttgataaaatgtttttagatttttcaaagaacataatcaatgatgaaacttttgaactactacttaaattgtgtgaagattgtgaattgaaaaaaaatataaagtctcttttcaatggtgaaaaaatcaatgaaactgagaatagatcagttcttcacacagcattgagagattttaatttaaattctgaaattggcaaagaacttcttttggatagacaaaaaattgaaaaatttactaatgatattttatcaggcaaaaccaggggttcaacaaataaaaaaataaccgacatagtaaatattggaatcggtggatctgatctggggccaaatatggttgttgagtctttaaaattttacaaaacagatcttaattgtcattttgtatcaaatgtggatggagatcacctgaaagaagttctaaaattagtcgaccccgaaactactgtatttataattgtttctaagacattcacaacacaagaaacattaactaatgctaaaaaaatcaaagaatttcttataagtagatctattgaagatatttctaagcatttcataggagtcacttctaatataaaagtgcagtaaa

SEQ ID NO: 291252 - DNA, 868 bp, Unknown
  Bacterial polypeptide expressing nucleotide sequence isolated from the Sargasso Sea
gtggcagtttcaaataatttagacaaaacaaaagattttggaatttctagcgataaaatttttcctatgaatgattgggtaggtggaaggttttcgttatggagttcagccggaattacaattgctcttgcaattggtcaagataactttcaagaacttttaaatggtgctcaagaagttgattttcattttaaaacagcgaaatttaatgataatattccaaaaattttagccatgattggtatatggtatactaatttttggaatgctgaaacagaggctattgttccatacacggagtatttaaggagtcttccatcatatttacaacagagcgtaatggaaagtaatggaaaaaatgtaaatagagagggtgaaaaaataaattaccaaactagtccaataatttggggcgcaagtggcactaattctcaacacgcattttttcagcacattcaccaaggaacaaagttaataccaatagattttattgggtttaaaaattctttatttaaaaatgatgagcaccaaaaaaagctacttgcaaatttaattggtcaagtggatgcattaatgaaaggaaagaacgagggagaagttgaaaaagaattagtgtcaaagaaaataaatgaagatgaaattaaatttttaactccttataaagtttttgacgggaataaaccatcgaatacgataatttttgacaaagttacacctgaaaatataggtcgattgatcgctatttatgaacataaaatttttgttcaaggaatcgtatggaacatttttagttatgaccaatggggtgtcgaattaggtaaggaattagctgatgaaatccttaaaaaggataatcaaaactcctctt

SEQ ID NO: 291253 - DNA, 780 bp, Unknown
  Bacterial polypeptide expressing nucleotide sequence isolated from the Sargasso Sea
tggttggtggacgattttcattatggggctctgtagggcttgttatttcaatcgtcataggctctcaaaattttaaagattttctaaaaggtgcacatgaaatggatattcattttaaaaattctccatttgaaaaaaatattccagtagtccttgctttaattagtatttggtacaataatttttttaagtgtgaaactgaagctgtattgccttacagccagttcttaataaaacttcctgattatcttcagcaagcaagcatggaaagcaatggtaaaagtattgacagaagtggtaaaaaaataaattatgagactggatcaatagtatgggggtcaacaggaactaatgctcaacatgccttttttcaactaatgcatcaagggactaaaattataccatcggactttattgcatttaaaaaatcattacatggtgatactaatcaacttaaaattttaaactcaaactttttagctcaaacaaatgccttgatgactggtaaacaaacctccggtgatgatattcacaaaaatatagatgggaataaaccatcaacttcaatagttattaacaagttagacccgtcaagcattggatcattaattgcaatgtatgaaaataaaatttttacaattggatctattttaaatgtatttagcttcgatcaatggggggttgagttaggaaaatcaatagctaaagaaattttacttggtaatgatggttaccttgataaatccacaaaaaaaataagggatcaactaaaagattaaa

SEQ ID NO: 291254 - DNA, 844 bp, Unknown
  Bacterial polypeptide expressing nucleotide sequence isolated from the Sargasso Sea
tgctgtatctacggcagttcaaaaaactgatgaatttggtatttctcgcgatcatgtttttggatttgaagattgggtaggggggcgttactcactctggggccctataggtctctcgataactattgctttaggagcagaaacctttgaagctcttttaaatggcgctcatgaaatggatattcactttaaaactgcggagataggaaaaaacttacccatattactggctttaattggagtctggcacaatcaaatttgcaattactcaaccagagcagttctgccttatgatcagaggcttaacaaacttccggcctacttacagcaattggaaatggaaagtaatggtaagagtgtggatcttgatggaagtctcttgggttttcattccgctccagtggtctggggtgaagcaggtaccaatggtcagcacgcctttttccagttgttacaccaagggacgagagtaatcccctgtgaatttttagtggcggctcaatcacacgagatgtatttagatcatcatcacaaatcattgttatcgaattgttttgcacaatcagaagccctgatgcaggggcgcagtttagaggaagtgtattctaagttaagtagtgacgatatgaaccatgacaaatttgaggaaaaggcaaggcatagagtttttccgggcaaccgaccttctacaactcttttataccctaaattgacaccaaaaattttaggtaaaataattgcactttatgagcatagggtttttgtagagggaaaaattttagggataaatagttttgatcaatggggggtggaattaggtaaagaattagctactgggctagag

SEQ ID NO: 291255 - DNA, 673 bp, Unknown
  Bacterial polypeptide expressing nucleotide sequence isolated from the Sargasso Sea
aagcattttagagagagtgattttgaaaacaacatacctgtattgttagctttaataagtatttggtataataacttttttaaatgtgaaacagaagcaataattccgtatagtgaattgctaaaaaacttaccaaagtatttgcaacaagctagtatggagagtaatggaaagtcaactgacagaaataaccaaaaaattaattatgaaactggaggaattatatggggtgcatcaggaactaatgcacaacattccttttttcaactactccatcaaggaacaaggataattccttgtgatttcatcgcttttcaacaaccatattcaaaagatctagaacaacacaaaatccttattgcaaatttcctggctcaaacaaatgcattaatgttaggagaaaaaaaagctggtgggcataaatatattgaaggaaacaagccttccaattcattatttatcaacagcttaacgccttataatttaggagcattaattgctatgtatgagaataaaatattcactataggatcaattcttaatatatttagttttgaccagtggggcgtagagctaggaaaatcaatagctaaaggaattcttgatggagacactgatcttcttgacatgtctacaaagaaactcttcgacaggtataaagaggggaaataat

SEQ ID NO: 291256 - DNA, 807 bp, Unknown
  Bacterial polypeptide expressing nucleotide sequence isolated from the Sargasso Sea
gatggcctactaccagcagccccacgacgtcaccaccctgcccgcctggcaggccctgcagcagcaccgtgccgagatggccggtttcagcatgcgcgaggccttcactgccgatacaaggcgcttccagcgcttctcgctggatgcctgtggcctgctgctggactactcgaagaacctgatcgacgaacacagcctcgagctgctgatgcaactggccgagcaggccggcctgcacgaagccatcacggcgctgttcggtggcgagcacgtcaacgcctccgagggacgcgccgccctgcatacggcgctgcgcagcccggtcggccaccgcctggtggtggacggcactgacatcatccccgaggtgcatcgggtgctgaaccaggtcaccgaactggtcagccgcattcacagcggcctgtggcgcggctacagcgagaagccgatcaaggaagtggtcaacatcggcatcggcggctcgttcctcggtccgcaactggtctccgaggcgctgcgcccgttcacccagcgcggcgtacgctgccactacctggccaatatcgatggcagcgagttccgcgagctgaccgcccgcctcgacccggaaaccaccctgttcatcgtgtccagcaagtccttcggcaccctggagaccctgaagaacaccctggcagcccgtgactggtacctggccatgggcggcccggaagaagagctgcaccgccacttcatcgccgtgaccagcaaccgtgaggcggccatcgagttcggtatcggcgaggagaacatcttccccatgtggga

SEQ ID NO: 291257 - DNA, 730 bp, Unknown
  Bacterial polypeptide expressing nucleotide sequence isolated from the Sargasso Sea
atgagcaatctaactaattcaaatacttggaatgcattaaaaaaccaccaaaatcaaatcaagaaatattctttgagagaccttttccaagatcccaatcgatttttggattttagtattgaatcggatgattttttaattgattttagtaaaaacatcatcaacaagcagacaatgaatttacttttcaaacttgcaaatgaatccaaaattctggataaaattgaagatatgttcagcgcaaagaaaataaattggactgaaaaaagatctgttttacatactgcattaagagataaatcaaaaacccaaactttaatcaataacaaagatattaagtctgatattagagaaagcttaaataaaattagaatattctcaaataaagttcgagatggagtttggaaaggaagtactggtaaaaaaataaaaaatattgttaatataggtataggaggttcagaccttggaccaaaaatggtttacgaagctctctcttattacaatgatggtccatccattcactttgtaagcaatattgatgctagtgatatttcagagactttgaaaaaaattaatcctgaagaaacactttttcttgttgcatcaaaaacttttaccacacaagaaacgatgactaatgcagaaactgcaaaatcatggcttacaaaggcacttgacaagtcttcagtatcaaaacactttgctgcgatgtctacaaatataccag

SEQ ID NO: 291258 - DNA, 872 bp, Unknown
  Bacterial polypeptide expressing nucleotide sequence isolated from the Sargasso Sea
cgcgtggacgggccattccgggcagcgcatcaccgacgtggtgaacattggcatcggcggttcggacctcggcccgcgcatggtgtgccgcgcgttggagcaccttgccgtgccacaggtgcgcgtgcatttcgtctccaacgtcgacggtacggatttggccgaaacgctcgaccatctcaaccccggtaccacgctcgcgattgtctgttcgaagacgttcaccacgctcgaaacaatggcgaacgcgcacagcatgcgccgttggtttgtcgagcatggcgtagctgaagaccagctcaggcaccacttcgtcgctgtctccaccaaccgcgaggccgtcgtccagttcggcatcgacccggacaacatgttcacgttctgggattgggttggcgggcggttctcgctgtggtcggcggtgggcctgtcgatcgtgctggcaatcgggccgcagcaattcgaagcgatgcttgatggcgcgcgcgccatggaccgccacttcgccacggccgcgccgcgtgaaaacttgccgctcattctcgggatgctgtcggtctggtatcgcggcttcttcgacgcggcgagtgcctgtaccgtgccctactgcgcgccgctggagctgctaaccgacttcatgcaacagttggagatggagagcaacggcaaatccgtccaacgcaacggcgcggccatcgataccgacaccggccccatcgtctggggcacggccggcaccaacgggcagcatgcgtatttccagttgatccaccagggctcgcagatcgtgcccgtggatttcatcaccacactcgagccggtgcgcaccctgcccggccaccacgccaaactgctcgcgaactgctttgcgc

SEQ ID NO: 291259 - DNA, 664 bp, Unknown
  Bacterial polypeptide expressing nucleotide sequence isolated from the Sargasso Sea
atgtttgacaggctcaaggatatggccgccggattggccgggcaggatatcgtcgatctgttcgcgcaggacgatacacgggcggaggggttttccgcccggtttgacgggctgttgctggattattcgaaaacgctggtcacgaaagaggtgcttgccgcgctgatcgccctggcggaaacgcgaggcgtaacggcacgtcgtgatgcgatgttcgcagggcaggtgatcaacgaaaccgaggggcgcgcggtgttgcataccgcgttgcgcaacctcgatggggccccggtcatggtcgaagggcatgacgtgatgcccgaggtccgcgatacgctggcgcggatggaagcctttgcagaggatgtgcgcggtgggcgtttcaaagggcagggcggggcgatcaccgatgtggtgaatatcgggatcggcggatctcatctggggcccgagatgggcacgctggccctgcggccatatcatgacggtccgcgctgtcatttcgtatcgaacgtggacggggccgatattgccgacacgctggcggggctggacccggtcacgacgctgatcgtcgtggcgtcgaagtctttcacgaccgtggagaccatgaccaatgccgaaaccgcccgtgcctggatggccgaagcggtttccgatccgg

SEQ ID NO: 291260 - DNA, 340 bp, Unknown
  Bacterial polypeptide expressing nucleotide sequence isolated from the Sargasso Sea
gcactcgcagacaacacgttaaatgtgcactacgtgtcaaatgctgatggtgtacaaattgcttctgtacttaaaaatattgatcccgaaacaacattatttgttatttcgtcaaaaacatttactacatcagaaaccatgacgaacgctaaaacagcggtagattggtttttagaaacaacaaaagatgaaagcacaattgctaaacattttgttgcagtaagtacaaatttagaaaaaacagctgcctttggtattgctgatgaaaacgtattcactatgtgggattgggtaggtggtcgcttttcattatggagtgcgataggcttaccgattgcgc

SEQ ID NO: 291261 - DNA, 900 bp, Unknown
  Bacterial polypeptide expressing nucleotide sequence isolated from the Sargasso Sea
tattggaggctcttttcttggccctaaagtggtttctcaagccctacgtccatactggaaccaaggtttaaattgccattttgtggcaaacgttgatggcacttctatcagtgaaaaactgaagttgctcgattctgaaaccacactgtttatcatgtcttctaagtcctttggtacccaagaaacactgacaaataccttaacagccaaggcctggtttttagctaaaggcggcttacaatccgatgtggctaagcattttgttgcagtcacgtcaaacgtgactaaagcaactgagtttggtattgatgccgataacatcttccctatgtgggactgggttggtggccgctactcgctttggtctgccataggtctgcctattgcattattggtgggtatggataatttcagagccctactcaatggtgctcaccaaatggatgagcattttgccagtgcacccttggcagaaaatatgcccgtcatcatgggactactgtctctatggtatggtaatttttttaatgctcaatcccatgtggtattaacatacgatcactatctacgtggtctaccagcctacttccaacaactcgatatggaaagtaacggcaagtcagtcacactcgatggaactgacgttgattacagtacaggtcccgtaatttggggaggtgaaggtacgaatggtcaacatgcttaccaccaactcatccaccaaggtacagcattgatccctgccgactttattatgccgctgcaaagccataatcccattggcgtacaccatgatcaattagcatcaaactgctttggacaaacccaagcacttatgcaaggtagaaccttcgaggaagcgttagccgaattggcgaatagctcgttaactgatgaaga

SEQ ID NO: 291262 - DNA, 541 bp, Unknown
  Bacterial polypeptide expressing nucleotide sequence isolated from the Sargasso Sea
accggcccggtgatctggggcggcgtaggctgcaacggccagcacgcttaccaccagttgctgcaccaagggactcaactgatcccggccgacttcatcgtgccgatcgtcagtttcaaccctgtgtccgaccaccatcagtggctgtacgccaactgcctgtcccagagccaggcgctgatgctcggcaagacccgcagcgaggccgaaaccgagctgcgtgagaagggcctgccggaagccgaagtacagaagctggcaccgcacaaggtgatcccgggtaaccgtccgagcaacaccctggtggtcgagcgcatcagcccgcgtcgccttggcgcactggtggctatgtatgaacacaaggtgttcgtgcagagcgtggtgtggggcatcaacgccttcgaccaatggggcgttgaactgggcaaggagctgggcaaaggcgtgtacaaccgcctgaccggcgccgaagaaaccttggccgaagatgcgtcgacccagggcctgatcaactacttccgcggtcgtcaccgcggctgaa

SEQ ID NO: 291263 - DNA, 778 bp, Unknown
  Bacterial polypeptide expressing nucleotide sequence isolated from the Sargasso Sea
cagttgcatcaagggacctacaaaggttatcagggcgatgccattaccgatctgatttggattggtattggtggctcgttattaggcccacaaatggcctgtgaagctttggccccttttaaccaaagcccggtgcgtattcactttgccggcaatatagatggcgcagttgtttccgatgtagtcaaagctttaaaccctgcgactacgttggtgtttgtcgcctctaagtcttttggtactgaagaaaccaaacaaaacgctttggctgtgcgtcaatggttcactgacaaaggtgcagacaaagcagcgatagcgcggcatttctgggccacctcgtccaatatcaaagccgcagcggagtttggcatagtggctgaacatattctgccgatgtgggactgggtaggtggtcgttattcgttatggtcggccataggcttccctgtggcattgcaattgggcatggcgcagtttcaacaactgctcaaaggtgcccgcgatatggaccagcattttatcaatgcgccgcttgagcagaatatgccggtgattctggctttgctgggtgtttggtatatcaatgccaaaggttgtcaggcgcaagccttactgccctacagccattatttacgtttcctgccctcttacgtgcagcaactggatatggagagtaatggtaaaggggtggatgtcgatggcaagccacttacagatgccacagcgcctgtgatttggggggatgcgggcaccaatggtcagcatgcctaccaccagt

SEQ ID NO: 291264 - DNA, 658 bp, Unknown
  Bacterial polypeptide expressing nucleotide sequence isolated from the Sargasso Sea
atgcttccaaaaattgatcccacttctaccaggtcttgggagtccttgtatgaattagcaaaagcagattccggcgacattaaaagtctatttacagatccaaataggtttgataagttcagctttaaaaatggagaatttctttttgatttttcaaaaaataatatttctgaagctgtcttaagcaaccttcttgtgcttgccgatgaatgtcacttatcagatgctataagtgcccaattttctggatctcccatcaacgaaacagaaaatagagccgtattgcacactgcacttagagacctgaatgctcagaatgctaacgccaaaaaagttgagcaggagctaaataaaatcaaatccttttctgagcggcttttatcgggtaattggaaaggctactctggaaaaggaatcacaaatgttgtaaatattggaataggaggatctgatctgggaccaaagatggtagcctgtgcactgcgagatcactggtcttcaattacaccccactttatttccaatgtagatgcagcacagctagccgaagagctcgaaggactcaatcctgagactacactttttatcatcgcatccaaaacatttaccacacaagagaccatgacaaatgcagcaacagctaaaagctggttctaaa

SEQ ID NO: 291265 - DNA, 831 bp, Unknown
  Bacterial polypeptide expressing nucleotide sequence isolated from the Sargasso Sea
aatggtgactgaagctttaagtgtttactcacagggtattaaaccttatttcatttcaaatatagacccagattatacagaaaatttactgaaatcactcaatccagatacaacaatttttattattgtttctaagacatttacaaccattgaaactcttgaaaatgctaaaaaagtcagaaaatggtttattaaaaatgtaaatgaagaatcaataaaaaatcatttcatcgcagtttcaaataatactgaagatccaaaagaattcggaattgaatctaaaaatattctttctattcctgaatgggtaggtggaagattctctttgtggggttctgtaggtttaattatttcaatttgtattggatctaaaaattttgatgactttttaagaggagcaagagaaatggatctacatttcaaagaaactcctttcgaaaaaaatataccagtagtacttgccctaataagtatatggtacaacaacttttttaagtgtgaaactgaggtaattcttccgtataatcaattcctttgtaaacttccagattatcttcaacaagtaagcatggagagtaacggaaaaagcatagatagggaaggtaaaaaggtagattatgaatcaggaacaataatctgggggtcaacaggaacaaatgcgcaacatgctttttttcaacttatgcaccaaggcacaaaactaattccagcagattttatcgcctttaaggagcctttatatgatgatgttgaacagcataaaattttaacttcaaatttcttagctcagacaaatgctttattggttggaaatataaaatctgataatga

SEQ ID NO: 291266 - DNA, 607 bp, Unknown
  Bacterial polypeptide expressing nucleotide sequence isolated from the Sargasso Sea
ccaacactttattgatgaaaagaacaaaatcaaaaacatcccgatagtcagcgcattattttctatttggaaccgcaactttctgggttctcatagccatgcacttttagtttacaacgataaattgaagtcattggttgactacatccagcaattagaaatggagagcaatggcaaatcccattctaacgaaaatgaaaccctcaactattccacatcgccaatagtttggggcggtgtcggcaccaatggacaacattcgtaccaccagctcttacaccagggtaccaatacattttccgcgaacttctaccttgtagctgatcagggagaggagctgttagagcatcaggagtggctcatagctaatgctttggctcaagcaaaggttctaaaacaaggaaacaaagttgaagaccaaagccttaattacaaatcgctgacaggcaaccatccgtcctctacaatcttactcgataaaatcacgccagaaaccataggtgctttactagctgtccacgaacataaagttttttgcgaaggcgctttatggcatataaactcttttgatcagtggggggtcgaacatggcaaaaatatcgcacaa

SEQ ID NO: 291267 - DNA, 807 bp, Unknown
  Bacterial polypeptide expressing nucleotide sequence isolated from the Sargasso Sea
agacccctcacactttgatgaggtaataaatgaactcaatcctgaaactacaatctttatcgttgcctcaaaatcatttaacacaccagaaactgcactgaatgctgcaattgcaaaaaaatggctcctggaaagctctgacgcaccggttgcaattgaaaagcatttcatagctataacaagcaacaaaaatggtgctattgattttggcgtggcagaagataacgtttttccagtttgggactgggttggaggcagatattcggtgtggtctgcgattggtctccctgtagcgctttcagtgggaatggagagtttcatcgcattccacgcgggtgcgcattcaatggacaggcattttcaagaagaatccgctgaaaagaacatgcctgtgatcatgggcttgattacagtttggtataacgcattttttaattgccaaagcagcgctgttgttccttatagtcatcggttaaaggaactgcccttttatctccaacagctaagtatggaaagcctgggcaaaagcgtaacaaaggaaaacgaccaggtttccattaatacaggtgagattctatggggaacggttggaaccaatagccaacattcttatttccaattgctccatcaaggaactcaatttgtcccagtagactttgtagccatagctaaaacgcgcagcaaaagcgccgaccataatgagatgcacaatcatctccttgctaattgtctaagtcagagcctcgccctcatgaaaggaaattctgaaagcgaagaagcacaaaaaaaggtaactggtaacaaacc

SEQ ID NO: 291268 - DNA, 492 bp, Unknown
  Bacterial polypeptide expressing nucleotide sequence isolated from the Sargasso Sea
gcgagacttgtccaataatatggggagggcttggttctaatgctcaacactctttttaccagttgttgcatcagggaaccgagaggacatcaatagacttttttcttccgatactatcgggcggcttagaaaaagagcagcaggatgtattaacaacaaattgcttggcacagagttgggctttggctgaggggaattcgtcaactaacgccgagacgccacatcaacattgtttcggtaatcgtccaagttcattagttgtttttgagaaactagaccctaaaactcttggaaagctgattgcattgtatgagcataaagtttatgtgcagggacttatctgggatgttaatagttttgatcagtggggagtggagctaggtaaaagcttagcaacagaagtgaacgggctgctctcgcaagaactatcaaataaaccgcctccagccttgcaggaagtaattataagattacgtaggtggaaaatatgag

SEQ ID NO: 291269 - DNA, 368 bp, Unknown
  Bacterial polypeptide expressing nucleotide sequence isolated from the Sargasso Sea
tttgccccatcaccatgatttattaattgccaattgtttagctcaatctgaagcgttaatgaatggtcgcattagtgataacgctaatagttttgaaagctaccgcgaatttcccggaaacagaccatcagttacaatagtatatccaaaattaactccaaaagttttgggtacgttaatagcgctctttgagcatcgcacttttgtcgagggtactgtttggggtattaattcttttgatcagtggggtgtagaactcggaaaagatctatctaatgatttattatctatcattcaaaagaaatctgctagtaaagctttaaatcagtcaactgcaggcttattgtcaacattgatgaaagaataat

SEQ ID NO: 291270 - DNA, 787 bp, Unknown
  Bacterial polypeptide expressing nucleotide sequence isolated from the Sargasso Sea
ttcatcgcacgcggctgccccgaggaagcgctcgcgaagcacttcgtcggcgtgtcggcgaacccggccgaagtcgtgaagttcggcatcgccgcggacaacgtgttcgaaatgtgggactgggtcggcggccgctattcgctgtggtcggcagtcggcctgtcgatcatgatcgcgatcggccccgagcagttcgacgagctgctggccggcgcgaacgacatggaccgtcatttccgcgaagcgccgctcgagcgcaacctgcccgtgctgctcggcctgatcggtatctggtaccggaatttcttcggttcgcagagctatctcgtcgcaccgtattcggaagcgctgcactacctgccgtcatacctgcagcagctcgaaatggagagcaacggcaaatccgcgcgcctggacggcaccttcgtcgactacccgacctccgcggtcacgtggggcgagccgggcaccaacggccagcacgcgttcttccagatgctgcaccagggcccgacgatcgtgccgatcgacttcatcgcggtgctgacacccgagcatccgctcgcgagccatcatccgaagctgctggcgaactgctttgcgcagagcgaggcgctgatgctcggccgcacgctcgatgaagcgcgcaaggtcgcggggccgggcaaggaggcgctcgcgccgcatctgacgttccccggcaaccgcccgacgacgacgctgctcgtcgatgcgctgacgccgcgcacgcttggcgcgctgatcgcgctgtacgaacacaaagtgc

SEQ ID NO: 291271 - DNA, 1013 bp, Unknown
  Bacterial polypeptide expressing nucleotide sequence isolated from the Sargasso Sea
tgatccttctgaactgaaatttaaattatcttcaataaatgcagagtcaacattggttattgtatcatcaaaatctttttcaacttcagaaacaatgctaaattcgaacgctacattagattggttaactaaaaatattggaaaagataatgctttaaagcagagagtagcaattacatcaaatttaaaaaatgcccttaaagaaggttttaaagaagaacaaatttttctttttgatgaatgtattggaggtagaacatccatttggtcaagtataggtcttcctctagttatttctattggaagtaaagaattcgaaaattttcttactggtgccagacaggttgatatccatgttaaaaaacagccaataaattcaatcccatgtactatggctttattaagttatattcaaagaaactattttgaagctacaagccaagctataattccttatgattctaatctagaattttttccttcttaccttcaacaattagaaatggagtcaaatgggaaaagtgttaaaaatgatggtaaatttttgacaaaaccctcctcacctttaatttggggtggaattggaacaaatgctcaacattcttttttccaaatgcttcatcaaggacttgaaaaaataccaattgatatcttattatcacgaaaaccagtttttgacgcaactaaagatgaattaataagacatagagtattggcagcaaatgctcttgcgcaatgtgaagcattgtcattaggcagtaaaaataacaacaaaaatttaaatttttttggtggaagatcagtaagtttactttcttataataaattaaatcctcataccttaggatctttaatagcgttatatgagcataaggtcatgtttcttgcaggtctttgggaaataaatccttttgatcaatttggtgttgaattaggaaaagaatatgctaaatcaatattaaataataaagaaaaaaacaaaggtgtatcatcaaaattattggatgaattat

SEQ ID NO: 291272 - DNA, 761 bp, Unknown
  Bacterial polypeptide expressing nucleotide sequence isolated from the Sargasso Sea
aatggcagttgaagcattaaagttttataaaaactcattaaatattcattttatttctaatgtagatggagaccacaatgaagaggtattaaaaaccttaaatccagagacaactttttttattgttgtttccaaaacatttacaactcaagaaactcttactaatgcaagtcttgctaaaaattgggttcaaaaaaaattagataccaaagaaattcaaaatcatttttgtgcgatctctacaaatattgatgcagttaagaattttggaattaacgaagattatatttttaaaatgtatgattttgtaggtggaagattttctatgtggggctccgttggactatctatttcaatttcaattggatacgataacttcaaaaagtttttaataggtgctgagaaaatggatatacattttaaagaatctccaattgaaaaaaatattccgatttgtttagcattaattagtatatggaatagtaattttttgggttcacaaacacagggaattattccatatacagaataccttaatctattgccaaattatttgcagcaatctatgatggaaagtaacggaaaaaatattgatcggtctggtaaaaaaattaattatagtactgggaacataatttgggggggcactgggacaaacactcagcacgcatttttccaactaattcatcaaggagataaattaattccttgtgattttataggttttaaaaattctcttcatgggaacaaagacagtcata

SEQ ID NO: 291273 - DNA, 919 bp, Unknown
  Bacterial polypeptide expressing nucleotide sequence isolated from the Sargasso Sea
atgcctcaaaaaatggagaaggcggtctcaagcatacatttctggagaatggaaaggatttacgggtcaaaagattaaagacatcgtaaatataggaattggtggttctgatttaggaccgttactcgtttgcgatgccttaactgacttcaaagttagtgacttaaatatgcatttcgtatcgaacctagacccttctcactttgatgacgtgatagagatgctaaaccctgaaactactctctttattattgcctctaaatccttcggcactttagagactgagcagaatgcttcttttgcaaaaaagtggctgatagcatcgtctaaatcgagcgatgcaattgacaagcatttcatagcgataaccagcaacctatctggcgcagccaattttggcgtagcaaaagagaacatttttcccatttgggactgggtcggcggcaggtattcagtctggtctgcagttgggctccctatcgcaatctctgtgggcatggataactttgttgattttcttgctggcgcacattctatggacaaacattttgtagaaaacgacccagaaatgaacatgcctgtaataatggcattaataacggtttggtacggtgcgttttttaattgttgtagccacgctgtcgttccatacagtcatcggttaagggaactacctttttatctccaacaactctgtatggagagtttagggaaaaatataacaaaggataacgagcctgttttgacaaggacgggagagatcgtgtggggaacagtcggcacaaatagtcagcattcgtatttccagctgctacaccaaggtactcaatttgtccctatagattttatggtggtagctaaaaccgccagcaggagcattaaccataatgaaagacacaatcatctcctggccaattgt

SEQ ID NO: 291274 - DNA, 712 bp, Unknown
  Bacterial polypeptide expressing nucleotide sequence isolated from the Sargasso Sea
atgtcattaaaaaaaattgatccaactaaaaccaagtcatgggataatttaaactctcactataaaacaatcaaatctagctcaattagtagtttttttaaggaaaacccttttaggtctgatgattttaagattgaatgggaggatttttatgttgatttttcaaaaaatataataaattccaaaacaatcaaattattaattgaactatgtaaagaagttgaccttaaaaattcaatagataaatattttagtggtgtaaaaattaattcaactgaaaatagatctgttcttcatactgctctaagatctaaagaaaaaatttttttagaaaatattgacatcagtaaaaacgtcaaggaagtaaaaagaaagctaaagaaattttctaataaaattatttctggaaaatttaaaagctcttctgaaaaaaaaattactgatattgtaaatattggtattggtggatcagatcttggaccagtaatggtgacccatgcactaaaacactactcaaaccaccttaaaatccactttatttcaaatgttgatggtgatcatgttgttgaaactctaaaaaaaattgatcctgaaactacactgtttattattgtttcaaaaacatttactacacaggaaacaataaccaatgccaattcagttaaaaaatggtttttatcaaaatatcccccaatggagatgtttcaaaaca

SEQ ID NO: 291275 - DNA, 934 bp, Unknown
  Bacterial polypeptide expressing nucleotide sequence isolated from the Sargasso Sea
tacagaactaagaaattttaaatcaaaaattcaatcaataataaacgacaggaaaaaaattcaaagtttatgcgataaaattataaatgggaaactaaaaggacaaactggggaaaaatatactgatattgtgaatattggtattggaggttctgatttagggccaaaaatggcagtagaagctttaaaattttataagaatcatttgaatatccactttatatctaatgttgacggagaccatatagctgatattttaaataaactaaatcctgaaactacatttttcataattgtctcaaagacatttacaactcaagaaaccattaccaatgcaagtattgcaaaagaatgggttataaataatttaaaaacaaatgaaattagtaatcatttttgtgcagtatcatccaatctaaatgctgttgaaaattttggtatcaacaaggatcttatttttagtatgtatgattttatcggaggacgattttcaatgtggggatcagttgggctttccatagccttatctgttggatatgataattttgaaaaatttttgaagggtgctgaaaaaatggataaccattttaaaaatgcctcatttgaaaaaaatataccaatatgtttggctttgataggaatttggaacagtaattttttaaattctgaaactcaagcaatcataccttataatgaatctttatgttttttaccaaattacttacaacaagctatgatggaaagtaatggaaagaatacagacaggtctggaaataaaattgattacaatactggaagtattatctggggcggtacaggtactaatacacaacatgcattttttcaactaatacatcaaagtaataaattaattccttgtgattttataggttttaaaaaatctcttcacggaaataccaacagtcataataag

SEQ ID NO: 291276 - DNA, 1639 bp, Unknown
  Bacterial polypeptide expressing nucleotide sequence isolated from the Sargasso Sea
gatgactatcttgacccaaagcacaacctggaaggcgttagcagcccatagccagcagatcccgcatatgcgggaactctttgcaggcgatcctgcacgctttagcaacatgtcgctttctacctgtggcttatttttagattattcaaaaaatagagcaacacctgagactctcaacttgctgctgacactggcgcaagaagccaagcttgacgctaaaatcaaggcgatgtttgccggtgatatcattaacaccaccgaaaaacgtgccgttttgcataccgcactacgcagtaccgcggaccaatccatcattgccgaaggtcaagatatcgttcctgaagtacagcaaacgctgaacaagatgcagcagtttgtcacttcagtcacctcaggacagtggaaaggctacacaggcaaagccattaccgatattgtcagtatcggtatcggtggttcattccttggccctaaaattgtttcccaagccttacgcccatactggataacaggtctcaattgccattttgttgcaaacgtcgatggcacctcgatcagtgaaaaactcaagctgctcgatcctgaaaccacgctttttatcatgtcgtctaagtcttttggtacacaagagacgctgaccaacaccttaacggccaaagcgtggttcttagctaaaggtggttcacagtccgatgtcgcgaaacactttgttgccgtgacctctaacgtggcaaaagcaactgagtttggtattgatgccgctaatatcttccctatgtgggactgggttggaggtcgctattctctgtggtctgccattggtttacccattgctttactcatcggcatggataacttccgctccctattaaagggtgcgcaccaaatggatacccattttgccactgcgcctttagcggaaaatatgcccgtcatcatgggactattctcactgtggtatggcaatttctttaatgctcaaagccatgtggtattgacctacgatcattatctgcgcggacttcctgcctacttccaacaactggatatggaaagtaacggtaaatcagtcacgctcaatggtactcatgtggattacagcacaggtcctgtgatttggggcggcgaaggcacaaacggtcaacacgcttaccatcagttgctgcatcaaggtactgcattaattcctgctgatttcattatgccgctgcaaagccataaccctatcggtgaacaccatgatcagttagcctctaactgctttggacaaactcaagcactcatgcaaggccgtaccttagatgaagcgctggctgaattgagcaagagcaacttgagtgatgaagaaaagttacttatcgccaaacacaaagtcatgccgggcaataagccaagcaacactctgttaatggataagctgactccagaaaccttaggcgcactgattgcgctctatgagcacagaacctttgtccaaggcgccatttgggacatcaactccttcgaccaatggggtgttgagcttggcaaaaccttaggtaacgacgtcctcgcccgtataggtgcagatcaagaagcgactgcgttagatgcttcaagcaatggcttaatcaatctttatcgacggggcaaaatctga

SEQ ID NO: 291277 - DNA, 1317 bp, Unknown
  Bacterial polypeptide expressing nucleotide sequence isolated from the Sargasso Sea
gttgaggaataaattaataaaagaaataaaagattactaccaagtggtgaaaagtcgtcgcattgaatcattatttttggagaagaataggttcaagaaattcagcagagaagcttctggaatatttttagatttttcaaaaacgaatatagataatgttcaattagatttactaatgaaacttctttcaaatagttcattttctactgctcgtgaagatttgttcgagggaagaaaggtaaattatacagaaggcaagcccgccctgcatactagcattagatctccattacagcccattctggtaggcaacaaaaatgttgcggaagagctactggcagagcaaaagaaaatgatcgaattttgtgagcggatacaatctggttcaatagtaagtgctaccggaaaacgattcacagatgttgtaaatattggcataggcggttcacaactaggccctgagatggtcatcaatgcgctcaaaacttcaaagaatctactaaatattcattttctttctaatatagatccatcaaatctaattgatgttcttgacaacttgaatcctgaaacaaccttatttgttgtagtttcgaagagttttaacaccttagaaactttaaagaatgctacctctgtagaaaaatggttgcgagagcatttaaaatctggagtttccgttcaaaagcactttgttgcagtcctatcagacacaaataaaatagaaaatttttcgtttcaatttggctataaattcaaaatccatgattttattggtggaaggtattctttctggggagtagctggaatatcaataatgttagggttaggtgtggataattttagtaagatcttagcgggtggcgcgagtatggataggcattttcgtcatagtgaggtggatgaaaatttacctgctttgcttggattaattggtgtatggcattcctctttttgtaattataccaatctagccattctcccatatgaaagcaggttagaattttttccaaggtatattcagcagttgcagatggaaagtaatggaaaaaattcttcaagatacagcgagacagtttcaagcttaatgagccctgtggtttggggggatataggaacaaacagtcagcactcttttttccagtacttgcatcagggaacacatacagttccaattgagttcatagtgggcagatctagttctgtaggtttagatgaagaacatcatgatttgcttaaattaaactgcgttgctcaatctgaggctttgatgtcaggaaatagtgataatgaagaatcttcacccatgtctattga

SEQ ID NO: 291278 - DNA, 1624 bp, Unknown
  Bacterial polypeptide expressing nucleotide sequence isolated from the Sargasso Sea
atgacgctgaattcgctccccgcctggactgcccttcaatcccacttcgagcaaatccgccatgctcgcctgcgcgactggttcgcgccggaaaacgaccacgcgccgacgcgtgccgaacgcttcacgctcgcgggcggcggcctcgcggccgatttctcgaagaaccgcatcaatgacgagacgctgcgcctgctcgtgcagctcgcgcgcgacgcgggcgtcgaagcgcgccgcgacgcgatgttcgcgggtgagatcgtcaacccgacagaaggccgcgccgcgctgcacaccgcgctgcgcgcgaccgatccgcgagcgccgttccacgcgcagatcagcgccgagcgcgcgaagatggcgaccttcgcgcgcgccgtgcgcagcggcacgtggacgggctacaccggcaagcgcatccgccatgtgatcaacatcggcatcggcggctccgatctcgggccgaagatggtcgtacatgctttgcactacgtcgcgacgcccgacatcaccacgcacttcgtgtcgaacgtcgacggcgccgatctcgcacgcgtgctcgaacaggtcgacccggaagaaacgctcgcgatcatcgtgtcgaaaaccttcacgacgctcgagacgatgacgaacgcgcgctcgctgcgcgactggttcatcgcacgcggctgccccgaggaagcgctcgcgaagcacttcgtcggcgtgtcggcgaacccggccgaagtcgtgaagttcggcatcgccgcggacaacgtgttcgaaatgtgggactgggtcggcggccgctattcgctgtggtcggcagtcggcctgtcgatcatgatcgcgatcggccccgagcagttcgacgagctgctggccggcgcgaacgacatggaccgtcatttccgcgaagcgccgctcgagcgcaacctgcccgtgctgctcggcctgatcggtatctggtaccggaatttcttcggttcgcagagctatctcgtcgcaccgtattcggaagcgctgcactacctgccgtcatacctgcagcagctcgaaatggagagcaacggcaaatccgcgcgcctggacggcaccttcgtcgactacccgacctccgcggtcacgtggggcgagccgggcaccaacggccagcacgcgttcttccagatgctgcaccagggcccgacgatcgtgccgatcgacttcatcgcggtgctgacacccgagcatccgctcgcgagccatcatccgaagctgctggcgaactgctttgcgcagagcgaggcgctgatgctcggccgcacgctcgatgaagcgcgcaaggtcgcggggccgggcaaggaggcgctcgcgccgcatctgacgttccccggcaaccgcccgacgacgacgctgctcgtcgatgcgctgacgccgcgcacgcttggcgcgctgatcgcgctgtacgaacacaaagtgctcgtgcaggcaacggtgtgggacatcaatccgttcgaccagtggggcgtcgagctcggcaagattctcgggaaggtggtggaagccgacctgacggccgagtctgtcgatccggcgaagcacgactcgtcgaccaccgcgctgatcgagcgcgcccgtgcggcgctgaagcgctgat

SEQ ID NO: 291279 - DNA, 1558 bp, Unknown
  Bacterial polypeptide expressing nucleotide sequence isolated from the Sargasso Sea
atgcctttaaataagctagatccatcaaaattaaattcatggaaggcactaggctctcaattcaagaatgagaactcaataactattgaagagcttatggaagagccaaataggttggataatttttctattgaatgggaagaatttattttagatttcagcaaaaataggataagtaaagggacgctagatcaattagtcaatttatgtaatgaaagtaaattaaaaaataatattgaaagttattttaaaggcgatataataaatgaaaccgaaaaaagatcagttctccatacagctttaaggtctcaaaaacacgaatctaatgagattagtcaaatagtaaatgagttaagagaacaaatcataaatacagctgataaaataaatagtggggatagagttggttattctggaaaaaaattcactgatgtagtgaatataggaattggcggatctcatttaggacaagaaatggtagtagaggctctttctttttgttctaagggcataacaccacattttatatccaacatcgatcctgattatacttcacaggtattagaaaagctcgatccagaaactacactttttattgtagtttcaaagagttttaaaactattgagactattgaaaacgcaaaaaaaagtaaagaatggttcatttcagaatcaaaaggtcaaaatattagagatcattttattggaatctctaataatacttctgcagctaaagaatttggaattaataaggacagtatatttccaattccagaatgggtgggaggtagattttctttatggggatccgcaggcttaataattgctatatcaattggttcagaaaattttagagaattgttaaatggtgccaatagcatggataagcattttagagagagtaattttgaaaataatatgcccgtattattagctttaataagtatttggtataataacttttttaaatgtgagacagaagcaataattccttatagtgaagtgctaaacaaattaccaaagtatttgcagcaagctagtatggaaagcaatggaaagtcaacagacagaaatagccaaaaagttaattatgagactggaggaattatatggggcgcatcaggaactaatgcacaacattctttttttcaactacttcatcaggggacaaagttaatcccttgtgattttatcgcttttcaaaaaccacattcaaaagatctagaacagcacaaaattcttattgcaaatttcctggctcaaacaaatgcattaatgtcaggacaaaaaaaagaaggagcgcataaatatattgaaggaaataagccttccaattcattatttatcaacagcttaacaccttataatttaggggcattaattgctatgtatgagaataagatattcacagtgggatcaattctcaatatatttagttttgaccaatggggtgttgagctaggaaaatcaatagctaaaggaattctctatggagattcagattctctagatatctctacaaaaaatctcttaacgaaatataataaagagaaataac

SEQ ID NO: 291280 - DNA, 1219 bp, Unknown
  Bacterial polypeptide expressing nucleotide sequence isolated from the Sargasso Sea
aaagccatcgagcacgtggtcaacatcggtatcggtggctctgacctgggcccggtgatgatcaccgaggcgctgcgcccctacaagaaccacctgcagatgcacttcgtctccaacgtcgacggcacccacatcgccgagacgctgaaaaaggtcgacccggaaaccaccctgttcctggtggcctccaagaccttcaccacccaggaaaccatgaccaacgcccacagcgcccgcgactggttcctgaaagccgccggtgacgaggctcatgtagccaagcacttcgcggccctgtccaccaatggcaaggccgtggccgagttcggtattgacaccgccaacatgttcgagttctgggactgggtcggtggccgttactcctcctggtccgccatcggtctacccatcgccctgtcactgggcttcgagaacttcgaagccctgcaccaaggcgcctacgagatggacatgcactttgccaccaccgccttcgagcagaacgttcccgtgctgctggccctgatcggtatctggtacaacaacttctacggcgccgaaaccgaggccatcctgccctacgaccagtacatgcaccgcttcgccgcctacttccagcagggcaacatggaatccaacggcaagtacgtggatcgcaacggcaacaaggtcgactaccagaccggccccatcatctggggtgagccgggcaccaacggccagcacgccttctaccagctgatgcaccagggcaccaagctgatcccgtgcgatttcctggccccggccatcagccacaaccccatcggcgatcaccatcccaagctgctggccaactacttcgcccagaccgaggccctggccttcggcaagagcaaggaacaggtggaagcggagttcctggccatcggcaagaccctggacgaggtcaaggacctggtgccgttcaaggtgttcgacggcaaccgcccgaccaactccatcctgttcaaacagctgacccccaagaccctgggtgccttgatcgccatgtacgagcacaagatcttcgtgcaaggcatcatctggaacatcttcagcttcgatcagtggggcgtggagctgggcaagcagctggccaacaagatcctgccggagctgaacactgccgaacccatcagcagccacgacagctccacaaacagcctgatcaacacctggaaggcgtggaaggcctaag

SEQ ID NO: 291281 - DNA, 1033 bp, Unknown
  Bacterial polypeptide expressing nucleotide sequence isolated from the Sargasso Sea
tattgtttcttccaaaacattcaccacttcggaaactatgaaaaatgctaaaactgcctataactggatgtctggagcggtgagtgagccttccctgcaatttgttgctgtatctacggcaattcaaaaaactgatgaatttggtatttctcgtgatcatgtttttggatttgaagattgggtagggggtcgttactcactctgggggcccataggtctctcgataattattgctttaggagcagaagcctttgtgtcacttttgaatggcgctcatgaaatggatattcactttaaaactgcggagataggaaaaaacttacccatattactggctttaattggagtctggcacaatcaaatttgcaattattcaaccagagcagttctgccttatgatcaaaggcttaacagacttccggcctacttacagcaattggaaatggaaagtaatggtaagagtgtagatcttgatggaaatctgttggattttcactctgctccagtggtctggggagaagcaggtactaatggtcagcacgcctttttccagttgttacaccaaggcactagagtaatccctagtgaatttttagtggcggctcaatcacacgagatgcatttagatcatcatcacaaatccttattatcaaattgttttgcacagtcagaagctctgatgaagggtcgcagttttgaggaagtatattctaagttaagaagtgatgatatgaaccatgacgaatttgaaaaacaggcaaggcatagagtttttcctggcaaccgaccttctacaactcttttataccctaaattgacaccaaaaattttaggtaaaataattgcactttatgagcatagggtttttgtggagggaaaaattttggggataaatagttttgatcaatggggggtggaattaggtaaagaattagctactggactagagaattttttaataacaggttccgacagtaacgatttaaacgcttcaacccaaaacttagtccaggttgcaaaaactatgcagtag

SEQ ID NO: 291282 - DNA, 1450 bp, Unknown
  Bacterial polypeptide expressing nucleotide sequence isolated from the Sargasso Sea
atgtctttatcaaagaagaatccaacaaatcagaaatcatggtctaacctaaaggatctttataatcaagaaaataatttacatatcaacgattattttaatagtgaaaagaatagacttgaaaattttacagctagtttaaatgatttacatattgatttttctaaaaatagaatcagtaaaaaagcttttgatttactaattgaactttgtgaggaaacagaccttaaagaaaatatagataagtattttaatggatctgcaataaatgaaactgaaaacaggcccgttctgcataccgcattaagatctaaaaacactaactcaaccgaaatatctgaacaggtaaaaaatactttatcaaaaattagaactatttcagatgagattaataatggtattaaacttggacattctggcaaaaaaattgaaaatgttgtaaatataggtataggtggctcacatcttggaccagaaatggtcactgaagctttaagtttttactcacaaggtattaaaccttattacatttcaaacatagacccagactatacagaaaatttactgaaatctcttgatccagatacaacaatttttattattgtttctaaaacatttacaaccattgaaacccttgaaaatgctaaaaaagtcaaaaaatggtttgttaagaatgtaaatgaagaatcaatgaaaaatcatttcattgcagtttcaaataacactgaagatccaaaagaattcggtattgaatctaataatattcttcccatacctgaatgggtaggtggaagattctcactttggggttctgtaggtttaattatttcaatttgtgttggatctaaaaattttgataattttttaaatggtgcaagagaaatggatctacattttaaagaaacgccttttgaaaaaaacataccagttgtgcttgctttactaagtatatggtacaataacttttttaagtgtgaaactgaagccattcttccttataatcaatttcttggtaagcttccagattatcttcaacaagcaagtatggagagcaatggtaagagtatagatagggagggcaataaggttgattatcagacaggaacaataatatgggggtcaacaggaacaaatgcacagcatgcattttttcaactaatgcatcaaggaacaaaacttattccagcagattttatagcgtttaaagaacctttatacaatgataaagagcaacataaaattttaacctcaaatttcttagctcagacaaatgctttaatggtaggtaataaaaaatctggaaatgaaattcaaaagaatattgacgggaataagccctccaacacaatacttattaacaagctaacacctcacagccttggctctttaatagcaatgtatgaaagtaaaatttttgttattggatccattttaaatatttatagttttg

SEQ ID NO: 291283 - DNA, 1651 bp, Unknown
  Bacterial polypeptide expressing nucleotide sequence isolated from the Sargasso Sea
atgaaaaacatcaatccaacccagacccaggcctggcaggcactggaagcccactttgcagcgaacaaagagacccggctcaaggatctgtttgcccaggatccccagcgtttcgacaaattctccctcaccttcggcggcgacatcctggtcgattactcgaagaacctgatcaccgaagaaaccctcaagttgctggttgatctggccaaagagaccgatcttcgcagcgcgatcgacgccatgttcaacggcgacaagatcaacatgaccgaaggccgctcggtactgcacgtggccctgcgcaaccgctccgaccgccccatcgagagcgacggcaaggatgtgatgccggaagtgaacgccgtgctggccaagatgaagggcttctgcgaaaagatcatctcaggcgagtggaaaggctacaccggcaaggcgatccagcacgtggtcaacatcggtatcggtggttccgatctcggcccggtaatgatcaccgaggcactgcgtccctacaaaaaccacctgcagatgcacttcgtctccaacgtcgatggcacccacatcgccgagaccctgaagaagatcgatccggaaaccaccctgttcctggtggcctccaagaccttcaccactcaggagaccatgaccaacgccctgaccgcccgcgactggttcatcaagatcgccggtgacaaggcccacgttgccaagcacttcgctgcgctctccaccaacggcaaggccgtggccgagttcggcatcgacaccaacaacatgttcgagttctgggactgggttggcggtcgctactcctcctggtctgccatcggcatgcccatcgccctgtccgtcggtttcgagaacttcgaagccctgctgcaaggcgccttcgagatggacatgcacttcgccactgcctcctatgagcagaacgtgccggtgctgctggcgctgatcggcctgtggtacaacaacttctacggtgccgagtccgaagccatcctgccgtacgatcagtacatgcaccgcttccctgcctacttccagcaaggcaacatggagtccaacggcaagtacgtggatcgcaacggcaagccggttgactaccagaccggccccatcatctggggtgagccgggcaccaacggccagcacgccttctaccagctgatccaccagggcaccaagctgatcccctgtgacttcctggcaccggccatcagccacaacccgatcggcgaccaccacccgaaactgctggccaacttcttcgcccagaccgaggcgctggccttcggcaagagcaaggaacaggtcgaagccgagttcctggcggctggcaaaaccctggagcaggtcaaggatctggtgccgttcaaggtgttcgaaggcaaccgcccgaccaactccatcctgttcaagagcctgaccccgaaaacgcttggctctttgattgccatgtacgagcacaagatcttcgtacagggcgcaatctggaacatcttcagcttcgaccagtggggcgtggagctgggcaaacagctggccaacaagatcctgccggagctcaacaccgatgcggcggtcaccagccacgactgctccaccaacggtctgatcaacacctggaaagcgtggaaagcctgat

SEQ ID NO: 291284 - DNA, 1508 bp, Unknown
  Bacterial polypeptide expressing nucleotide sequence isolated from the Sargasso Sea
tgagcgctttgcgttcgcgggcggcggtctcgcggccgatttctcgaagaaccgcatcaccgacgaaaccctgaaactgctggtgcaactcgcgcgcgaagccggcgtcgagaaacgccgcgacgcgatgttcgcgggcgaaatcgtcaacccgaccgaaggccgcgccgccttgcataccgcgctgcgcgccaccgatccgaaagcgccgttccatgctgaaatccaggccgaacgcgcgaagatggccgcgttcgccgaccaggtgcgcagcggcgagtggaccggctatacgggcaagcgaattcgctacgtcgtgaatatcggcatcggcggctcggatcttgggccgaagatggtcgtgcacgcgctgcatcatctggccacgccggagatcaccacgcacttcgtgtcgaatgtggacggtgcggacctgtacaacgtgatgcagatgatcgatccggaagaaacgctcgcgatcatcgtctccaagaccttcaccacgctcgaaacgatgaccaacgcgcgctcgctgcgcgactggttcatcgagaaaggctgcccggaaagcgcgctggcgaagcacttcgtcggcgtgtcggcgaacccggccgaggtagtcaagttcggcatcgcgaaagagaatgtgttcgagatgtgggactgggtcggcgggcgttactcgctgtggtcggcggtgggtctttcgatcatgatcgcgatcggcccgcaacagttcgacgaactgctggccggcgccaacgagatggaccagcatttccgcgacgcgccgctcgaaaagaacctgcccgtgctgctcggcatgatcggcatctggtatcgcaacttcttcggctcgcaaagctatctggtcgcgccgtattcggaagcgctgcatttcctgccctcgtacctgcaacaactcgagatggaaagcaacggcaagtcggcgcgcctcgatggcgcgatggtcgactatccgactgccgccgtgacctggggcgaaccgggcacgaacggccagcatgcgttcttccagatgctgcaccagggcccgacgatcgtgccgatcgacttcatcgccgtattgacgccggagcatccgctcgtcagccatcaccctaagttgctggcgaactgcttcgcgcaaagcgaagcgctgatgttcggccgcacgcttgaagaagcgaagaaggtggccggtgccgacaagcctgagctggcgccgcacctggtatttccgggcaaccgtccgaccacgacgctgctcgttgacgcgctcaccgcgcgttcgctcggcgcattgatcgcgctgtacgagcataaggtgctggtgcaggcatcggtatgggacatcaatccgttcgatcaatggggcgtcgagttgggcaagatcctcggcaaggtggtcgaggcggatctgacgtcggcgagcgtcgacgagaaaaagcatgattcgtcgacctcggcattgatcgcacgggcacgtgcggcgttgaagcgctgaa

SEQ ID NO: 291285 - DNA, 1273 bp, Unknown
  Bacterial polypeptide expressing nucleotide sequence isolated from the Sargasso Sea
atgccttcgtcaaataaaaaagacaaaattaaagagctcctaaaaaaacaccacgagattctaagtgaatctcatataagtaaattatttagcgaagatataaatagagctaagaaatttacaactcaattctctgatctatatgttgattactctaaaaatttcataacaaatgaaacattagatttgctattgcaatatgctgcctcaagtaatcttgaaacaacaattaacgcaatgtttaaaggagaaaagattaatcacacggaggatcgggctgcactacatgtagcactaagaggaaaatcaaaattaaaattagagaatattgaaattgaaaatgatattaaaaatgagctaaaaaaaattaagagttttgtctgtgatgtgcatgaaaagaaaataacaggctggacaaataaatcatttgataccttcgttaacattggtgcagggggttcagatcttggatcaaaaatggcagttaaaggactagcggaataccgattgggaaatacccactctttttttatatctaatgtcgaccccgatgaaatagaatcaataaaaaagaaaattaatcctgaaacaactctttttattatctcctctaaatcatccagcaccctggagacgatcacaaatgccaatacattgaaatcatggatggtcgagtctggctgtaaaaacataaataaacatttcttcgtagtaagctcgaatatgaaactaatcaaagattttggattgagcgaagataatctatttaaaatatgggactgggtcggcggtagattttcattatggtcagctgcgggtcttcctaccgcacttgctattggctttgaaaattttgaaaagatgctgactggagcattcgctatggatcaacattttttaaatgaaagtcctcaaaacaatatacctgtaatactcgcactaattgatttttggtatattcgtttctttaatacaagcacgcatgcgcttattccatatgatgagtcactaagatacttacccgaacatctggctcaactttttatggagagtaatggtaaatcaacagatttatctggaaaaaaaatcaatcatgaaacaggttcaatagcctggggcacagttggaacaaatgctcaacacagtattagtcaattactccatcaggggaaacatctaataccaatagattttcttgtgccgttgcaaaaaaatggtgaccagcaacatcatcaattattgcttgcgaactgtttagcacaaagtcgtgcgc

SEQ ID NO: 291286 - DNA, 766 bp, Unknown
  Bacterial polypeptide expressing nucleotide sequence isolated from the Sargasso Sea
attttcattatgggggtttgtagggcttgttatttcaattgtcataggctttgaaaattttaaagattttataaatggtgcacatgaaatggatattcattttaaaaattctccatttgaaaaaaatattccagtggtccttgctttacttagtatttggtataataatttttttaagtgtgaaactgaagctgtattaccttatagccaatttttaacaaaacttcctgattatcttcaacaggcgagtatggaaagtaatggcaaaagtattgatagaagtggcgaaaaagtaaattatcagactgggtcaatagtatggggatcaacagggactaatgctcaacatgccttttttcaactaatgcatcaagggactaaaattattccatctgacttcattgcatttaaaaattcattatatggtgattctgatcaacatgaaattctaaactcgaattttttagctcaaacaaatgctttgatgatgggtaaatcaacctcaggtgaatatattcataaaaatatagatgggaacaaaccatcaaactcaatagttattaacaagttagacccatttaaccttggatcattaatagctatgtatgaaaataaaatttttacaattggatcaattttaaatgtattcagctatgatcaatggggtgttgagctaggaaaatcaatagctaaagaaattttagctggtaaggttgtggatcttgacgattccacaaaaaaaacaatggaccaactaaaaaaatag

SEQ ID NO: 291287 - DNA, 1651 bp, Unknown
  Bacterial polypeptide expressing nucleotide sequence isolated from the Sargasso Sea
aatgagtgttttaacttctcttcctgaatggaaaaagctgtctgaacttgctgctacggtaaaagatgcgcacatgcgcgactggtttgcacaagatgcaaatcgcgcagataagatgcagcttgaagcctgcggtatttttcttgattactcgaaaaaccgtgtaaatgatgacgcgcttaaaggacttttcgaccttgccagagcctgcaaactagaaacccttcgcgacgcgatgttttctggtgagcagattaactcaacagaaggtcgcgctgtgcttcacaccgcacttcgtaatttctcagaccgtaaagtactggtagatggcgaagacgtaatgcctgaagtgcatgctacgcttgcaaaaattgaagcgtttactgcatcggttcacagcggtgaacacaaaggttataccggcaagcctatcaagcacattgtggcaattggtattggtggttcgttccttggtcctaagattatgaccgaggcacttaagccgcatacagtcgatgctgtgaaggttcactttgttgccaatgttgacggttgccacattcacgatgtgctatctagtgtagattttgaagaaactttggtggtcatgtcatcaaagtcgttctctacccaagagacgcttcaaaatacacttacggctaaagactggttcttaaagtctggcggtacacaagaagatattgctaaacactttgtagccgtgtcttcaaacgttaaagcagccaccgagtttggtattagcgccgacaatattttccctatgtgggattgggtaggcggtcgttactcactgtggtctgccattggcctgcctatctcgctagcccttgggtttgaaaacttcaaaggcttacttgaaggtgcatttggcatggacacccatttcacaaccgcaccgctagaagaaaacatgcctgttctacttgcactgttaggtgtgtggtacagaaacttcttcgacgcgcaatcacacgttttattaccttactatcactatcttcgcggcttaccagcttacgtacagcagttagatatggaaagtaatggtaaagaagtgacgcaagaaggtgagcacgtagattaccctactggcccaattatttggggcagtgaaggtacaaacggccagcatagcttccatcagcttattcaccaaggttctggcgttattccagcagacttcatgttgccacttaacgttcctaaccaggacgacacgcatcacgctatgcttgcgtctaactgttttggtcaaacacaggcactaatgcagggtaaaacctttgaagagtgttatgcagaccttgacggtaaaggcctagacgacgctgaacgcaaacgcttggccgctcataaaaccatgcctggcaacaagcctagcaatactttcttgtttgatagccttacgcctaaaacacttggcgcgctggttgcaatgtatgaacataaggtattcgttcagggtgttatctggaaccttaactcattcgaccaatggggcgtagagttaggtaaagtactaggaaaccaagtacttgcaggcattcaaggcgaggcagacaaagataatttcgacgcttcaacacaacaattgattgccaaattcagagcagcgaatgcaccaaaataa

SEQ ID NO: 291288 - DNA, 1639 bp, Unknown
  Bacterial polypeptide expressing nucleotide sequence isolated from the Sargasso Sea
atgactatcttgacccaaagcacaacttggcaagcgttagccgcgcatagccagcagatcccgcatatgcgggaactctttgcaggcgatcctgcacgctttagcaatatgtcgctttctacctgtggcttatttttagattattcaaaaaatagagcgacaccagagacactcaacttgctgctgacactggcgcaagaggcaaagcttgacgctaaaatcaaggcgatgtttgctggtgatattattaacaccaccgaaaaacgtgccgtgctgcataccgcactgcgcagcaccgccgagcaaaccatcattgccgagggtcaagatatcgttcctgaagtacagcaaacgctgaacaagatgcagcaatttgtcacttcagttacctcaggacaatggaaaggtttcactggcaaagccattaccgatatcgtcagtatcggtatcggtggttcgttccttggccctaagatagtttcccaagcattacgcccttactggataacaggtctcaattgccattttgtcgccaacgtcgatggcacctcgatcagtgaaaaacttaagctgctcgatccagaaaccaccctgtttatcatgtcgtctaagtcttttggtacacaagagacgctgaccaataccttaactgccaaggcgtggttcttagccaaaggtggttcacagtctgatgtggcgaagcactttgttgccgtgacctctaacgtggcaaaagcgactgactttggtatcgatgccgacaatatcttcccgatgtgggattgggttggtggtcgttattcactttggtccgccattggcttacccatcgctttactcatcggcatggataacttccgctccctattaaagggcgcacagcaaatggatacccattttgccaatgcgcctctagcggaaaatatgcccgtcatcatgggcttattctctctgtggtatggcaatttctttaatgcccagagccatgtggtattgacctacgatcattacctacgtggacttcccgcttacttccaacaactggatatggaaagtaatggtaaatcggtcacgctcaacggtactcatgtggattacagcacgggtcctgtgatttggggcggcgaaggcacaaacggtcagcacgcttaccaccagctgctgcatcaaggtaccgcattaatccctgccgatttcattatgccgctgcaaagccataatcctatcggagagcaccatgatcagttagcctctaactgcttcggacaaacccaagcactcatgcaaggccgaaccttggatgaagcgctggccgaattgagcaagagcagcttaagtgatgaagaaaagttacttatcgcgaaacacaaagtcatgcccggcaataagccaagcaacacgctgttaatggataagctgactcctgataccttaggtgcacttattgcgctctatgagcacagaacctttgtccaaggcgccatttgggatatcaactccttcgaccaatggggtgttgaactcggtaaaagcttaggtaatgacgtcctcgcccgcatcggcgccgagcaagacgccaccgccttagatgcctcgagcaatgggttaattaacctatatcgacagggtaaaatctgat

SEQ ID NO: 291289 - DNA, 1249 bp, Unknown
  Bacterial polypeptide expressing nucleotide sequence isolated from the Sargasso Sea
ttgtcaattgaccaatccacagcattaatcaacgaagcaacttttagttattttgaaaattatgctgaaaaacatgacttcgtgcaaaaatttcaggatctcaagtctggagtcagactgaataatactgaaaacagagcagtcacacactttaaatatagagaaccagaatcagatttatattcaaaaaatttagatgaaatagaagttttaacgaaattaattaaaaccaattttaaaaaaataataatttttggtattggaggttcatatctaggaccaaaacttatgcatgatgttttttcaaatgatgaaatccaaattaattttgttacaggcagtgacccagctgagtttgaaaagtttaaaaatttagatttatctgaatacggcttagtcattgcttcaaagtctttttcaactcttgaaactttaagaagctatgaagtaattaccaaaaataaatatcttaacaacacatttgcggtaacggcatcgagaaaatcagcaattgattatggtattaatgcaaataacattttaggttttgacgttggtactggtggaagattctcaatatggactggaataaacataggattctttttatcccatggtcgaactgcttttgaaaaatttttatcgggggcaaatagtatagatcttttaagtttgcagaagcctgagttaaatccagcactttcattggctatacaagatatcgtcttcaataatttattaaattttgatacgacattaatccttaattacgactataagttgagaaatttctatgcctatgcccaacagcttgaaatggagtcccttggaaaatcagtggatagagatacaaatgaactgttgggttttaatactgggtcaattatttggggcggatatggcccaagatctcaacactccttttttcaacatttatttcaaggaaatagagaaaccaatagctactttattgcttcaaaaaataacgaattgaatttcaaacaattcaaaggacaaactaaatctcttagagaaggcaccctagatgaatctgactcgcataagagagttttacctaagagatatacaacaatacttttagaaaatatatcaccagaatcattaggcgagttaattgcaatttgggaaaataaaaccatattcatgagcatgttttggaacattaatccattcgatcaatggggggttgaattaggtaaattaaatacaaaaaaagaaattgaataaa

SEQ ID NO: 291290 - DNA, 583 bp, Unknown
  Bacterial polypeptide expressing nucleotide sequence isolated from the Sargasso Sea
taatggtaagtcggtcacgctcaatggtactcatgtggattacagcacgggtcctgtgatttggggcggcgaaggcacaaacggtcagcacgcttaccaccagctactacatcaaggtaccgcattaattccggccgatttcattatgccgctgcaaagccataatcctatcggagagcaccatgatcagttagcctctaactgcttcggacaaacccaagcactcatgcaaggccgaaccttggatgaagcgctggccgaattgagcaagagcagcttaagtgatgaagagaagttacttatcgccaaacacaaagtcatgccaggcaataagccaagcaacactctgttgatggataaactgactcctgaaaccttaggcgcactgattgcgctctatgagcacagaacctttgtccaaggcgccatttgggacatcaactccttcgaccaatggggggttgaactcggaaaaagcttaggtaatgacgtcctcgcccgcatcggctccgagcaagacgccaccgccttagatgcctcaagcaatgggttaattaacctatatcgacagggtaaaatctga

SEQ ID NO: 291291 - DNA, 1063 bp, Unknown
  Bacterial polypeptide expressing nucleotide sequence isolated from the Sargasso Sea
aaagccttaaatccagagacaactttttttattgttgtttccaaaacatttacaactcaagaaactcttactaatgcaaatcttgctaaaaattggattcaaaaaaaattagacaccaaagaaattcaaaatcatttttgtgcgatctctacaaatattgataacgtaaaggattttggaattgacgaagagtatatctttaaaatgtacgattttgtaggtggaagattttctatgtggggttccgtcgggttatctatttcaatttcaattggatatgataactttaaaaagtttttaattggtgctgagaaaatggatacacattttaaagaatctccaattgaaaaaaatattccgatttgtttagcgttaattggtatttggaatagtaattttttgggttcacatacacaaggaattatcccatatacagaataccttaatctactgccaagttatttacagcagtctatgatggaaagtaacggaaaaaatattgataggcatggaaataaaattaattatagtactggcaacattatttggggtgggactggaacaaacactcagcatgcattttttcaattaatacatcaaggagataaattaattccttgtgattttataggttttaaaaaatctctacatggtaataaagacagtcataataagttaatgtcaaattatgttggtcaaatgcaagcactgatgaagggaagaagtttaaaagaagttgtttctgaaatggagtcaaaaaatatcgataaagaaaccataaacaagaacgcgaattttaaagtatttgatggaaacaaaccaactacatctatcttaattgaccagcttaatcctgaatctttagggatgctaatatccatgtatgaacatattgtttttaccaaaggtgtaatatggaatatttttagttttgatcaatggggtgttgaattgggtaaagtactagcttctaagttattaacagaaattgaaggtggtgaaattggcaatcatgatcattccactgaatcccatctgaaaaaattaaaaaatatctcttaat

SEQ ID NO: 291292 - DNA, 1164 bp, Unknown
  Bacterial polypeptide expressing nucleotide sequence isolated from the Sargasso Sea
tatgtccgtttcgtcatggcccggattaaaagcattggcagcacagcaaggctcgttacgtcaggcctttgctgaagatccgacgcgggctgagcaatttagtactcaggcttgtggcatcacgctggactactcgaaaaacctgatcaaccgtcagagctggcaggcgttacagcagctggctgcacagagccggattaaacctgtgctcagcgccatgctagctggcgagaaaattaataacaccgagcagcgcagtgtctggcatatgatgctgcgtaaaacagatgtatccggcctgatgcttgatggtgagaacattggcgatgccattcatgattgccgcaagcggatgacagcgctggtcagccagttacataacggtgaatacctcggttacaccggcaaaaccattactgacctgatatgggtagggatcggcggctcgctgctggggccgcagatggcagttgaagccctgaccccttaccactgcagtccggttcgtttgcattttgccggcaacatcgatggtgccgtggtatccgatattgttaaagggctgaaccctgcaacaacactggtctttgtggcgtccaaatcttttggcaccgaagaaaccaagcaaaatgcactggctatccggcagtggtttaaagaccacggcgccgatggtgcagctatcgcccggcatttctgggcaacctcgtcaaatatcagcgcagcggcagagtttggtatcgttgagcaaaatattctgccgatgtgggactgggttggcggccgctactcgttatggtctgcgattggttttccggtcgcgctgatgataggcaacgcgcacttcgccgagctgttaaaaggtgcagaggccatggatacccattttactgaagcgccgttcagtgacaatttaccgttaatcttggcgcttttgggtatttggtatatcaatggttttggttgccaggcgcaggcgctgttgccatacagccattatttgcgcttgctgccctcttatgtgcagcagctggatatggaatctaacggcaaaagcgttgatgtcaacggcgttgcggtaacggatgccacagcccctgtgatttggggtgatgccggcactaatggtcagcatgcctatcatcagttgttacaccaaagtgc

SEQ ID NO: 291293 - DNA, 1405 bp, Unknown
  Bacterial polypeptide expressing nucleotide sequence isolated from the Sargasso Sea
gaaggaatgtaaaatttctgattcaattaaaatgttgtttaatggtgataaaataaatgagacggaaggaagatcagtacttcatactgagttaagaaacttcaaaacatcaaattcatcaattgtgggagacagagaaaagattaaaagtttttcatccaaaattattaatggaacaattaagggttatacaggtaaaaaatttacagatgttgttaatataggtattggaggatccgacttaggtccaaaaatggcagttgaagcattaaagttttataaaaactcattaaatattcattttatttctaatgtagatggagaccacaataaggaggtattaaaagccttaaatccagagacaactttttttattgttgtttccaaaacatttacaactcaagaaactcttactaatgcaaatcttgctaaaaattggattcaaaaaaaattagacaccaaagaaattcaaaatcatttttgtgcgatctctacaaatattgatgcagtaaaggattttggaattgacgaagagtatatctttaaaatgtatgattttgtcggtggaagattttctatgtggggttctgttggactatctatttcaatttcaattggatacgataacttcaaaaagtttttaataggtgctgagaaaatggatatgcattttaaagaatctccaattgaaaaaaatattccgatatgtttagcgttagttggtatttggaatagtaattttttgggttcacatacacaaggaattatcccatatacagaatacctcaatctactgccaagttatttacagcagtctatgatggaaagtaacggaaaaaatattgatcggtctggtaaaaaaattaattatagtactggtaacataatttggggaggtactgggacaaacactcagcatgcatttttccaactaattcatcaaggagataaattaattccttgtgattttattggttttaaaaaatcacttcatggaaataaagacagtcataataagttaatgtcaaattatgttggtcaaatgcaagcactgatgaagggaagaagtttaaaagaagttgtttctgaaatggagtcaaaaaatatcgatgaagaaaccataaacaagaacgcaaattttaaagtatttgatggaaacaaaccaactacatctatcttaattgacgagcttaatcctgaatctttagggatgctaatatccatgtatgaacatattgtttttaccaggggtgtaatatggaatgtttttagttttgatcaatggggtgttgaattgggtaaagtactagcttctaagttattaacagaaattgaaggtggtgaaattagcaatcatgatcattccactgaatcccatctgaaaaaattaaaaaatatctcttaa

SEQ ID NO: 291294 - DNA, 841 bp, Unknown
  Bacterial polypeptide expressing nucleotide sequence isolated from the Sargasso Sea
ctctctagcctctttttttcaatcccaatgggagtcggatctcaaaggatagctcttgagaatcaaagcctagaagcactgtttcatattcgaaaaaaatttccaaaactctatcttatagccaatattggaataagtgaagtgataaaagaaaatggacttgaaaaagcaaaaaaagccattgatatgttagaagctcaagccttagccattcatctaaatgtggctcaagaatgtttacaagaagaaggatcccgtttatttaaaggtttttataatgcgctagaaaaactttgttcacagctaagtattcctctgctgataaaagaagtaggctgtggcataagccctgcaaccgctataaaactcaagcaaacaggtgtaaaagctattgatatagggggaaaagggggaacctcttggccctatattgaaagttgtcgttctcaacatgaatatagagagcttttaggagaaagtatgcgtgaatggggtattcccacagcttatagtctcgccacagtccgtcaagagataggtgacttagatattgtggcaacaggtgggattagagatgggctcaccatagccaaagcctgtgctctcggtgccactatggtgggagttggtctaccttttatgaaagctgccttaaaatcagaggattcttctttcaaactcatggaagctttgatccatgggcttaaaaccaccatgattacaacaggaagtcgctctctaaaaaacttatcaagaaagatctgccttggaactccactagaaaatgaattttataagctttttcaaaataaaagatcagaaaagaaaaaagactcttaat

SEQ ID NO: 291295 - DNA, 805 bp, Unknown
  Bacterial polypeptide expressing nucleotide sequence isolated from the Sargasso Sea
ggagcattaggttctgttatagaagagcttcataattcatacaaactaaattttgatgaattatatatggaagttgacggaaactttccaaaccatcctgctgacccttctgatccagcaaatcttagagagttaagagaattagtaatttctaaaaataaagcatttggagtagcttttgatggagatgctgatagagcagttttcttagatgacaaaggcaatttaatttctggcagtttaatgacagctctagtttcagattggttaaatgaaaaaaaagataatttaaaaatagtacataatgttaatgtctcaccttcagtggttaactacttgaagaaaaagggaattactacaataagagctaaagttggtcattcttatataaaacaaatcatgagagaagaggacgctgattttggtggtgagcatagtgctcacttttatcttaaagaaaattattatgctgattcaggaattgttactttattaatatttttgcaaatactttcagaaaagaatgtaaaagcctcagagcttattgacagctataactttccacctacctcaggcgaaataaattttgaagttactagtgttaaggagagtctaaaaaaaattgaaaattcttttgaaaattcttttgataaattagatggaatctcttattttgctgataactactggtttaacgtgagagggtctaatactgaaccaaaattaagacttaatgctgaggcagaggacgaagaaactcttaataacctcataaacgagataacaaatataattaaggtataaa

SEQ ID NO: 291296 - DNA, 823 bp, Unknown
  Bacterial polypeptide expressing nucleotide sequence isolated from the Sargasso Sea
tatttcaaacttcaaaatactggaaaatatattaattaataaagaagtagatggcaattttccaaaccatcatccagatccaacaattcctaaaaacatggagcaacttataaaatcagtaaaagaaaataattgtgatatcggcttagcttttgatggagacggagatagactgggagtagtagataatttaggaaatattgtttgggctgatcaatatatgttaattttatgctcagaaatatcacacttatataaaaatccaaaaataataatggacgtaaaatgcagtaaggttttttttgatgagtcaaaaaaaatgggatgtgacccaataatggagaggactggacactcaccaatcaaagaaaaaatgaaagaattaaaatccccattatcaggagaaatgagtggccatgtatgttatggagatgatttctacggatatgatgatgcaatgtatgttgctttaagacttataagaattttaagtaatcaagaaaataatttatttaatattattgatcaatatcctaaaacattttcaactccagaaacgagatttgatgttgaagaaattaaaaaatttaaaataattgatgacatcaaagaaagattaaaaaattttgatggtaaaataattgatattgatggtatcagagttgaaacagataaaggttggtttttaatgagagcaagtaatacacaaaaccaacttacatgtagagtagaatctacaagtgagagtggtctaagaaaattaatatccatagttgaagatcaattaaaattaagtgatataaattttcaatttacaatctaa

SEQ ID NO: 291297 - DNA, 907 bp, Unknown
  Bacterial polypeptide expressing nucleotide sequence isolated from the Sargasso Sea
aagtttagaaacaaacaatgaactaggtttatattttgaacatttaaagaaattagtaaaaccagaaaaagtaaatagccaaatcaaatttggagttgatggcggaaatggagcaataggttctatatttgaggacttatcaaaaatttataactttgattgtgaaaagctttatatggaagttgatggaaatttcccaaatcatcctgctgatccatcaaatataaataatttgaaagagattataaagctggttcaagaaaaaaaattggattttggggtagcttttgatggagatgctgatagagcagtatttattgataataatggaaaagttgtatctggaagcatgatgacaacattaattgcagattatttatctgaaaaaaagaataatttaaaagttgtatataacgttaatgtttcaccacatgctttatcaatacttgattcaaaaaatatttctctctttaggtgtaaggtgggtcattcaaatattaaagcaatgatgaaagaacttgaagcagattttggtggtgaacatagtgctcatttttattataaagataattattttgctgattcagcaatactaactctcttaatgtttatgactattatttctgagcgaagagagaaagtaagtatgatgatcgacaagtataattttcctccatcgtctggagaagtcaactttgaagttgaagatgtagaaaagtccttggagaaaattaaaaatgtttttactggtgattttgatgaacttgatggtctttcattttttgatgaaaacttttggtttaatgtaagaggctcaaatactgaacctaaattaagagtaaatatagaagctccttctcaaaaaacccttgatgaagttttagagaaaatttcaactactatatag

SEQ ID NO: 291298 - DNA, 946 bp, Unknown
  Bacterial polypeptide expressing nucleotide sequence isolated from the Sargasso Sea
gggcattgcatcttatttttctgccaaatcagttgtcgttggttatgatgtaaggtcttcatctgttgacatactcaatgcattaacaaaaggcatcaatagtcagggcgctaaagtctattcaattggtctatgtggtacagaagagatctactttgccacaaatcatctagagactgatgctggggtgatgatcactgcgagtcataaccctgctgattacaatggattaaaaattgttggcaagggtgcaaagccagtcagcatggacagcggacttggtgaaatcaaaaagattgcagatcaatctgaatccaaccttttagctgagcctaatatggaggtcgtcgatataaaagctgcatatattgagaaacttttagaattcgtagatccaaatacaatcaaaccaatgcacatagtcacaaatgctggaaacggttgtgcaggtccaattttggatttgcttgaagaaagactcccgctaaattttactaagattcaaaatgatccagatggcacatttccaaatggaattcctaaccctttgttgccagagaatagggatattacatcaaaagctgttattgaacattccgctgaccttggtattgcatgggatggagattttgatcgatgtttcttttttgattcgaatggagacttcatagaaaattactatcttattggtttattgagtgaacagttgctgaaattatcacctggtgacagcatcgttcatgatccaagattggtttggaacaccgttgaagaagtcaatagttttggaggtatccctacgatctcaaagtcaggacattcctttattaaagaggtcatgcgagcaaatagctcgatttatggtggagagatgagcggacatcattatttcagagatttttatttcagtgatagtggaatgatcccttggcttttactcgttgag

SEQ ID NO: 291299 - DNA, 961 bp, Unknown
  Bacterial polypeptide expressing nucleotide sequence isolated from the Sargasso Sea
ggtgatgatcactgcgagtcataaccctgctgattacaatggattaaaaattgttggcaagggtgcaaagccagtcagtatggacagcggacttgctgaaatcaaaaagattgcagatcagtctgaatccaaccttgtaactgaacctaatatggaagtcgtcgatataaaagctgcatatattgagaaacttttagaattcgtagatccaaatacaattaaaccaatgcacatagtcacaaatgctggaaacggttgtgcaggtccaattttggatttacttgaagaaaaactgcttcttaaatttactaagattcaaaatgatccagatggcacatttccaaatggaattccgaaccctttgttgccagagaatagggatattacatcaaaagctgttattgaacattccgctgaccttggtattgcatgggatggagattttgatcgatgtttcttttttgattcgaatggagacttcatagaaaattactatcttattggtttattgagtgaacagttactgaaattatctcctggtgacagcatcgttcatgatccaagattggtttggaacaccgttgaagaagtcaatagttttggaggtatccctacgatctcaaagtctgggcattcatttatcaaagaagccatgcgtgaaaataactcaatatatggtggagagatgagcggacatcattatttcagagatttttatttcagcgacagtggaatgatcccttggctgttgctcgttgagaatgtatctacatcagggtcaaatctcactcatcttgtgaaagatagaatcaataagtttcctgtaagtggtgaaattaatcgaacagtcagtaatccagaggaactgcttgaaaaggtaaaagatcattaccttaaacttggcccaaatattgagaatcttgatggatatagtttagattttggtgattggagatttaat

SEQ ID NO: 291300 - DNA, 1012 bp, Unknown
  Bacterial polypeptide expressing nucleotide sequence isolated from the Sargasso Sea
tttgacagctgataaattagataaaataaaatttggaactgatggttggagaggaattattggttttgactttaacctgtccaatctttcaagagttgttgtcgctgcatgtcaggagttgcattatcaatactataaagaagttaattcaaagaaaattattattggatatgatcgtagatttatggcttgtgaattcgccaagcaaatagtgccttttgtaagaggatgtggtttcgaacctatcttatctgatagctttgttacaacaccctcttgtagtttctatgccaaagaagtcggttgtcttggagcgttagtaattacagcaagtcataatccatataattggctaggtctgaaaataaagagctttaatggatgttctgttgacgaatcttttacaagtgaagttgaaaaaagattaatgcttggaaattcaattgaaaaaatagatggtattaatcaattggtagatattaagaaatttcatttaaatagaattaaatccctttttgatattgaccatatttccaagagattaaaaaaaatgaaattgagaatttttgtagattctatgcatggttcagctgcaaattgtatggctgagatttttgcttctaatgatttagaagtgatttcagaaatcaggaaagatgctgatcctttttttggaggaaaacctcctgaacctcttttgaattatgcagatgatctaaaacaaacactaatgaaaaattcaacaaatgaagtgaaaactttaggaattatatttgatggtgatggtgatagaattgcggcaattgatgaaaaaggaagatactctagtactcaagatttactcccatattttattagctatttgggcgaaattaaaaataattcttatccagttttaaagactgttagtggttcagatattattaaaaatatatcagagagtcaaaatagagatgtttttgaactcccagttggctttaaatatattgctgaaaaaatgattaaagaaaaa

SEQ ID NO: 291301 - DNA, 652 bp, Unknown
  Bacterial polypeptide expressing nucleotide sequence isolated from the Sargasso Sea
atggaaataacagaatcaatttttagggaatatgacattaggggcatttatcctaatcaaataaatgaagaagttatcaatcatataggccttgctatagctcataaatgttataaagagaaaataagacaaatttttattggaagagatggaaggctttctggaaagaaattattaaattctttagcaaatagtttatcagattatggtatagatgtgattgatattggtttagtaacatctcctcttctatattatgctgcaaaaaaaggtgaatctaaaagcggtgtaatgattactggtagtcataatccaaaagatcataatggaattaaacttgtaataaatgataagcctgtttcaggaagtgaaattctcaagcttataaaagaaaataaaaaaatttcagcctctcctggaaaaatcatctctaaagattttaaaagtgagtatatttcagaggtcatagaaaatattgatattgaaaaagataaaaagattaagatagttgtcgattgcggtaatggagcggctggatgcatagctcctaatctttttaaaagtcttggatgtgaagttattgagctttttagtgaggtggacggaaactttccaaaccaccatcctgacccaggaaaaatagaaaatcttc

SEQ ID NO: 291302 - DNA, 784 bp, Unknown
  Bacterial polypeptide expressing nucleotide sequence isolated from the Sargasso Sea
ctgtgatgttgatggtaatttcccaaatcatcatccagatccgggtaaagaaaagaatttagtggatcttattgaaaaagtaaaggaggtctctgcagatgttggtgttgcctttgatggtgatggagacaggcttggagcaataacttcatcaggaagattaatttatcccgatcaaatgatgatgttattctcaaaaaaaatactttcaaataatggaaccgaaactattgtttttgatgttaagtgctcagactttcttcctcaaataatcaaggaaaatgatggaatacctttcatgagccctactggtcattttcatattaaaaataatataaaaaaatataatgccgtgctaggaggtgaaatgagtggtcatattttctttaatgatatttggcatggttttgatgatggtcattattctgcaataaggcttttagatatcatgaatgaaacagggtcatcactagatgatttattggatagccttcctgtttcttattcaaccccagaattaaatatagatgttcctgaggagaaaaagtttaaaataattgaggatttcattgaaaatgcatcaattgatggaaaaaaagattttactgacggtcttcgagcctcatttgagaatggctgggctctgttaagagcttcaaataccactccgaagcttgtcttgagatttgaagcaaatagtcaagaatcgcttgaaaagattcaaaaaaactttttggaagaattaaaaaaattcttaccaaatgaagatattaatttagaataa

SEQ ID NO: 291303 - DNA, 834 bp, Unknown
  Bacterial polypeptide expressing nucleotide sequence isolated from the Sargasso Sea
ttgctccagacttattaagatcagttggctgcgaggttatagaaattatctgtgatgttgatggaaatttcccaaatcatcatccggatccgggaaaagaaaagaatttagtggatcttattgaaaaggtaaaagaggtctctgcagatattggtgttgcctttgatggtgatggagacaggcttggagcagtaacttcatcaggaagattaatttatcccgatcaaatgatgatgttattctcaaaaaaaattctttcaaataagagaggcgaaactattgtttttgatgttaagtgctcagactttcttcctgaaataattaaggaaaatgatgggataccttttatgagtcctactgggcattttcatattaaaaataatataaaaaaatataatgccgtgctaggaggtgaaatgagtggtcatattttctttaatgatatttggcatggttttgatgatggtcattattctgcaataaggcttttagacatcatgaatgaaacaggatcatcactagatgatttattggatagccttcccgtttcttattcaactccagaattaaatatagatgttcctgaggagagaaagtttaaaataattgaggatttcattgaaaatgcatcaattgatggaaaaaaagattttactgacggtcttcgagcctcatttgaggatggttgggctctgttaagagcttcaaatacgactccgaagcttgtattaagatttgaagcaaatagtcaagaatcgctagaaaagattcaaaaaaactttttggaagaattaaaaaaattcttaccaaatgaagatattaatttagaataat

SEQ ID NO: 291304 - DNA, 990 bp, Unknown
  Bacterial polypeptide expressing nucleotide sequence isolated from the Sargasso Sea
aatggtttgtaaaaatcagaaaggtaatttgacattaaaaaatggcgacattatttcttctgatattcaaaaaaaatatttaagtgatgtacatagtaagatacaaataaagaaaaaactcaaaatagctattgatgcgggtaatggagctgcaggaccaactgcatttgaactctataataaactaggctgcgaagttatacctttatattgtgacatagatgggaattttccaaatcaccatccaaatccaagcgaagaaagtaatttagaagacttaaaaacagctgtattaaaaaataaatgtgatttaggtttggcattcgacggagatggtgatagatgcttaatagtagatgattgcggaaattcattatggcctgataagcaaatgatgattttttctacatcgattcttaaacatcatcctaatgctaaaattatttatgatgtaaagtcatccaataatcttcataaaattatagaggaaaatagcggtatccctttaatatgtagaactgggcattcatttatcaaaaagaaaatgaaagaagaaaaagcaatattaggaggagaaatgtctggccacattttttttaaggacaaatggtttggttttgatgatggaatttatgctggtgcaagaatgattgagataatatcagaaataagtgaaacatcttcccaattttttggtaaacttccgaattctttttctacgccagaaattaatattccggtttcagaggaaggggagcagcataaaataattgagttattctcagaaaaatgcaattttgagggagcaagaatttctaaaattgatggtgtaagagctgattattcttttggatgggggataattagggcttcaaatacaacgccaaatatagttgcaagatttgaggctaatactcataaagaactctctgtgattaaaaataatttttataacccagttaaaaaaaattattttaatcacagagagtc

SEQ ID NO: 291305 - DNA, 757 bp, Unknown
  Bacterial polypeptide expressing nucleotide sequence isolated from the Sargasso Sea
tatgttttttaagtttggtctagcatcaggaactttttttagatcacaaaaaaaaaacaaacaagtggctgtaattgctaaagatacaaggctatcaggttatatgctcgaaccagctttggtatcaggattaacctcagctggtatgcacgtttacactttgggacctctaccaactaatggtttagcgatgcttaccaaaaccatgaaagccaatatgggaattatgataactgcatcacacaatccacattatgataatggattaaaattatttggcccagatggaatgaaattgtctaacaaaattgaaaagaaaattgaacatttaatagaccaacatattgaaaaaaatttatctgaacctgaaaaactaggaagggtaaaaagactagaaacaggaactagagattatattaaaattttaaaaaaaaacttttctgaggagtttaatttaagaggacttaggattgttatagactgcgccaatggagcaggttacaaagctggtcctgaattattaaaatcattgggtgcgaaagtaatagctattggggtggagccgaatggcatgaatatcaataaaaattgtggatcagtctatcctcagaatattaaaagagcagtaaaaaaatataaagctcacattggtatatcattagatggtgacgctgatcgagtaataatgtgtgatgaaaaaagtaatataattgatggtgatcaaattattgctgctttggcctcaagatggaaaaat

SEQ ID NO: 291306 - DNA, 782 bp, Unknown
  Bacterial polypeptide expressing nucleotide sequence isolated from the Sargasso Sea
tttagcgaactaggctgtgaagttattgaacttttcactgaagtagatgggaattttcccaatcaccatcctgatccaggcaaattagaaaatcttcaggatttaattgcaaaagttaaattaacaaaagctgatttgggtttagcatttgatggtgatggagatcgagtaggtttaattactgataaaggcgatgttatttatcctgacaaaatcttgatgatgttctgcaaagaaatccttgataaaaataaagggtctataatctttgatgttaaatgtacgaatgctcttccaaatttgataaaaaatttaggaggaacaccaataatgtcgcctacaggacactttcatatcaaaaatggtatcaagaaacataatccactcctggcaggtgaaatgagtggtcatattttttttaatgacaaatggcatggctttgatgatggacattattcaggtgcaagaattattgagttaatatcaaataataaaagaagtatttctgctattaataatgatttaccaaacttattttcaactccagaattaaatattacggtgactgacgaaacaaaatttcaaataattgaagatttttcaatgaaatgtaatttaaaaggtgaaaaaataaatatagatggattaagaataaattttaaaaacggctgggggcttttaagagcatctaatacaacaccaaaattggtaatgaggtttgaaggaaatactgaagatgatttaaaagaaattcaaaataattttttacatgaactttctcg

SEQ ID NO: 291307 - DNA, 825 bp, Unknown
  Bacterial polypeptide expressing nucleotide sequence isolated from the Sargasso Sea
tgagcgtttgctgccggtggcggcggcagcggcggcggaattggcccattccgctccccctgagttggcgagccagaccgtggtgatcggctacgaccgccgctttctcgccccagagttggcggcagccctggcggctgctgtgcggggcgttggtcttgagcctcttctggcgcaggagcccctgcccactccggcctgcagttgggtggtggtggagcgccaggcccttggagcgctggtgatcaccgcaagtcataacccgccggaatggctcggcctcaagataaaaggccatttcggggggtcggtggaaggggacttcaccaaacgggtggagcgccgtttggccgcaggtggcatcacaatccctgaaccaggtgagaccgagtgttttgacggctgggccgagtatttgaacggcctgcgtggcgccatcgataccgccgctttgcgccatggactgcagcagagcggtctcaaggtgattgttgacccgatgcacggctctgctgctggtggtctgccggccttgctgggagatggggtcatggaaattcgctccgagcgggacccgctttttggcggccatccgcccgagccgctggcgccgtatctggggcagctgatcgagagcgttcaggctgcctctcaagacggaacgcctgcggtcggcatcgtgttcgatggtgatggcgatcggatcgcggccattgatgagcagggccgctactgcagcacccaactgctgatgccactgctgattgatcacctggctcgcgcccgtcagctgccgggcaaggtgatcaagaccgtcagcggttc

SEQ ID NO: 291308 - DNA, 871 bp, Unknown
  Bacterial polypeptide expressing nucleotide sequence isolated from the Sargasso Sea
acagctagccataaccctaatggttggacaggaataaaaatggggaatgaaaagactcttacttttggtccagatctaattaataatttaaaaaaagttatagaagataaagataaaacttcaaataatcctggaaaatatatttttaggaacatcaataatgagtatcttatagatataacttcaaaatataaaataaatagaaaaattaaagctgtagtagcatgtggaaatggtacagcaggtctttttgcgcctaaagctcttagtttattgggtgttgaagttattcccttgcattgtgatttggatagctcatttccaaactacaatcctaatcctgaagatttaataatgctaaaagatttaggaaaaaatgttttagaaaataatgcagatataggttttgcatttgacggtgatggagatcgcgtaggtgtagttgataacaacggacaagaaatatttgctgataaaattgggttacttattgctagaaacctatccttggaaaattcaaattcaaaatttgtagttgatgttaagtctacttccctttttctaactgatgaaattcttaaaaagagcaattctgaaattgttttgtggaaaactggtcacagttatattaaaagaaaaacaaatgagataaatgctacagctggtttcgaaagatccggtcatttctttttcaataacccgataggtcgagggtatgatgatggtattttgtctgcaattgaaattctaaaaatattagacaaaaacaaaaataaaaaacttaatgatttatataacgagctccctataaccttctcatcaccaactatgtctccaaaatgcccagaagaaaaaaaatatgatgtgtaga

SEQ ID NO: 291309 - DNA, 817 bp, Unknown
  Bacterial polypeptide expressing nucleotide sequence isolated from the Sargasso Sea
tatgtcagatattaagtttggaacagacggatggagagcaataatagctaaagactttacagtggataacgttgcaagaatttcttatgcaacagggttgtgggttaaagaaaatttttctgatccatctgttgttattggtcacgattgtcgatttggaggtaaattgtttgttgaaactgctgttaaagtatttgtttctataggtattgaagtacatatagcaaaaggatttattacaactcctatgatttcattaggtgctaaaaagttaaatgcatcaattggcgtggtaatgacagcaagtcataatcctccttcttacaatgggtataaattgaaaggtcactatggagggccattaacaaccgataaaatcaacgaagttgaaagccttatacctaatgataatccagtagatttagaatcgatttctattgaagcatctgttaaaaatggtttggttaaatgggttgatttagaacaaatgtatgtagatgttgtagagtcttcatttgatcttaatgcaattaaaaattctggattacactttgcttacgatgccatgtacggagcaggacaaaatgttatgaaaagaattcttggtgacatgactttcttacattgtgaaaacaacccttcattttatggacaagctccagaaccaatcgcaaaaaatttaaccgaattttcagaacttataattaaagatggaacgattgctgctggattagcaactgatggagatgctgacaggattggattgtacaactctaaaggagaatttgttgattctctatcaatattattttattgt

SEQ ID NO: 291310 - DNA, 832 bp, Unknown
  Bacterial polypeptide expressing nucleotide sequence isolated from the Sargasso Sea
aatgacgattaaaatttcttcatttaaagcttacgatataagaggccgacttcctcatgaaattaattctgagattgcctacagagtcggcaacgcaacggctaaatatttatcagcaaaaaaaatgattctaggaagggatattcgtgcaagcagtaaagaattgtctgaatcaatggcattaggacttatggatgcgggtgtggacgtgattgatataggtgaatgcggtactgaaaatgtctattatgctacaggagaacttaaatcttgtggcggtattatggtcacagccagtcataatccctctgattataatggttttaaaatagtcagtgaaaacgcaaaaccaataagctctaagactggtttactagatatacggaaacttgctgaatctgacaaaagattgatttcagagacaagaggcaatcttgagcaaagagattttaaccagtcatatgttaaaaaaatattgagttttattgactctgactccataaataagctcaaggttgtaatgaatccaggaaatggtggggcgggtgtttacgcagaattaatatcaaaaaacatgccaattgagattattaagcaaaattttgatccagattcgtcttttcctaatggaataccaaatccaatgttagaggaaaatagagcgtccacatcacaagtagttattgataataaggctgatgtaggtatcgcctgggatggagattttgaccgatgttttttcttcgatgaaaaaggtaattttattgagggatattatctagtaggtcttctcgcaaaaagctttcttaataaaaatcgtaatgaaaaagtc

SEQ ID NO: 291311 - DNA, 697 bp, Unknown
  Bacterial polypeptide expressing nucleotide sequence isolated from the Sargasso Sea
tgcgttggaagggatggaaggctctctggagaaaatctactaaaatcactaaccgaatcattatcagcatatggtttaaatgttcaaaatattggtcttgttacgactcctcttctttattatgccgcaaagaaaaacaaatctaaaagtggtgtaatgattacaggaagtcataatccaaaagaatataatgggattaaattagtcattaatgataaacctgtttctggaaatgaaattttgaagctgatacatgttgataagccaattgcagataagtcagggaatgtttcatatatcgatataaagaacgattatatttcagaagttaaagataatataaactttgattttaaaaataaaataaaaattgtaattgattgtggaaatggagctgcaggctgtattgcgccaatactttacaaagaattagggtgcgaagtaatagagctctatagtgaagttgacggaagctttcctaatcatcatccagacccaggaaaattagaaaatcttaaggctttaattgattctgtaagagctactaatgctgatttaggtttggcttttgatggagatggcgatcgtgttggtttaataactgataaaggtggagtggtttttccagataagattttgatgatgttaagtgaggatattcttcttacgagaaaaggaacaatcattttcgatgtta

SEQ ID NO: 291312 - DNA, 874 bp, Unknown
  Bacterial polypeptide expressing nucleotide sequence isolated from the Sargasso Sea
ttgacatcattagatttagaaaaaaaatatattttaaggcttctacaaaattttaatcaaaaaaaaaaaataaatattgtttgggactcaggaaatggttctgctggaaaagttatgaaaaatctagctgaaaagattgatggaaaagcagagttgttatttactgaaattgatggaaattttcctaaccaccaccccgatccatctgaaccaaaaaatttagaaagttgtcaaaaaaaattacttgaactaaattatgatgttggctttgcctttgatggcgacggcgatagattaggagtaattgacaataaaggaagaataatttctggtgatacattgctattgctactttcaaaggaacttctaaaaaaaaaaaaatcaagaattgtcgctgatgtgaagtgtagccaagttttgtttgatgagataaagaaattaggtggtgaagtttacatgtctccaacaggtcatagtcatgtaaaaaactatgtaaaaaaattgaatgcggatctagctggagagatgagtgggcatattttttatgcatatgattattttggttttgatgatgcattttatgccgctgttaaagtaatagagttgattaacaacaatagttataaactatcagatttagtagaccaaatcccaagagtttttaatacacctgaaatcagaattgacactgatgataataaaaagtttggtataatttctaaaatttttgataatcagaaatcaataaaaaagaatattattgatattgatggacttagagttactgaaaatgatggttggtggctaattcgagcatataatactcaacctgcaatagttgtaaggtgtgaatcactaagtaaaagggcctaga

SEQ ID NO: 291313 - DNA, 844 bp, Unknown
  Bacterial polypeptide expressing nucleotide sequence isolated from the Sargasso Sea
tatgttctttaaatttggacttgctagtggaacatactttaaatctcaaaaaaaaagaaaacaaacagcaataattgcaaaagatacgagattgtctggatatacacttgaaccagctcttgtctcaggtttggcttcagcaggtatgcatgtttataccttaggacctttaccaactaatgggttggctatgttaacaaaagagatgaaggcaaatatgggtataatgattaccgcttctcataatccacattttgacaacggtttaaagttgtttggccctgatggaatgaaattatctgataaaatagaaaaaaaaattgagagtctcatagataagaaaatctcaaaaaatctctcgcattctgaaaaattaggaagagttaagagattagaaacaggcaccaaaaattatattaaaatattaaaaaaaaatttcacaaaagagttcaatttaagaggacttagaatagtaatcgactgtgcaaacggcgctggttataaggcaggtcctgaattattgaaatcattaggagctaaagtgatagcaataggtattaaaccaaatggtttaaatattaataagaaatgtggatcaacttttccaagaaatattaggtctgctgttaaaaaatataaagcccatatcggaatatctttagacggagatgctgacagaattattatgtgtgatgagaaaagcaatataatagatggagatcaaattatagccgccttagcaacaagatggaaaaataaaaaaatgttaaaaggaggagttgttggaacattaatgtcaaattatggtttagaaaaatattttaaatcaatagggataaaattt

SEQ ID NO: 291314 - DNA, 877 bp, Unknown
  Bacterial polypeptide expressing nucleotide sequence isolated from the Sargasso Sea
tagaggtcttacagactctcatttaacaccgaaaatatcatctatttatgcaagagcacttcatacttttcttcctgatggtgtgatcatggctggccgagatagtcgaccatcaggggatatgattttgcatgcaatgaccgaagagctagtaggtttaggcagaacagttatacagtgtgggatagtcccaacgccaacagtgcaatttatggttcacaatactgaagctgtaggtggttttattgttaccgctagtcataatcctgttgagtggaatggaataaaatttttaagaccagatagtactttttttcatcctgaagaatgccaagatctttttaatatggttgatcagaatgtagaattgaaaaaatcaaaagaagctggtattgtgtggccagagcagaatgctattcagaaacatgtgattgcatgtgcaagtattagctgtattgatctaaatagaattcaaaggagaaaattcaaagttgttatagatgcagtcaatggtgctggtgccatagcacttccaaatatgctagaagcattggggtgtgaagtaattgaattaaattgcgaaccagatggaaactttactcgagggactgaaccacttcctgaaaatttgaacgatttatctacaatggtaaaaaaccataatgctgatgcgggttttgctatagatcctgatgcagatcggttagccgtagttaatgaacatggagaacctctaggagaggaatatactcttgtattagctgcagatggatacataaatgaaactggaaagaaggaaagatttgtggttaatctctcaacatctttagcattagaaaaactagctcataaaaatggaagcactgtagaaaggtct

SEQ ID NO: 291315 - DNA, 662 bp, Unknown
  Bacterial polypeptide expressing nucleotide sequence isolated from the Sargasso Sea
tttaccaacaaatggtcttgcaatgcttacaaaaaaaatgatagctaatatggggataatgattactgcatcgcataatcctttttatgataatggtttaaaattgtttggaccagatggtttaaaattgtcagataaaatagaaaaaaaaatagaaaaactaattgatactaaaatatcaaaacaattatcaaatcctcatatattaggcagagttaaaagattagagaatggctcaaataaatatattgaaatattaaaaacaaattttcctaaacaatttaatctaaaaggtttaaggattacaatagattgtgctaatggagctgcatataaagtaggacctcaattgtttagatcattgggtgccaaagttcatgaaattggaacttctccaaatggatttaatataaataaaaaatgtggttctacatttccaaataaaattaaatatcatacaaaaaaaaataaatcccatattggaatttctttagatggtgatgcagatagagttattgtttgtgatgaaaagggtaatattattgatggagataaaataatagcaatgctagcaactagatggaaaagaaaaaaaattttaaaaggtggagttgtaggtacattaatgtcaaactatggattacaaaaatatttttttgaaa

SEQ ID NO: 291316 - DNA, 715 bp, Unknown
  Bacterial polypeptide expressing nucleotide sequence isolated from the Sargasso Sea
agcaaatgttaaatcacaaaatcttttaaaaaagaaaattatttgggattgtggtaatggtgcaactggtaaagttttaaaaaaaataatcaacaaattgcctggagtacatcatattttgtttgatgaaatagatggaaatttcccaaatcatcccccagatcctactaaaaaagaaaatctacttgaattaagaaacaatattgaaaaatcagatgcagacctaggcatagcttttgatggtgatggagatcgaattgctattatgagaaaaaatggagaattaattcctggagatcttttaactgctttcttaagtttgtcaattaaagataaaacaaagaaaattatactggatgttaagtcaagtattgttgctaaacaagcaatagaaagtattggatttaaagtagaaatatggaaaacaggacattcaaatattaaatcaagaatgaaaaaaacaaactcattattggccggagaaatgtctggtcatatttttttttcagatgattattatggatatgatgacgctatatattcaagtattaggtttttaaaattaattaatgaggaaaaagaaatagaaatttttctagctaatttaaataaatgctattctacaccagaaataaaaataagttgctcagaaaatattaaatttaaaattatggaaaaaataactacaaaattaaaacaaaaatacgatttaaaa

SEQ ID NO: 291317 - DNA, 835 bp, Unknown
  Bacterial polypeptide expressing nucleotide sequence isolated from the Sargasso Sea
gatgcgtggctcccaactgtttaatagtctaggatgtgaggtaattgagctttatagcgaaatagatggaaattttcccaatcatcatcctgatcctggtaaaacagaaaatctaaaagatttaatattagaggtaaaaaataataatgcagaccttgggttagcatttgatggagatggcgatagagtaggacttattacaaatgaaggggaaataatttttccagataaaattcttatgatgttttgtcaagatatattactttctgaaaaaggatcaataatttttgatgtgaaatgttctaatgctttacctaaaataataaaagacttaggaggtaacccaataatgtcaccaactggacatttccatataaaaaatggtattaaaaagcataatcctttattagcaggtgaaatgagtggtcatattttttttaacgataaatggtatggctttgatgatgggcattactcaggagctagaattattgaacttatttataaaaaaagtgaatctattagtaatataaataaagaattacctacgttatattcaacacctgagctgaatattgatgttactgatgagactaaatttaaaataatagaggatttttgctctcaatgtttattagagggtgaaaaaattactatagatggcttaagaattaattttgctaatggatggggtttattaagagcctctaacacaacaccaaaattagttttaagatttgaaggtgactctaaagaaaatttaaatgaaattaaaaagaactttttaaatgaactttctcgcatttgtcctgatattgatataaatttagattag

SEQ ID NO: 291318 - DNA, 864 bp, Unknown
  Bacterial polypeptide expressing nucleotide sequence isolated from the Sargasso Sea
tgggcggtggttgagcggcgtgccttgggcgctttggtcatcaccgccagtcacaatccctccgaatggctcgggctcaagatcaagggccccttcggcggttcggtggagggtgacttcacagccgctgtggagagacggctggccgccgcaggaatcacgcccccgatccaggggacattcaaacgcttcgacggaagacaggatcatctcgacggtctgcgccgcaagctcgatctgacggccctgaccgatgggctcaggtcgatgaacctgaaggtgatcgtcgacccgatgcatggctcggcagcaggatgtgtcagcgaacttctgaacagctccaccgatggtctggtggaggagatccgcagcgaacgcgatccactgtttggcgggcatccaccggaaccgctggctccctacctttgccagctgatcacggcggtgaaagcttcacacgcagcgggcactccggcggtcgggcttgtgtttgacggagacggagaccggatcgccgctgtggatgaaacgggccggttctgcagcacccagctgctgatgccgctcctgatcgatcatttggctcgggccaggcaaatgcctggaaccgtggtgaagaccgtgagtggctcggacctgatgcgcctggttgccgaaggtcttgaccgcgaggttctggagctgcccgtgggtttcaaatacatcgctgcggagatgctggccggcgacgtcctcatcggcggtgaggaatccggcggtgtcggattcgggatgcaccttcccgagcgagacgccctgtttgcggcgatgttggtgctggaagctctggtggagggcgggcaaccgctgggggcccgtctgagc

SEQ ID NO: 291319 - DNA, 860 bp, Unknown
  Bacterial polypeptide expressing nucleotide sequence isolated from the Sargasso Sea
aatgaccaaagaaatatcctgcttcaaggcctatgatgtcagaggcaggataccttctgaactaaatgaggatgttgcttatcgaattggtgtcggcattgcatcttatttttctgccaaatcagttgtcgttggttacgatgtaagaccttcatccattgacatactcaatgcattaacaaaaggcatcaatagcatgggcgctaaagtctattcaattgatctatgcggtacagaagagatctactttgccacaaaccatctagagactgatgctggggtgatgatcactgcgagtcataaccctgctgattacaatggattaaaaattgttggcaagggtgcaaagccagtcagtatggacagtggacttggtgaaatcaaaaagattgcagatcaatctgaatccaaccttttagctgagcctaatatggaggtcgtcgatataaaagctgcatatattgagaaacttttagaattcgtagatccaaatacaatcaaaccaatgcacatagtcacaaatgctggaaacggttgtgcaggtccaattttggatttgcttgaagaaagactcccgctaaaatttactaagattcaaaatgatccagatggcacattcccaaatggaattcctaaccctttgttgccagagaatagggatattacatcaaaaactgttattgaacattccgctgaccttggtattgcatgggatggagattttgatcgatgttttttctttgattccaatggtgaatttattgatagttactacatcatcagtctactcggtaagcaattacttaaatcatcaccagggtcaaatattgtccatgatcctaggcttgtctgggatacac

SEQ ID NO: 291320 - DNA, 608 bp, Unknown
  Bacterial polypeptide expressing nucleotide sequence isolated from the Sargasso Sea
tggttacacattagagccagctttagtatcgggactagtttcaggtggaatgcacgtttttacgttagggccacttcccacaaatggattagcaatgctcacgaagtctatgaaggcgaatatgggaattatgattactgcatctcacaacccttatcaagataatggtctcaaattatttggtccagatgggatgaaattatcagacaaaattgaaaaaaaaattgaaagattaatagatgccaaaagtattttacaactttcagaccctaaatttttaggaagagtaaaaagattagaggatggaaatgaaaaatatattaagatattaaaaaataattttccaaataacttcaatttaaaaggcttaaaaatagtattagattgtgcaaacggggcagggtataaagctgctccaaaattattaagagaattaggagcaaaaattatttcaataggtactaaacctaacggttttaatataaatgataaatgtgggtccacttatccatctaaaattaaatttgccgtaagaaaacataaagctcatgttgggatttcatttgatggcgatgccgataggataattatgtgtgaagaaaagggta

SEQ ID NO: 291321 - DNA, 766 bp, Unknown
  Bacterial polypeptide expressing nucleotide sequence isolated from the Sargasso Sea
atagcaattgattgtggaaatggagctgcatctataatagcaaaacaaatttatgagaaattaggctgcaacgttacaagtctttttgatgaactagatggaaactttccaaatcatcacccagatccctcaaaagaagagaatatgcgagatctgaaaaatgcagttttagacaaaaatttggatttaggaatagcttttgatggagatgcagatagattaggaatagtaactaaaaaaggttcaattattgatgcagatatacaaatgttggcattttcgaaagaaattctgaaccagaatcaggggggcaagattgtatttgatgttaagtgctccaaattgctttcagaaggtatagaaaagctaggaggtatacctttaattaaccctacagggcattccttaataaaacggagattactagaggaagaggcccttctaggaggagaaatgagtgggcatattttctttaatgataggtggcctggtttcgatgatgctatctatgcaggtgcaaggatgctggaaatagtctcagaagctgaaaataaagatcttttggataatttgcccaacagctgctctactccagaaattaatatcccagtaggagataaagagaaatttggaatagtcaaagagtttaaaaaaagaatggattttaaggaagctaaaattattgatattgatggtgtgagagtagaatttaaatctggttggggcctcctgagaccttcaaatacctcaccagtcttagtgctta

SEQ ID NO: 291322 - DNA, 913 bp, Unknown
  Bacterial polypeptide expressing nucleotide sequence isolated from the Sargasso Sea
aacggcaaacctagaggtggacggaggtgtgatgattaccgccagtcacaacccgcctgagtataacgggttcaagatgtgtcgaggcaccgctgcaatggcaggtgacgaaattcaagaacttcgatctgtctttgaagcgggagaattccggacgggatcagggaaccatatcgatgctggagatttcctcaccatgtacatgactgatgtaatcgaaaaggctggactgcccgatcgttcggtcaaggtggtcattgattcagccaatgctgttcctggccccttcatggttgaactgtgtgaaaaactgggctgtgaggtctaccctcttcactgtgaatgggacaataccttccccaatcacccaccggaccccacgcgtccgaagaacatggtcgaacttggagcaaaagtggttgaaaccggagccgagtttgggattggcattgatggtgatggagaccgaatcggtgttgtagatgagcgaggacatttcatccatccagatcgcttgttggctgtatttgccagagacatcctctctcgcgtacccgctgatgccagtgatgctgccagaacggtgattcatgatgtcaagtgtagcatggccttggaacaaaccatcgaagccgcgggtggaattgcacacatgatgcgaacagggcactcgttcctgaaacaggcactccgtgaaaatcctgaagtgccgatggctggcgaaatgagcgggcatttcttcttccacgatcgatggaatggattcgatgattctctgtatgccactgctcgattgattcagttggttgcacaagacaacaaaccattctcttccttgttcgatggcattccttcctatccttcaaccggagaggcaaaggtccccttgaccggtggccgagaggagaccatg

SEQ ID NO: 291323 - DNA, 836 bp, Unknown
  Bacterial polypeptide expressing nucleotide sequence isolated from the Sargasso Sea
aatgttttttaaatttggtttagcagcaggtacatattttaaaaatcaaaaaaaaagtaaacaaatcgctattattgcaaaagatacaagattatctggatacacattagagccagcattagtctccggactgacttctgcaggaatccatgtttttacctttggacctctccctaccaatggattagctatgctaacaaaaaaaatgaaagcaaatatgggaataatgattactgcatcacacaatccttattatgataatggtttaaagttatttggtccagacggtttaaaattgtcagacaaaatagaaaaaaaaattgaaaaaataatagattcaaaaattactgataaattatcaaatccaaaaatacttggaagggttaaaagacttgaagatggatcagaaaaatatattgaaattttaaaagcaaattttccaaatcaatttaatttaagaggtttgaagatcgctatagattgtgcaaatggggctgcatacaaggttgggccaaagttattgagatcattaggagctgaagtttatgagattggaacttctccaaatggatttaacattaatgaaaaatgtggatcaacttttcctaataaaataaaaaatttaacaaaaaaaaatagagcacatattggaatttccttagatggtgatgctgacagaattattgtatgtgatgagaagggaaatatcatagacggtgataaaataattgcaatgttagcgcaaagatggaagaaaaaaaaaatattaaagggaggagttgttggaacattaatgtctaattatggtctagaaaaattttttaaaaaaaaaaaaa

SEQ ID NO: 291324 - DNA, 890 bp, Unknown
  Bacterial polypeptide expressing nucleotide sequence isolated from the Sargasso Sea
ctcaaatggtaaaaatagattcttggatataaaagatgactatattgacgaggttaaaaatagctttaattttaaaaacctcaaagtagtggttgattgtggaaatggtgcagccggaattattgctccagagttattaagagcagttggctgcgaagtcatcgaaatattctgtgatgttgatgggaatttcccaaatcatcatccggatccaggaaaagaaaagaatttagtggatcttattgagaaagtaaaagaggcctctgcagatgttggtgttgcctttgatggtgatggagacaggcttggagcagtaacttcatcaggaagattgatttatcccgatcaaatgatgatgttattctcaaaaaaaatactttcgaataatggatccgaaactattgtttttgatgttaagtgctcagactttcttcctcaaataattgaggaaaatgatggaatacctttcatgagtcctactgggcattttcatattaaaaataatataaaaaaatataatgccgttctaggaggtgaaatgagtggtcatattttctttaatgatatttggcatggttttgatgatggtcattattccgcaataaggcttttagacatcatgaatgaaactggatcatcactagatgatttattggatagccttcccgtttcttattcaactccagaattaaacatagatgttcctgaggagagaaagtttaaaataattgaggatttcattgaaaatgcatcaattgatggaaaaaaagattttactgacggtcttcgagcctcatttgagaatggctgggctctgttaagagcttcaaatacgactccgaagcttgtcttgagatttgaagcaaatagccaagaatcgctagaaaaga

SEQ ID NO: 291325 - DNA, 550 bp, Unknown
  Bacterial polypeptide expressing nucleotide sequence isolated from the Sargasso Sea
aatgaagattaaaatttcttcatttaaagcctacgatataagaggccagcttcctcatgaaattaaccctgagattgcttacagagttggcaacgcaacggctgaatatttatcggcaaaaaaaatgattctaggaagggacattcgtgcaagcagtaaagaattgtctgaatcaatggcatcaggactcatggatgcgggtgtggatgtgattgatataggtgaatgcggcactgaaaatgtctattatgcaacaggagagctcaaatcttgtggcggagttatggtcacagccagtcacaatccctctgattacaatggttttaaaatagtcagtgaaaacgcaaaaccattaagttctgagactggtttactagatattcggaaaattgctgaatctgacaaaagattgatatcagagtcaagaggcaatcttgagcaaagagatcttaatcagtcatatgttaaaaaagtattgagttttatcgatcctgactccctaagtaagctcaaggttgtaatgaatccgggaaatggtggggcgggtgtt

SEQ ID NO: 291326 - DNA, 871 bp, Unknown
  Bacterial polypeptide expressing nucleotide sequence isolated from the Sargasso Sea
ttggaacaggaacataattataaaatacaaaattttgatatagaagtacttcgtgaatatgatatcagaggagttgtaggtgtaaacataaatgagaatacagcttatacaataggtagaacttttggttatactgtaaaatcaaaattagaaacacatactatagcaacaggttacgacggaagattgacatcgccagttttacacaaagcactttgtgaaggtttgaaagattctggttcaaaagtattaaatattggaatgggaccaactccaatgacttattttgctcactatcatttaaatgccgatgcagtaataatggttaccggttcacataatccatctgaatataatggttttaaaatggtttttaacaatagctcatttttttcagaagatattcaaagtcttcaaaaattaatttatgacaacaaacttgaattgttagaaggccaaataattaatcaagatataacccaagaatatataaaaagagttcttttaaatattcgcttaaataggaagctgaaaattgcttgggatcctggcaatggagctatgggaaaagttactcgagaaataactgaaaaactatataattcagataacattattattaatgaagatgttgatggaaattttcctaatcaccatcctgatccaacgataccaaaaaacatggtacaattaataaagaccgttaaagaaaatgattgtgatataggtcttgcctttgatggtgatggagacagattaggcgttattgataatcttggaaatatagtttgggctgatcaatatatgcttttgctatgctcagaaattgccaatttatatgataatccaaaaaattataatggatgttaag

SEQ ID NO: 291327 - DNA, 592 bp, Unknown
  Bacterial polypeptide expressing nucleotide sequence isolated from the Sargasso Sea
atgacctgtttcaaagcctatgatatacgtgggcggctcggccacgatctggatgcggacatcgcgcgtgccatcgggcgcggtttcgcggcggcccgcagccccaaatccgtggtgatcgggcgtgatgcgcgcgaaagctccgccgatctggcgcaggcgctggccgaggggctgatcgcgggcggcgtggatgtgcacgatatcgggctggcgggcaccgaggaggtgtactttgccaccgatcacctgggcacggatggcggcctgtgcgtcaccgccagccacaatcccatcgactataacggcatcaagctggtgggcgcaggcgcgcgcccgctgagccccgccgatctggacgcggtgcgcgcggcatcggaggtgccccaccctgatgccgctacccccggcacgctgatccccgccgatccgcgcgccgattacgtggcgcgggtgctgagctttgtggagcctgcggcgctcaaaccgctcaaggtgctggtgaacgcgggcaacggtgcggccgggccgaccttcgatgcgattgcgcaggcgctggcgcaggcgggcgcgccggtgacgtgggtgcgga

SEQ ID NO: 291328 - DNA, 784 bp, Unknown
  Bacterial polypeptide expressing nucleotide sequence isolated from the Sargasso Sea
tttaaatttggtttggcttcaggcacttattttaaaaatcaaaaaaaaactaaacaagttgcaattatagcaaaagatacaaggttatcaggatacactttagagcctgctttagtatctggattagtttctggaggtatgcatgtgtttactttaggacccttacctactaacggtcttgctatgcttactaaatcaatgaaagcaaatatgggtataatgattactgcctcgcataatcctttttatgacaatggtttaaaattatttggtccagacggtatgaagctatctgataaaatcgaaaaaaaaatagaaaaattaatagatacaaaaagtacaaaacaactttcaaatccaaaatttttgggaagagtaaaaagattggaagatggaaatgataaatacattaagatactaaaaaataatttcccaaaaaattatcatttaaaaggaactaaaatagttttagattgcgcaaatggggcctgctacaaagcagctcctaagctattacgagaacttggagcaaaggtagtttctattggtattaaaccagatgggttaaatataaataaaaattgtggttctacatttccatctaaaatcaaagcagctgtaaaaaaatttaaagcacatgttggcatctcttttgatggtgatgccgacagaataatcatgtgtgatgagaagggaaaaattatagatggagatcaaataattgcaatgttagctagacggtggaaattaaagaaaatattaaaaggaggagtagttggaactt

SEQ ID NO: 291329 - DNA, 657 bp, Unknown
  Bacterial polypeptide expressing nucleotide sequence isolated from the Sargasso Sea
aaaaggccgtaattaatcatagagctgattatggtatttctcttgatggtgatggtgatagggtaattttagtagataaagatggaaatatattagatggagatgatcttttatatattcttgcttttgcaaatccaaatagaacaggtgcttggtcaggagttgttggaactcttatgagcaatctaggattagaagatggaatcaagaaacttggttataaatttttaagagctgatgttggagacaaatacgtcactgaaatgctcgcaaaaaaaggctggatgttaggtggagaagcatctgggcatattatatgtaaagatcttgttagcacaggtgatgggactattgctgctttaaaagttatatcttctttattaatattagaaaagagccctcaagaagtactttctaactataaaaaaatacctcagattaataaggcggtttcagtaagtaataaggatattgttaatgataaagacctcaaagcattaattaaagagattgaatcagatatgactgttggaaggattttagttagaccatcaggaacagaatctaaaataaggattatggtagaagctcctgaaaaacaagtagcagaaaaatttgctagtgatattgaaaaaattataaggtcaaaatcatgat

SEQ ID NO: 291330 - DNA, 898 bp, Unknown
  Bacterial polypeptide expressing nucleotide sequence isolated from the Sargasso Sea
tttggggactgatggtatcagaggaagagttaatgattccaaaataaatggagaaatgttttttaaatttggcttagcagctggtacatattttaaaaatttaaaaaaaagtaaacaaacagcaattatagcaaaagatacaagattatcaggatatactcttgaaccagctttagtatctggattggcatcggcaggaatgcatatttatactttgggaccattacctacaaatggtttggctatgctaacgaaaaaaatgaaagcaaatatgggtataatgattactgcatcacataatccatatcacgataatggattaaaacttttcggacctgatgggcttaaactatccgacaaaattgagaaaagaattgaaaagttaatagactctaaaattacgaaaaatctctcaaaaccaattgagttgggtagagtaaaaagattagaagatgctaatgaaaattatataaaaatattaaaacaaaatttcccatcctctttcagtttaaaaggtattaaaattgctttagactgcgctaacggagctggttataaagctggaccagatttatttaaatcattaggtgctaaagtatataaaactggcacttctccgaatggattaaatattaatcttaaatccggatctactcatccaagtttaatttgtcaaatgacaaaaaaaaataaagcccatataggtatttcattagacggagatgcagacagaataattgtctgcgatgaacaaggaaaaattgttgacggagacaaaattcttgcaatgctaggagagagatggaaaagaaaaaagattttaaaaggaggtgttattggcacacaaatgtctaattatggtttagaaaagttttttaaaaataatggaattaaattt

SEQ ID NO: 291331 - DNA, 694 bp, Unknown
  Bacterial polypeptide expressing nucleotide sequence isolated from the Sargasso Sea
atgattgatgaatccattttccgagaatatgacatcaggggaattgtgccctctcaagtaaatgaagcttctattagatctatctccaatgcaattgcaaaaaaatgcaatgatgaaaatattaatgagctggctcttggtagagacggaagactatctggagaaaacatattaaaccttctttctaaagagctccaatcgattggaatcaatgttgtgaatgttggaatagttaccagtcctcttctatattttgcggctaaacaactaccttcaaaatctggaatcatgattactgggagtcataatccaaaaaactataacggttttaagatagtaattaacgattcgcctatctcaggtcttgagattttaagtttactatcaaataaaccaatcagaaaaaaagatgctggcaaggaagtctataagaaaaatttaatggatgagtatattgaagaagtattgtcgcaaagtttgaagaagccaaaaaaaattaaggttgttctagattgtggtaatggttcagcaggtgaaattgcacccaaactaattcgttcgttaggttatgaagtgattgagctctattgtgatattgatggaaactttcctaatcatcaccctgatcctggacaagtagagaacctccaagatttaattcaggcagtaaaagaaaattctgctgatgtgggaa

SEQ ID NO: 291332 - DNA, 829 bp, Unknown
  Bacterial polypeptide expressing nucleotide sequence isolated from the Sargasso Sea
atcacagcttcccataatcctccagaatataatggatttaaaatgaataaaggttctgctgcaatggcaggacaatcaattcaagagttattagaagtatttctacaatctaagtttaaagcaggtgaaggaagtatatcaaatagggaaattttaggaaatcatattgaaacaataatgaataagattaatgttccaaaaaggcgattaaatgtagcaattgattgcggaaatgcggttgcagggccagcaatgttagaattattcaagaatttagaagtcgatgtagttcctattttttgccagtgggataatcaatttccaaatcatccaccagatcctacaagagtagaaaatatgcaacatttggcaaaagcagtgagagaaaataattgtgattttggcataggtattgatggggatggagatagagtaggtttagttgatgaggccggaaattttattcatccagacaaaatgttagcactttttgcaatagatattttgagtaaaaacaagggacttagtgaacaacaacgtaccatcatttttgatgtcaaatgttcaatggcggttgaaaaagtcattaaagaaaatggaggaattcctctaatgttgcgtactggacattcattccaaaagcaagcattacgtgaaaaacctttagttccattagctggtgaaatgagcggacatatatttttcaatgataattggcctggatttgatgatgcattatatgtttctgctaggttagttgaattggtttcaaggtctttagaatctaatggaaaatttagtgatttaatttctaaattacctgtttatt

SEQ ID NO: 291333 - DNA, 838 bp, Unknown
  Bacterial polypeptide expressing nucleotide sequence isolated from the Sargasso Sea
aaagactatgaagttggccaaggaaagttaagaagtacagatgtatcgaatgattatattcagagtatcttagatgcaatacatctaaataataagccaatattgaagatcgttctggattgtggcaatgggtccgctggtgaaattgcacccagattatttaatgcgcttggttgcgatgtggttacaatgttttcagaaattgatggtaattttccaaatcatcaccctgatccaagtcagccagaaaatttggaagatcttataattaaagttaaagaagaaaacgcagatattgggtttgctttggacggtgatgctgatcgattaggtgtggttgatgctagtggtaatattatctggccagataaacagttaatgttattagcaaaagatgttctgtcgcgtaataaggggaaacacataatattcgatgtgaaatgtactcgtcatctaaaatcaatcattgagtctaacaacggtatagcgtgtatgtggaaaacaggacattctttcataaaacaaaagatgtatgagcttgatgcgccactagctggtgagatgagtggccatatatttttcaaggagcgttggtatgggtttgatgatgctctatatacagctgctcgttttattgagatttttactaattatagtataaagccaacagaattatttgccgcattgccttatgggatatcaactcctgaactgagaatgcctctagaagaaaaatatcatactaattttatgaaagagttttcaaataacattccaaaattagatgctaatattataagtatagatggattacgagctgaatataatgatggatggg

SEQ ID NO: 291334 - DNA, 664 bp, Unknown
  Bacterial polypeptide expressing nucleotide sequence isolated from the Sargasso Sea
gttcaaaagctgtttaaagaacatagagctgactttggagtgtcactagatggtgatggtgatagagtaaccatcgtagacagagaatcaaatattttagatggtgatgatattctttacatattaggttttgccaatcctaacagactaggtccatggtcaggcatagttggaactcaaatgtctaatgttggattagaagatggacttaataagcttggatattcattcaaaagagcggacgttggcgataaatatgtttcagatttattatcaaaagagggttggcttcttgggggagaaccttctggacatattatctgcaaagaccttgtcagcacaggtgatggaactatagcagcgctaaaaacaattagttcactagttatgcttgagaaagatccaaaagatatcctttctaattacaataaaattcctcaaattaacgaatccataagcgttataaataaagatattgtcagtgatgccgaagtaaaaatagctataaatgatatcaagtcagatttaacaattaatagaattcttgtaagaccatcaggtactgaaaataaaattagaataatgattgaatctgaaaacaaaaaaacagccaaaaaatatacaaatgatctcattaagctatttgagtctaaaactcgctaac

SEQ ID NO: 291335 - DNA, 494 bp, Unknown
  Bacterial polypeptide expressing nucleotide sequence isolated from the Sargasso Sea
ttttaaattaaaagtggttattgattgtgggaatggtgctgcaggatgtatagccccaaaactatttagcgaactaggctgtgaagttattgaacttttcactgaagtagatggaaattttcctaatcaccatcctgatccaggcaaattagaaaatcttcaggatttaattgcaaaagttaaattgacaaaagctgatttgggtttagcatttgatggtgatggagatcgagttggtttaattactgatagaggcgatgttatttatcctgacaaaatcttgatgatgttctgcaaagaaatccttaatataaacaaagggtctataatctttgatgttaaatgtacgaatgcccttccagatttgataaaaaatttaggcggaacaccaataatgtcgcctactggacactttcatatcaaaaatggtatcaaagaacataatccactccttgcaggtgaaatgagtggtcatattttttttaatgacaaat

SEQ ID NO: 291336 - DNA, 802 bp, Unknown
  Bacterial polypeptide expressing nucleotide sequence isolated from the Sargasso Sea
tatgagattatttggaactgatggaataagaggcgaggttggaaaataccccttaactgctgaaaacgtacttaaactagctaaagcatcatcgtttgttttaagaaaaaaaaattcaatatcaagagtagttattaacaaagatacaagactgtctggttatatttttgaacctgctttagcttcaggctttatatcaatggggatagatgtgattttagtagggcctttacctacacctgctttaacagtacttggtaagtcacttagagcagacttttctgtaatgattacggcttctcacaatccatataaagataatggattgaaattcttttcaggtcaaggtcttaaaatttctactgatgatgaaaataaaatagaagatttgttttttaattatgactttgataattttaaaataaaaccatcaaattatggtaaagcaataagactaaaaaatgctttagggagatattcagaggctcttaaacagagtgctgatagaaatctaaattacagtaaattaaaagtaactttagattgtgcaaatggggcttcatataaagtagcaccagaagttttatttgaattaggtttagaccttcacactattggaaataatccctctggcataaacatcaatcaaaactgtggctctttatttccactaaaagcatcagagttagtaaagaaaaaaaaatgtgatattggagtttgtttagatggagatggtgaccgagtaataattgttgatgaaaagggtaaggtattaagtggagaggaattaatttatattttg

SEQ ID NO: 291337 - DNA, 730 bp, Unknown
  Bacterial polypeptide expressing nucleotide sequence isolated from the Sargasso Sea
gggttgcaatggaggtgtagtacttaccgcctctcacaatcccaaagaatacaacggatataaagcatactggtcggatggtgggcagctcatttcacctcatgataaaaatgtggtagcagaagtggcaaaaattgaaagcattgatgatgtaagctttgaagcggatccatcgttgattgaaatgataggcgatgatatggatcaggcgtatttgaaaacactcaaggaaatatcactgctggataccgaaataattaaaagctccaacctaaagatcgtcttctcatccatacatggaacaggaatcacattaatcccccgggcattgaaagcgcttggatttcagggggtagctattgtagaagaacaggcagatccggatggtaacttccctacagtagtttatccaaatcctgaggagaaagaagccatgtccatggcattgaagcagggtgaagctaaaggtgctgatttaattttagccaccgaccctgatgcagatcgtgttggaattgccgtgaaaaatacaaatggagaataccagcttttaaatggcaatcagacaggctctttattgatctattacctcgttataaagtggaaagaaaaagggctaaaaggaaatgaatttgtggccaaaaccatcgtgaccaccgaattgattaaagatattgcagttaaaaatcaaatcaaatgctatgatacgctgactggctttaagtttatt

SEQ ID NO: 291338 - DNA, 825 bp, Unknown
  Bacterial polypeptide expressing nucleotide sequence isolated from the Sargasso Sea
gcagaatgtgtatccgtagtgagagatatcagggactctagtcctagttatcatgaagcctttgttgagggattaatttctgctggagcaaatgttctagatctgggtatttcttctacaggtgttttgtatagatctacagtagacctaccagtcgatgtagctgtagcaattacagcaagtcataatcctcctgaatataatggtttcaagatatgtaagggtaagctacctctagggggtgaggatctacaagatattcggagaacgtttgaatctggaaacttcagagaaggcataggaagctatgaaacaagaaatgattatgaaaaagaatatgtaaattccattttgaacactgtcggtaaacctgatagggatatcaggattgtactggactgtggaaatgcagttcccggacccctagcagtaaagacccttgaagaattaggaatagatgtgattcccttatattgcgattgggacaattcattcccaaatcatcctccagatcctacaagaccgaagaatatggttgatctgggcaaagcagttgtcgaacacggagcagaattcggaattggaatggatggagatggagatagattaggggtcgttgatgaaaaaggagattttattcatccagatagattaatggggatttttgtcaaagatgttctggaaaaccttccgaaagacgcctcagaagagaaaaggacgattttttatgatgtcaagtgtagcatggctctggaggatgctataaccgatttcggaggagtccctaggatggttagaactgggcacacattcatgaaactagaa

SEQ ID NO: 291339 - DNA, 847 bp, Unknown
  Bacterial polypeptide expressing nucleotide sequence isolated from the Sargasso Sea
tatgggaaaagttacacgagcaataactgaaaatttaaataactctgaaaccatttttataaatgaagaagttgatggaaattttcctaatcatcatcctgatcctacagtaccgaaaaacatggtacaattaatcaagactgtgatagaaaatgattgcgatgtaggtcttgcttttgatggcgatggtgacagattaggtgtaattgataatcttggtaatatagtttgggctgatcaatatatgcttttactatgttcagaaattgcacatttgtacgacaatccaaaaattataatggatgttaagtgcagcaaggttttttttgatgaagcaaaaaaaattaattgtaatcctgtaatgtcaagaacaggccactctcctataaaagaaaaaatgaaagaattaaattcgcccttatcaggggaaatgagtggacatatttgttatggtgatgatttttatggatatgatgatgctatgtatgttggtttaaggttgctgcgtatattatcaaacgagagtaagccacttaatgatttaattaatatttatcctaaaacattttcaacaccagaaacaagatttgatgtcgatgagtctagaaaatttattattatagaagaggtaaaagaaaggcttaaaaaagaagataagaaaataatagatatagatggtgttagggtagaaaatgaagatggatggtttttgatgagagctagtaatacacaaaatcaacttacttgtagagctgagtcaatttctgaaaaaggtctacataaacttatcggcattattgaagatcaattatctttaagtggaataagttataaatttacaatctaa

SEQ ID NO: 291340 - DNA, 526 bp, Unknown
  Bacterial polypeptide expressing nucleotide sequence isolated from the Sargasso Sea
aaaaaaaatggtgaaattaatgatgtaaatataattgataactatatcgagagaattttgcaaaatattcatatcaaaaaaaaattaaaaattagttgggatattggtaatggtgcaatgggagtagtaattgataaacttatagcaaaacttcagaatactgaaaatatattattaaataaagatgtagatggcaactttccaaatcatcatcctgatccaacagtgccaaaaaatatgcagcaattaataaaatcagtaaaagaaaataattgtgatttaggtatggcttttgatggtgacggggataggttaggtgttattgataattttggtaatattgtttgggcagatcaatatatgttagttttgtgctcagaaataaaaaatttatataaaaatcctaaaattattatggatgtgaagtgcagtaaggttttttttgatgagtcaaaaaagatgggttgccttcctataatggaaagaactggccactcacctatcaaagaaaaaatgaaggagttaa

SEQ ID NO: 291341 - DNA, 754 bp, Unknown
  Bacterial polypeptide expressing nucleotide sequence isolated from the Sargasso Sea
ctttggtataagaggcacagtaaatttaggcaatattaatggtgaaaagttttttaaatttggcttagctgccggcacttattttaaaaacttaaagaaaaaaaagcagatagcgattattgctaaagatacaagattatcaggatatactttagaaccagctctagtatcaggattggcttcagcaggaatgcatatctttacattagggcctttacctacaaatggattagcaatgttgacaaaaaaaatgaaagcaaatttaggtataatgataacagcatctcacaatcctttccatgataatggactaaaattatttggaccagatggaatgaaactatcagataaaattgaaaaaaaaattgagagtttaattgacaaaaaaacaatttatcaattatcaaaaccagattttttaggaagagttaagcgattagaagatggaaatgataaatatattgaaattttaaaaagcaatttcccaagtaattttagcctcaaaggaatgagaatagttttagattgtgctaatggtgcaggatataaatctgctcctaaaattctatcaaacttaggtgcgaaagtattttcaattgggattaaaccaaatggtttaaatataaatctaaaatgtggctccacatatcctgaactcttaaaaaaatatgtgaagaaatttaaagctgatattggaatatctttagatggtgatgccgatagagttataatgtgtgatgaaaatctcaaataa

SEQ ID NO: 291342 - DNA, 742 bp, Unknown
  Bacterial polypeptide expressing nucleotide sequence isolated from the Sargasso Sea
gggattgtcgaagagacactttcaaccgacgatgcctatgcgattggccgtgcgttcggcactgaaatttccctaaacggcggtgccacagcctgtgtcggatacgatggacggcttagctcgcctgaaatggaacaggccgtcgtcgatggtctgaaggacagcggtatcgatgccgttcgcgttgggctgggccccacgccgatgctgtatttcgcagtaaatatcgttggtgctgatggtggcatcatggtgtcgggctcgcacaatccgccggaatacaatggattcaaaatgatgcacggaaccaagccgttctatggtgacgccatccagaacctcggaaaaattgcggcagctgcggattatgcggacggcagcgggcaggaccgacaggaacccatgctcgaccgctacgtctcaagggtcggtcaggattataccggtggcaaggaactgaaggtcgcctgggatgccggcaacggctctgcgggtgaggcgatggttcgcctcgcagaagccctgccgggcgagcacctgcttctgaacgaaaagatcgacggaaccttcccggtacaccatcccgatccgacagtggtcgaaaacctagagcagcttcgcgatgttgtcctgaaggaagggtgcgatcttgggatcgcgttcgacggggacggcgaccgcataggtgttattgatggtgaaggtgagattctatggggcgatcagcttatggtggtgtggt

SEQ ID NO: 291343 - DNA, 823 bp, Unknown
  Bacterial polypeptide expressing nucleotide sequence isolated from the Sargasso Sea
tgtagtaattacagggagtcataaccctggtaattacaacggttttaaaattctttttaataacaactcaacttctagcgaagaaatacaatccattaaaaagaggataaaagaacaagatttcttgtctggagcagggaggattgaatctttagatgttgtagaaagctatgttgaagaagtcaaaaataatataaaactgagccgaccactgaatatttctatagattgcggaaatggagcagcaggtgttgttgcagaaaaagtttacaaaggtatagggtgtgaagtggaaggactttattgtgatcttgatggaaatttcccaaatcaccatccagacccatccaaaccagaaaatgtggaagatcttattgaatcagttttaaaaaacaaatcagagattgggttagcatttgatggggatgctgatagattaggggttatttctccttctggggaaatgatttttcccgatatgcagatgatcttattcagtgagcatgttcttaagaaaaagccaaattcaaagattgtatttgatgttaaatgctcaaaactattagaggaagccattcttaaatctaacggaattccaataatgagtaaaactggtcacaccttcataaaaagcatgattagaggccatggagctatattgggaggggaaatgagcggtcacatcttttttaatgataggtggcctggttttgatgatggagtatatgctggtgcaaggatgttagagattctttctcattctgaaggagaagatatatttagaactttaccaaaattagtatctactccagaaataaatata

SEQ ID NO: 291344 - DNA, 732 bp, Unknown
  Bacterial polypeptide expressing nucleotide sequence isolated from the Sargasso Sea
caaaaactaggacattttgcaagcaaaggttattcaagaacctataatggtttttctaaatctgtcgcaataaatactcattatgttgatgaaattattaaacctctccaaaatattaaacgacaacttgatgataaaactattgtttgggattgtggcaatggcgcatccggtccttcacttgaaatgataaccactaaaattcctggaaaacacgttatcttatattctaaagttgatggcaattttccaaatcatcatcctgatcctactgatgagtctactctaaaaattttgagaaataaaatgaaagaggttgatgctgaacttggaatagcatttgatggagatggtgatagaattggcgttgttgacaagcaaggtaggccaattcctggtgatttgttaactgcatttcttgcaaattcaatagctacaaatgataaaattattcaaacaataattttagatattaagtcaagttatgttgcatatgaaaatattatatctcttggttttaaagcagaaattggaaaaacaggacattcaaacatcaaaaaaagaattaaagaaataaaatccccattagcaggtgaaatgtctggtcacattttttttggtgacacctattttggttatgatgatgcactttatgcagctataagattacttaccttaacggcaaataattttgaattagataaatttatatcaactttgcctgaaacattt

SEQ ID NO: 291345 - DNA, 796 bp, Unknown
  Bacterial polypeptide expressing nucleotide sequence isolated from the Sargasso Sea
ctttaaatttggtttagcttctggcacatattttaaatctcaaaaaaaaaagaaacaaacggcagtcatagctaaagataccaggttatccggttactctttggaaccagcattagtttcaggattggcatctgctgggatgcatgtttttacactaggacctttgcctacaaatggtctagcgatgttgactaagtctatgaaagctaatatgggcattatgattactgcttctcacaatcctcattatgataatggtttaaaattatttggcccagatgggatgaagttatcagataaaatagaaaaaaaaattgaaaatttaattgataagaaaataaataaaaatttatctaatcctgaaaatttaggaagagtaaaaagattagaaagtggtacaaaagattatataaaaatcctaaaaaaaaattttacaaaagatttcaatttaaaagaattaagaattgttatcgattgcgcaaatggcgcaggatataaagcaggaccagatttgttgagatcattaggagcgaaagttttcgcgataggagttaatcccaacggcttaaatataaacaagtattgtggctcaacatttccaagtaacataaaaaatgctgtaaagagacataaagctgatttaggtatttctttagatggtgatgcggatagaattattatgtgcgatgagaagagtaatatcattgatggtgatcaaataattgctgctctagcaactaggtggaaaaataaaaaaatgctcaaagggtggagtggttggtactttaatgtctaa

SEQ ID NO: 291346 - DNA, 467 bp, Unknown
  Bacterial polypeptide expressing nucleotide sequence isolated from the Sargasso Sea
aaaattgtaaataaatacgtccaaagaattttaaaaaatataagtataaaaagaaaattaaaaatttggtgggatattggaaatggagcaatgggtgtaattattgataaagttttaggaaatttaaataatactgaaaatattgtacttaataaagttgttgatggaaattttcctaaccatcatcctgatccaacagttccagaaaatatgaaacagttaataaattctgttgtaaaaaataaatgtgacattggtctcgcatttgatggagatggtgacaggttaggagttgttgataatttaggtaatattgtttgggcggatcaatatatgctagttttatgttctgagattgtaaatttatataaaaatcctaatataattatggatgttaagtgtagtaaggtattttttgatgagtctaagaaattgggatgtgtaccaattatggaaagaataggtca

SEQ ID NO: 291347 - DNA, 890 bp, Unknown
  Bacterial polypeptide expressing nucleotide sequence isolated from the Sargasso Sea
cgtgcgtggctgcgagcttgagccactgctcaccgaaacgcccgtgccgacacctgcctgcagctgggcggtggtggaacgcaaagcgctgggagctttggtgatcaccgccagccataacccccctgaatggctcggcctgaaaatcaaaggtcccttcgggggctcggtggaaggtgacttcaccgcagcggtggagcgacgcctggcggctggcggcatcacaccacccattgcagcgaccaccagccgattcgacgggcggggtgagcaccttgagggattgcgtcgcaaattggacctcaccgctctggtgacgggcctgaaggcgatgaacctgaaggtgttcgtcgacccgatgcacggatcggcagccggctgtgtgagcgatctgctcggccctgaagcctctgagctggtggacgagatccgcagcacgcgtgatcccctgttcggcggccatccaccggaacccctggccccttacctcagcgatctgatcacagcggttcagcactccacggcagcgggcactccagcggtgggtctggtgttcgatggggatggcgatcgcatcgccgccgtggatgagaacggtcggttctgcagcacccagctgctgatgcccctgctcatcgaccatctcgccagggcccgccagctgcctggaacggtggtgaagactgtgagcggttccgatctgatgcgcctggtcgctgaggcccagggccgtgaggtcctggaactggccgtcgggttcaagtacatcgccagcgagatgctggcgggtgaggtgctgatcggtggagaggagtctgggggggtgggcttcggcatgcatctgccggaacgggatgccctattcgccgcgatgctcgtgctggaagcgc

SEQ ID NO: 291348 - DNA, 796 bp, Unknown
  Bacterial polypeptide expressing nucleotide sequence isolated from the Sargasso Sea
atttatgaaaacagcagccaaagtactggtgtcacaaggaatcaaagtatatcaagccaatagtataattacaacaccgatgatctcccttggagctaaagaacttaatgcctgtgtaggtatagtattaacagctagtcataatccaccctcatacaatggatttaaactaaaaggtcattatggtggaccacttacttctgataaaattacagaagtcgaacaattaatccctgatgaaaatatagttgacttaaatgctgttgaattgtcagaaatggagcaaaagggactaatagaatctgttgatttagaagaaatgtacatggacaagataaaatcatcatttgatcttgatgccattaaaaattcaggtttaagatttgcttatgactctatgtatggagcaggtcaatttgttatgcataaattatttcctgacatgagctttttgcattgtgaatataacccatcttttaatgggcaggcaccagaaccaattgcaaaaaatttaatgccattttctaattttatagctggtgatggaggaattgcagcaggattagctaccgatggtgatgctgatagaataggattgtttaatgaaaagggcgaattcgtagattctcatcatatacttcttttattattgctgtatttacataagtacaaatcaatgaatggaaaagtagttgtagctgcctcaactactcctagagtggtgaaattagctgaaaagtggggcctagaacatgatactgttcaaattggatttaaacatattgccccaacaaat

SEQ ID NO: 291349 - DNA, 886 bp, Unknown
  Bacterial polypeptide expressing nucleotide sequence isolated from the Sargasso Sea
ggcctttggggtaaaacatttaatgcggcagcaggcattgtggtgaccgcgagtcataacccgccgcaatacaatggctataaagtctattgggagaatggcgcgcagattattccgccccacgactcgggcattgccgcgcaaattgagcgtgcagcgaatcaagcgattccgtttttagagcatgatgacgcggtaaaacaaggtaagttgatactcctgcaggacgatttttaccaaagctatcgtcatggcgtgcagcaagcagaggtgctgcaaaaccataccgctcctgaaaaggtgagtttagcctataccgccatgcacggcgtgggtgccgaaatggctgaaacggtattgaaagatgctggtttcacccaagtgtattcggttgcctcccagcgtgaacccgatggcgatttcccgacggtgaacttcccaaaccctgaagaaaagggggcgatggatttagtgattgccgaggcgaaaaaacacggcgctatgctcgcctgtgctaacgatcccgatgccgaccgttttgctgttgcagtgcgtcgtgatgatggcgagtatcagatgctgacgggcgatcaagtcggtgtgctctttgggcattacttgttatctcacgctaaagataatcaacgtcttacgggcacaacgatagtgtcatcgagcctgttatctaaaattgctcaagggtttggcacgcaaagctttaccacgctcaccggctttaagtggctgatgaatgtgggtatcgcgaaaacgtcccctgaggatcagttcctgtttgcctatgaagaagcccttggctatacggtgggcagtatggtgtgggacaaagacggcctgtcggcgctggtggcatttgcccaattaactg

SEQ ID NO: 291350 - DNA, 916 bp, Unknown
  Bacterial polypeptide expressing nucleotide sequence isolated from the Sargasso Sea
aacaaaagttttgataatggttttggtaagctaagtaaaaaagatataaaaggggaatatatttctgagctaataaaatattctggtcctttttcaaattgtaaagtcatttgggattgtggcaatggtgcaactggagaaattgtttcaaaaattgtcaaaagaattcctgggcagcataaagttttattcagtgagattgacggtaactttcctaatcatcatcctgatccaaccatagaaaaaaatattcagcatttaaaaaattatataaaaaccgaaaaagctgatttaggcatttcatttgatggtgatggtgacagaattggagttatttcaaaaaatggagacttaatatcaggtgatctactaacttcttttttatcaggtgggattttggctaagaaaccaaatcaacaaatcattcttgatgtcaagtctagtgaaatggctatcaaatcaattgagaaacaaagtggctttacagttatttcaaaaactggtcacagtttaattaaagaaaaaattaaagaaattaatgcgcccttagcaggggaaatgagtggccatattttttttaatgataaatggtatggttttgatgatgcaatttatacagccttaagatgcttggaagaaataaattttagaaatggtggattagaaaagtttcttaatcttttgccggaatcttttgcaagccctgaaataagaattgaatgtaaagaagaggaaaaatttaaagttattgaaaatataaaacataatgctttatcagattattcttcatcagatttactattaattgatggagtaagggtaaaaaccaagattggatggtggttaattcgtgcttcaaatacgcaagctgcattaattgccagagcagaaggtaataataaagaaagcctttaat

SEQ ID NO: 291351 - DNA, 853 bp, Unknown
  Bacterial polypeptide expressing nucleotide sequence isolated from the Sargasso Sea
agagaatatgatattcgaggaattgttgataacgatattaatcaaaatacagcttatactattggtagaatatttggacatattatcagtaataaatttaacgaaaaatctattgttgttggttatgatggaagaaatacatcaccaaatcttcaaaaagcattatgtgtaggtcttattgaaagtggatcaaatgttaaaaatattggtttatgtccaacaccaatgacatattatgctcatcactttttaaatactaatgcagcaattatggttactgggtctcataatccttctgaatataatggttttaaaatggtattagacaagaatcctttttatgcaaaagacattcaaaattttaagaatttagcagatgataataaacttgtaaaagggaggggaaagtttgaatctattaatattaaaaatcattatataaatcgtaatcttaaaaatattaattttaaaaaaaaattaaaagttgcttgggatataggcaatggatcaatgggaatagttatggattctattgcattgaaaatgaaaaatatagaaaatatacttataaacaaagaagttgatggaaattttccaaatcatcatcctgatccaacagtaccaaagaatatgattcaactaattgaaacagtaaaagaaaatagctgtgatgttggattagcatttgatggagatggagatagactaggagttgtagacaataaagggagaataatatgggctgatcaatatatgttattattatctaaagaaatatcatctatttatgaaaatccaaaaattattatggatgttaaatgttctaaagttttttttgatgaagtaagaaaat

SEQ ID NO: 291352 - DNA, 837 bp, Unknown
  Bacterial polypeptide expressing nucleotide sequence isolated from the Sargasso Sea
actgagagaaaaattctttaaatttgggttagcatctgggacttattttaaaaaccttaaaaaaaataaacaagttgcaataatagctaaagacacaagattgtctggctatacattagagccagccctggtctcaggtttggtttccggaggaatgcatgtatttaccttaggccctttaccgacaaacggtcttgcgatgctcactaaatctatgaaagccaatatggggataatgattactgcttcacataatccttatcacgataacggtctaaaattatttggtccagatggtatgaagctatctgataaaattgaaaaaaaaatagaaaaacttattgatgctaaaataacacgccaactttcaaatccaaaatttttaggaagggtaaagcgattagaagatggaaatgacaattatataaagatactaaaaaataattttccaaataatttcaacttaaaaggtttaaaaatagttttagattgtgctaatggagccagttataaagctgcccctaaattactaaaagaattgggagcgaaagtaatcgctattggaactaatccaaacggatttaatattaacgaaaaatgtgggtctacttatccatccaaaattagacaagcagtaagaaaattccaagctcacgtgggtatatcttttgatggtgatgcggatagaataattatgtgcgatgaaagaggaaaaataattaatggcgatcaaattattgcaatgcttgctcgaagatggaaatctaagaaaatcttaaaaggaggagtagttggaacattgatgtcaaattatggggttagaaaagtttttgaaaa

SEQ ID NO: 291353 - DNA, 898 bp, Unknown
  Bacterial polypeptide expressing nucleotide sequence isolated from the Sargasso Sea
gtcggcattgcatcttatttttctgccaaatcagttgtcgttggttacgatgtaagaccttcatccattgacatacttaatgcattaacaaaaggcatcaatagcatgggcgctaaagtctattcaattgatctatgcggtacagaagaaatctactttgccacaaatcatctagaaactgatgctggggtgatgatcactgcgagtcataaccctgctgattacaatggattaaaaattgttggcaagggtgcaaagccagtcagtatggacagcggacttggtgaaatcaaaaagattgcagatcagtctgaatccaaccttgtagctgagcctaatatggaagtcgtcgatataaaagctgcatatattgagaaacttttagaattcgtagatccaaatacaatcaaaccaatgcacatagtcacaaatgctggaaacggttgtgcaggtccaattttggatttacttgaagaaagactccctcttaaatttactaagattcaaaatgatccagatggcacatttccaaatggaattccgaaccctttgttgccagagaatagggatattacatcaaaagctgttattgaacattccgctgaccttggtattgcatgggatggagattttgatcgatgttttttctttgattccaatggtgaatttattgatagttactacatcatcagtctactgggtaagcaattacttaaatcatcgccagggtcaaatattgtccatgatcctaggcttgtctgggatacacaagaagagataagtaataatagcggagtacctacaatttcaaagtcaggtcattccttcatcaaagaggtaatgagagaatgcaactctgtatatggaggagaggtcagtggtcacccattattttagg

SEQ ID NO: 291354 - DNA, 734 bp, Unknown
  Bacterial polypeptide expressing nucleotide sequence isolated from the Sargasso Sea
catgttctttaaatttggactcgctagtggaacatattttaaatctcaaaaaaaaagaaagcaaatagcaataattgcaaaagatacgagactttcaggctatgctcttgaaccagcacttgtctcaggtttagcttcagctggtatgcacgtctatactttaggacccttaccaactaatggattggctatgttaacaagagaaatgaaggctaatatgggcataatgattacagcctctcacaatccacattacgataatggattaaaattatttggtccagatggaatgaaattatcagacaaaatagagaaaaaaattgaaagtcttatagataaaaaaatttcaaaaagcctttctaaacctgaaaaattaggaagagttaaaaggttagaaacaggcacaaaaaaatatattaaaatattaaaaaaaaattttacaaaagagtttaatttaaggggattaagaattgtaattgattgtgcaaatggtgctggttataaagcaggacctgaactattaaaatctttaggagctaaagttattgcgataggtataaaccctaatgggctaaatataaataaaaattgtgggtcaacatttccaaacaaaattagatctgctgtaaaaaaatataatgctcatgttggtatttctctggatggagatgctgatagaattataatgtgtgacgagaatagtaatataattgatggagatcaaattatagcag

SEQ ID NO: 291355 - DNA, 828 bp, Unknown
  Bacterial polypeptide expressing nucleotide sequence isolated from the Sargasso Sea
aagttacaaataatttaaataattctgaaaatatattaattaatgaagaagttgatggaaatttccctaatcatcacccagatccaactgttccaaaaaatatggagcaattaataaagtcagtaaaagataacaaatgtgacataggtctggcttttgatggagatggagatcgtttaggtgttgtagacaacttaggcaatttagtttgggcagatcagtacatgttattactatgcactgaaattgctaacttatacaataacccaaaaataattatggatgttaaatgtagcaaggttttttttgatgaagcaaaaaaacttaattgcgatcctattatgtctaaaactggtcactctccaataaaagaaaaaatgaaagaattaaaatcccctttatcaggagaaatgagtggtcatgtatgttatgcagatgatttttatggttacgatgatgcaatgtatgttgcgttacgcttattacgaatattatgtaatcaagaaaaatccttgaatgagttaattaatatatatccaaaaacttattcaacccctgaaacaaggtttgatgtagatgaaataaaaaaatttttaattattgaagaaataaaagaaagaataaaaaatacagaaggtaaaataatagatattgacggtataagagtggaaaatgatgatggatggtttttaatgcgagctagtaatacccaaaaccaactaacttgtagagcagaatctacttctcaagaaggccttaagtctttgatagcaattattgaaaatcagttatctttaagcggtgtaaattataagtttacagtctaac

SEQ ID NO: 291356 - DNA, 804 bp, Unknown
  Bacterial polypeptide expressing nucleotide sequence isolated from the Sargasso Sea
tttagcaaccgctacttattttaaaaaccaaaaaaaaactaaacaaattgcaataatagctaaagatactagaatttctggatatactttagaaccagctctagtatcgggtttaacatcaggtggaatgcatgttttcacattaggaccgctgccaactaatggacttgccatgttaacaaaaaaaatgaaagcaaacatgggtattatgattaccgcgtctcacaatccttataattataatggtctaaaattgttcggacccgatggtatgaaattatcagatcaaatagaaaaaaaaattgaaaaattgatagatgctaaaaatacaaagcaacttacaaattctaaatttttgggcagagttaaaagactcgaagatggtaatgatagatatatttcaatattaaaaaaaaaatttccaaatagttttaacctaaaaggaaccaaaatagttttagattgtggaaatggtgcaggttatatagcaggtcctaaattacttaaaaaacttggagctaagccaatctcaattggaacaaaacctaatggttttaacattaatgataagtgtggatctacctttccatttaaaattcaatctgttgtaaggaaatacaaagctcatgttggtatttcgttagatggagatgccgatagaataattatgtgtgatgaaaaaggaaaaattatagatggtgaccagataatcgctatgctggctaaaagatggaaaagagaaaaaattttaaaaaggaggggtaatcggcaccctaatgtcgaactatggattagaaaattttt

SEQ ID NO: 291357 - DNA, 719 bp, Unknown
  Bacterial polypeptide expressing nucleotide sequence isolated from the Sargasso Sea
atatacgttagagcctgcgttggtatctgggcttgtttctggtggcatgcatgtttttacactaggacctttaccaactaatggacttgctatgctaaccaaatctatgaaagctaacatgggcataatgatcacagcgtctcataacccttattatgataatggtttaaaattatttggtccaaatggtttaaaactatcagaccaaatagaaaaaaaaattgaaaaactaatagatgcaaaaaataagaaacaacttacgaatcctaatttactaggcagagtaaaaagactagaagacggtaacgataaatatatcaaaatattgaaaagtaattttcctaaaaattttaacctaaaaggaactaaaattgttttagattgcgctaatggagcttgctataaagctgcacctaaacttctgaaagagcttggggcaaaggtcattgctattggtgtaaaacctgatggttttaatattaatgaaaggtgcggatcaacttacccatctaaaattaaaactgctgttaaaaaatttaaagcaaatgttggaatttcttttgatggcgatgcagatagaataatcatgtgtgatgaaaaaggcaaaatcatagatggcgaccagattattgcaatgttagcacgtagatggaaatccaaaaaaattttaaaaggtggtgtagtaggaactttaatgtctaattatggtttggaaaaat

SEQ ID NO: 291358 - DNA, 640 bp, Unknown
  Bacterial polypeptide expressing nucleotide sequence isolated from the Sargasso Sea
catgatcttagagtctatatttcgtgaaaatgatattagaggaacttacccagaagaattaaatgaatcagttattaaagaagttgcaaaaggaattgcaaaaaaatgctttcaagaagatattacctctattgttgttgctagggatggaagattgtcaggagagtctttgttaacaactttttgtgaagctatttcacaatatggtatagatgttaaaaacattggcctagccactagtccaatgctttattttgcagcaaaaaaagaaaattcaaaaagtggaatcatgataacaggtagtcataaccctaaaaactacaatggaatcaaaatggttattaatgataattccgtttctggcagtgaaatcctaaatctcatcaaaaatgatgagattttaaacgattcattaacagggaatattatttatagtgacataaaagaaatgtatatctctgaaatccttgagaatatcaaaacagaattaagtgaactcaaagtggtaattgatagcggtaatggtgctgctggttttgtcgcacctgagctatttaaaagattgggttgtaatgtgattgagctttatagtgaagtggatggaaattttcctaatcatcacccagaccctggcaaatag

SEQ ID NO: 291359 - DNA, 831 bp, Unknown
  Bacterial polypeptide expressing nucleotide sequence isolated from the Sargasso Sea
aaagctgatatcttagataagataaaatttggaactgatgggtggagaggaattattggatttgattttaatttatccaatctttcaagagtcgttgttgctgcatgccaggagttgcattatcaattctataaagaagttaattcaaagaaaattattattggatatgatcgaagatttatggcttgtgaatttgccaagcaaatattgccttttgtaagaggttgtggttttgaaccgatcttatctgatagctttgttacaacaccctcttgtagtttctatgccaaagagatgggttgtttaggagcgttagtaattacagctagtcataatccatataattggcttggcctgaaaataaagagctttaaaggatgttctgttgatgaattatttacaagtgaagttgaaaaaagattaatgcttggaaattcaattgaaaaaatagatggtgttaatcaattggtagatattaagaaattgcatttaggtagaattaaatccctttttgatattaattatatttccaagagattaaaaaaaatgaaattgagaatttttgtagattctatgcatggttcagctgcaaattgtatggctgagatttttgcttctaatgatttagaatttatttcagaaatcaggaaagatgctgatcctttttttggaggaaaacctcctgaacctcttttgaattatgcagatgatttaaatcaaatactaatgaaaaattcaacaaatgaagtgaaaactttaggaattatatttgatggtgatggtgatagaattgcggcaattgatgaaaaaggaagatactcaagtagtcaa

SEQ ID NO: 291360 - DNA, 937 bp, Unknown
  Bacterial polypeptide expressing nucleotide sequence isolated from the Sargasso Sea
ccttcctgatggcgtgattgtagttggtagagatagtcgcccgagtggtgacgtaattttaaattctatgtgtgaagaattggtctcacttggaagaacaattattcattgtgatatcgtaccaacacctaccgtacaattcatggttcacaatacagaagcagtcggaggctttatagtcactgcgagtcataatccaatagaatggaatgggctaaaatttgttagagaggatagtacgtttttttatcctgatgattgcaaaaagctttttgaacttgttgataaaaattctaccgttaaatccacaaacgaacccgggattatttggccagaacaaaatgcagtacagaaacatattatttcttgtgttggtttaaaatgcattacactgaatagaattcaaaaaaggaaatttaaggttgttattgattcgataaatggagcaggatcacaggcgttaccagcagttttgcaagctttagggtgtgaggtaatcgaattaaattgtgaaccggatgggaactttactaggggaacagagcccttgcctgaaaatttaatggatctcaggaatatggtaaagagacatcgcgcggatgtgggttttgcagtagatccagatgcagataggttggcaattgtgagtgaaacaggagaacctttaggggaagaatacacaattgttttagccgcagacggatatctcaatgaaatgaaacaaagtgagaactttgttcttaatctttcttcttctttagccttagacaagctggctgagtcaagaggcagtgctgttatccgatctgctgttggagagattaatgttgtaaataaaatgaacgaagttaattcaaatcttggtggagaagggaatggtggtgtaattctacgtgagtgccatttaggccgagattcattggttggagtcactatg

SEQ ID NO: 291361 - DNA, 757 bp, Unknown
  Bacterial polypeptide expressing nucleotide sequence isolated from the Sargasso Sea
ttattctggctatacacttgaacctgcgcttgtttcaggtttggcttcagctggaatgcatgtttatactttaggacctttaccaaccaatggtttggccatgctaacaaaagaaatgaaagctaatatgggtataatgattacagcatctcacaatccacattatgataatggtttaaaattgtttggtcccgatggaatgaaattatctgacaaaatagaaaaaaaaattgaaaatcttatagataaaaaaatctcaaaaaatttgtctcaacctgaaaaattaggcagagttaaaagattagaaacaggcacaaaaaaatacattaaaatattaaaaaaaaattttactaaagagtttaatttaagaggattgagaattgtgatagattgtgcaaatggtgctggctatagagcaggacctgaattattaacatctttaggagctaaagttatagcaataggtgtaaatccaaatggtttaaatataaataaaaattgtggctcaacttttccaaacaaaattagattagctgtaaaaaaatataaagcacatattggtatttctttagatggtgatgcagatagaattataatgtgtgatgagaaaagcaatattatagatggagatcaaattatagctgctttagcaacaagatggaaaaataagaaaatgttaagaggtggagttgttggaacattaatgtcaaactatggactagagaaatattttaaatcagaaggaattaaatttata

SEQ ID NO: 291362 - DNA, 790 bp, Unknown
  Bacterial polypeptide expressing nucleotide sequence isolated from the Sargasso Sea
aatgacaaaagagatatcctgctttaaggcatacgatgtcagaggcaggataccttctgaattaaacgaagatgtcgcctaccgcattggagctggagtcgcgtcttattttggagcggaatcggttgtcgttggatatgatgttagaccctcttccatcgatattctcaatgcgctgacaaaaggcatcaatagcaagggcgcaaaagtatactcaattgggctttgcggcacagaagaaatctactttgccacaaatcatttaaatacggacgcaggcgtaatgatcactgccagccataatccggcagattacaatggattgaaaattgttggcaaaggtgcaaaaccagtcagcatggatagcggacttgatgaaataaagaatattgctgaagcatcagaatctaagaccgacaaagagcctgtcattgagatcattgatgtaaaaaacgaatacatcgataaactcatggaattcattgacccaaaaaaaatccaacccatgaagattgtcaccaattcaggcaatggttgtgcgggtccaattttagatatgcttgaggataagcttccaattgaattcatcaaaattcagaatgaaccggacggttcatttcccaatggaattcccaatcccttattgccagagaatagagaaataacttctaaagcagtgattgaacattctgctgatcttgggattgcctgggacggagattttgatcgatgctttttctttgattcgaatggcgaatttatagagagctattacctgattgctttgttg

SEQ ID NO: 291363 - DNA, 909 bp, Unknown
  Bacterial polypeptide expressing nucleotide sequence isolated from the Sargasso Sea
aatggcgctgacaaaaggcatcaatagcaagggcgcaaaagtatactcaattgggctttgcggcacagaagaaatttattttgccacaaatcatttaaatacggatgcaggcgtaatgatcactgccagccataatccggcagattacaatggattgaaaattgttggcaaaggtgcaaaaccagtcagcatggacagcggacttgatgaaataaagaatattgctgaagcatcagaatctaagactgataatgagcctgtcattgagatcattgatgtaaaaaacgaatacatcgataaactcatggaattcattgacccaaaaaaaatcaaacccatgaagattgtcaccaattcaggcaatggttgtgcgggtccaattttagatatgcttgaggataagctcccaattgaattcatcaaaattcagaatgaaccggacggttcatttcccaatggaattcccaatcccttattgccagagaatagagaaataacctccaaagcagtgattgaacattctgctgatcttgggattgcctgggacggagattttgatcgatgctttttctttgattcggacggcgaatttatagagagctattacctgattgctttgttgggtgagcaattattaaaacagtcgccgggggagagcattgttcatgatccacgactggtttggaatactgttgaagaagttgatgggtttggcggcactcctgtcatttctaagtctgggcattcattcattaaagaagcgatgcgagagaacaactctgtttatggcggtgagatgagtgggcatcattatttcagagatttctattacagtgacagcggaatgattccctggcttttgctcatcgagaatgcatctgtctcgggatcaacgctcactgatttggt

SEQ ID NO: 291364 - DNA, 728 bp, Unknown
  Bacterial polypeptide expressing nucleotide sequence isolated from the Sargasso Sea
aatgaataaagaacttacttgtttcaaagcctatgacgttcgtggagaactaggtgtaaattttgatagtgatatttgctataccataggttgtgcttttgcagagattatggatcctaaagttgttattttgggaagagatgtacgcgaatcttcaccagaactgtttaattctttatcaaaaggattaatggatcatggtgtaaatatttatgatataggtatcgctggtactgaggaagtatactgggcaacaactcattttaaagcttgtggtggtattatggtaacggcatcacataatccaatctcttttaatggtctaaagatggtaaaatctaaatctcaacctcttgatgatagtgaatttattaaaataaaaaaatcagctgaaaataaaattttttcaataaaagaaaataaagggttactttttgataaatgctctgaaagtaaaattgcttacgtaaataaattatttacatttatagatgtaaaacttcttcctactctcaatattgtaattaattcgggaaatggtgctttaggtcccacttttgatcattttgaaaaaaagttattaaaaaaaactaaaaatttaaattttattaaatgtcagtataatcctgaccccagctttcccaatgggatacccaatccattacttaaagaaaaccatcaaataaataaaaatttagtgatttcaaataaagctgacattggtattg

SEQ ID NO: 291365 - DNA, 788 bp, Unknown
  Bacterial polypeptide expressing nucleotide sequence isolated from the Sargasso Sea
aatgattattcgaagtatatcgggagttagaggtctcacaccatcgcatttaaatattgattcaatgtacatgtatgcaagagcacttcacatacatcttgaagaaggtttattatttattggtagagatagccgtccttcaggggaagagttacttgaagcattcgccaatgaattaattcgcttgggtagagatgtaattatttgtgggatagtgccaactccgacagtgcaatttatgattgaaagatcagaagcagctggaggagccattattacagcaagtcacaatccaattgagtggaacgggataaagtttgttagatcagacagcacattttttaattctgaagattgtgaaaatttatttgatttagctgatagaaataagcccattaaagactctaagcaaccaggaatggtttttcctgatcaaaactccatattaaaacactctatcaaaattgttgaattatctactattgatgcaaaagctattagagcttcaaatttcaaagttgtaattgatgctgttaatggagcgggatcaactgctttaccattattattagagcacttgggttgtgatgttgttaagattttctgtgagggtaatggaaaattcgatcgtggaacagaacctttaccagatcatttagaaaagttaaaaaaatctgttattaagaataaagcagatgtcggttttgccgtagatccggatgctgacagattagctgtggtaaatgaaaaaggtgtccccttaggtgaagaatatacattggtcttag

SEQ ID NO: 291366 - DNA, 866 bp, Unknown
  Bacterial polypeptide expressing nucleotide sequence isolated from the Sargasso Sea
gtatgacgcgaggtggttgtttgaggaagacattgatattgacggaatagttgatttgggcaaaggtctaggaactcaaatagtaaatcatttaaaaaaagtcaatccaagaataattgtaggacacgactatcgttcatatagtgaaaaaattaaaaaagcattgattcaaggtttaatgtcgaccgggtgtaatgttgaagatgtaggcttgtctctgtcccctatggtttattttgcacaatttaaattaaattctgatgcaattgccatggttactgctagccataatgaaaacggttggaccggagtaaaaatgggtatcaaaaagggcctaacccacgctccagaggagatgtcagaattaaaagttataactttaaataaaaaatttattaaaggaaaaggttcggttaaaaatatagataattttaaaaaagtttatatagaggatttaataaaaaaaaataaaattaataaaaaaattaaagttgtagtggcctgtggtaatggcaccgccggtatttttgcgccacaaattttaagaggaattggatgtgaggtaattgagcttgattgtaacttaaattggtctttccccaaatataatcctaatcccgaagatttaaagatgcttaatgctatttcaaaagtcgtaaaacataataaagcagatataggttttggtttcgatggagacggagacagatgtggggtgatagataataagggaaacgaaattttttcagataagataggcttactaattgctagaaatctttctagtaaatataagaaatctaagtttattgttgatgttaaatcaacaggattgtattcgaaagataaaatcctaaaggaaaatc

SEQ ID NO: 291367 - DNA, 829 bp, Unknown
  Bacterial polypeptide expressing nucleotide sequence isolated from the Sargasso Sea
ttggcagctggaacttattttaaaaatttaaaaaaaattaaacaaaccgctgttatcgctaaagatactagactttcaggttacactttagaacctgctttggtatctgggctagcttctgctggtatgcatgtttttactcttggaccactacccactaatggtttagccatgcttacaaaaaaaatgaaggcaaatttgggcataatgattactgcatcccacaatcctttccatgacaatggtttaaaattatttggcccagacggacttaagttatcagatcaaatagaaaaaaaaatagaaaaacttattgattcgaaaattgtaaaaaatttaacattaccaaaaaatttaggtagagtaaaaagattagaggatgcaaacgacaaatatataaaaattttgagaaaaaatttcccaaaaaattttagcctaagaggtataaagatcgcaatagattgtgccaatggcgctggctataagtctgcaccgaaattatttaaatctttaggtgcaaaagtttatgatattggcgtttctcctaatggattaaatataaacgataaatgtggatctacttttccaaaaaaaatcaaaaatcttgtatctaaaaaaaacgttgatattggaatatctttggatggtgatgctgataggataattatttgtgatgaaaacgcaaagattattgatggtgatcaaattatcgcaatgcttgcaagtcgatggaaaagaaaaaaaattttgaaaggtggtgttgttgggactttaatgtcaaatttaggtttagaaattttctttaaaaaaaataatattaaatttttga

SEQ ID NO: 291368 - DNA, 852 bp, Unknown
  Bacterial polypeptide expressing nucleotide sequence isolated from the Sargasso Sea
tagtggttgattgtggaaatggtgcagccggaattattgctccagaattactaagagcagttggctgcgaagtcatcgaaatattctgtgatgttgatgggaatttcccaaatcatcatccggatccggggaaagaaaagaatttggtggatcttattgaaaaagtaaaggaggtctctgcagatgttggtgttgcctttgatggtgatggagacaggcttggagcaataacttcatcaggaagattaatttatcccgatcaaatgatgatgttattctcaaaaaaaatactttcaaataatggaaccgaaactattgtttttgatgttaagtgctcagactttcttcctcaaataatcaaggaaaatgatggaatacctttcatgagccctactggtcattttcatattaaaaataatataaaaaaatataatgccgtgctaggaggtgaaatgagtggtcatattttctttaatgatatttggcatggttttgatgatggtcattattctgcaataaggcttttagatatcatgaatgaaacagggtcatcactagatgatttattggatagccttcctgtttcttattcaaccccagaattaaatatagatgttcctgaggagaaaaagtttaaaataattgaggatttcattgaaaatgcatcaattgatggaaaaaaagattttactgacggtcttcgagcctcatttgagaatggctgggctctgttaagagcttcaaataccactccgaagcttgtcttgagatttgaagcaaatagtcaagaatcgcttgaaaagattcaaaaaaactttttggaagaattaaaaaaattcttacccaaatgaa

SEQ ID NO: 291369 - DNA, 889 bp, Unknown
  Bacterial polypeptide expressing nucleotide sequence isolated from the Sargasso Sea
ggaataagaggagcagttaatagcaaacacataaatggagatatgttctttaaatttggacttgctagtggaacatactttaaatctcaaaaaaaaagaaaacaaacagcaataattgcaaaagatactagattgtcaggatatacacttgagccagcacttgtatcaggtttggcatcagctggtatgcatgtttataccttaggacccttaccaactaatgggcttgctatgttaacaaaaaagatgaaagctaatatgggtataatgattaccgcttctcataatccacattttgacaatggtttaaaattgtttggtcctgatggaatgaagttatcagataaaatagaaaaaaaaattgaaagtctcatagatgagaaaatctcaaaaaatctctcctattctgaaaaattaggaagagttaaaagattagaaacaggtaccaaaaattatataaaaatattaaaaaaaaatttcacaaaagagtttaatttaagaggactaagaatagtaattgactgtgcaaacggtgctggttataaggcaggtcctgaattattgaaatcattaggagctaaagttatagcaacaggtattaaaccaaatggtttaaatattaataaaaaatgtggatcaacttttccaagaaacatacggtctgctgtaaaaaaatataaagctcatatcggaatatctttagacggagatgctgacagaattattatgtgtgacgagaaaagtaatataatagatggagatcaaattatagccgctttagcaacaagatggaaaaataaaaaaatgttaaaaggaggtgttgtcggaacattaatgtcaaattatggtttagaaaaatattttaaatcaatagggataaaatttttaa

SEQ ID NO: 291370 - DNA, 859 bp, Unknown
  Bacterial polypeptide expressing nucleotide sequence isolated from the Sargasso Sea
tttggaacagggaaataattatacaatacaaaattttgataaagaggttcttcgtgaatatgatatcaggggtgttgtaggcgataatataaatgagaatacagcttacacaataggcagaacttttggttataccgttaaatcaaaattagaatcgcatactatagcaactggttacgatggaagactaacatcaccaatactgcataaagcactttgtgaagggttaaaagattctggcataaaagtgataaatattggaatgggaccaactccaatgacttactttgctcactattatttaaatgctgatgcagtaataatggttactggctcacataatccatctgaatataatggttttaaaatggtttttaacaaaagttcatttttttcagaaaatattcaaaatcttcagaaattaattgatgataacaaacttgaattgttagaaggtcaaatcattaataaagatataatccatgaatatataaaaagaaatcttttaaatattagcctaaaaaggaagatgaaaattgcttgggatcctggtaatggcgctatgggaaaagttactcgagcaataactgaaaaactatacaactccgaaaatattattattaatgaagaagttgatggaaattttcctaatcatcatcctgatcctacagtaccaaaaaacatggttcaattaataaagactgttatcgaaaatgattgcgatataggtcttgcatttgatggtgatggtgacagattaggtgttattgataatcttggaaatatagtttgggctgatcaatatatgcttttgctatgttcagaaattaccaatttgtatgaaaatccaaaattataa

SEQ ID NO: 291371 - DNA, 1039 bp, Unknown
  Bacterial polypeptide expressing nucleotide sequence isolated from the Sargasso Sea
ttggaaattgagaatttcgataaagaagttttaagagagtatgatatccgaggtgtggttggtaacaatatcaatcaaaacaccgcttatactattgggagaacatttgcctacacagtaattaatcgattaaaatctaacataattgctacaggttacgatggaagattaacctcaccagatttacataaagcactatgtgaaggtttaaaagattcaggtgctaaagtaattaatattggtatggggcctacacctatgacttactttgctcattactatcttaatgcagatgctgctattatggtaacaggctctcataatccttcagaatacaatggctttaaaatggttttaaataagcattctttttatgccgaagacattcaaagccttcaaaaattaattgatcaaaatgatttaaaattagtcgaaggtgaaattattaatgaagatattaaaaaagattataacgaaagattattacaaaatattaatctcaataaaaaaataaaaattgcttgggatattggtaatggtgcgatgggagctgtcattaaggaagttacaaacaatttaaataattctgaaaatatattaattaatgaagaagttgatggaaatttccctaatcatcacccagatccaactgttccaaaaaatatggagcaattaataaagtcagtcaaagataacaaatgtgacataggtctggcttttgatggagatggagatcgtttaggtgttgtagacaacttaggcaatttagtttgggcggatcagtacatgttattactatgcactgaaattgctaacttatacgataacccaaaaataattatggatgttaaatgtagtaaagttttttttgatgaagcaaaaaaacttaattgtgatcctattatgtccaaaaccggccattctccaataaaagaaaaaatgaaagaattaaaatcgcctttatcaggagaaatgagtggtcatgtatgttatgcagatgatttttatggtttcgatgatgcactgtatgttgcattac

SEQ ID NO: 291372 - DNA, 1111 bp, Unknown
  Bacterial polypeptide expressing nucleotide sequence isolated from the Sargasso Sea
atgagcacccaacttcttgataaagtccgttactggtcggaacatcaatgttttgattctgagactcgagatcatgctaaaaggatgctccaagaaaataatcaaaaggaaatcgaagaatgcttcaaaaatgtgcttgaattcggcacaggcggattgcgggggccgatgggaattgggaccaatcggatgaaccgatacacagtaatgcaggcaacggaaggacttgcgagagtgatcgaagcgcagggttcgggatctaaaaaagggaattcctattcaggtgtagtgattggatatgattcccgtaaccaatcgaaacaatttgcagaagcagtcgcagaagttttatgtgctcacaaaatccaggtatttctattttctgaaattgccccgacacctttggtttcatgtgagctgatacgacgatcagcacaggcagcggtcatcatcacagccagccataatcccccatctgataatggctacaaggtttactggtcgcatggtggacaaatcattcctccagttgatgtggccattattcaggaggtcaagaaaatcagcagaattgaagagattccttacatggaattgagtgaggcaaaaaaaacagacctattgcagtatattggagaagaagccgatcaatattacatcaaccttgtagcacccatggccttgggcagcaaagatgccaacaaaaaacttggagtgatttattctccattccatggcactggagggagaatggttccaaaacttcttcaactgagaaattttgaacgtttgaaaaccgtttcggaacaaatggttcctaacggtgattttcccacactaccttccccgaatcctgaagacccaaaagcctttggattggctttggagaaggcaaatgatgatgatgacatgatccttaccaatgaccctgacgcagatcggcttggcgtcatgatcaggggaaaaaaccgtaattggcagtggcttaacgggaatctaatcggggtacttttgctggatcaaatgctttcctcactacaaaagacaggcggtttaccgactaatggagttctagtgaccaccatcgtcacttctccgattaatgagtaaa

SEQ ID NO: 291373 - DNA, 728 bp, Unknown
  Bacterial polypeptide expressing nucleotide sequence isolated from the Sargasso Sea
attgcaaaatcataactataacaaaagcaaaatagtggaaataacaaattcaattttcagagaatatgacatcaggggtgtttaccctaaggaaataaacgaggaagctataagtcatattgctaaagctatatcaataaagtgtgagcaagagaatattaaagagatttgtgttggaagagatggtcgtatttctggccaaagccttcttgaaacattatcagattcattatcaaaatatggtttgaaagttgagaatattggcctagttacaactccccttctttattttgctgcaaaaaagagtgatcataaaagcggtataatgattacaggaagtcataatcctaaaaactataatggcataaaattagtcataaatgacaatcctgtttcaggaagcgaaatactaaaactgatttcttcaaaaaaggaaatttcaataaatcctggagagattatatataaagacatcaaagatgattacatatcagaagtagttggaaacattaaaattaattcaaatagaaaaattaaaattgttatcgattgcggtaatggtgcagccggctgtattgcacctgcattatttaaaaaattaggctgtgaggtcattgagttatttagtgaaatagacggcaattttccaaatcatcatccagatccaggtaaattagaaaatcttaaagacttgataactgctgtaacatcatcaaatgctgatctgg

SEQ ID NO: 291374 - DNA, 1188 bp, Unknown
  Bacterial polypeptide expressing nucleotide sequence isolated from the Sargasso Sea
acaccagaatatcaggttatatgcttgaagctgcacttcaagcaggattcttgtctgtagggatgaatgttaggcttctgggtccactgccaacaccaggagttgcgtatttaactaaatcttttagaaatcaatgtggaattgtaataagcgcgtctcataataattatcaagacaatgggattaagatttttgataatagcggcgtgaaaatcgatagaaaaattgagatgatgatcgaaaatattttaagtgaaaaaattacttcattaccatctgtagaaattggaaaagctaaaagatttgatgaatccggatcaagatatgttgaattctgtaaatcaacagttcctgatgacattagttttactgacttaagaattgtccttgattgtgcaaatggagcatcttataaggtttctccagatgtttttcgtgagttaggagctgagacaatagttgttggtgatcagcccgatggattcaatatcaatcaagattgtggctcaaccaatcctgagcttgttcaaaaacttgttaaagaacatagagctgactttggtgtgtcactagatggtgatgctgatagagtaaccatcgtagacagagaatcaaatattttagatggtgatgacattctctacatattaggttttgccaatcctaacagacttggcccatggtcaggcatagttggaactcaaatgtctaatgttggattagaagatggccttaataagcttggatattcattcaaaagagccgacgttggcgataaatatgtttcagatttattacttaaagagggctggcttcttgggggagaaccttccggacatattatctgcagagaccttgtcagcacaggtgatggaactatagcagcgttaaaaacaataagttcactagttatgcttgataaagatccaaaagatgttctttctaatttcaataaaattcctcaaataaacgaatctataagcgttaaaaacaaagatattgtcagtgatgccgaagtaaaaatagccataaatgatatcaagtcagatttaacaattaatagaattcttgtaaggccatcaggaactgaaaataagattagaataatgattgaatctgaaaacaaaaaaacagccaaaaaatatacaaatgatctcattaagctgtttgagtctaaaacaccgtaat

SEQ ID NO: 291375 - DNA, 1039 bp, Unknown
  Bacterial polypeptide expressing nucleotide sequence isolated from the Sargasso Sea
gttttaaataagcattcttttttttctgatgaaattaaaaatcttcaaactttaattaatcaaaatgaaataacttccaatcaaggaagtatacataaaaaatctattgtacaaaattacatttcaagaattcttcacaatataaatataaataaacatattaaggttgcttgggatacaggtaatggagccatgggctcagttataaatcaaattacttctcaattaattaatacagagaatattataattaatgcagaagttgatggtaactttccaaaccatcatccagatcctactgtgccaaaaaatatggaacagctaataaatacagttttagaaaataaatgtgatattggtttagcttttgatggcgatggtgatagattaggtgttattgacaataaaggtaatattgtctgggcagatcagtacatgcttatactatgttccgagatttcaaaactttacaaaaatccaaaaattattatggatgtaaaatgtagcaaagttttttttgatgaagctattaaaatgaattgtgatcctataatgtctaaaaccgggcactcaccgataaaagaaaaaatgaaagaattatcttcacccctttcaggtgaaatgagtggtcatgtctgttattctgatgatttttttggttatgatgatgcaatgtatgttggattaagattgttaagaattttaggaaacacaaagcaatcattaagtgagttaattgatgttttccctaaaactttttcaactcctgaaactcgatttgatgttgaggaagctagaaaatttataataatagatgaagttaaagatcgattaaggaatattgaaggaaaaattatagatattgatggggtacgtgttgaaactaaagatgggtggtttttaatgcgtgcaagcaatacacaaaaccagttaacatgtagagcagaagctattagtaatgatggtttattgtctcttctaagtattattgaagaacaacttcatttaagtggtgttagctataagtttaagatctaat

SEQ ID NO: 291376 - DNA, 1390 bp, Unknown
  Bacterial polypeptide expressing nucleotide sequence isolated from the Sargasso Sea
atggagtggcctgtacactgcttcaaggcatacgatattcgtggtctttcaggtgaagaattgaccgatagtttcgctcttcgtcttggacaagcatttgcaacatacctagaatgtgatgctgttgcagtaggccgcgatattcgagaatccagtccagggtttgcctcaaatctgatcaaaggattggtatccagtggagtgagggttttagatctcggaatcgtttctaccggatgcctttaccatgcttgctggacattaccggtaaatggcgggataatggtaaccgcctctcatcttccaatgccaactcataatggattcaaaatgtgtagagggactttacctcttgctggagaagagattcaagaattgaaggaggttttccttgctggcaatttcaaaactggcgatggtgaatatgtggaccatcctcatgaagacgcctacctggaagcgattgttgagtcgtctggaaaactagcaaggcctgtcaaggttgctgtagattgtggcaatgcagtccccggtcctgctatgagtaaactgcttgatatgattggggcagaacatatcgacctatactgcgattgggataataccgaaccaaatcatggtgcagacccaacccgtgaatacaatatggtagatttagccaaggcagtagtcgacaatggttgtgaacttggacttggtagtgatggtgatggcgaccgaatcggtgctgttgacgaaaatggtgattttgtttatcctgacagattaatcgctttgatggctgacgatgtagtcggttctgaggaaggaaaagatttgctaatttatgatgttaaatgttcaatgaatgttgagaaggcgattattgccgctggtggaaaaccaatgatggcaaaaacaggtcattcattcatgaaaagagttcttgcaaagcatcctaattccttgatggctggtgaaatgagcggtcatattttcatgtcagaccgcggttggtacggctttgattgttcattgtataacgctgcaagaattctcgaattgtggtcacgccggaatactaaatttagttctgaactaaatcgacttgcaccgaatttaccaactactggagaagtcaaagtaccatgtgctgaagctgacaaattacctactgttgcagcgataactgaggcttttgctgactatgattgctcaacgattgatggtgtgagagtacgtttcgaaaaggatgggcagcaatcaggatggtatcttgctcgtaaatcaaatactgaagaaattcttgtaatgcgggttgaagcaaacgaccaagaaactctagataaaattctaaagatgatcgaacagagagtttcaccaataatcgatatcagcaaattgctgtgat

SEQ ID NO: 291377 - DNA, 928 bp, Unknown
  Bacterial polypeptide expressing nucleotide sequence isolated from the Sargasso Sea
atgcaggcatcctccccaacccccgccctcgctcatggcatagtcggtcggaaggttgacctaggggtgatgattacggcttcccacaacccaagcggggacaacggcttcaagatattttccgggaaaggagagaagcttgccatcgagcaggagagactgattgagtcgcggatcgaactttcggcgttacccgaagacggtgcgcgcccccctcgggattcggaaacgggaaaagcctacctcgattacgtcaagggggtcttccccgatgggtttcttgaagggcgcaaggttgtagccgacatggccaacggcgccacctccggcacgagcatccaagtcctcagccactacggggccgaggtattccccctgcaccaaggcgagggagcaatcaacgaaaatgcgggttcggagcacccacggcttatgcaagcaaaggtctcggaagtcggcgcccagctcggtatcgcctatgacggggatggggatcgggccgtattttgcgatgcggggggaggattgattcacggcgacaagatcctgggattgctggcccttgacgcacagcgcttctcaagcctcgatggcactgccttggttgcaaccgagcatagcaattcgggacttgaggaaagcctgcgaatcgagggtcttgcccttcaccgggccaaggtgggcgaccgaaacgtagccgagatgatgcggagggaagggtgcaacttgggcggagagtcttccgggcacgtcgtctccagcaactaccttccaacgggagacggtctctacacctctctcctcgtggcttatgccatggtccgcaactcgaaatccctcaaggaattgtccggagccatttcactctggccctccagggttggagccttcccggtgcgacgaaaggttcccattgaggatgaaccgg

SEQ ID NO: 291378 - DNA, 1408 bp, Unknown
  Bacterial polypeptide expressing nucleotide sequence isolated from the Sargasso Sea
tttggaacaggaacataattatacaatacaaaattttgatcaagaagttcttcgtgaatatgatatcagaggagttgtaggtgataatataaatgaaaataccgcttacacgataggaagaacctttgggtatattgttaaatcaaaattagaatcaaatactatagcaactggttacgatggaagactaacatcgccaaaacttcataaagcactttgtgaaggtttaaaagattctggttcaaaagtattaaatattggaatgggaccaactcctatgacttactttgctcactatcatttagatactgatgcagtaataatggttaccggctcacataatccatctgaatataatggttttaaaatggttttgaataagacctcattttttgcagaagatattcaaagtcttcaaaaattaattgattataacaaaattgaattggggaaaggtcaaataattaatcaagatataaccgctcaatatatagagagaaaccttttaaatattaatttaaaaaagaaactgaaaattgcttgggatcctggtaatggcgctatgggaaaagttactcgagcaataactgaaaaattacataactctgaaaacattattattaatgaagaagttgatggaaattttcccaatcatcatcctgatcccaccgtaccaaaaaacatggtacaattaatcaatactgtaatagaaaatgattgcgatataggtcttggatttgatggagatggtgacagattaggtgttattgataatcttggaaatatagtttgggctgaccaatatatgcttttgctatgttcagaaattgccaatatgtatcaaaatccaaaaattataatggacattaagtgcagtaaggttttttttgatgaagcaaaaaaaattaattgtgatcctataatgtcaagaacaggtcactctcctataaaagaaaaaatgaaagaattaaattcacctttatcaggtgaaatgagtggacatatttgttatggcgatgatttttatggatatgatgatgctatgtatgtaggtctacggctactgcgtatattatcaaacgagagtaagcctctttatgatttaattaatgtttatcctaaaacattttcaacaccagaaacaagatttgatgtcgatgagtctagaaaatttattattatagatgaagtaaaagaaaggcttaaaaaagaagacaaaaaaataatagatatagatggtgttagggtagaaaatgaagatggttggtttttgatgagagctagtaatactcaaaatcaacttacttgtagagctgagtcaatttctgaaaaaggtctgcataaacttattggcattattgagaatcaattatctttaagtggaataagttataaatttacaatctaa

SEQ ID NO: 291379 - DNA, 1141 bp, Unknown
  Bacterial polypeptide expressing nucleotide sequence isolated from the Sargasso Sea
ttggcacaggaacataattacacaatacaaaagtttgataaagaagtcctgcgtgaatatgatatcagaggagttgtaggtgataatataaatgagaatacagcttatactatagggagaacctttggttatattgttaaatcaaaattagaatccaatactatagccactggctatgatggaagaataacatcaccaaaacttcataacgcactttgtgaaggtttaaaagattctggttcaaaagtattaaatattggaatggggccaactcctatgacttactttgctcactatcatttagatactgatgcagtaataatggttaccggctcacataatccatctgaatataatggttttaaaatggttttaaataagacgtcattttttgcagaagatattcaaagtcttcaaaaattaattgattataacaaaattgaattggaagaaggtcagataattaatcaagatataactactgaatatataaaaagaaaccttttaaatattagtttaaaaaagaaactgaaaattgcttgggatcccggtaatggcgctatgggaaaagttactcgagcaataactgaaaatttaaataactctgaaaacattattattaatgaagaagttgatggaaattttcctaatcatcatcctgatcctacagtgccgaaaaacatggtacaattaatcaagactgtgatagaaaatgattgcgatgtaggtcttgcatttgatggcgatggtgacagattaggtgtaattgataatctcggtaatatagtttgggctgatcaatatatgcttttattatgttcagaaatcgcccacttgtatgaaaatccaaaaattataatggatgttaagtgcagcaaggttttttttgatgaagcaaaaaaaattaattgtgatcctgtaatgtcaagaacaggccactctcctataaaagaaaaaatgaaagagttaaattcacctctatcaggggaaatgagtggacatatttgttatggtgatgatttttacggatatgatgatgctatgtatgttggtttaaggttgctacgtattttatcaaacgagagtaagccacttaatgatttaattaatatttatcctaaaacatttttcaacaccagaa

SEQ ID NO: 291380 - DNA, 1060 bp, Unknown
  Bacterial polypeptide expressing nucleotide sequence isolated from the Sargasso Sea
aatgaaaattacgcatcagcctccatcttttgatcctgttattttcagagcatatgacattcgtggaattttcggggaacaattaactagcgagattgtattcgaaatcgcgaaggctattggaacgatggctgataaggagcatcagaaagaatttatcgttgggcacgatggaagagtctcaagtcccgaattaaataaagctcttatagagggattaataagtactggaagagatgtcatcgatataggcatagtgccaacaccagttacatatttcgccagtcaccattttgctgcaaataattgtgtcatggttacaggtagtcataatgctgcagaatacaatggtttaaaaactgtgatcgggggtaattctttatttggcgagcgtattaattcgcttaaaaagcaaatattgtctggggaatatacggctggtgaaggctcattaaaaaatgcagatgtatcaaaggattatattgatcgtatagtaagtgatataaatataccgaaaaacccatctcttaaaattgttgtcgattgtggaaatggttccgttggtaatattgccaccgaactttttaaagtacttaactgtgaaactataataatgtattctgaaatcgacggaaattttcctaatcaccaccctgatcctagtcaacctgaaaatttagaagatcttataaatagagttaagaaagaaaacgcagatattggtttcgcttttgatggcgatggagataggcttggtgttgtcgatgccaaaggaaaaattatatggcctgacctacaattgatgttgttggcaaaagatattttgatgcgaaataaaggagctcatataatatttgatgttaaatgtagtagacaccttaaaagagaaatagatctttgtgatggcagggcgctaatgtggaaaactgggcactcatatattaaacaaaagatgaatgaagtaaatgcacctttagcaggagaaatgagtggccatattttttttaaagaacgctggtatggctttgatgatgcattatatgcagctactaggtttatt

SEQ ID NO: 291381 - DNA, 724 bp, Unknown
  Bacterial polypeptide expressing nucleotide sequence isolated from the Sargasso Sea
aatgaccaaagaaatatcctgcttcaaggcctatgatgtcagaggcaggataccttctgaactaaatgaggatgttgcttatcgaattggagttggcattgcatcttatttttctgccaaatcaattgttgttggttacgatgtaagaccttcatccattgaaatactcaatgctttaacaaaaggcatcaatagtcagggcgctaaagtctattcaattggtctatgtggtacagaagagatctactttgccacaaatcatctagagactgatgctggagtgatgatcactgcgagtcataaccccgctgattacaatggattaaaaattgttggcaagggtgcaaagccagtgagtatggacagcggacttggtgaaatcaaaaagattgcagatcaatctgaatccaaccttttagctgagtctcatatcgaggtagtcgatataaaagctgcatatattgagaaacttttaaaattcatagattctgacgcaatcaaaccaatgcacatagtcacaaatgctggaaacggttgtgcaggtccaattttggatttgcttgaagaaagactcccgcttaaatttacgaagattcaaaatgatccagatggcacatttccaaatggaattccgaaccctttgttgcctgagaatagggatgttacatcaaaaactgttattgaacattccgctgaccttggtattgcatgggatggagatttt

SEQ ID NO: 291382 - DNA, 1336 bp, Unknown
  Bacterial polypeptide expressing nucleotide sequence isolated from the Sargasso Sea
atgatcattcgtagtatttctggagtcagggggattactaaatcttcactcactcctgaaacaattaaattatatgctcatgcattccacgatcttgttcctgacggtcttatatatcttggtagagacgcaagacaatctggtgaagaattattagaaattttctcagccgaacttattgagatcggaagagatgtggtgttgtgcaatatagtccccacacctaccattcaatttatggtggagagatctgaggctgctggtggaattattgttaccgccagccataatccagaggagtggaatgggataaaattcgttcgagaagatggaacattttttttaccgaacgagtgcaatgaattatttgaaaaagttgataaagaagtggtttatcaaaaagcaaaaaagcaggggatgcttttccctgatcaaaattcgattcttaaacacgtcattcatgtaattgaactttcatgtgttgatacaaaaaggattaaaaattgcaaatttaaggtagctgtagactcaattaatggtgcaggttcaaaagcattgccccttcttttagaatacctagggtgtgagttgatccctattcattgtgatggaaccggtaaatttgatcgcggagccgaacctttacctgaaaaccttggtgatttgagtaaagctgttttagaaaataatgcagatataggctttgcaattgacccagatgcagataggctcgcaattgttaatgatcatggaattccaatcggtgaagagtatacgttagttattgctgcagaaagttatttaaagcaacttaaaaaccctgaagatattgttaccaatctatcaacaacgctagcgcttgataaaatagctgaaaaatacaatacaaaggttatcagaactgctgttggggaaattaatgttgtcaaaaaaatgatcgagattaattcaaattttggcggtgaaggcaatggaggtgttatactaaaagaggcacatctcggtcgagattctttggtagctgctgcaatggttttaaatcgattgtcccaagaagagaatttgactgtttcacagcttcatgattcattaccccattattcaattattaaggataaaattgatctagttaaagtagatgagacggttttgttaaaaaaagctaaagaggcttattcagattcaacaattaattctattgatggaataaaattcatttgggatgatcgatgggttcatttaagaaagtctaatacagagccgattatgcgtatttatgctgaagcaccctcaaaaaaagaagcaactcatttaattaaacaaataaaaaattaag

SEQ ID NO: 291383 - DNA, 1345 bp, Unknown
  Bacterial polypeptide expressing nucleotide sequence isolated from the Sargasso Sea
tatgttgatacgcagtatttctggaatccgaggtttagtcaattctgatttgacattaaaattatgtcgtgattttgctattgcaattaatcagcttattccagatggagttataatgatttgtcgtgatacacgtccttctggagaagagatattagaaaatgtttcagatcaattacgaaaatgcggtagaaatgttatttcattagggattgcgcctacacctactattcagtacatggtacaaacaactgaagctcagggtggtatagttattactgctagccataatccaatagaatggaatgggtttaagtttattagaaatgatgggacttttttccgaccaaatgaatgtcaaaaacttttttcaaaaatggataaaacaaacaatcttaataaaaaagatgaattaggcgagatccttcaagatgtaaatgctgttcaaaagcatattattaatataattggattaagttgtattaatttaagtcaaatacgaaaaaagaaatttatagtagttgtagatgcagttaatggggcaggatatgatgctgtgcctcagcttctcgaaacgttaaattgtgaagttattcggattaattgtgatcctagcggtgactttgttagagggccggaacctctggcgaataatctagaaatgttgagtgatactgttaaaaaaacaaatgcagatattgggctcgctcttgatccagatgcagatcgtttagcagtagtgtcaaatatgggcaagccaattggcgatgaatacaccttagcactagctgctgatggatatatcaggcaaaaaaaatcaaaagaaacttttgtaattaacctatcaacatctatgatattagaaaaaatagctaacaagaatgattgtaaagtaattagcacagctgtaggcgaaattaatgtggttgaaaaaatgatagaaataggagctgaattagggggagaaggaaatggtggagtaatattaaaggaatctcatcttggtagagattcacttgtagcctgcgcattagttttaaaccgtctggctcaaacagatgagagtattcatgatatttttttgggattgccccaatttgttattgtgaaagataaaatagaactttctagtaatgatttagatgatttaatctcatattcaaaaaacatttttgaagatgcaaaaataaatattgaagatggaacaaaatttatatggaaagataaatggattcatttacgcaaatctaacacggagccaattgttcgtatatatgcagaagcaaaagataaaacaatagctcaagatttaataaaaaaagtaaaattatttatagataagtaa

SEQ ID NO: 291384 - DNA, 684 bp, Unknown
  Bacterial polypeptide expressing nucleotide sequence isolated from the Sargasso Sea
aatgacaaaaaataaactagatttaatttttaaatcttatgatattagaggcgtttatggtgacagtatagaccaagatatagcttataagattggcaaagcttttgcagaatttgttccagatgacactattattgttggtcatgacgggagagtttcaaatattgaaatgcttgatgcttttacttctggaattaaatccattaataaggaaattatttatgttggattagccccaacagatactgtctattcgctatccggcttacttaaaaaaccaggggcaataattactgcttcgcataatccaaaaaattataatggcttaaaactctgtaatgctggcgcaataccaataggtgaaaactctggcctaatggatatcaaaaaattagccgatagaaatgtagagatacgtattgagaaatttaaaattaacgacaaacacttaggtaatgaatattatgaacatctcaaaaatttagtatctccagagagtatttcacaaaaattaaattttggtattgatggaggaaacggagtatttggtgcgatatttgatactttaaataatatatacaaattcaatgtgaagtctatatatttagaagttgatggaaatttccctaatcatcctgctgacccatcagacgaatcaaatttaactgatttaaaaaatctagt

SEQ ID NO: 291385 - DNA, 1156 bp, Unknown
  Bacterial polypeptide expressing nucleotide sequence isolated from the Sargasso Sea
tatgttaattagaagtatatccggtataagaggtcttgtaaatgaagatctaaaggaaaatgctattattaactatgcaaatgctcttaatgagtatcttccagaaggtgttatttatgcaggaagagatagcaggccctctggggaagaaattgcacagttaatgatagatgaactaattagacttggccgcacaattatttattgtggtatcgttccaacaccgactgtccaatatatggttcatattagtgaagcagttggcggattcattattactgctagtcacaacccaattgagtggaatggcataaaatttttgagaggggatagtactttttttcataaggaagattgtgaaaaattatttgaaatagctgataatttttcctcaatgaaaaaatatcctgatgagaaaggaatgctatgggaggaaaaaaatgccatttacaagcactctgtcaaatgttcatctttgaaatgtgttgatttagataccattagaagtaaaaaatttaaagttgtcattgattctgtcaatggtgcaggggctgacgcattgccatcgatgttagacttattaggatgtgagattatagaactagattgtgagccaactggtgtttttaatagaggtacagagcctctacctgaaaatcttaaggggctttcaaaagaaataatcaataataaagctgacgtaggttttgctgtagatccagacgcagatagattagccgtagttgatgaaaaagggaatcctttaggtgaagagtatactcttgtcttagctgctgatggttacataaatacaattggggcaaaagatgaaatttttatttcaaatctttctacttcgttagcattggacaaattagcattgtcaaaaaattgtcaagtaaaaagggctgctgtcggtgagataaatgtagtgaataaaatgaatgaagtagggtcaaattttggcggagaaggaaacggtggagtgattttaagagaatgtcatctaggtcgagattcattagttgcggccactatggttttaaatcgaatggcgcagtctatatctccgattagcgaaatttataattctcttccccagtttgaaatagttaaagataaggtaagtgttgaagggataaatagtgatgacttt

SEQ ID NO: 291386 - DNA, 1396 bp, Unknown
  Bacterial polypeptide expressing nucleotide sequence isolated from the Sargasso Sea
gatgatctcccaatccatcttcaaggcatatgacattcgtggcgtggtcggcaagacgctcgacaccgacaccgcacgcgcgatcggccgggcattcggcagtgaagtgcgtgcgcagggcggcgatgcggtcgtcgtcgcgcgcgacggccgcctgtccgggccggacctcgtcggcgcactggccgacggcctgcgtgcggcaggcgtcgacgtggtcgacgtcggtatggtgcccacaccggtcggttatttcgcggcgaacgtcccgctcgcgctgaagggcggcgagcgccgcgtcgattcgtgcatcgtcgtcacgggcagccacaacccgcccgactacaacggcttcaagatggtgctgcgcggcgccgcgatctacggcgagcagatccaggcgctgtaccggcgcatcgtcgacgagcgcttcgagacgggcagcggctcgtacgaacagatcgacgtggccgatcagtacatcgcgcgcatcgtcggcgacatcaagccggcccgcccgatgaagctcgtcgtcgacgccggcaacggcgtggccggcccgctcgcgacgcgtttgttcaaggcgctcggctgcgagctcgtcgagcgcttcaccgacatcgacggcacgttcccgaaccaccacccggatcccgcccacccggaaaacctgcaggacgtgatccaggcgctgaaggacaccgacgccgagatcggcttcgcgttcgacggcgacggcgaccgcctcggcgtcgtcacgaaggacggcaagatcatctatccggaccgccagctgatgctgttcgcggaagaagtgctgtcgcgcaacccgggcgcgcagatcatctatgacgtgaagtgcacgcgccacctcgcgcaatgggtgaagtcgaagggcggcgagccgctgatgtggaagacgggccactcgctcgtgaaggcgaagctgcgcgagacgggggcaccgctcgccggagaaatgagcggccacgtgttcttcaaggatcgctggtacggcttcgacgacggtctctacacgggcgcgcgcctgctcgagatcctcgcgaagacggccgacccgagcgcgctgctgaacgggctgccggacgcgatgagcacgcctgaactgcagctgtggctcgacgagggcgagaacttccgcctgatcgacaagctgcagaaagaggcgaagttcgacggcgccgaggaagtcgtgacgatcgacggcctgcgtgtcgagtacccggacggcttcggcctcgcgcgttcgtcgaacacgacgccggtcgtcgtgatgcgtttcgagtcggagacgcaggaagggctcaagcgtatccaggaggacttccgccgcgtgctgacggccgcgaagccggacgtcaagctgccgttctga

SEQ ID NO: 291387 - DNA, 1051 bp, Unknown
  Bacterial polypeptide expressing nucleotide sequence isolated from the Sargasso Sea
ttggatattaactattcaaatccagtaaattttaaacttaaagattatgatgaaaagcctgaaatatataatttaggtttcagagaatatgatgcacgctggttatatcctgaacaaattaatttagcaggcgttcaaaaaattggactaggtttaggaaggcttatcaagcaatcagataataatggaaaaatttctgtaggacatgattttcgatcatactcagaagaaataaaagaagctcttattgggggattaatagcctcaggagttgatgtttatgatgtaggtttaacaatttctcctggagcttatttttctcaatattttctcgactgtgataatgttgcaatggttacagctagccataatcctaatggttggacaggaataaaaatgggaaatgaaaagaccctcacctttggtccagatctaattaataacctaaaaaagcttatagaagaaaaagataacacctcaaataagaatggaaaatatatttttagaaacatcaataatgagtatcttacagatctaatttcaaagtataaaataaatagaaaaattaaagctgtagtagcatgtggaaatgggacagcgggtctttttgctcctaaagctcttagtttattaggtgttgaggttattccattgcattgcgatttagatagctcatttccaaactataatcctaatcctgaagatttaataatgttaaaagatttaggaaaaaatgttttagaaaataatgcagatataggttttgcatttgacggtgatggagatcgcgtaggtgtagttgataataaaggacaagaaatatttgcagataaaattggactactaattgctcgaaatttatccttagaaaattcaaattcaaaatttgtagttgatgttaagtcgacttccctttttctgactgataaaattcttaaaaagaataattctgaaattgtattatggaaaactggccacagttatattaagagaaaaacaactgagataaatgctacagctggtttcgaaagatccggtcatttctttttca

SEQ ID NO: 291388 - DNA, 1327 bp, Unknown
  Bacterial polypeptide expressing nucleotide sequence isolated from the Sargasso Sea
tatgaatcttaaatttggtaccgatgggattagggggcctgtcgaaactaaagttactcctgaagcttgtcttcgcattggtcatgcagctggtattgtttttaaagagctcggctgggatacagtgttaattggaaaagataccagagtatcaggttatatgcttgaagctgctcttcaagcaggattcttgtctgtcgggatgaatgtaaggcttcttggtccattaccaacgccgggtgttgcatatttaactaaatctttcagaaatcaatgtggtgttgttataagcgcatctcacaatgattatcaagataatggaatcaaaattttcgataatagtggcgtaaaaattgatagaaagattgagatgatgattgaaaatattttaagtgacaaaattacatcattaccatcagtagaaattggaaaagctaaaagatttgatgaatctggaccgagatatgttgaattttgcaaatcaactgttcctgaagatattagctttagtaatttaagaattgtccttgactgcgcaaatggagcatcttataaggttaccccagatgtttttcatgagttgggcgctgaaataatagttgttggagatcaacctgatggatacaacattaaccaggaatgtggatcaacaaaccctgagcttgttcaaagacttgttaaagagcatagagctgactttggagtatcacttgatggtgatgcggatagagtaactattgttgacagagagtcaaatatattagatggagatgacattctttatattttaggttttgcaaatccaaatagattaggtccatggtcaggcatagttggaactcagatgtcgaatgttggattagaagatggccttaataaacttgggtattcctttaaaagggcagacgtcggtgataaatatgtatcagatttgctatcaaaagagggttggcttcttggtggagagccctctggacatattatctgcagagaccttgttagcacaggtgatggaactatagcagctcttaaaacaattagttcacttgttatgcttgagaaagatcctaaagatgttctttcgaattacaaaaaaataccccaaataaatgaatctatcagtgttataaataaagatattattagtgatgctgaagtaaaaacagctataaatgatataaagtcagacttaaccattaacaggattcttgttagaccctcagggactgaaaataagattagaataatgattgaatctgaaaataaaaaaacagctaaaaaatatacaaatgatctcattaaactgttcgagtctaaaatcgcataa

SEQ ID NO: 291389 - DNA, 728 bp, Unknown
  Bacterial polypeptide expressing nucleotide sequence isolated from the Sargasso Sea
aatgaaaaaagagatatcctgctttaaggcatacgatgtcagaggcaggataccttctgaattaaacgaagatgtcgcctatcggattggagctggagtcgcgtcttattttgcagcagaatcggttgtcgttggatatgacgttagaccctcttcgatcgatattctcaatgcgctgacaaaaggcatcaatagcaagggcgcaaaagtatactcaattgggctttgcggcacagaagaaatttattttgccacaaatcatttaaatacggatgcaggtgtaatgatcactgccagccataatccggcagattacaatggattgaaaattgttggcaaaggtgcaaaaccagtcagcatggacagcggacttgatgaaataaagaatattgctgaagcatcagaatctaagaccgataatgagcctgtcattgagatcattgatgtaaaaaacgaatacatcgataaactcattcaattcattgacccaaaaaaaatcaaacccatgaagattgtcactaattcaggcaatggttgtgcgggtccaattttagatatgcttgaggataagcttccaattgaattcatcaaaattcagaatgaaccggacggctcatttcccaatggaattcccaatcccttattgccagagaatagagaaataacctccaaagcagtgattgaacattctgctgatcttgggattgcctgggacggagattttgatc

SEQ ID NO: 291390 - DNA, 886 bp, Unknown
  Bacterial polypeptide expressing nucleotide sequence isolated from the Sargasso Sea
atgaaactttttggcacagatggaatcaggtcagaatataataattttcctatgatagacaaagatctgataaaaattggatattgttttgctaaatctatgtttggtaacaattatggtagaatatttattggtaatgatgggagagaatcatctactgatatcttgaattctttaaatactgggatatcacaacaaggatccgacgttatatctgtagggctattgcctaccccagcattaagcagttgtatttatctaaataataattctaaaactgcgggaatacagatcactgcatctcataatccttattttcataatggtctaaagttttttgacaataaaggtcaaaaaattgatcataatatggagcagttaatagaaagatattttgatgaccacaagaccattttaaataccaatctgaatggaaaaaaaattgaacataacctaactgattttcaaaatatttatatttcatatattgataaatatttattatctaaggccttaaataaaaatactagaaaattaaatattctggttgattgtgctaatggcgctgcatcgcatctagtagataaaattttcaaaaatagtcagataaatctaattccaatttttaatgaaccaaatggatcaaatattaatttaaattgtggtgctaccgacctaactgctttaaaagattttatttcttcatttaacagtatacaagcaaagtccactaaaaaagaaaaagaatcgattctcaaaattgacctaggtgttgcgcttgatggagatgcagatagggtaatttttgtagatgaaaaaggtaatgtaatagatggagataaagttttatttctgttgtcacaatactacagagataaatatgatt

SEQ ID NO: 291391 - DNA, 1229 bp, Unknown
  Bacterial polypeptide expressing nucleotide sequence isolated from the Sargasso Sea
agttgatgtttatgatataggtttaacaatttctcctggagcttatttttctcaatattttctcgactgcgataatgttgcgatggttacagctagccataaccctaatggttggactggaataaaaatggggaatgaaaagactctcacctttggtccagatctaattaataacttaaaaaagtttatagaagagaaagacagtacttcaaataagcctggaaaatataattttagaaatattaataatgagtatcttacagatctgatttcaaaatataaaataaatagaaaaattaaagctgtagtagcatgtgggaatgggacagcaggtctttttgcgcctagagctcttagtttattaggtgttgaagttattccattacattgcgatttagataattcatttcccaattacaaccctaatcctgaagatttaataatgctaaaagatttaggaaaacatgttttagaaaataatgcagatataggttttgcatttgatggtgatggagatcgcgtaggtgtagttgataataatggaaaagaaatatttgcagataaaatcggactactaattgctagaaatttatgcttggaaaattcaaattcaaaatttgtagttgatgttaagtcgacttccctttttctaactgatgaaattcttaaaatgaacaattctgaaattgtattatggaaaactggtcacagttatattaaaagaaaaacaactgagataaatgcaacagctggtttcgaaagatctggtcatttctttttcaataaccccataggtcgagggtatgatgatggtattttgtctgcacttgaaattctaaaaatattagacaataacaaaaatagaaaacttaatgatttatacaacgagctccctatcaccttctcctcaccaactatgtctccaaaatgccctgaagaaaaaaaatatgatattgtggataaaataaaaaatatttttcaaaataaaatggaaaataatcagcctttagcagggcaaaaaatactatctatcttaactgtaaatggagttagaattcatctagaggatggatcatggggtttggtaagggcatcatcaaattcaccaaatcttgttgttgtttgtgaaagcacagtatccgaagaaagaatgaaagaagtatttcatggtcttaatagtgaaatagtaaaatttgaagaaattggtgattatgatcagaaaatttaaa

SEQ ID NO: 291392 - DNA, 1345 bp, Unknown
  Bacterial polypeptide expressing nucleotide sequence isolated from the Sargasso Sea
atgttgattcgtagtatttctggtatacgaggcttgataagttctcatcttacaaaagaatcttgtattaattttgcgaatgcaatcgatcaaataattcctgatggtgtaattatgttaggtagagatactcgtccttctggtgaggaattactagaaaatgtttctactcaattacagaaatgtggaaggacagttattgtattaggcattgttcctactcctacgattcaatatatggtgcaaaatacagaagcacaaggtggtatagttattacggcaagtcataatccaatagaatggaatggatttaaatttattagaaatgatggcacattttttaggccagatgaatgtgataatcttttttctattatggatgaaaataacttttcaaatcataaaaatgatatgggaatgattatgcaggatgttaatgctgtgcaaaaacacattattaatgtcctaggattaagttgtattgatattaacaaaattcgtgagaaaaaatttagtgttgttgttgatgctgtaaatggcgcggggtatgatgccttgcctaagcttttagaagctttaaattgtaatgtaattactattaattgcaatccaagtggagattttgttcgaggagcggagcctcttccaaagaatttgaatatgttaagtgaaacggttttaaaaactaaagcagatattgggttagctgttgatccagatgcggatcgtttagctgttgtatcaaatgaaggtatgcctattggtgaagaatacacgttggcgttagctgctgatggatatataaagcataaacaatcggaagagacatttgttattaatctttctacatcaatggtattagaaaaaatagcaaatcaaaataattgtaaagtaattagaacgcctgtaggtgaaattaatgttgtggaaaaaatgatagaaataaatgctgaattaggaggagaggggaatggaggtgttattttaaaagaatcacattttggccgagattctattgtaggatgtgcaatggttttaaatcgtttatctcagactaatgaaagtttgcatgatatttatgtaaatcttcctcaatatacaatcgttaaggataaaattgaaatttccaaggacgcactaggtgatctcattaatcattcaaaaaggatttttgatgatgtggatgtaaatattgaagatggaataaagtttacatggaaaaataaatggattcatttgcgaaagtctaatactgagccaattgtacgtatatatgctgaggcaaaagaccaagaaacagctcaagatttaattgataaggttaaatcttttatgagtgaataat

SEQ ID NO: 291393 - DNA, 1366 bp, Unknown
  Bacterial polypeptide expressing nucleotide sequence isolated from the Sargasso Sea
tatggaaatatcaaaatcaatttttcgtgaatatgatattagaggtatttatccaacacagatcaacgaacaagtagttcacaaaattgctaaggcgatatcaaaaaagtgtcttgatgagggtattacagagatttgtattgccagggatggaaggctttcaggtgaaaaacttttatctgcattagagaattctttatctaacaatggtattgacgttatcaatacaggcatgactacaacgcctttactatattttgctgccaaaaagagtgaatgtaaaagcggtgtgatgataacaggaagtcataatccaaagaattacaatggtataaaacttattatcaatgacaagcctgtctctgggactgaaatctatagtctcatagacaataccaatggaatttcaagatgcaaaggaaaaattgcaaccaaagatttcagggatgaatacatttcagaaataaagaaaaatattgttgtaaaagaaaagttaaaagttgttattgattgtggcaatggtgctagcggatgcgtagcaccaagattatattcagaattaggctgtgatgttataaatttgtatacagaaatcgatggccattttccaaaccatcatccagatccaggtaagcctgaaaatttaattgatttgatagaaaaagttaaggaaactgatgcagatttgggtcttgcatttgatggagatggtgatcgtgtagggctagtaactggtagtggcgaaataatttttccagacaagattatgatgatgctatgtaaagatattctttcatcgaataaaggaaaaattatatttgatgttaagtgcacagactcactaccaaaattaattaaagataatggtggtactcctctgatgtatccaacagggcactttaatatcaaaaatggtattaatgagcacaatccactattagctggtgaaatgagtggtcatatattttttaatgataaatggtatggttttgatgatggtgtttattccggtgccagaattattgaacttatactcaaaactaaaaaatcaatctcaagtcttaacaaagaattaccagtgctttactcaacacctgaattaaatgtagaggtctctgataaaaaaaaatttgagatagttaagcaatttatagctaattgcagcatagaaggggaaaaaatcgctattgatggtttaagaataaattttgatgatggatggggcctgttgagggcatcaaatactactccaatgctagttatgagatttgaaggtgactctaaagagagtttaattaagattaaagataaatttattaatgaactttctcgcatttatcctgatattgatataaatttaaattga

SEQ ID NO: 291394 - DNA, 1235 bp, Unknown
  Bacterial polypeptide expressing nucleotide sequence isolated from the Sargasso Sea
tatgaaaaaattatttggtacaaacggtgttcgtggtgttttttctgaggactttacactagaattcgttaatgatcttgtcatgtcactagcagcctatttcaaacaaggaaaaattctggttggatatgatggcaggcattctagtccaattgttgcaaaagttgtttcttcagcgttaaattattcaggtttggattgctatatggctggacttgtgcctactccttgcttagaatatgcgacaaaaaaactaggctatgatggtggattaatgattactgcatcacacaatcctccacaatacaatggaatcaaacctgtagcatcagatggtgtagaaatctctcgtgaagatgaacgaaaaattgagcaaatttttgatgaaaaaaattggattaaagctagtacttttggtaaatcatttgaagaaacaaatgttatttcaacatacattgatggaataatttccttaattgatattgattctataaaggcaaaaaaattcaaagtatgcttagatcttggaaacggtgcacaagctgttacggcaaaaaaattatgtgaaaatttaggttgtaatgttcatactatcaatgaagaaatcgatggtgattttccaggtcgtggttcagaaccaacccctcaaaaccttgatgaattatctaaattagtcgttgatacaaattcaaattttggaattgcatttgatggtgatggtgacagaagtattttttgtgatgaaactggaaaaatcttaacaggtgatagttctgccttacttctttgtgattaccttcttcaacaatatccaaattcacaggtagttacctgtctaaactctggtaacatcattgaaaatattgttgaaaaaactaattctcatgtagtacgaacaaaagtgggtagtgtagaagtctctagaagaatggtaaatgatgatgcattagtgggttatgaagaaaatggaggttttatgtttggaaatcataatcatgttagagatggtgctatgactttagcgctaatgttagatctactctcaaagtctcaatcacaacttagccaaaatatcaaaaacttacctccaagttttaccacaaaaacaaagatagaatgttctttagaaaaatcaaaaatcgtaatttccgagcttttgaaagaatttcctgattcaaacacctctgatggaataaaaattcaagtagatcaagacaactgggtcatgatcgacc

SEQ ID NO: 291395 - DNA, 763 bp, Unknown
  Bacterial polypeptide expressing nucleotide sequence isolated from the Sargasso Sea
atgaaaaaattatttggcacgaatggtgtacgtggtgttttttcagaggacttcacactagaatttgttaatgatctcactatgtctttggcagcatatttcaaaaaaggaaaaattttagtcggatatgatggcagacattctagtccgatagttgcaaagattgtttcttcagcattaaattattcaggtttagattgctatatggctggacttgtgccaactccatgtttagaatatgctacaaaaaaattaggatatgatggaggtctgatgattactgcttctcataatcctccgcagtataatggaatcaagcctgtagcctctgatggtgttgagatatctcgtgatgatgaaaaaataattgaaaaaatctatgatgacaaaaactggataaagggagattcatttggaaaaacactagaagaaacaaatgttgtttctacatatcttgatggaataatttccctagttgacacaaatagtatcaaaaataaaaaattcaaagtctgcctagatcttggaaatgggacacaatctgtcactgcaaaaaagttatgcgaaaaattagattgtgatgtttttacaattaatgaagaaatagatggtgatttcccaggacgtggctctgaacctacccctcaaaacttagataatctatctagtttggttgttaaaacaaactctaatcttgggattgcctttgatggagatggagatcgtagtatcttttgtgatgaaaatggaaaaattttaaccg

SEQ ID NO: 291396 - DNA, 1156 bp, Unknown
  Bacterial polypeptide expressing nucleotide sequence isolated from the Sargasso Sea
attgaaaatagaaaattttgataaagaggttcttagagagtacgatatcagaggagtagttggagaaaatattaatcaaaatacagcctatacgataggtagaacgtttggatacactgtaattaatagattaaaatctaacagaatagctaccggctatgatggaagattaacatcaccatacttacatcaagctctttgcgaaggtttaaaggatgcaggagcaaaagttatcaatattggtatggggccaactccaatgacttattttgctcattatcatcttgaaactgatgctgttattatggttactggatcacacaacccttcagaatataatggtttcaaaatggttttagctaaacattctttttatgctgaagatatccaaagccttcaaaaattaattgatcaaaataatttaaaattaatcgaaggtgaaatcattaatcaagatattaaaaaagattataccgaaagattattacaaaatattaatctcaataaaaaaataaaaattgcttgggatattggtaatggcgcgatgggagctgtcattaaagaagttacaaacaatttaaataattctgaaaatatattaattaatgaagaagttgatggcaatttccctaatcatcatccagatccaactgttccaaaaaatatggagcaattaataaagtcagtcaaagaaaataaatgtgacataggtctggcttttgatggagatggagatcgtttaggtgttgtagacaacttaggcaatttagtttgggcggatcagtacatgttattactatgcactgaaattgctaacttatacgataacccaaaaataattatggatgttaaatgtagtaaagttttttttgatgaagcaaaaaaacttaattgtgatcctattatgtctaaaactggtcactctccaataaaagaaaaaatgaaagaattaaaatcgcctttatcaggagaaatgagtggtcatgtatgttatgcagatgatttttatggttacgatgatgcaatgtacgtagccttacgtttattgcgaatattatgtaatcaagaaaaatccttgaatgagttaattaatatatatccaaaaacttattcaactcctgaaacaaggtttgatgtagatgaacaaaaaaatttt

SEQ ID NO: 291397 - DNA, 1327 bp, Unknown
  Bacterial polypeptide expressing nucleotide sequence isolated from the Sargasso Sea
catgaatcttaaatttggtaccgacggaattagggggcctgtcgaaactaaagtgactcctgaagcatgccttcgcatcggtcatgcagctggtattgtttttaaagaacttggctgggatacagtattaattggaaaagacaccagagtgtcaggttatatgcttgaagctgcacttcaagcaggattcttgtctgtagggatgaatgtaaggcttctgggcccattaccaacaccaggcgttgcgtatttaactaaatcttttagaaatcagtgtggcgttgtaataagcgcgtctcataatgattatcaagataatggaattaagatttttgataatagtggcgtaaaaatcgatagaaaaattgagatgatgatcgaaaatattttaagtgagaaaattacttcattaccatcagtagaaattggaaaagctaaaagatttgatgaatctggaccaagatatgttgaattttgtaaatcaacggttcctgacgagattagttttggtgacttaagaattgtccttgattgcgcaaatggagcatcttataaggtttctccagatgtttttcgtgagttaggagctgagacaatagttgttggtgatcagcccgatggattcaatatcaatcaagattgtggctcaacaaatcctgagcttgttaaaaaacttgttaaagaacatagagctgactttggagtgtcactagatggtgatgctgatagagtaaccatcgtagacagagaatcaaatattttagatggtgatgacattctctacatattgggttttgccaatcctaacagactaggtccatggtcaggcatagttggaactcaaatgtctaatgttggattagaagatggccttaataagcttggatattcattcaaaagagcggacgttggcgataaatatgtttcagatttattatcaaaagagggttggctccttgggggagaaccttccggacatattatctgcagagaccttgtcagcacaggtgatggaactatagcagcgctaaaaacaattagttcattagttatgctcgagaaagatccaaaagatgttatttctaattataataaaattcctcaaataaacgaatccataagcgttataaacaaagatattgttagtgatgccgaagtaaaaacagccataaatgatatcaagtcagatttaacaattaatagaattcttgtaaggccatcaggtactgaaaataagattagaataatgattgaatctgaaaacaaaaaaacagccaaaaaatatacaaatgatctcattaagctatttgagtctaaaaccccgtaa

SEQ ID NO: 291398 - DNA, 1093 bp, Unknown
  Bacterial polypeptide expressing nucleotide sequence isolated from the Sargasso Sea
gttggacatcaactattcaaaaccagtaaattttgtaatcaaaaattatgatgaaaaggctaagatttataatttaggttttagagaatatgatgctcgatggttatatccagaacaaataaacttagctggggtacagaaagttgggcttggattaggtaagctaattaaaaaatctggaaacaataataaaatatcagtcggacatgattttcgttcatattcagaagaaatcaaagaagctctaattggtggtttaatcgctgcaggtattgatgtttatgatattgggctaacaatttctcctagtgcttatttttctcaatattttcttaattgtgacaatgtagcaatggtaacagctagccacaatccaaatggttggactgggataaaaatggggaatgaaaaaaccctaacttttggcccagaacttataaatcaattaaaaaaaataattgaagagaaagatgaaatttccgataaaccgggttcctacacttttaataacattaatgaggagtatgtatctgatcttatatctggttatcaatttaagagaaaaattaaagctgtagtagcttgtggaaatggaactgctggaatttttgcgcctgaggtttttaatttattaggcattgaagtgatcccgttgcattgcgatttagatgcatcatttccaaattataatcctaatcctgaagatttaaaaatgctcaaagatatcggaaaacatgttttagctcataaagcagatataggttttgcatttgatggggatggagatcgtgttggtgtagtagacaataatgggcatgaaatatttgctgataaaataggcttgttgatagctagaaatttagctaaggaagtttcaaattcaaagtttgttattgatgtcaaatcaacatctcttttttcaacagatgaaattcttaaaaagaataattctgaaataatattttggaaaactggccatagctatatcaaaaggaaaacatctgatataaatgctactgctggatttgaaagatcaggacacttcttttttagtaaccctattggtcgaggatatgatgatggtattttatag

SEQ ID NO: 291399 - DNA, 1345 bp, Unknown
  Bacterial polypeptide expressing nucleotide sequence isolated from the Sargasso Sea
atgaaaaaattatttggtacaaatggtgttcgtggtgttttttccgaggattttacattagaatttgttaatgatcttgttatgtcaatggcagcctatttcaaacaaggaaagattttggttggatatgatggtcgtcattctagtccaattgtcgcaaaaattgtttcttcagcattgaattattcgggtttggactgctacattgccggactggtgcctactccttgtctggaatatgctacaagaaaattaggttatgatggtggattgatgatcactgcatcacacaatcccccacaatataatggaatcaaacttgtggcatcagatggtgtagaaatatctcgtgaagatgaacggaaaattgagcaaatttttgatgaaaaaaattggataaaaactgaaacatttggtaaatcctatgaagaaacaagtgtcatctcaacatacattgatggtataacttcagtaattgatactgattccataaaggcaaaaaaattcaaagtatgcctagatctcggtaatggtgcacaagctgtaactgcaaaaaaattatgtgaaaatttaggctgcgatgtatatgctattaatgaagaaattgacggtgatttcccaggtcgtggctccgaacctaccccgcaaaatcttcatgaattatctaaattagttgttgacacaaattcaaattttggaatcgcatttgatggtgatggtgacagaagtattttttgtgatgaaactggaaaaattttaacaggtgatagctctgctttacttctatgtgattatctccttcaacaatacccaaattcacaagtggttacctgtctaaattctggtaacataattgaaaatattgttaaaaaaactaattctcatgtagtacgaacaaaagttggaagtgtagaagtttctagaaaaatggtaagtgatgatgcactagttggttatgaagaaaatggtggttttatgtttggaaaccacaatcatgtaagagacggtgctatgactcttgcactaatgttagatcttctctcaaaatctgaatcacaccttagtcataatatcaaaaatttacctcctagttttaccacaaaaacaaagatagaatgttctttagagcaatcaaagctcgttatttctgaacttttgaaagaattccctgattcaaacatctctgatggaataaaaattcaagtagatcaagataactgggttatgattaggccaagtggaactgaacctataatcagaatttatggtgaatcaaactctcaacaaaatcttgattcattaatctctaattttgttgaaaaaaccaaatcaattctcgcctgat

SEQ ID NO: 291400 - DNA, 2113 bp, Unknown
  Bacterial polypeptide expressing nucleotide sequence isolated from the Sargasso Sea
atgatatccgattccttaccggaacgattgcagggtaccgatggaatccgcggaaagattggtcttgcctgcgattttccggaaacgggcccgctttccgtttggatccaaaaaaaaattctcacagaagagttttttgaactctataccttttcattctgtcagaatttaatcgattctggctgggctgaattgggtgactccattattgtaggatgggacacccgagatcctaaaggaatcttcagtgatgctgcgataaggggaatacgcaaatccgggctgactgcggtgtccattggagttcaaccaactccttgtgtggctctttatcagctttcgcgagaagctgcaggtgccgttgtattgacagcttcgcacaatccttcagaccagaatggtatcaagatttttttaggtcacaccggattaaaactctttcctgcagatgacataaggctgacaaaaaccattaactccccggattttaagcatctgaaaaagactcctttgcaaggtgacgttgttgatgaagaagtcttggcaaggaagttctttaaaaatgtgatgctggattcgtttaattcgtgggtcagcgaccagtcgttgcagaagacttcactggtcatcgatgttgcgaatggggcttttatccctttgctcgaacagatgatccaggaattcggcggggcaaatttgatcctttgcaacacatctttggaaaatggaatcaatcataattgcggggttgccgatctcgaaggtcgtcacattgtcgaagcaaaggaactattgcaggaacctctttgccatgcagaagctctaaaacggcttcttgaagaaggacgaagaaaacgagagcaaaattctgaaggtttaaccgtaggccttgtgctggatggtgatggggaccgatgttttatgctcgtttatgatcctcaaaaagatagaatcatcatcatcgatggggatggacttgcgattctacaacttctttggctcaaacagaatcagaaaacgagggagggtcagctttatcttaacacggtagaaagcagccttgaagcctcaagaagtgctctcaaggtaggatgttttgtcaagcaatgtgcagttggagataagtggattctctgggatgcattgttaaaggcttatcagtggaaatgcaattttttcaaaaaccatatcaacgatcctgaattttccggaatgctcctggaccttgaaaattcattcaaaaacatggaagaaaaatccagttttgatgccttggaattaagcctaaaaatcaaaaatgttgatgaatattttcaggtacgtatccaagaccctaaaattcttgaaaaactctcaaacgaatccaacgccttcagttcttcagattttttaatcggaaacgaagagtcaggacatttattaagcctgacccgaatccctaataaagagggaaggatgattccggcttatgccggtaatggactgaaaacgggattaaattccttaattgccctggaatcactgagaccgtcagatccacggaaattgattgagtggttgaatgaaaagtttcccagaggctactctcgaagcctccctgtttatcatgtgaaacaggaattactggaacctcaatccctgctccgaaatgagctcaaaggtctgattgagcaggttttggaagccaatggtcattccattgaatggcatcatcgttctcaagaaccgaatatgctcatgggattgtccctgaaaaatcatttaccggaactctgtgtttttgttcgcaattcaggaacagaagacaaacttaacctttatttccgaagtctcagcaacaattgtgagatgctcgaaagcgtaataaatctgatttatggttttttgctgaaaaattttaaagatccttcgaaatcttccactcaacttgaacaatacatattaaaacaattgaaagaaaatcccctcaacttaagtgaaatccaaaattcaacaaaaaatgattctgcatttcaagaaattttccgcttaatgcattcccgtcagccgctgatagattatataaataatcgatgggaactcagccagtggggacagttgttggtaaactaag

SEQ ID NO: 291401 - DNA, 1282 bp, Unknown
  Bacterial polypeptide expressing nucleotide sequence isolated from the Sargasso Sea
ttgtcgaggagttccaaaacacagatagaggagataagggctttggatcatcaggaacaaaataatatcaaggcggatatttttagagcatacgacatacgtggtatctatccgagtgacttcaatgagagtacagcatattttatcggtgtggcccttgggaataaaatacaaggccaaaaaaaagctgttgttgcaatggatggtagattgagtgggccaaatataaaaacgacattaattaatgggctccaagctgcaggtgtcgaagtcactgattgcgggatgattcctacaccattactttattttgcaactcattcacttgagatacccaatggctttatggttactggaagtcacaatcccagaaattataacggaataaaaatgataataaatggaagtccattgtttgataaagatatctatgcattacgtgattggattcaaaataatccaatttccgtagtggatagtcaaggtccaataagaaaatatgagatgatagtagacgattacataaaaagagtaaaaagagacacgaatatttcaacatcaaaaaaaatagtagtagattgcatgaacggtgtcacaggtgcagttgtggatgaaatattaaagtcatttcatataaacgcagattatataaactcaaaagtagacggtaattttcccaattgctcgccagatccaaccaaagaggtaaaccttaaaaatttgaaatcaaaagtctccagcactaacgctgattatggtgtagcatttgatggtgatggtgacaggaccgtcatcatcagaaaagacggttcggtcttgtggcctgatgaattaatgatactattttctaagtctgtactgatgcagcatgctaaagctaaaattgtatatgatgtcaaatgcacaagaaatttaaaaatcaatatcattaatgatggagggataccattagaatctagaacaggtcattcatatattaaacagacgataaagaaagaaagtgcaaaattaggcggtgagatgagtggtcatattttctttaatgacaagtggtacggcttcgacgatggaatctatgtttttttaagatttctagaaattctatctcaagaaaatcatctcctaaaagctcttgaagatttaccaaaaacacatactactccagagatagacattgaattcaaaggaaatagtcatttcaaatttattgaggaatttattaaattaagcagatttgatgaatacaatgtttctttgatagatggtattaaaagctgctagg

SEQ ID NO: 291402 - DNA, 778 bp, Unknown
  Bacterial polypeptide expressing nucleotide sequence isolated from the Sargasso Sea
agttgatggaaatttccctaatcttcacccagatccaactgttccaaaaaatatggagcaattaataaagtcagtcaaagataacaaatgtgacataggcctggcttttgatggagatggagatcgtttaggtgttgtagacaacttaggcaatttagtttgggcggatcagtacatgttattactatgcactgaaattgctaacttatacgataacccaaaaataattatggatgttaaatgtagtaaagttttttttgatgaagcaaaaaaacttaattgcgatcctattatgtctaaaactggtcactctccaataaaagaaaaaatgaaagaattaaaatccccattatcaggagaaatgagtggtcatgtatgttatgcagatgatttttatggttacgatgatgcaatgtatgttgcgttacgcttattacgaatattatgtaatcaagaaaaatccttgaatgagttaattaatatatatccaaaaacttattcaacccctgaaacaaggtttgatgtagatgaaacaaaaaaatttttaattattgaagaaataaaagaaagaataaaaaatacagaaggtaaaataatagatattgacggtataagagtggaaaatgatgatggatggtttttaatgcgagctagtaatacccaaaaccaactaacttgtagagcagagtctacttctcaagaaggccttaagtctttgatagcaattatcgaaaatcagttatctttaagcggtgtaaattataagtttatagtctaa

SEQ ID NO: 291403 - DNA, 828 bp, Unknown
  Bacterial polypeptide expressing nucleotide sequence isolated from the Sargasso Sea
aatgcgttgtttaggagcgttagtaattacagcaagtcataatccatataattggctgggtctgaaaataaaaagttttaatggatgttctgttgacgaatcttttacaagtgaaattgaaaaaagattaatgcttggaaattcaattgaaaagatagaggatgctaatcaattggtagatattaagaattttcatttggataggattaaatccctttttgatattgactttatttccaatagattgaaaaaaatgaaattaaaaatttttgtcgattctatgcatggttcagctgcaaattgtatggctgatatttttgcctccaatgattcagaagttatttcagaaataagaaaagatagtgatcctttttttggcggaaaacctcctgaacctcttttaaattatgtagatgatttaaatcaaatactaatcaaaaattcaacaaatgaagtgaaaactctaggaattatatttgatggagatggtgacagaattgcagcaattgatgaaaaaggaagatattctagtacacaagatttactgccatactttattcactatttgggcgaaattaaaaataattcttatccagttttaaagactgttagtggttcagatattattaaaaatatatcagagagtcaaaatagagatgtttttgaacttccagttggctttaaatatattgctgaaaaaatgatcaaagagaaaatatttattggaggagaggaatctgggggagttggttttggtgactttatgcctgaaagagatgctctttatgccgcaatggttttattgaatggaattgcttcaaaatctca

SEQ ID NO: 291404 - DNA, 1405 bp, Unknown
  Bacterial polypeptide expressing nucleotide sequence isolated from the Sargasso Sea
attggtaaataatttttttatagaaaaatttaatcctgaagtacttagggaatatgatattcgaggaattgttgaaaaagatattaatcaaaacacagcttatactatcggcagaatatttggacatatagtaagtaatagatttaatgaaaaaactattgttgttggttatgacggaagaaatacatccccaaatcttcaagaagctttatgtgaaggacttattgaaagtggatcaaatgtaaaaaacattggcttatgtccgacaccaatgacatattttgctcaccactttttaaatacaaacgcagcaattatggttactgggtctcataatccttctgaatataatggttttaaaatggttttagataagaatcctttttatgcaaaagatattcaaaattttaaaaatttaacagatgataataaacttataaaagggaagggaaggcttgaatctattaatattaaaaatcattatatagatcgcaatcttgaaaatattaattttaaaaaaaaattaaaagttgcttgggatataggtaatggatcaatgggagtagttatggatgctattacattgaagatgaaaaatattgaaaatatacttataaacaaagaagttgatggaaattttccaaatcatcatcctgatccaacagtaccaaagaatatgattcaattaattgaaacagtaaaagaaaataattgcgatgttggattagcatttgatggagatggagatagattaggtgttgtagacaataaagggagaataatatgggctgatcaatatatgttattattagctaaagaaatatcatctatttatgaaaatccaaaaattattatggatgttaaatgttctaaagttttttttgatgaagtaagaaaatttaattgtgaaccaattatgtatcaaacaggccattctcctataaaagagaaaatgaaagagcttaattctcccttgtcaggagaaatgagtggccatgtctgctatggtgatgatttttatggttatgatgatgctttatatgttgcactacgcttacttagaattttatcacaagaaaaagaaactttatttgaattaataaatcaatttcctcaaactatttcgacacctgaaacaaggtttgatgtagatgaaataagaaaatttgagattattcaagaaattaaggaaagattaaaaaataataaagaagaaataattgatattgatggtgtgagagtacaaaatagtcttggatggtttttaattagagcaagcaatacacaaaatcaactaacttgtagagctgaagctttaaacaaagccgatctcaaaactttaacaaatttgattgaagatcagctatcattaagtggtgttaattttaaatttaaccacgaataa

SEQ ID NO: 291405 - DNA, 934 bp, Unknown
  Bacterial polypeptide expressing nucleotide sequence isolated from the Sargasso Sea
atgtctgctaccaagctaaactcacaaattttacgtgaatatgatattcgtggcatcgtaaataaaacaattacaattgaagatgcggtcgttgtaggaaaatcttttggaacgatagtagctgaaaaaggcggcaagtcggtttgtatagggtatgacggtcgtatttcctctcctgctctggagaaggctgttgtaaaaggtttgcaatcatgcggactatcagtaatacgaattggtgttgggccgacaccaatgctatattttgctgttcacgatttgcgggcagatgccggtatcatggttactggttctcacaatcctccagaatataatgggtttaaaatgatgttaaatcgtcacccattttatggtgatgacatccttaaaattggtaaagttgcagcgtctggtagtttttttataggggatgggaatgcagaaaaagtgttagttcagacacgatatgtggcccgtcttagggctgattatgggggtggtcgacccctcaaaattgcttgggatgctggtaacggttctgcggggccggtgatgtgcgagttatgctctgcattaccaggtaaccatattttaataaatgagacgattgatggaacttttccatcacatcatcctgacccgacaatccctgaatgtcttgaacagctgcagggaattgtgaagtctgagggttgtgatttaggcattgcttttgatggtgacggcgaccggatcggcgcaattgatagcgaaggacaaattctatggggggatcaactcatgatgctttttgcaaccgatttactccaagaatttcctggctctacaattattgctgatgttaaggctagtcaggggttattcgatacaataagtcaattgggcggaacacctctaatgtggcgcacaggtcattctctcatcaaggccaaaa

SEQ ID NO: 291406 - DNA, 952 bp, Unknown
  Bacterial polypeptide expressing nucleotide sequence isolated from the Sargasso Sea
tttgaaagctgataaattagataagataaaatttggaactgatgggtggagaggaattattgggtttgattttaatttatctaatctttcaagagttgttgttgctgcatgccaggagttgcattatcaatactataaagaagttcattcaaagaaaattattattggatttgatcgtagatttatggcttgtgaatttgccaagcaaatagtgccttttgtaagaggatgtggtttcgaaccgatcttatctgatagctttgttacaacaccctcttgtagtttctatgccaaagaagtcggttgtcttggagcgttagtaattacagcaagtcataatccatataattggctaggtctgaaaataaagagctttaatggatgttctgttgacgaatcttttacaagtgaagttgaaaaaagattaatgcttggaaattcaattgaaaaaatagatggtgttaatcaattggtagatattaagaaatttcatttagatagaattaaatccctttttgatattgactatatttccaatagattgaaaaaaatgaaattgagaatttttgtagattctatgcatggttcagctgcaaattgcatggctgagatttttgcttctaatgatttagaagttatttcagaaattaggaaagatgctgatcctttttttggaggaaaacctcctgaacctcttttaaattatgcagatgttctaaatcaaacactaatgaaaaattcaacaaatgaaatgaaaactttaggcattatatttgatggtgatggtgatagaattgcggctattgatgaaaaaggaagatactctagtactcaagatttactcccatactttattaaatatttgggggaaattgaaaataattcttatccagttttaaagactgttagtggttcagatattattaaaaatatatcagagagtcaaaataaa

SEQ ID NO: 291407 - DNA, 1033 bp, Unknown
  Bacterial polypeptide expressing nucleotide sequence isolated from the Sargasso Sea
aatggattatataaaaaaagcaaaattttggtctgaaaatccttgttttgacattgaaactcagaaagaagccaaaaaacttctaaaagatcaaaacagagatttatgtaaagattcttttggcagtattctggaatttggtacaggcggacttcgtggcattatgggagtgggaacaaaccgagtaaataggtacacaatacaaactgctacagagggtgtggcaaggataatcatgaaaaataattttaaacctgattcaagaaaagaagttataattggatatgatacccgaaaccattctcttgaatttgcgaaagtggcatctgaggttttggtgggacatgaaatacatgtttttttgttcgcagaaccttccccaactccactcgtatcgtgtgaactgttgcggagaaatgcagtagctggaattatcattacagcaagtcataatcctcccgagtataacggctataaggtttactggaaaaacggcggacagattgtacctcccatagaggggcagataattaatcaaatacgaaatttaaaaagaattgataaaatctcggtaatcccttttgaaaaagggctaaaggatatgaaaattgagtggatacataaagatgctgatgaattttatctgaatactgttagtaatttaagtttaggtaacagtgaaaataacaagaatttaggagtagtttttactccactgcatggtacaggaggccgtttggttccggaactgttaaagcgaaactgctttgagaaagtgaaaactattaaagagcaaatgataccagatggggaattctctacattatcatctccaaacccggaagacattggtgccttcaaaatggctgtttctcaagcatcagatatggatgatttgattttggcaaacgatcccgatgcagatcgcttaggcgtcatgatccgagactcagagaaaaaatggcgttggttaacaggtaatcaaattggagtgctaatactggattacatcctttcaaatttaagtaaaaaa

SEQ ID NO: 291408 - DNA, 1098 bp, Unknown
  Bacterial polypeptide expressing nucleotide sequence isolated from the Sargasso Sea
atgcagctataatggtgacaggctctcataatccttcagaatacaatggatttaaaatggttttaaataagcattctttttattctgaagacattcaaagccttcaaaaattaattgatcaaaatgatttaaaatttatcgaaggtgaaattactaatgaagatataaaaattgattatactaaaagattattacaaaatattaatctcaataaaaaaataaaaattgcttgggatattggtaatggagcaatgggaactgtcattaaggaagttacaaacaatttaaataattctgaaaatatattaattaatgatgaagttgatggaaatttccctaatcatcacccagatccaactgttccaaaaaatatggagcaattaataaagtctgtcaaagataacagttgtgacataggtctagcttttgatggagatggagatcgtttaggtgttgtagacaacttaggaaatttagtttgggcagatcagtacatgttattactatgcacagaaattgctaacttatacgataacccaaaaataattatggatgttaaatgtagtaaagttttttttgatgaagcaaaaaaacttaattgcgatcctattatgtctaaaacgggtcactctccaataaaagaaaaaatgaaagaattaaaatcgcctttatcaggagaaatgagtggtcatgtatgttatgcagatgatttttatggttacgatgatgcaatgtatgttgctttacgcttattgcgaatattatgtaatcaagaaaaatccttaaatgagttaattaatatatatccaaaaacttattcaactcctgaaacaagattcgatgtagatgaaacaaaaaaatttttaattattgaagaaataaaagaaagaataaaaaatactgaaggtgaaataatagatattgacggtataagagtggaaaatgattatggatggtttctaatgagagctagtaatacccaaaaccaactgacttgtagagcggagtctacttctcaagaaggtcttaagtctttaatagcaattatcgaaaatcagttatctctaagtggtgtaaattataagtttacagtctaac

SEQ ID NO: 291409 - DNA, 841 bp, Unknown
  Bacterial polypeptide expressing nucleotide sequence isolated from the Sargasso Sea
ggagctgcctctaaagtagcaaaacagatttatgaagaattaggctgtaaggttacaagcctttttgatgaactagatggaaactttccaaatcatcacccagatccctcaaaagaagagaatatggaagacttaaaaaatgtagtcttagaaaaaagtttggatttgggaattgcctttgatggagatgcagatagattgggaatagtaaccaaaaaaggttcaattattgatgcagatattcagatgttggctttttcaaaagaaattctaaaacaaaatcagggaggtaagatcgtatttgatgttaagtgctctaaattgctttctgatggcatagaagaactaggaggagtacctttaataaaccctacaggacattccttaattaaaaagagattactagaggaaggggctctccttggaggagaaatgagtgggcatatcttctttaatgataggtggcctggtttcgatgatgctatctatgcaggagcaagaatgttggaaatagtctcagaagctgataattcagatcttttggataatttacctaaaagctgctctacgccagaaattaatatctctataggagataaagagaaatttaatgtagtcgaagagtttaaaaaaagaatggattttaaggaagctaaaattattgatattgatggtattagggtggaatttaagtctggctggggccttttgagaccttcaaatacctcaccggtcttagtgcttagatttgaagctacctcaaatgatgaaatagaagtaattaaagaaaaatttaaaaaaattctatattctataaatcctaatttaggagaattctgac

SEQ ID NO: 291410 - DNA, 904 bp, Unknown
  Bacterial polypeptide expressing nucleotide sequence isolated from the Sargasso Sea
tatgcaaataagaaaatcaatatttagagaatatgatataagaggcatatatccagaagaaataaatgaaaaagtaatcgatcaaattgctaaagctatttctattaaatgtgagcaggagaatgtttcagaagtatgtctaggtagggatggaagactttctggtgaaagcttgctttcttctttgtcctcatcgttatcaaattatggcattgatgttgaagttataggcctttcgacaacaccgttgctttattttgcagcaaaaaaaaataaaaataaaagtggagtaatgataactggaagtcataatcctaaaaattataatggagtaaagcttatcatcaatgataagccagtttcaggaagtgaaatttatgagttgatatataagaaaaaagatttttcggatattcctggaaaagtaaattttattgatgtgaaagacaaatatatttcagaagtattaaggaatattaatatagagggcaagagaaagataaaagttgttattgattgcggtaacggcgcagccggttgtatagcaccaagattatataatgatttgggttgtgaagtggtagaactttatagtgaagtcgatggaagttttccaaatcatcatcccgatcctggaaaaatagaaaatcttaaagaattagtttccacggtaaaatccactaaagccgatcttggtcttgcttttgatggagatggtgatcgagttggacttgttactgacaaaggagaagttgtttttccagataagatattaatgatgatgagcaaagagatattaaaaaaagataaaggctcgattatttttgatgtaaagtgcacaaattctttacctgaaattattaaaaaatacggaggaatgccaattatgtcggctactggtcat

SEQ ID NO: 291411 - DNA, 1342 bp, Unknown
  Bacterial polypeptide expressing nucleotide sequence isolated from the Sargasso Sea
atgttaatcagaagtatttcagggataaggggtcttgtaaatgaagaccttggcgaaaaaactatcattaaatatgcgcatgcacttcatgattaccttcaggatggagtcatttatgttggcagagatagccgcccttctggggaagaaatagtggagataatgatcaatgagcttattaagctaggtagaacaattatgtattgcgggatagtgccaactccaaccattcaatacatggtccatactactgaggcaattggaggtgttattatcactgctagccataatcccattgagtggaatgggatcaaatttgtaaaagaagacagtacttttttcaatttgtacgattgtgagaatctttttgaatacgcagataatttttcaaatgaaaatatagaaatttcagaacaaggaatgctatgggaagaaaaaaatgctatccacaaacacaccatcaattgcgcatctttgaaatgcattgatttagataaaataagagacagaaaatttaaagttgttattgattctgttaatggagcaggatcagatgcgttaccagcaatgctagggttattgggctgcgaggttataaaaatcaactgtgattctagtggtgtttttactcgagggacagagccactcccagaaaatctatcggaattatccaagaatgtaatcagtcataatgcagatgtaggatttgccgtagaccctgacgctgatagactagcagtagtagatgaaaaagggatacctcttggagaggagtacactcttgtgcttgctgctgaaggctatataaaatctgtaaaaacggaagagacctttgttacaaacctatccacgtcattagcattagataaattagcgatcgcaaataaatgctctgttgaaagagccgctgttggagagataaatgtggtaaataagatgaatgagattgatgctaaattcggtggtgaaggcaatgggggagttattctcagagagtgccaccttggtagggattcactagttgcggttacaatggtattgaacagaatgtcgcaatcaaaaaatacagtaagctctatttacaattctttacctcagtataaaatagtgaaggatagaataaatattgaagggctggataaaaaaaaattactatcaaaagtaaatgagctctttaatggagtagaaaacaacactatcgatgggctaaagtttatctgggatgataaatggatacacctacgaagttcaaacacagaaccaatcatgaggatatatgctgaggctgcttctgagaatgtagctaaagagttagttataaaagtaaaaaaccttctatgat

SEQ ID NO: 291412 - DNA, 1129 bp, Unknown
  Bacterial polypeptide expressing nucleotide sequence isolated from the Sargasso Sea
ggtagtcccaacgccaaccgtacaatttatggttcacaatactgaagctgtaggtggttttattgttaccgctagtcataatcctgttgagtggaatggaataaaatttttaagaccagatagtaccttttttcatcctgaagaatgccaaaatctttttaatatggttgatcaaaatgtagaattgaaaaaatcaaaagaagctggtattgtgtggccagagcagaatgctattcagaaacatgtgattgcatgtgcaagtattagctgtattgatctaaatagaattcaaaggagaaaattcaaagttgttatagatgcagtcaatggtgctggtgctatagcacttccaaatatgctagaagcattgggatgtgaagtaattgaattaaattgtgaaccagatggaaactttactcgggggactgaaccacttcctgaaaatttgaacgatttatctgcaatggtaaaaaatcataatgctgatgcgggttttgctgtagaccctgatgcagatcggttagccgtagttaatgaacatggagaacctctgggagaggaatatactcttgtattggctgcagatggatatataaatgaaactggaaagaaggaaagattcgtggtcaatctctcaacatctctagcaatagaaaaactagctcataaaaatggaagcaccgtagaaaggtctgctgttggcgagataaatgttgttaataaaatgaatgaggtcaattcgaatctagggggagaagggaatggtggtgttattttaaaagaatgtcatttaggtagagattcaatggttggtgctactatggttttaaataggatgtctcaaacagaaaatacgttaagtgaaattcaccgaaccttaccaatatttaaaattgtaaaagataaaataagtgtagatacaatagattcagatgagctaatagataaagtaagtaatttattcaatgatgcagataaaaacgatctagatggaataaaatttacatgggatgataaatgggtacatctaagaagatcaaatacagaacctattatgaggatatatgcggaagcaccaagtgaagatcaggcgctagaattagtatcaaaaataagatcaattatttga

SEQ ID NO: 291413 - DNA, 781 bp, Unknown
  Bacterial polypeptide expressing nucleotide sequence isolated from the Sargasso Sea
aatgaatgaaaatatttttagagcctatgacgttagaggaaattcatcgcatgatttaacagacgatgttgtaaaaattataggctctgtattaggtgaatatgtaaaagagtttggggataattcaatttacttaggtcatgatagcaggctatcaaaagatagaattaaaaagagtttaatttcggggatccactctgttggagtagatgtcaattatcttgggctggttccaacacctatggtgtactacgcaacaaaaaaaggaatttcgaatcatggagtaatgattaccggaagccataatcccaaagaggataatggtttaaaaattgtcatagatggaaattctatttctggtctagaaattaaaaaaagagttaaaaattataaatatgataaggatttgactgctcaaacttttagccaagacttaactaatgattatttaaatgagattaaaagaaatgcccctataggaaaaccaatgaaagtcatacttgatgcaggcaacggagctgcagggccgctagcaaaaagggtttttgagaacattggaatagatataatttctataaatgaagaaccagatggtaattttccaaatcatcatccagatcctggaaaagaaaagaatttagtccaattaaaggaggaaattataaggaatgatgcagacattggttttgcttttgatggtgatggtgacagagtaggtttagtggcaaagagtggaaatcaagttctttcggaccacattatcatgcttctaagtaaatac

SEQ ID NO: 291414 - DNA, 1056 bp, Unknown
  Bacterial polypeptide expressing nucleotide sequence isolated from the Sargasso Sea
tttgaacatgaatacaacatatttagagcctatgacataagaggccatgctgaaaaagatcttaatagctcaactatagaaaaaataggttatgcgcttggtttaaagattaaagaaaataattctaattctgtttatataggttatgacagcagattgtcttgtgaagaaataaaaagcaatcttattagaggaatcaatgctgcaggagtaaaagtgcttaatttgggtctagttcctacacctatagtctattatgcgaccaaagttggagatacttcaaatggaataatgattactggcagccataaccctaaagatgataacggtctaaaaatggtaataaacgataatgctatttctggaattgaaatcaaagaatcggtcgaaaatttagatgaaataccaacaaatgatatagagatggtagaaaattcagatcttgaaaaaaaatatatagaagaagtagcaaataaagtaaaaataaataaaaaactaaaggttgtattggatgcaggtaatggagcagcagggatcttagcggaaaaaatgtttactgctcttggccatgaagtgatatcgataaataaagaacctgatggaaatttccctaatcatcacccagatccaagcaaagaaaagaatcttatagaaataaaaagagagatagatttaacaaatgctgacataggttttgcatttgatggtgatggagatcgaataggcttaataaccaataagggagaatcagttattgcagaccagataattatgctaatggcagagttttatttgggtcaagtaaagggtccaatagtatttgatgttaagtgttctaatcaattacccctactaatagagaattttggaggagaaccagtaatggaaaaaactggacactttaatattaaaaaaagaattagacaaacaaatgctgttatgggtggagaaatgtcaggacatatattcattaatcatgattggtatggttttgatgatgctattttttcagctgtaatacttactaaaattattactgatttagatattagtatt

SEQ ID NO: 291415 - DNA, 706 bp, Unknown
  Bacterial polypeptide expressing nucleotide sequence isolated from the Sargasso Sea
ttctgagaaaataattattggccatgatggaagaatatctaataaagaaatgcttaatgctgttgcatctggtgtaatgaaaaaaaataaatctatattgtatattggaactgtccctacagacgtagtttattcattatcaggaatggaaaatcttcccgggatagtaattactgcctctcataatccaaaggaatggacaggattaaaattctgtaataaaggggcaacacctataggaatcgagacagggttattggatatcaaagagaaagtagaaaatttagatattgatatcgaaatacaaactgagtttcaggaagaagatatagttgatgcttacattgaacaccttaattccttagtcaatccagaagatgtaaaaaacacaatcagcttcataattgatgcaggtaatggagcattaggttctgttatagaaaaacttcataattcatacaatatgaattttgatgaattatatatggaagttgatggaaactttccaaaccatcctgctgacccttctgatccagcaaatcttagagagttgaaagaattagtaatatctaaaaataaagaatttggagtagcttttgatggagatgctgatagagcagttttcttggatgacaaaggaaatttaatttctggcagtttaatgacagctctagtttcagattggttaaatgaaaaaaaaagataa

SEQ ID NO: 291416 - DNA, 897 bp, Unknown
  Bacterial polypeptide expressing nucleotide sequence isolated from the Sargasso Sea
aaggtgtttaaaattggattatgtcccacaccacaattgtacttcggagtgcatcacctaagggctgatggcggcatcatgattacgggttctcacaacccacccgattataatggctttaaaatgatgctgggtcatggtccattttttgggcaagatataaaagacatggccaaaaccccttataatcggactaaaattatcgagggtggtcaacaaattcaattagacattcaggacgcctatctacatcgagtattagaaggtcttagattagatactaagttatcaattgtttgggattgtggaaatggtgtcgctggtcctgttatcgacaaacttaccaaatctttatccggagaacacgaggtactgttcgcagatgttgatggaaactttcccaaccatcaccccgatccaaccatagagaaaaacctagaaacactaattacaagggttaaaaaaagaaatgctgatctcggcattgcctttgatggcgatggcgacagaatcggagttatcgacgatttaggaaaaatattgtggggcgatcaactcctagcaatattagcagaagatgtattgttggaacaacctggttcgacaatcattggcgatgtaaaagcaagccaaggcttgtttgataggatcacagcactcggtggcaagccccttatgtggaagacagggcactctctaatcaagaacaagatgaaagaagtcaacgccccgttggcaggtgaaatgagcggacacattttttttagtgatcggtactttggttttgatgatgcaatctatgctgcaattcggctcatcgatgttgttaatcgacaggggaaaaaattatcaaccattcgatctgccttgccaagtgtaatcaacacacccgagtta

SEQ ID NO: 291417 - DNA, 900 bp, Unknown
  Bacterial polypeptide expressing nucleotide sequence isolated from the Sargasso Sea
aataggtcttatagctaaagctattgctataaaatgtgatcaagagaatattaaagagatatgcattgggagagatggaagactgtcgggagaatctctcctcaaatcattggaaaaatctctttcttattatggaatcaatatacaaaatattggtctagttacaacaccactactttactatgcagcaaaaaaaaataaatgtaagagtggtgtgatgattacaggcagtcataaccctaaaaattataatggtataaaacttattattaatgataagccggtttctggtaaagaaatatacaatttactttatagaaataaagataagtcaaaagttccaggcaaaattgaattcttagatatcaaaagtaactatgttgaagaagtaaaaaataatattcagattgatgacaatgttagattaaaagtggttattgattgtgggaatggtgctgcaggatgtatagccccaaaactatttaacgcactaggatgtgaagttattgaacttttcactgaagtagatggaaattttcctaatcatcatcctgatccaggaaaattagaaaatcttcaagatctaatcaaaaaagttaaatcaacaaaagctgatttgggtttagcatttgatggtgatggggatcgagtaggtttagttactgataaaggcgatgttatatatcctgacaaaatattgatgatattcagcaaagaaatactcaataaaaataaagggtctataatctttgacgttaaatgtacgaatgcccttccagatctgatacaaaatttaggcggaacaccgataatgtcacctactggacactttcatatcaaaaatggtattaaagaacataacccaattctggcaggtgagatgagtggtcatattttctt

SEQ ID NO: 291418 - DNA, 760 bp, Unknown
  Bacterial polypeptide expressing nucleotide sequence isolated from the Sargasso Sea
tctcaaatcattagaaaaatctctttcttgttatggaatcaatatacaaaatattggtttagttacaactccactactttactatgcagcaaaaaaaaataagtgtaagagtggtgtgatgattacaggcagtcataaccctaaaaattataatggcataaaactcattatcaacgacaagccggtttctggaaacgagatatataaattacttgatagaaataaagataagtcagaagttccaggcaaaattgaattctttgatatcaaaagtaattatattgaagaagtaaaaaataatattcagattgatgagaattttaaattaaaagtggttattgattgtgggaatggtgctgcaggatgtatagccccaaaactatttagcgaactaggctgtgaagttattgaacttttcactgaagtagatggaaattttcctaatcaccatcctgatccaggcaaattagaaaatcttcaggatttaattgcaaaagttaaattgacaaaagctgatttgggtttagcatttgatggtgatggagatcgagttggtttaattactgatagaggcgatgttatttatcctgacaaaatcttgatgatgttctgcaaagaaatccttaatataaacaaagggtctataatctttgatgttaaatgtacgaatgcccttccagatttgataaaaaatttaggcggaacaccaataatgtcgcctactggacactttcatatcaaaaatggtatcaaagaacat

SEQ ID NO: 291419 - DNA, 823 bp, Unknown
  Bacterial polypeptide expressing nucleotide sequence isolated from the Sargasso Sea
ttttcaaagctaaattcaaacaatattgcaattggctatgatggtagattaacctctccaaaattatataatgctttaagtagcggattaaaagactcgggctctaacgttattaatatcggcatgtgtccaacaccaatgttatattttgcagattatcatctaaaaatggatgctgctattatgattactggctcacataatccatctgaatataatgggtttaaaatggttttaaacaagcacagtttttttagtaaaaatattcaaaattttcagcagatagtgtcagaaaataaattagaaaaaaaagatggaaaaattcaaaatattgaaattatagaacattatatcgatcgacttttaaaaaatattgtaattaaaaaaaaattaaaaatttcctgggatattggaaatggcgcaatgggagtcattatagacaagttaatttctaaacttcaaaatactgaaaatatattaattaataaggaagtagatggcacttttccaaaccatcatccagatccaacaattcctaaaaacatggagcaacttataaaatcagtaaaagaaaataattgtgatgtcggcttagcttttgatggagatggagatagactgggagtggtagataatttaggaaatattgtttgggctgatcaatttatgttaattttatgctcggaaatatcaaacttatataaaaatccaaaaatcataatggacgtaaaatgtagtaaggttttttttgatgagtcaaaaaaaatgggatgtgacccaataatggagaggactggacactcaccaatcaaagaaaaaatga

SEQ ID NO: 291420 - DNA, 739 bp, Unknown
  Bacterial polypeptide expressing nucleotide sequence isolated from the Sargasso Sea
atggaaatagctagatcaatctttagggaatatgacataagaggcatttatcccgaagaaataaatgaggatgtaatcaaacaaatagctaaagcaatatcaataaaatgtttaaaaaataatgtatcagaaatatgtattggaagagatgggaggctttctggcgaaaatttacttaattctttatctgactcattatcaaaatgtggaataaatgtagtaaatattggtctagtaagtactcctctactttattttgcagctaagaaaaacaaatacaaaagcggggttatgattacaggtagccataacccaaaaaattataatggtgtaaaactaataataaatgacagtcccgtttctggtaacgaaatttttaaactaattgatgaagataagccctgtgttaaacaaactggaaagataatttataaagatattaaaaaagaatacatacaagaggttaaagaaaacattaatataaataataaaattaagatcgttattgattgtggaaatggagcagctggttgcattgctcctgatttatttaaaactattggatgtgaggttattgaactttttagtgaaatagatggaaactttcctaatcatcatccagatcctggcaaaatagaaaatctcaatgacttgatatctaaagttaaagaatcaaatgcagatcttggaatagcttttgatggagatggtgacagggttgggctggtaacagataaag

SEQ ID NO: 291421 - DNA, 886 bp, Unknown
  Bacterial polypeptide expressing nucleotide sequence isolated from the Sargasso Sea
atgaatctaccaaaaaatatttttaaggcatatgatatcagaggaatttacgatcacgagcttaataataagacagtcaagttaattgcaaaggcattatctgtaatttataaaaataaaaatgataaaattgtaattggtagagatggaagattatctagtgaaacattgtcaaacgctctaatagaaggttttttagaaagcggaaaagacataattgatattggtcaagttccaacacctttattatattatgctgttaactattttaaactaaattcggggattataataaccggtagtcataatccaaaagattataatggcttaaaaataattatggatggtcatgcccttgcaggcaatgaaatacaaaaaatttatgaaaacataaaattaaaaaactatattcagtccaaaaaaaatcacaatgcgaagttagaaaatattaaaattgataatatttatatagacgaattattaaaagatataaatataaacaaaaaattaaaggttgcaattgatgctggtaatggggcagctggtcctattgctttagaagcatataggaaattaggacatgaggttatagatttatactgtgacgtcgatggcaatttcccaaatcatcatccaaatccaagtgatccaaagaatttaaaagatttgatttcttgtgttaaagaagatgattgtgatattggtatcgcatttgatggagatggtgatagatgtttaattattgataacttgggtcaagtgttatggccagataaacaaatgatggtttattcaaaagatattttatcaacgaataaaaatgaaaaaattgtatatgatgttaaatcttcaaaagatcttgcaaatattgtaaaagaatatgaag

SEQ ID NO: 291422 - DNA, 911 bp, Unknown
  Bacterial polypeptide expressing nucleotide sequence isolated from the Sargasso Sea
tcaaatcaaaagtaaatggtcggaacttataaaatcaatatttagggaatatgacataagaggaattttccctgatgagcttaatgaggattccattacgaaaattgctaaatctatagcccacaaatgtcataaagaatcagttgctgaagttgtaattgctcgagacgggagactttctggtccatctcttttggagtctcttcaggaatctttaaataattacggaattgatactataaatataggacttgctacaagccctcttctctactatgcagcaaaaaaacaagcttctagatccggaataatgattacagggagtcacaatcctaaaaactataatggaattaagcttgttatagatgataaaccggtttctgggactgaaatatttgagctatctaaaacagatatatctttggaaaacttaaatggtgaaaatagatttttagatataaagggtgactatataactgaagttaaaaatagctttaactttaaaaaactcaaagtagtggttgattgtggaaatggtgcagctgggattattgctccagacttattgagagcagttggctgcgaggtaatcgaaatattctgtgatgttgacggaaattttccaaatcatcatccagatcctggaaaggaaaaaaatttagttgatcttattggaaaggtaaaagaggtctctgcagatattggtgttgcttttgatggtgatggagacaggcttggagcagtgacttcatctggtagattgatctatcctgatcaaatgatgatgttattttcaaaaagaatactttcaaatgaggaaggcaaaactattgtttttgatgttaagtgctcagactttcttcctcaaataattaaggaaaatgatgggataccatttatgagtcctactg

SEQ ID NO: 291423 - DNA, 799 bp, Unknown
  Bacterial polypeptide expressing nucleotide sequence isolated from the Sargasso Sea
tatgatcgatgaatccatttttcgagaatatgatattcgtgggattgttccagttcagcttaatgagctttcagtaaaagctattgcaaaagctatagcaattaaatgtaacaatgaattagttgacgaggttgctcttggaagagatgggcgtttatcaggaggcaatcttatgagatccctttctagtgaattacagtgtcttggaatcaatgttttaaatataggaattgttacaagcccccttctatattttgcagcgaaaaaaataaaatctaaatcaggaataatgattacgggaagtcataatccaaaaaattataatggttttaaaattgtaattaatgatactccagtttctggaacagagattcttgatttaatttcaaatgaattttctgaagtaagaaattcaggaagtgaagtcaccagagaaggcatcatggatgaatacataaacgaagttatatctcaggcaagctctatttccaatccaatgaaaattgttatagattgcgggaatggttcagctggtgaaattgctcctaaattaattcgtagcctagggcatcaagtaattgagctattttgtaaaattgatgggaattttccaaaccatcatccagatcctggaaaaatagaaaatcttcaagatttaattaaagttgtaaaaagtgagtcggctgatattggaatagcatttgatggcgatggagatagacttggtgttgtttctagaaatggagaaattatatatccagatcagcttatgatgatatttagtaaaggaggtttaaaa

SEQ ID NO: 291424 - DNA, 777 bp, Unknown
  Bacterial polypeptide expressing nucleotide sequence isolated from the Sargasso Sea
atcagttaacaaaatagttttgtacgttggtatggttccaacagatgttgtttatacactttctggaattaagaatttacctggtttaatcattacagcatctcacaatccaaaagagtacacaggtttgaagttttgcaacagtggagcagtagcgatcggtcaagaaacaggattaaaagaaataaagaatttagcagaaaaattcaatgatgattttaatatgtcagaattgcctaaggtgcaaactatgaatcaactttatttagaacattttaaaaatatagttgatccatctgaaataagtgacaaagtgaaatttgcaattgatggtgggaatggtgttcttggtgcaattattgaagatctatcaaaatcatttagtttaaatttttatggcctttatatagaagtagatggtaacttcccaaatcatccagcagatccatctaatgaagaaaacctgaaagatttaaaaaataaagttgtatcacaaaatcttgattttggagttgctttcgatggagatgctgacaggtctgtatttgttgatgataaaggaaacataattagtggaagtatgatgacttgtttaatttctgattggttatttgaaaagaaatctgaaataaagatagttcataatgtaaatgttcaaccatctgttattgaatatttaaaaaataaaggaatagagacaataagatctaaagtaggtcattcatacataaaaaaaattatgagagataatgatgcagattttggtggggaacatag

SEQ ID NO: 291425 - DNA, 919 bp, Unknown
  Bacterial polypeptide expressing nucleotide sequence isolated from the Sargasso Sea
gttacaacacctcttctgtattatgctgctaaaaaaagtaaatctaaaagcggtgcaatgataacgggtagtcataacccaaaaaactataatggaattaagcttgtaataaatgataaaccagtatcaggtaaagagatttttaacttaatacagcataaaaaagatatttcaagctcgcctggtaaaattatttctaaagatattaaagaagactatatattagaagttactaaaaatattaaaattaataaagataaaaaaataaagttagttattgattgtggaaatggtgctgcaggatgtatagccccagagctttataaaaatattgggtgtgatgttattgaactctacagtgaagtagatggaaattttcccaatcaccaccctgacccaggaaaaactgaaaatctaatggatctaattcaagaggttgagaaaagtaatgcagatcttggtttagcttttgatggagatggagatagagttggtttagtgacaaatacaggagaaataatttttccagacaagattcttatgatgtttagtcaagacattttatcatctgaaaaaggctcgataatttttgatgtaaagtgctctaatgccttacctaagattataaaagatcttggtggcaatccaataatgtctccaactggacattttcatataaaaaatggcataaaaaaacataatccactattggctggtgaaatgagtgggcatatcttttttaatgataaatggtatggttttgatgatggtcattattcaggggctagaattattgagcttatatggaagagaaatgaatcaattagtgaaataaatgaaaaattgccaaaatcattttcaactcctgaattaaacattgatgtaactgacgaaataaagtttaaaataatgaagattt

SEQ ID NO: 291426 - DNA, 793 bp, Unknown
  Bacterial polypeptide expressing nucleotide sequence isolated from the Sargasso Sea
aatgtcagaacttataaaatcaatatttagggaatatgacataagaggtattttcccagatgagcttaatgaagattcgattgcaaaaatagctaaatccattgctcagaaatgttatcaagaatcagtggctgaagttgtaattgcgcgagatggaagactgtcaggtccatcccttttggagtctctccaagaatctttaaataggcatggaattaatactataaatataggacttgctacaagtcctcttctttactacgcagcaaaaaaacaagcttctaagtctggaatcatgattacagggagtcataaccctaaaaactataatggaattaagcttgttatagatgataaaccagtatctggtactgaaatatttgagctatctaaaacagatatatctttgaaagatacaaatggtgagaatacacttttagatataaaaagtaactatataactgaggttaaaaatagctttaattttaaaaaccttaaagtagttgttgattgtggaaatggtgcagccggaattattgctccagacttattaagagcagttggctgcgaggtcatcgaaattttctgtgatgttgatggaaatttcccaaaccatcatccggatccgggaaaagaaaagaatttagtgaaccttattgataaggtaaaagaggtctctgcagatgttggtgttgcctttgatggtgatggagataggcttggagcagtaacttcatcaggaagattaatttatcccgatcaaatgatgatgttattctcaaaaaaaatactt

SEQ ID NO: 291427 - DNA, 965 bp, Unknown
  Bacterial polypeptide expressing nucleotide sequence isolated from the Sargasso Sea
ttttcacttggttacgatggaagattaacttctcctaaactatacaacgctttaagtactggattaaaagattcaggagctaaagttaaaagtgtaggtatgtgtccaacaccaatgttatattttgctgattattatcttaatacagatgcagctataatgataactggttcacataatccttcagaatataatggttttaaaatggtaatgaacaaacatagtttttatagtgaaaacattcaaaaatttaaatctataattaaaagtaataaattagaaaaaaaagaaggatctattgagcatgttgatatagtagatgcatacgtcgagagagtactaaaaaatatttctataaaaaataaactaaaaataagttgggatataggtaatggcgcaatgggcgttataattaataaattaatttcaaaactagtaaatacagataatattttattaaacaaagatgttgatggtaattttccaaaccatcatccagaccccacagttccaaaaaatatggaacaattaatacagtctgtaaaagaaaacaaatgcgatattggcttagcctttgatggagatggtgatagacttggagttgttgataacactggaaatattatatgggcggatcaatacatgttaatattatgttctgaaatatccagtttatatcaaaaacctaaagttattatggacgttaaatgtagtaaagtattttttgatgaagcaaaaaagcttggatgtgatcccataatggaaagaactggacattctccaataaaagaaaaaatgaaagagataaaatcacccctttctggagaaatgagtggtcatgtttgttatggcgatgatttttatggatacgatgatgctatgtatgtaggtttaagattattaagaatacttagtaataaaaatcaaaatttacatgatttaattaatttatatcctaaaacttt

SEQ ID NO: 291428 - DNA, 833 bp, Unknown
  Bacterial polypeptide expressing nucleotide sequence isolated from the Sargasso Sea
tattgcaaaagccatctctattaaatgtgaatataataatgtttcagaaatatgtgttggaagagatggaagactttcaggtgaaagtctactaaatgccttgtcaaactctctttcagattttggtattaacgtccaaaatataggtcttgttacaacaccacttctttattttgctgcaaaaaaaaataaatataaaagtggtgtaatgattacagggagccataatcctaaagattacaatggaataaaacttgttatcaatgatgctcctgtttcaggaacagagatctttcaactcattagtcaaaataaaaatttatcaaagaaaccaggaaaaataaattttattgatattaaagaagaatatatttcagaagtgaaaaaaaatattgctataactggaagtaaaaaaattaaggtagtaattgattgcggaaatggagcagctggttgtattgctccagctttatataaagcattaggatgcgatgttgttgaacttttcagtgaaattgatggaaattttcctaatcatcatcctgatccaggaaagcctaaaaatcttgaagatctggtatcaaaagtaacaagtagtaaagctgatcttggtctagcatttgacggtgatggtgatagagttggccttattacaaataaaggagagattatttatgcagataaaattttaatgttattgagcaaagaaattttaaagaaagaaaaaggatcaattatttttgatgtgaagtgctctaatgctttatctgaaattattaaagaatatggtggtgatcctattatgtctcgaaccaggtcattttcatattaag

SEQ ID NO: 291429 - DNA, 891 bp, Unknown
  Bacterial polypeptide expressing nucleotide sequence isolated from the Sargasso Sea
ctccaaattatataatgctttaagtagcggattaaaagactcgggctctaacgttattaatatcggcatgtgtccaacaccaatgttatattttgcagattatcatctaaaaatggatgcagccattatgattactggctcacataatccatctgaatataatgggtttaaaatggttttaaacaagcacagtttttttagtaaaaatattcaaaattttcagcggatagtatccgagaataaattagaaaaaaaagatggcaaaattcaaaatacccaaattatagaacattatgtcgatcgactattaaaaaatattgtaattaaaaaaaaattaaaaatttgctgggatattggcaatggtgcaatgggagttattattgataatttaatttctaaacttcaaaatactgaaaatatattaattaataaagaagtagatggcaattttccaaaccatcatccagatccaacaattcctaaaaacatggagcaacttataaaaacagtaaaagaaaataattgtgatgtcggcttagcttttgatggagatggagatagactgggagtggtagataatttaggaaatattgtttgggctgatcaatatatgttaattttatgctcggaaatatcaaacttatataaaaatccaaaaatcataatggacgtaaaatgtagtaaggttttttttgatgagtcaaaaaaaatgggatgtgacccaataatggagaggactggacactcaccaatcaaagaaaaaatgaaagaattaaaatccccattatcaggagaaatgagtggccatatatgttatggagatgatttttatggatatgatgatgcaatgtatgttgctttaagacttataagaattttaagtaatcaaag

SEQ ID NO: 291430 - DNA, 870 bp, Unknown
  Bacterial polypeptide expressing nucleotide sequence isolated from the Sargasso Sea
tatccggtcatctcttttggaatctctccaagaatctttaaatatgcatggaattaatactataaatataggacttgctacaagccctcttctctacttcgcagcaaaaaaacaaggttctaagtctggaattatgattacagggagtcacaatcctaaaaactacaatggaattaagcttgtcataaatgataaaccagtatctggaactgaaatatttgagctctctaaaacagatatatctttagaagactcagctggtgaaaatagattcttggatataaaaggtgactatataaaggaggttaaaaatagctttaattttaaaaacctcaaagtagtggttgattgtggaaatggtgcagccggaattattgccccagagttattaagagcagttggctgcgaagtcatcgaaatattctgtgatgttgatgggaatttcccaaatcatcacccggatccaggaaaagaaaagaatttagtggatcttattgaaaaagtaaaagaggtttctgcagatattggcgttgcctttgatggagatggagataggcttggagcagtaacttcatcaggaagattaatttatcccgatcaaatgatgatgttgttctcaaaaaaaatactttcaaataatgaaggcaaaacaattatttttgatgttaagtgctcagactttcttcctcaaataattaaggaaaatgatgggatacctttcatgagtcctactgggcattttcatattaaaaataatataaaaaaatataatgctgtactaggaggtgaaatgagtggtcatattttctttaatgatatttggcatggttttgatgacggtcattattcagcaataagacttttagacat

SEQ ID NO: 291431 - DNA, 775 bp, Unknown
  Bacterial polypeptide expressing nucleotide sequence isolated from the Sargasso Sea
ttgcaaaattgctaaatccatagctcagaaatgtaatcaagaatcagtggctgaagttgtaattgcccgagacggaagactgtcaggtccatctcttttggactctctccaagaatctttaaataggtatggaattaatactataaatttagggcttgctacaagcccccttctatattatgcagcaaaaaaacaagcttctaagtctggaattatgattacagggagtcacaatcctaaaaactacaatggaattaagcttgttataaatgataaaccggtatctggtactgaaatatttgagctttctaagaaagatttatacttggaaaactcaaatggtgaaaatagatttttagatataaaagatgaatatataactgaggttaaaagtagctttaattttaaaaaacttaaagtagtggtggattgtggaaatggttcagccggaattattgctccagacttattaagagcagttggctgcgaggtgatcgaaatattctgtgatgtcgatggaaatttcccaaatcatcatccggatccaggaaaagaaaagaatttagttgatcttattgaaaaggtaaaggaggtctctgcagatgttggtgttgcctttgatggtgatggagacaggcttggagcagtaacttcatcaggaagattaatctatcccgatcaaatgatgatgttattctcaaaaaaaatactttcagatgagggaggcaaaactattatttttgatgttaagtgctcagactttcttcctcaataa

SEQ ID NO: 291432 - DNA, 1336 bp, Unknown
  Bacterial polypeptide expressing nucleotide sequence isolated from the Sargasso Sea
atgacaaaaaataaactagatttaatttttaaatcttatgatatcagaggcgtttatggtgacagcatagaccaagatatagcatataaaattggcaaagcttttgcagaatttgtttcagatgacactattattgttggtcatgacgggagaatttcaaatattgaaatgcttgatgcctttacttctggaattaaatccattaacaaggaaattatttatgttggattagtcccaacagatactgtctattcactatccggcttacttaaaaaaccaggggcaataattactgcttcgcataatccaaaaaattataatggcttaaaactctgtaatgcaggcgcaataccaataggtgaaaactctggcctaatggatatcaaaaaattagccgatagaaatgtagaaatacgtattgagaaatttaaaattaacgacaaatacttaggtaatgaatattatgaacatctcaaaaacttagtatctccagaaagtatttcacaaaaattaaattttggtattgatggaggaaacggtgtatttggtgcggtatttgatactttaaataatatatacaaattcaatgtgaagtctatatatttagaagttgatggaaattttcctaatcatcctgctgacccatcagacgaaacaaacttaaccgatttaaaaaatctagtaatagataacgacctagattttggaatagcatttgatggagatgccgataggggtgtatttatagataatcttgggagagttatttcagggagtatgatgacagtgttaatatcagaatttttatctacacaaaaaaatcaatttagagtagtccacaatgtaaacgtctctccgcatgcattaaatatgatgaaaaacaacaatattgaattatacaaatgtaaagttggtcattccaatataaaaaaaatgatgcgtgatgtagatgctgattttgggggggaacatagcgcacatttttattacagagataacttttatgctgattctgcaattctcacacttttgatatttatgaaattgctctccaataataaagatcaactcagcttaataattgataactataactttccaccaagttctggtgaaataaattttgctgttgaagatatcaatgagtcaattagtaaaattgaaagaatttttgaaggggagtttgatcatactgatggacttagttgtctgaataaaaacttttggtttaatgttaggggttcaaatactgaaaataagttaagaattaatattgaagctgatactcaagaaattcttgaccaagttttagaaaaaatttcgagtagtatttagt

SEQ ID NO: 291433 - DNA, 1014 bp, Unknown
  Bacterial polypeptide expressing nucleotide sequence isolated from the Sargasso Sea
aatgtcagaacttataaaatcaatatttagggaatatgacataagaggtattttcccagatgagcttaatgaggattcgattgcaaaaattgctaaatacatagctcagaaatgtcatcaagaatcagtggctgaagttgtaattgcccgagacggaagactgtctggtccatctcttttggaatctctccaagaatctttaaataggtatggaattaatactataaatataggacttgctacaagtcctcttctttactacgcagcaaaaaagcaagcttctaagtctggaattatgattacagggagtcataatcctaaaaactacaatggaattaagcttgttatagatgataaaccagtatctggtactgaaatatttgagctctctcaaacagatatatctttggaaaacgcaaatggcgagaatagttttttagatataaaagataactatataactgaggttaaaaatagctttaattttaaaaacctcaaagtagtggttgattgtggaaatggtgcagccggaattattgctccagacttattaagagcagttggctgcgaggtcatcgaaattttctgtgatgttgatggaaatttcccaaatcatcatccggatccgggaaaagaaaagaatttagtggatcttattgaaaaggtaaaagaggtctctgcagatattggtgttgcctttgatggtgatggagacaggcttggagcagtaacttcatcaggaagattaatttatcccgatcaaatgatgatgttattctcaaaaaaaattctttcaaataagagaggcgaaactattgtttttgatgttaagtgctcagactttcttcctaaaataattaaggaaaatgatgggataccttttatgagtcctactgggcattttcatattaaaaataatataaaaaaatataatgccgtactaggaggtgaaatgagtggtcatattttctttaatgatatttggcatggttttgatgatggtcattattctgc

SEQ ID NO: 291434 - DNA, 901 bp, Unknown
  Bacterial polypeptide expressing nucleotide sequence isolated from the Sargasso Sea
tatgactgttttcaaagcatatgacataagaggaatcgcaggaagtgagcttgactcggaattctcggaacgcctaggcagggcgatagcgacccacttagacgcggattgtgtctcagtggtcagagatatcagggattcgagtccggactaccacgaggctttcgtcagagggcttctgaattctggagcagatgttattgacctcgggatttcaacaaccggggtgctgtatcgttcgacagtagatcttccagttgatgtcgccgttgcgattactgctagtcacaacccccctgagtataatggattcaagatttgcaaagggaagatgcctctgggaggggaagagttgcaagaagttaggaagacattcgaagaaggtaatttcagggaagggagtggcaattacagaatcatggactcatatgaggaaaggtatgtccagtcaatcgttgatagcgttggacgcctatctcgggacctcagggtagttttggactgtgggaatgcagtaccgggccctctggcagtcaaagttctggaaaggcttggagtggatgtaataccactctactgcgattgggacaactcgttcccgaatcaccccccagatccaactagacaagagaatatggaagatttggggagagctgttctagagcatggtgcagagtttggcatagggatggatggagatggagaccgcctgggtgtggttgatgagaatggcaagttcatacaccctgatcgactgatgggaattttcgtcgaagaagttctctcggaccttcctgaaaattcaacagaggagcaacgcactattttcttcgacgtgaagtgtagtatggctttggaggaggcaatagaggaactggggggagtacctaagatggtgagg

SEQ ID NO: 291435 - DNA, 1432 bp, Unknown
  Bacterial polypeptide expressing nucleotide sequence isolated from the Sargasso Sea
aatgcagcggacttttcaaccccatcacgaaaggcccccctgcgtgcaaccgacccccgccatcttcaaagcctatgacatccgcggcatcgtgccgtccaccctgaacgaagacgtggccctgggcctgggccgggcctttggcacggcagcccgtgcagaagggcagaccaccgtggcggtggggcgggatggccgcctgtccggccccgcgatgtcggcggcgctgatccaggggctggtggaggcgggcatcgaggtgatcgacgtgggcctggtcaccacaccgctgctctactttgcggccagcacgctgtgcaccagtggtatccaggtcaccggcagccacaaccccaaggactacaacggcttcaagatggtgctaaacggccgcgccatctatggcgacgagatccaggccctgcgccgcaccatggagcaggaaagctggcagctggtgcccggcggctcggtgcgccatgtggatgtgctgcccgcgtaccgcgaacgcattgtgggcgatgtgaagctggcccgccccctcaagatcgtggtggactgcggcaacggcattgcaggcgcctcggcgcccgccatcttccgagctctgggctgcgaggtgaccgagctgtactccgaggtggacggcaacttccccaaccaccatcccgaccccagcaagcccgaaaacctgcgcgacctgatcgaggccctcaagaccagcgacgccgaactgggcttggcctttgacggcgacggcgaccgcctgggcatcgtcaccaaagacggcaccaacatcttccccgaccgccagatgatgctgtttgcgcaagacgtgctctcgcgcgtgccgggtggcgaaatcatcttcgacgtgaagtgcacccagcgcctggcccccgccattgcggcggccggtggcgtgccggtgatgttcaagaccggccactcgctgatcaaggcgcgcatgaaggagacaaactctcccctgggcggcgagatgagcggccacatcttcttcaaggaacgctggtacggctttgacgacggcacctacgccggctgccgcctgcttgagatcctgagccgcagcagcgaccccagcggcgtgctgaacgcgctgcccaccagcttctccacccccgaactgaacgtggcctgcgccgaaggcgaaccgcaccgcctgacggccgaactgcaggccctggccgccgaaacctttgccgcccccgccgccatcagcaccatcgacggcctgcgcgtggactggcccgacggctttggcctgatccgcgccagcaacaccacgcccgtgctggtgctgcgctttgagggccacacccccgaagccctggcccgcatcgaggctgccatgctggctctgctgcaccgggtcaaacccgacgcccatgtgggcgcagccagccactga

SEQ ID NO: 291436 - DNA, 1112 bp, Unknown
  Bacterial polypeptide expressing nucleotide sequence isolated from the Sargasso Sea
tatgactgttttcaaagcatatgacataagaggaatcgcaggaagtgagcttgactcagaattctcggaacgcctaggcagggcgatagcgactcacttagacgcggattgtgtctcagtggtcagagatatcagggattcgagtccggaataccacgaggctttcgtcagggggcttctgacttctggagcagatgttattgacctggggatctcaacaaccggggtactgtatcgttcgacagtagatcttccagtagatgtcgccgttgcgattactgctagtcacaacccccctgagtataatggattcaagatttgcaaagggaagatgcctctgggaggagaagagttgcaagaagttaggaagacattcgaagaaggtaatttcagggaagggagtggcaattacagaatcatggactcatacgaggaaaggtatgtccagtcaatcgttgatagcgtcggacgcctatctcgggacatcagggtagttttggactgtgggaatgcagtaccgggccccctggcagtcaaagttctggaaaggcttggagtggatgtaataccactctactgcgattgggacaactcgttcccgaatcaccccccagacccgactagacacgagaacatggaagatttggggagagctgttctagagcatggtgcagagtttggcatagggatggatggagatggagaccgcctgggtgtggttgatgagaatggcaagttcatacaccctgatcgactgatgggaattttcgtcgaagaagttctctcggaccttcctgaaaatgcaacagaggagcaacgcactattttcttcgacgtgaagtgtagtatggctttggaggaggcaatagaggaactggggggagtacctaagatggtgaggactggtcataccttcatgaaaaaggagttgagggaattcccgggctctccgatggccggggagatgtcgggtcatttcttcatgaacgaccactgggacggatttgacgattcgatttactgtgctgcaaggcttctaagcataattggtatggacccgtctccagaacaaggaggtcccaaattctctgagaggttcaacttcatgccag

SEQ ID NO: 291437 - DNA, 853 bp, Unknown
  Bacterial polypeptide expressing nucleotide sequence isolated from the Sargasso Sea
tatggaaatagcaaaatcaatttttagagaatatgatattaggggtgtttatcctgatcaagtaaatgaaaatgtaataagtctgatagcaaaagcaattgccataaaatgtgatcaagagaatgttaaagagatatgtattggtagagacggaagactatcgggagaatctctactcaaatcattagaaaaatctctttcttattatggaatcaatatacaaaatattggtttagtcacaactccactactttactttgcagcaaaaaaaaataaatgtaagagtggtgtgatgattacaggcagtcataaccccaaaaattataatggtataaaactcattatcaacgacaagccagtttctggaaatgagatatacaaattactttatagaaataaagatcattcagaggttccaggcaaaattgaattcttagatataaaaaataattatgttgaagaagtaaaaaataatattcagattgatgacaattttagattaaaagtggttattgattgtgggaatggtgctgcaggatgtatagctccaaaactatttaacgaactaagctgtgaagttattgagcttttcactgaagtagatggaaattttcctaatcatcatcctgatccaggaaaattagaaaatcttcaagatttaattacaaaagttaaatcaacaaaagctgatttgggtttagcatttgatggtgatggagatcgagtaggtttagttactgataaaggcaatgttatatatcccgacaaaatattgatgatattcagtaaagaaatcctcaaaaaaaacaaagggtctataatctatgatgttaaatgtacgaatgcccttcca

SEQ ID NO: 291438 - DNA, 1369 bp, Unknown
  Bacterial polypeptide expressing nucleotide sequence isolated from the Sargasso Sea
atggaaatatcaaaatcaatttttcgtgattatgatattagaggtatttatcctgatcaaataaatgaaaaaattattaaaagaattgcgaaagctatatcagtgaaatgtttaaatgaaggtgtttcagaaatatgtgttgcaagagatggaaggctttctggcaaaaaacttttatccactttagaaaacgctttatcagagaatggtataaatgttataaataccgggttagctaccacacctctcctttattttgctgctaaaaaaagtaaatataaaagcggcgtgatgattacaggaagtcataatccaaaaaattataatggaataaagctaattattaatgataagccagtctcaggagtagaaatttataatctgatgaatcaaagtctagatatttcagaaaataataatggaaaaataatatccaaagatttcaaggaagagtatatatcagagattaaaaaaaatatttctataaatgaaaagcttaaagttgttattgactgtggtaacggcgctagtgggtgcatagcaccaaagctttataaagctctaggttgtgaagttgtaaacttatatacagatgtagatgggaattttccaaatcatcatccagatccaggtaagccagaaaatttaaccgatttgatcaaaaaagttaaagagacaaaagcagatttaggtcttgcatttgatggagatggagacagagttggagttgttaccaatgatggcgaaatagtttttccagacaagattttaatgattttaagcaaagatattcttgcaacaaaaaaaggaacaatcatatttgatgttaaatgtactgactcacttccaaaattgataaaagagaatggaggaaatcccataatgtacccaacaggacatttcaatattaaaaatggtattaaggagcataatccccttttagctggtgaaatgagcggacatattttctttaatgataaatggtatggttttgatgatggtatttactctggtgctagaatcatagaattaatattaaaaaacaaaaaatcaatatctagtcttaataaagaattaccagaattgttctctacacatgaattaaatattgaagtcacagatgaatcaaaatttgaaatagttaaaaaattcatcgctcaatgttctttggatggaaataagatcttaattgatggattaagaattaattttaagaatggttgggggttattaagagcatcgaatacaaccccaatgcttgttctaagatttgaaggtgatacagaaaagaatttaatacaaataaagaataaatttatcaaagaacttactcgcatttgtcctgatattgatataaatttaaattgaa

SEQ ID NO: 291439 - DNA, 1366 bp, Unknown
  Bacterial polypeptide expressing nucleotide sequence isolated from the Sargasso Sea
aatgaataaaaacatatttcgtgcatatgacattagaggtcatgctaaaaaagatcttaaaagttcgactatagaaaaaataggttatgtgcttggacaaaaaattaaagaaaataactctgattcagtttatataggctatgacagtagattatcctgcgaaaggataaaaaatgatcttattaaaggagttaatgctgctgaagtaaaagtgcttaacttaggtctagttcctactcctatggtctactatgcaactaaagttgggagcacttctagcggaataatgattactggtagccacaacccaaaagatgataatggcttaaaaatggtcataaatgataatcctatttctggatatgaaattaaggaatcagtcgaaaacttaagtgaagtgcctataaacgattcaaaaatggtcgaaagcgtagattttgaaaaaacatatatagaagaagtagtaaataaaataaaaattaataagaaactgaaggttgtcttagatggaggaaatggagcagctggaattttagcagacaaaatgtttaatgctattggtcttgatgtggtgtctataaataaggagcctgatggaaattttcctaatcatcatccagacccaagtaaagaaataaatcttctagaactaaaacatgaaataaatttattaaatgcagatataggttttgcattcgatggcgacggagaccgcataggcctaataacaaatgaggggcaatctatagttgctgatcagataattatgctaatggccgaattttatttagataaaaaaagggggccaattgtatttgatgtaaagtgttctaatcaattgccactattaatagaaaaattaggaggtgaaccagtaatggaaaaaactggccactttaatatcaaaaaaagaatcaaacaaacaaatgcagttatgggtggtgagatgtcaggacatatatttataaatcatgattggtatggctttgatgatgctattttttcagctgtaattctcactaagattatttctgaacttgatattagtgtgtctgaaaagatgaaagagatcccttcaacatattcaacacctgaactaaatctaaatgttaaagatgaggacaaatttacaatagtagaaaaatttaggtctaaaatggaatttcctaatgcggatatcaatacaattgatggaataaggataagtattggagattcttgggctttaatgagagcatcgaatacaagcccaaaactagtcttacgatttgaaggtgatacagaagataacttaaatcaaataaaaactttatttgagaaaaattttctaagaatatttcccgacattaaactcgactatcattaa

SEQ ID NO: 291440 - DNA, 1372 bp, Unknown
  Bacterial polypeptide expressing nucleotide sequence isolated from the Sargasso Sea
tatggaaataacagaatcaatttttagggaatacgatataagaggtacttatcccgaccaaataaacgaagaggttgttaaaaaaatagctgttgctatatcactaaagtgccaacaagagcaggtagctgaaatttgtattgggagggatggaagattatctggaaaaagtttattaaattcattatctgaaggattgtcggaacatggaattaatgtaactaatcttggcttagttacaacacctcttctgtattatgctgctaaaaaaagtaaatctaaaagcggtgtaatgataacgggtagtcataacccaaaaaactataatggaattaagcttgtaataaatgataaaccagtatcaggtaaagagatttttaacctagtaaaacataaaagagatatttcaagctcgcctggcaaaattatttcaaaagatattaaagaagactatatattagaagttactaaaaatattaaaattaataaagataaaaaaataaagttagttattgattgtggcaatggtgccgcaggatgtatagccccagaactttttaaaaatattgggtgtgatgttattgaactgttcagtgaagtagatggaaattttcccaatcaccatcctgacccaggaaaaactgaaaatctaaaggatctaattcaagagattaagaaaactaatgcagatcttgggttagcttttgatggggatggggatagagttggtttagtaacaaatacaggagaaataatttttccagataagattcttatgatgtttagtcaagacatcttatcatctcaaaaaggttcaataatttttgatgtaaagtgctctaatgctttacctgaaataataaaagatcttggcggtaacccaatcatgtctccaactggacattttcatataaaaaatggcataaaaaaacataatccactattggctggtgaaatgagcgggcatatcttttttaatgataaatggtatggttttgatgatggtcattattcaggggctagaattattgagcttatatggaagaaaaatgaatcgattagtgaaataaacgaaaaattaccaaaatcattttcaactcctgaattaaacattgatgtaactgacgaaacaaagtttaaaataatagaagatttttcttcgcaatgctctttagaaggtgaaaaaattacaatagatggcttaagaattaattttgataatggttggggtttgttaagagcatctaataccactccgaaattagttttacgatttgaaggtgactctatagatagcttaaataaaataaaagatgcttttttaaatgaactttctcgcatttgtcctgatattgatataaatttagtttaa

SEQ ID NO: 291441 - DNA, 1234 bp, Unknown
  Bacterial polypeptide expressing nucleotide sequence isolated from the Sargasso Sea
atgtcagaacttataaaatcaatatttagggaatatgacataagaggtattttcccagatgagcttaatgaagattcaattgcgaaaatggcaaaatccatagctcagaaatgtcatcaagaatcagttgctgaagttgtaattgctcgagacggaagactatctggtccatctcttttggaatctctccaagaatctttaaatatgcatggaattaatactataaatataggacttgctacaagccctcttctctactatgcagcaaaaaaacaagcttctaagtctggaattatgattacagggagtcacaatcctaaaaactacaatggaattaagcttgttgtagatgataaaccggtatctggaacggaaatatttgagctttctaaaacagatatatctttagaagactcaaatggtgaaaatagattcttggatataaaagatggctatattaacgaggttaaaaatagctttaactttaaaaacctcaaagtagtggttgattgtggaaatggtgcagccggaataattgctccagatttattaagagcggttggctgcgaggtcatcgaaattttctgtgatgttgatggaaatttccctaatcatcatccggatccgggaaaagaaaagaatttagtggaccttattgataaagtaaaagaggtctctgcagatgttggagttgcctttgatggtgatggagataggcttggagcagtaacttcatcaggaagattaatttatcccgatcaaatgatgatgttattctcaaaaaaaatactttcaaaaaagggaggcaaaactattgtttttgatgttaagtgctcagactttcttcctcaaataattaaggaaaatgatggcatacctttcatgagtcctactgggcattttcatattaaaaataacataaaaaaatataatgccgtattaggaggtgaaatgagtggtcatattttctttaatgatatttggcatggttttgatgatggtcattattctgcaataaggcttttagacatcatgaatgaaacaggatcatcgctagatgatttattagatagccttcccgtttcttattcaactccagaattaaatatagatgttcctgaggagaaaaagtttaaaataattgaggatttcattgagaatgcatcaattgatggaaaaaaagactttactgacggccttcgagcctcatttgagaatggttgggctctgttaa

SEQ ID NO: 291442 - DNA, 1396 bp, Unknown
  Bacterial polypeptide expressing nucleotide sequence isolated from the Sargasso Sea
catgatctccaaatccattttcaaggcgtatgacattcgcggcgtaatcggcaagacgctggacgctgatgcagcgcgttcgatcggccgcgccttcggcagcgaagtgcgggcgcaaggcggcgacgccgtggtggtcgcgcgtgatgggcggctctcgggccccgagctggttcaggcgctgtcggacggcctgcgtgcggccggtgtcgacgtggtcaacgtcggcatggtgccgacgccggtcggctacttcgcggccagcgtgccgttgcaactcgacggcggcgagcgtcgcgtcgattcgtgcatcgtcgtgacgggcagccacaatccgcccgactacaacggcttcaaaatggttctgcgcggcgcggccatttacggcgagcagatcctcgcgctgcatcagcgtatcgtcgacgagaacttttctgacggtagcggcacgtataccgagtacgacatcgccgacgcctatctggatcgcatcacgagcgacatcaagctcgcccgcccgatcaagatcgtggtcgacaccggcaacggcgtggccggcggcctcgcgccgaagctcttcaagaagctcggctgcgaactggtcgaactgttcactgagatcgacggcaacttcccgaaccatcacccggacccggctcaccccgagaacctgcaggacgtgatccgcgcgctgaaggaaacggacgctgaaatcggtttcgcgttcgacggcgacggcgaccgcctcggcgttgtcaccaaagacggccagatcatttacccggaccgccagctgatgctgttcgctgaagaagtgctgtcgcgcaacaagggtgcacagatcatttacgacgtgaagtgcacgcgcaatcttgcgaaatgggtcaaggataagggcggcgaaccgctgatgtggaagaccgggcactcgctggtcaaggccaagctgcgcgaaaccggcgcgccgctggccggcgaaatgagcggccacgtgttcttcaaggaccgctggtacggatttgacgacggcctgtacacgggcgcgcgtctgctggaaatcctcacgcgggtggccgacccgagcaagctgctgaactcgctgccgaactcgaattccacgccggaattgcagttgaagctcgaagaaggcgaaaacttcgagctaatcgcgcggttgcagcaaaacgccacgttcaccggcgcggacgacgtcgtgaagatcgacggcctgcgtgtcgagtatccggacggctttggccttgcgcgctcgtcgaacaccacgccggtggtggtgatgcgtttcgaagcggatagcgatgaagcgctcaggcgtatccaggaagacttccgtcgcgtgatcatggctgagaagccggacgcgaagctgccgttttaa

SEQ ID NO: 291443 - DNA, 873 bp, Unknown
  Bacterial polypeptide expressing nucleotide sequence isolated from the Sargasso Sea
tatgtctgttgatagagctatatttcgagaatacgacattagaggtatctatccatctgatttaaatgaaaaatcaattgaggttattgcagatgctatttcaaaaaaatgctttaaagaaaatataagatctgtagttgttggaagagatggaagaaattctggtcaaagccttttgaaagctttttcggatagattgataaaaaatggaataaatgtaaagaatattggtttagtgacgagtccgattctttattttgcagcaaaaaaagaagttaataaaagtggcattatgattactgggagtcataatccaaaaaattataacggcttaaaaatgatattaaatgacgagcctgtatctggaaaggaaatatttaatttaattaatgaagaaataaaattacctttactaaatgctaaaagtgaagagattgacataatagatgaatatatagatgaagtttgtaaaaatattttcataaagacaagaattagggttgtcctcgattctggtaatggagctgctggctgtgtagcgccaaagctatttaaaaaattaggttgtgatgttattgagttattcagtgaaatcgatggtaattttcctaatcatcatccagatcctggaaagattgaaaatctgcaagacttggtaaaaagcgtaagagaaaataatgcggatttaggtattgcttttgatggagacggtgatcgtcttggagtcgttaccgaaaaaggagatataatttttcctgataaaataatgatgttattttcaaaagaagtattaaaaagaaaaaaaggtaaggtaatttatgatgttaaatgttctagagatcttgaatatataattaaaaaatataatggcga

SEQ ID NO: 291444 - DNA, 1366 bp, Unknown
  Bacterial polypeptide expressing nucleotide sequence isolated from the Sargasso Sea
tatggaaattacaaaatcaatatttagagaatatgacataagaggtgaatatcccaatcaaattaatgaagaagtcgtaagaaagattggtaatgcaattgctggaaagtgtattaatttaaatattaaagaaatttgcgtcggcagagacggccgaaattctggtaagtctttgcttgaggcaatgattggtggtctttctgaaagtggtattgaagtcatcaatattgatttagctacatcaccgcttctctactatgcagcaaaaaaaaataaatataaaagtggaattatgattactggaagtcataacccaaaaaatcataatggaattaaacttgttattgatgataaaccagtctcaggaaatgaaattctagatttacttaataaagatcaaaagttttcagaatcagtcggttcaataaaatcactagatgtaaaaaatatctatatcgaagaagtttctgaaagcttaaaaattaataaaaaattaaaaatagttatagattgcggcaatggagctgctggatttattgcgccagatttatataaaaatttaggctgtgaagtaatagaactatattctgaggtggatggtaattttcctaatcatcatccagatccaggaaaagtagaaaatctaaaagatctaattcaagcagttaagactcatggtgcagatcttggactagcctttgatggagatggcgacagagttggcatggttactaacaatggtgaaatagtctttccagacaaaatattaatgatgctaagcaaagatgtgctccattcacaaaaaggatcaattatatttgatgtgaaatgctcaaatgcacttagtcaaattatcaaagaaaatggtggttctccaatcatgtctcctacaggtcactttcatattaaaaatggtattaaaaaacataatcctttgttagctggagaaatgagtggacatattttctttaatgataaatggtatggatttgatgatggtcattactcaggtgctaggattattgaaatgctttcaaaaaatgaaaaaagtatcgcagaaatttgcaatgaattacccatgcttttctcaaccccagaactcaacataaatgttacagatgataataaattcaaaataattaaagaattcgctgataactgcaaattagaaggtgaaaaaaatacaatcgatgggctccgattagactttgaggatggatggggtttgataagagcatcgaatactactccaaagcttgtattgagatttgaaggtagatctgaggaaattctgaatagaattcaaaatgactttttaaatgaactgactcgcatttgtcccgatattgatataaatttatcctaa

SEQ ID NO: 291445 - DNA, 1372 bp, Unknown
  Bacterial polypeptide expressing nucleotide sequence isolated from the Sargasso Sea
aatgattaatgaaaatatttttcgtgcttacgatataagaggtaaagcagatgaagatttaaatgatgacatcattagaaaaattggaattgtgcttagtgagaaaattcttaatactggtcaaaataaagtatacctaggtactgattgcagattgtctgcaaatagaataaaaaaatcacttatctctggcctttgttcaaatgatttggaggttctagaccttggcatggtacctacccctttagtttattttgcaacaaaaactggaaaaaccaattgtggaataatgataactggcagccacaatcccaaagaagataatggtttaaaaatggtaattaatggtggtgcagtttctggttttgaaattaaaaatgatgtgattaatttaaaaaataaaacgacaaatatagttaatatttcagatgcgagagatttaattgaacaatatgaaaataaaattttttctaattgtaaattagcgaaaaaaataaaagttgttttggattctggtaatggagctgctggcccgtatgcaaaaaaagtatttgaaaaaattggtgctgaagttatttcattgaatactgaaccagatggaaattttccaaaccatcaccccgacccaagcaaagaaaacaatttaaaagatttaattgaatctgtctcagtaaataaggctgatctaggtttcgcatttgatggtgatggagatagagttggcatggtggataacaactcaaacatagtttcccctgatcacatcataatgctcttatccgaatattttttgcaaaaaaagaagggtccagtgatctatgatgttaaatgctctaatcaggtatcaaaaataattgaagacaatggaggtgatcctgtaatagaaaagactggccacttcaacataaaaaacaaaattagaaagacaaatgcaattttaggtgcagaaatgtctggccatattttcataaattatgattggtatggttttgatgatggcatttattctgcagttattcttacaaaaataatttctgaacttgaaatagatttatcaacaaaaattttagattttccaaaagttttttctactccagaattaactttagatgtagaggattctcagaaatttgaaatggttgataaatttaaaaatgaagtagacttttcaggatatgagattcttgatattgatggtgttagattttctagttccaaagcatggggtctgctaagagcatcaaatacttcaccaaaacttgtcatgagatttgagggtgatacagatcaagaattactaaacataatggctttttttaaagataactttaaaaaaatatatccaaatttaaattttgaagatcatagctaa

SEQ ID NO: 291446 - DNA, 1324 bp, Unknown
  Bacterial polypeptide expressing nucleotide sequence isolated from the Sargasso Sea
tatgatcgatcaatctatttttcgagaatatgatattcgtggtattgttccgactcagatcaacgaactttcagtcaaagctattgcaagagctatagcaattaaatgcaataatgaacaagttgatgaagttgctcttggaagagatgggcgtttatcaggagacaatcttttgcgatccctttcaagtgaattacagtctctaggaatcaatgtcttaaatataggaattgttacaagccccctactttactttgcagctaaaaaaataaaatctaaatcaggaataatgattacaggaagtcataatccaaaaaattacaatggtttcaaaattgtaattaatgactcgccagtttctggaatagaaatgtacgatttaatttcaaatgaattgcccagtttaaaaaattcaggaagggaaaacatcaaaaaaaaccttatggatgaatatataaatgaggtaatctctcaggcaagctcagataccaatgcaatgaaaattgttatggattgcggaaatggttcagccagtgaaatagcgccaaaattaatccgcagcctagggcatcaagtaatagaattattttgtaaaattgatggaaattttccaaatcatcatccagatcctggaaaaattgaaaatcttaaagatttaatcaaagctgtaaaaagcgaatcagctgatgttggaatagcatttgatggtgatggtgatcgtcttggtgttgtctctaatagtggagaaataatatatccggatcaactaatgatgatatttagtagagaggtactaaaaaataatccaggcaaggaaatagtttttgatgtgaagtgtacaaatttactcaacaaaattattactgatgctggagggattccatttatgtcgcccacaggacattttcatataaaaaatatgttgaaaaaaactaaatctcctttggctggtgaaatgagtggtcatatcttcttcaatgataaatggtatggttttgacgatgctcattatgctgctttcagacttatagaaattcttaaaaattctaaaacttcacttgataatcttattaaagatttaccaaaagctttctctactcctgaaatgaatattaatgttgatgaaaataaaaaatttcaaattgttgaagacttcatttcaaaagctgattttggaactgctgacaaaattacaattgatggattaagagtgaactttgaggatggttggggattgctaagagcatcaaacacaactccgaaactcgtgctaaggtttgaagccaattctccaaaaagactaagtgaaatagaaaatatgttt

SEQ ID NO: 291447 - DNA, 1111 bp, Unknown
  Bacterial polypeptide expressing nucleotide sequence isolated from the Sargasso Sea
atggttccaacagatgttgtttatacgttgtcaggaattaagaatttacctggtctaattattacagcttctcacaacccaaaagagtatacaggtatgaaattttgtaacgtgggagcagtagcaattggtcaagaaacaggattaaaagaaattcaaaagttcgcagaaacttttgatgatgattttattatctctgctttgccagaaaggcaaacaatgaatcaactatatttggatcactttaaaaaaatagtaaatccatcagaaataagtgacaaagtaaaattttctatcgatgctggaaacggtgttctaggtgcaattattgaagacctctcaaaaacttttaatttaaattttgagggtctttatatggatgtagatggcaacttccccaatcatccagcagatccctcggatgaaaacaatcttttagatttaaaggataaagtcatatctcaaaatcttgattttggagttgcttttgatggagatgccgacagatctgtatttatagatgataaagggaatcttataagcggaagtttaatgacatgtttgatctctgattggctatttgaaaaaaaatctgaaataaaagtagttcataatgtaaatgtccaaccttctgttgttaagtacttaaatgatagaggaatagagacaataagatctaaggttggtcactcatatataaaaaagattatgagggataaagatgcagactttggtggagagcatagtgcacatttttatttgagagaaaatttttatgctgattcaggaatattgactttattaatatttttaaaaattttatctgaaaaaaatgtcaaaagttcagtgcttgtagaagattatgaatttaacccatcatcaggtgaaattaattatgtggtcgaagatgtagagacaagtttaaaaaaaatcgaaaattcttttcagggtaaatttgataaattagatggaatatcttatttttccgatgatttttggtttaacgtaagaggatcaaatactgaacctttgcttagattaaatgcagaagcagtagatcaaaaaactttagacaacatcattgatgaaatttcaaatataataagttaat

SEQ ID NO: 291448 - DNA, 926 bp, Unknown
  Bacterial polypeptide expressing nucleotide sequence isolated from the Sargasso Sea
catgagcgttttcaaggcatatgacataagaggaatcgcagggagtgagcttgactctgaattctctgaacgtctaggcaaggcggtagcgactcacttagacgcggaatgtgtctcagtggtcagggacatcagggactcgagccctgactaccacgaggccttcgtcaggggcgttctgtctaccggagcagatgtaatcgacctgggcatctcgacaactggggtgctgtatcgttctactgtagaccttccagtagatgtctcagttgcgataactgctagtcacaacccacctgagtataatgggttcaagatttgcaaagggaagtcgcccctgggaggagaagagttgcaagaagtcaggaggacattcgaagaaggggatttcagggaagggagtggcaattaccggatcatggactcatacgaggaaagttatgtccagtcaataatagatagcgttggaagcctatctcgggacatcagggtagttctggactgcggaaatgcagtacccggtccgttggcggtcaaagttctggaaagactgggtgtggatgtaataccactctactgcgattgggataactcgttcccgaatcaccctccagaccctaccagacacgagaacatggaagatttgggaagggccgtcctagagcatggtgctgagtttgggatagggatggatggtgatggggaccgtctgggcgtggttgatgagaatggcaggttcatacaccctgatcgactaatgggaattttcgtcgaagaagttctcactgaccttcctgaaaacgcaactgaggagcaacgcaccattttcttcgacgtgaagtgcagcatggctttggaggaggcaatagaggaactgggaggagtacccaagatggtgaggactggccatactttcatgaaaaagg

SEQ ID NO: 291449 - DNA, 1366 bp, Unknown
  Bacterial polypeptide expressing nucleotide sequence isolated from the Sargasso Sea
atggaaatagctagatcaatctttagggaatatgacataagaggtatttatccaaaagaaatcaatgaaaatgtaatcgaacaaatagctaaagcaatatcaataaagtgcttaaagaataatatacctgaaatatgtgttggtagggatggaagactttctggggaaagtttgcttgactgcttatctgaatcattatctggtttcggaataaatgtaataaacattggcttagtaagtacccctctgctttattttgcggctaagaaaaataagcacaaaagtggaattatgattacgggaagtcataacccaaaaaattataacggtgtaaaaatggtcataaacgataatccagtttctggtagcgaaatatataaactcatagacaaagataagcctagtaccaaaaaaaaaggaactatagtttataaagatattaaaaaagaatatatacaagaagttaaagaaaacgtggatataaataacaaagttaagattgttattgattgtggaaatggagcagctggttgtattgctcccgatttatttaaaagtatgggatgtgaagttattgagctttttagtgaggttgacggaaatttccctaatcaccatcctgatccaggcaagatagaaaacctcaatgatttgatatctaaagtaaaggaatcagatgcagatctaggcattgcttttgatggagacggcgacagagttggacttgtaacgaatgaaggaaaagttatttatccagataaaattatgatgatcttaagtaaagatatcctttcttcaaaaaaaggctcaataatttttgatgttaaatgttcaaatcttttgccagacatcatatcaagtcatggcggtaaaccaataatgtctccaacaggtcattttcatataaaaaatgctataaaaagacataaccctttacttgctggagaaatgagcggccatatattcttcaatgataagtggtatggatttgatgacggtcattattctggtgcaagaattattgaaattgtttcaaaggaaaataggaaaatatctgaaatagaaaatgaattgcctctactttattcaactccagaattaaatatagatgtaactgacgaaacaaaatttaaaataatagaagacttttcaaaagaatgttccttagatggagaaaaaatcactattgatggattaagaataaattttaaaaatggatgggggttattaagggcatccaacacgacaccaaaattagttttaaggtttgaaggaaattcagttgatgatttaaaccaaataaaaagtaattttctaaatgaactttctcgcatttgtcctaatattgatataaatttagtttaaa

SEQ ID NO: 291450 - DNA, 982 bp, Unknown
  Bacterial polypeptide expressing nucleotide sequence isolated from the Sargasso Sea
atggaaatagcaaaatcaattttcagagaatatgacattaggggggtttatcctgaccaagtaaatgaaaatgcaatgagtcttatagcaaaagctattgctataaaatgcgatcaagagaatgttagagaaatatgcattggtagagacggcagactgtcgggagaatctctactcaaatcattagaaaaatctctttcttgttatggaatcaatatacaaaatattggtttagttacaactccgctactttactatgcagcaaaaaaaaataagtgtaagagtggtgtgatgattacaggcagtcataaccctaaaaattataatggtataaaactcattatcaacgacaagccggtttctggaaaagagatatataaattacttgatagaaataaagataagtcagaagctccaggtaaaattgaattctttgatatcaaaagtgattatattgaagaagtaaaaaataatattcagattgatgagaattttaaattaaaagtggttattgattgtggaaatggtgctgcaggatgtatagccccaaaactatttagcgaactaggctgtgaagttattgagcttttcactgaagtagatggaaattttcctaatcaccatcctgatccaggtaaattagaaaatcttcaggatttaattgcaaaagttaaattaacaaaagctgatttaggtttagcatttgatggtgatggagatcgagtaggtttaattactgatagaggcgatgttatttatcctgacaaaatcttgatgatgttctgcaaagaaatccttaatataaacaaagggtctataatctttgatgttaaatgtacgaatgcccttccagatttgataaaaaatttaggcggaacaccaataatgtcgcctactggacactttcatatcaaaaatggtattaaagaacataatccactccttgcaggtgaaatgagtggtcatattttttttaatgaca

SEQ ID NO: 291451 - DNA, 1063 bp, Unknown
  Bacterial polypeptide expressing nucleotide sequence isolated from the Sargasso Sea
cctgggtctaataattaccgcatctcacaatccaaaagagtacacaggtttaaagttttgtgacagtggagcggtagcgatcggtcaagaaacaggattaaaagaaatcaagaatttagcagaaaaatttaatgatgattttaacatgtcagaattgcctgaaatgcaaactttgaatcaactttatctagaacattttaaaaatatagtgaatccatctgaaataagtgacaaagtgaaatttgctattgatggtggaaatggtgtccttggtgctattattgaagatctatcagaatcctttagtttaaattttgaaggcctttatatggaagtagatggcaacttcccaaatcatccagcagatccctctaaccaagacaatctcttagatctaaagaataaagtattgtcacaaaattttgattttggagttgctttcgatggagatgctgacaggtctgtatttgttgatgataaaggaaacttaattagtggaagtatgatgacttgtttaatttctgattggttatttgaaaagaaatctgaaataaagatagttcataatgtaaatgttcaaccatctgttattgaatatttaaaaaataaaggaatagagacaataagatctaaagttggtcattcatacataaaaaaaattatgagagataatgatgcagattttggtggggaacatagtgctcatttctatttgagagaaaatttttatgctgattctggaatattgactttattaatatttttaaaaattttatctgagaaaaatattaaaagttcagaacttgtacaaaattacaactttaagccgtcatctggtgagattaattatattgtcgaagatgtagagataagtttaaaaaaaattgaaaattcttttgagggtgaatttgataaattagatggaatatcatatttttctgatgacttttggtttaatgtgagaggatcaaatactgagcccatgcttagattaaatgcagaagcaatcaatcaaaaaactttagacaacatcattgaaaaaatttcaaatataataagttaa

SEQ ID NO: 291452 - DNA, 1168 bp, Unknown
  Bacterial polypeptide expressing nucleotide sequence isolated from the Sargasso Sea
atggaaatagcaaaatcaattttcagagaatatgacattaggggtgtttatcctgatcaagtaaatgaaaatgcaataagtcttatagcaaaagctattgctataaaatgcgatcaagagaatgttagagaaatatgtattggtagagacggaagactgtcaggagaatctcttctcaaatcattagaaaaatctctttcttgttatggaatcaatatacaaaatattggtttagtcacaactccactgctttactatgcagcaaaaaaaaataaatgtaagagtggtgtgatgattacaggcagtcataaccctaaaaattataatggtataaaactcattatcaacgacaagccggtttccggaaacgagatatacaaattacttgatagaaataaagataagtcagaagttcctggaaaaattgaattctttgatatcaaaagtaattatgttgaagaagtaaaaaataatattcagattgatgagaattttagattaaaagtggttattgattgtgggaatggtgctgcaggatgtatagccccaaaactatttagcgaactaggctgtgaagttattgaacttttcactgaagtggatggaaattttcctaatcaccatcctgatccaggcaaattagaaaatcttcaggatttaattgcaaaagttaaattaacaaaagctgatttgggtttagcatttgatggtgatggagatcgagtaggtttaattactgataaaggcgatgttatttatcctgataaaatcttgatgatgttctgcaaagaaattcttaataaaaacaaagggtctataatctttgatgttaaatgtacgaatgcccttccagatttgataaaaaatttaggcggaacaccaataatgtcacctacaggacactttcatatcaaaaatggtatcaaagaacataatccactcctggcaggtgaaatgagtggtcatattttttttaatgacaaatggcatggctttgatgatggacattattcaggtgcaagaattattgaattaatatcaaataataaaagaagtatctcagctattaataatgatttaccaaacttattttcaactccagaattaaatattacggtgactgacgaaacaaaatttaaaataattgaagatttttctatgaaatgta

SEQ ID NO: 291453 - DNA, 1219 bp, Unknown
  Bacterial polypeptide expressing nucleotide sequence isolated from the Sargasso Sea
tatgaaagtcaattctaaagtttttagagcctatgatgtaagaggagtcgttggaaaagagctttcagatgaattaattgaaaaattaggaaaagctattggtaccaaactgaagagaaataatttaaattctttaaacatttgccgagacggtagactctcagggccacatgtatcaaagttatttactaaaggattactttcaacgggatgtgatgtctataatttagatttaggacccactcctctactttatttttcaacattcaaatcatcgattaaaaatggtgtaatgattacaggtagtcacaatccgaaagactataatggctttaagatagtatttgatcaaaagcctctgtcaggagagtcaattactgaaataaaagatctcattgaaaatgaggatttcctttctggagaaggcatagaaataaagacgcctatgctagagagctataaaaaagaaatcaaaacaaaaattaatctcaataaaaatcttaaagtcgttctagattgcggtaatggagttggaggatcaatcgcgccaactcttttcaaagatttggggattgaattatttgaactttatagcgaagttgatgggaattttcctaatcatcatcctgatccagggaacccaaaaaacctagaagatttaattaacaaagtttgcgaaataaatgctgatttgggaattgctttagatggagatgcagataggttgggagtcgtagataacttaggcaaaattatttatccagatcaatatatgtctttgttggcagatcaagttttaaaaaaaaatccaggacgaaaagttgtctttgatgttaagtgctcttcaaagctcaaagaatcaattattaaaagcaaaggtataccggttatgactagaactggacattcttttattaaaaaggaaatcttgaatcaaaatgcaattttaggtggggaaatgagtggacatattttttataatgacgattggtacggttttgatgacggtatttattcagcgctaaggttgatagaaattatttctgaatctaaaagttcttcttctgagatttttaataaatttcctcagctatttaatactccagaaataaatctcagcacaacagatgatagaaaatttaaaattattgaaagattaaaaaaagagtttgaatttaatggcttcgagaaggtcttaattgatgggataagattagaa

SEQ ID NO: 291454 - DNA, 1276 bp, Unknown
  Bacterial polypeptide expressing nucleotide sequence isolated from the Sargasso Sea
gcttggcttaaaattaaagaaaataattctaatgctgtttatgtaggttatgacagtagactgtcttgtgaagagataaaaagcaatcttattacaggaatcaatgctgcaggagtaaaagtgcttaatttgggtctagttcccacgcctatagtctattatgcgactaaagttggtgatacttcgaatggaataatgattactggaagtcacaaccctaaagatgacaacggtctaaaaatggtaattaatgataatgctgtttctggaattgaaattaaagaatcggttgagaatttaggtgaaatcccaacaagcgatatagagatgatagaaaatttagatcttaaaaagaaatacatagaagaagtgatgaacaaagtaaaaataaataaaaaactgaaggttgttttagatgcaggtaatggggcagcaggaatcttagcggaagaaatgtttactgctcttggtcatgaagtgatatcaataaataaagagcctgatggaaatttccctaatcatcacccagatccaagcaaagaaaaaaatcttatagaaataaaaagagaaatagattcagcaaatgctgatataggttttgcatttgatggtgatggcgatcgaataggattaataaccaataagggagagtcagttattgcggatcagataattatgctaatggcagagttttatttagatcaagtaaaaggtccaatagtatttgatgttaagtgttccaatcaattacctttgctaatagagaagtttgggggagaaccaataatggaaaaaactggacactttaatattaagagaagaattagacaaacaaatgctgttatgggtggtgaaatgtcgggacatatattcattaatcatgattggtatggttttgatgatgctattttttcagctgtaatacttactaaaattattactgatttagatgttagtatttctgaattagtgaataaaattccttcgacacattcaactcctgaactaaatttagatgttaaagatgaagagaaattcaatatggttgaaaaatttaaatctgaaatggagtttccaaacgcagacatcaatacaattgatggagtaagaataagcattaataattcttgggctttaatgagagcatcaaacactagtccaaaattggttctaagatttgaaggtgatacagaggataatttgaatcaaataaaaaatttgtttgaaaataattttttaaaaatatttccagatattaagctcgactaccattaat

SEQ ID NO: 291455 - DNA, 508 bp, Unknown
  Bacterial polypeptide expressing nucleotide sequence isolated from the Sargasso Sea
gaacaattagatgactataaaaaagtcaaatctgcttgggaacttaacgaaagacactatggatctcttactggtttaaataaagatgaaatgaaaaaaaaacttggagaagaaaaagttcaccaattcagacgctcttgggatctaagacctgatccactagataaaaataacagctatcatcctctaaatatcaatacatataaagatgtacctgtcgaaaaaattccagatactgaatctttaaaagatacatatgagagagtaattaaatattatagtgaggatattaaaaatgaattaaaaaataaaaatattttaatttctgcacatggaaattcaataagagctttatgtaagtatctttttaatttagataacaatcaaatttcaaaattggaaatacctactggtaaccctttactgataaaatttgattccgattataaaatattaaattgtgggtatcttgactctgaacgagctaaagatctcttagtttattaaa

SEQ ID NO: 291456 - DNA, 175 bp, Unknown
  Bacterial polypeptide expressing nucleotide sequence isolated from the Sargasso Sea
atgaaattaattcttcttcgtcatggtgaaagcgaatggaatttaaaaaatcgttttacaggttggaaggatgtagacttaacatctaatggtataaaagaagcaactgctgcagccaataaaatcttagaagaaaacattaatatttcctcaattcacacttcaatactagaaa

SEQ ID NO: 291457 - DNA, 498 bp, Unknown
  Bacterial polypeptide expressing nucleotide sequence isolated from the Sargasso Sea
tatgagttatttaatactagtaagacatggtcaaagtgtatggaatctagaaaataaattcactggatgggtggatgttgacttaaatgaaaatggaaaagctcaagcaaagaaagcaggagaattaattaaagaaaaacaaataaatattgatctatattacacgtcatttcaaataagagctaaaaatactcttaaaattatacaagaagaactaaaggattttaaaagtgtaaaatctgcctggcagctcaatgaaaggcattacggatctcttacaggtttaaataaagatgagatgagacaaaagcttggagaggaaaaaattcatcaatttagacgttcttgggatttaagacctgacccattggataaaaatagctcttatcatcctttaaatattaatatttataaagatataccacttgataaaattcctgataccgagtctttaagagatacatatgaaagagtaatcaaattttttaatgaggagtt

SEQ ID NO: 291458 - DNA, 706 bp, Unknown
  Bacterial polypeptide expressing nucleotide sequence isolated from the Sargasso Sea
tattttataagacatggggtcaaagtgaatgggaatttacaaaataagtttacaggatgggttgacgttgaactttctccacaaggcaaacttgaagcatgtaaagcaggtgaacttataaaagaattaaattttaaaattgattacttttttagctcctatcaaaggagatctatagacactcttaagcttatcttaaacacaatcagagaaaaagatgatcaaattataaaagcttgggagttaaatgaaagacattacggagccttaactggtttaaataaagatgaaatgaaaaaaaaattaggagaagagcaagttcacatttttagacgatcatgggatactccgcctcaacctttaagtaaaaatagcccttatcatcctttaaatattgaaacttataaagacattccaagagaaaaagtgcctgatactgagtctttaaaagatacctatgaaagagtaattccttattataagtctcaaatcgaaaataaattggataataatattgttgtttctgcccacggaaattcaataagatcaatgtgcaaatttttatttgaactagataatgatgaagtaactaaactagagataccaactggcaatcctttgaaaataacatttaataatgaaaaaaaattaaatgatgcaatttatctagacaaaagtagagcgaaaaacctgatcaaattttaag

SEQ ID NO: 291459 - DNA, 396 bp, Unknown
  Bacterial polypeptide expressing nucleotide sequence isolated from the Sargasso Sea
caaaaaagtacaggagatcctgggatgtagcccctcctccaatggaggagaaaagtgaatacctaaatttatttagtccactgaatgctagtatacctatgggaatgaccccatttactgagtccttaaaaagtacatatgacagggtggtacctttttatgaggacgaaattaagaaaaatcttttagaaaataagaatattttaatttcagctcatggaaactctctaagagctttatgtaaatatttatttaatatttcggatacaaaaataaatgaattggaaataccaacaggtaatccgctgttaattgaatttggtgagaatttaaaaattcaaaaatattattatttagacgagtccagagctaaggatataatttttaatcaataat

SEQ ID NO: 291460 - DNA, 193 bp, Unknown
  Bacterial polypeptide expressing nucleotide sequence isolated from the Sargasso Sea
tgttttaatttcagctcatggaaattctttaagagcattgtgcaaaaatttattcaatttaaataataatcaaatctcagatttagaaatacctacaggtaaccctttaattattgaactaaatcaagaattagtaataaccaattgtgaatatcttgataaagaaagagctaaaagtcttttagttttttaa

SEQ ID NO: 291461 - DNA, 694 bp, Unknown
  Bacterial polypeptide expressing nucleotide sequence isolated from the Sargasso Sea
ttcgatgccattaatagcagttatctaagaaatgaaatagatgaatttttaaatcctaccattatagaagagtatggttatgacagttttaaaggcattaaggataatgatggattatttgttgcaaactttagatcagacaggatacgtcaattactttcatctttaatagaaccaaactttattaattttgaaaggcagaaaaaaccaaaatttatttcaaaattaggaatggttaattattttgataagtcaattcatgggataaaatgcttgtttcctaatatcattccaaaaaatacattgggtgaggtgatttcaaggaacaatttgaaacaatttcgagtggctgagacagaaaagtatcctcatgttacgtttttttttaatgggggaagagaaaaaaaattcaaaggtgaagaaagatttttggttccatctccaaaagtaaaaacttatgatgagtgtcctcagatgtctgcaggtgaaatagctgcaaaggttataaaatctatatctaatcaaaagcatgatgtgattatagttaattttgctaatccagatatggtgggtcataccggagactttggcgctgttgttgaagctgtagaatgtgttgataaatatttaggagatatagttaaaaagcttctaaaggatgaaggtcatatgatcttaacttctgaccacggta

SEQ ID NO: 291462 - DNA, 244 bp, Unknown
  Bacterial polypeptide expressing nucleotide sequence isolated from the Sargasso Sea
gttggtcatatgaaccttggttctggaagagtggtactacaaaccctaccaaagataaataaagcttttgccaataatgaaatagaaaaaaataacaattctcagaattttttatcaaatcataataaaaataagactgtccatcttctcggtttgagtagtgatggtggggttcattctcactcaagtcatataattgaaatgtcaaatcttttagaaaaaaataattgtaaaacttgcatac

SEQ ID NO: 291463 - DNA, 274 bp, Unknown
  Bacterial polypeptide expressing nucleotide sequence isolated from the Sargasso Sea
atgagtaaattaatcttaataagacacggccaaagcatttggaatgcggaaaataaatttacaggatgggtagatgttgatttgtccaaaaaaggaattgaagaggcaaatagatcaggacaattaattaaaagcttaaatattaatgtagattttttttttacgtcttttttaaaaagatcaatcaatactcttaaaattattttagataatacaaacatgaataagaaagattttgtaaaagcctgggaattaaatgaaagacactacggat

SEQ ID NO: 291464 - DNA, 577 bp, Unknown
  Bacterial polypeptide expressing nucleotide sequence isolated from the Sargasso Sea
aaagaacaattaaatattgatctatattattcttcatttcaattaagagcaaaaaatacacttaaaataattcaagatgaattaaatgatcataaagaggtcaaagaagcttggcagttaaatgagagacattatggtgctcttacaggcctgaataaagatgaaatgaagataaaactaggagaagaaaaaatccaccaatttagaagatcttgggatttaagaccagacccgctagaaaaaacaaacccttttcatcctataaatatcgaaacatacaaaaaaattcctagagataaaattccagatacagagtctttaaaagatacttatgagagagttattgaattttataaaaatgagatagaaaataataaaggtaaaaatattcttatttctgcacatggaaattctataagagctctttgtaaatatttatttattttagataatactcaaatatctagacttgaaattcctactggtaatccactgtttattgaatttgaaaacaataaaatttctaagtgcaaatatcttcataaagaaagagctaaagatcttttagttttttaaa

SEQ ID NO: 291465 - DNA, 635 bp, Unknown
  Bacterial polypeptide expressing nucleotide sequence isolated from the Sargasso Sea
aatgaataatttaattttagttcgacatggacagagcttatggaataaagaaagaagatttactggttgggctgatattgacttaacggaacaaggaaaattagaagctaagcaagcaggacgactaattaaagaactcaatataaaattagatgcatgttttacatctcatctaaaaagagctgttaatagtttagaaataattctagaaattttaaacaatccaaagatagatatatttaaaacagagtcattaaatgaaagacattatggtggacttacaggtcttaataaagatgaaactattgaaaaatatggcaacgaacaagttcagagctggcgaagaagttttgatattcagccaccaaaaatggaagaagatcatccatacaaaaataaaattggaacaaaaattttaagtgaatcattaaaagatacttttaatagagtaatacctttttatactaaaaatatagaacctcttatctcttcaaaaaaaaatgttttgattgtttttcacggtaatagttgcagagcattattgatggaaatttttagtatttcaaaagaacaaattaataaatttgagattcctacaggaaaccctttattgattacatatgagaaaaatttga

SEQ ID NO: 291466 - DNA, 139 bp, Unknown
  Bacterial polypeptide expressing nucleotide sequence isolated from the Sargasso Sea
taataaagatgaatgtaggcaaaaatggggtgctgaacaggtacaaatttggagaagatcttatgatgttggtccgcctgggggagagtcacttaaagaaactggagagagagttttaccatattatttaaatgagatt

SEQ ID NO: 291467 - DNA, 190 bp, Unknown
  Bacterial polypeptide expressing nucleotide sequence isolated from the Sargasso Sea
tatgaaagatcaaaattttttagtgctggttcgtcacgggcaaagtaaatggaatgccagaaaccttttcacgggatggaaaaatcctggtttgacatctgatggtaagaaagaagcaattaaagcaggctcattaattaagcaaaggaatattcaattctcaatgatgttcacatcagctcttaagaga

SEQ ID NO: 291468 - DNA, 247 bp, Unknown
  Bacterial polypeptide expressing nucleotide sequence isolated from the Sargasso Sea
aattccttattacgaaaaagaaattcaaaaacacattcaagaaaataaaaatgttttaatatcagcccatggaaattctttgagagcactgtgcaagtacttatttaaaatctctgatcaaaagataaatgaattagaaattccaacaggaaatcctttaatggttgaatttgataataatcttaaagttaaaaaatattattatttagataagagtagagctaaaaatattatatttaatcaataa

SEQ ID NO: 291469 - DNA, 280 bp, Unknown
  Bacterial polypeptide expressing nucleotide sequence isolated from the Sargasso Sea
atgtttaaacttgtcctattacgacacggagaaagcgagtggaatctggaaaatcgtttttccggatgggccgatatcggactcacagagaaaggaatgtcagaagcgaaacgttttggtttgttgttaaaaggacaaaacttcaggtttgatgtagttttcacttctgtcctaaaaaaggccataaagaacatggaaatctgcctcagtgaaatggggccatcggtattctcaccattcatgactggcgtctcaacgagcaacactatggggctttaga

SEQ ID NO: 291470 - DNA, 226 bp, Unknown
  Bacterial polypeptide expressing nucleotide sequence isolated from the Sargasso Sea
aatgagcaatctaattttagttaggcatggacagagtgaatggaatttggaaaataagttcactggatgggttgacgttgatttggccccaaaaggaaaacttgaagcttgtaaggctggagaattaattaaaaatcaaaaaattaaaattgatcattactttacatcatatcaaaagagagcaatcaatacgttaaagttaattctaaatactttaagggttaaa

SEQ ID NO: 291471 - DNA, 232 bp, Unknown
  Bacterial polypeptide expressing nucleotide sequence isolated from the Sargasso Sea
aatgaattaatcttaaaagatcttcaaaatggtaaaggtgtgtgcatctcagcccatggaaattctttaagagctctatgtaagtatctttttaaaatcgatgagagggaaatttctaaaatggaaataccaaccggaaatcctcttttaataatttttgaggacaaacttcaaatttcatctgtgacatatcttgatcaaggaagagccaaaaatttagttgctttttaga

SEQ ID NO: 291472 - DNA, 460 bp, Unknown
  Bacterial polypeptide expressing nucleotide sequence isolated from the Sargasso Sea
aatgataaaaaatattgaaattttttttattaaaaaattaatcattaataattatagttttatttatcaaattattctaaaagataaacaaatgagttatttaattttagtaaggcacggccaaagtgtatggaatcttgaaaaaaaatttactggatgggttgatatagatttaactgataacggaaaactagaagcaaaaaaagcaggtcagttaataaagcaaaaacaaattgaaattaatctttattattcatcttttcaattaagagcaaagaataccttacaaataatacaaaaagaattggaggattttaaagatgtaaagagtgcttgggaattaaatgaaaggcattatggagccctcacaggattaaataaagatgaaatgaaaaaaaacttggagaggaaaaagttcatcaatttagacgttcgtgggatcttagacctgaccctttag

SEQ ID NO: 291473 - DNA, 568 bp, Unknown
  Bacterial polypeptide expressing nucleotide sequence isolated from the Sargasso Sea
attgatctctattactcctcatttcagttgagagctaaaaatacactaaaaattatacaagaacaattagatgacaataaaaaagttaaatttgcttgggaacttaacgaaagacactatggatctcttactggtttaaataaagatgaaatgaaaaaaaaacttggagaagaaaaagttcaccaattcagacgctcttgggatctaagacctgatccactagataaaaataacagctaccatcctttaaatatcaatacatataaagatgtacctgtcgaaaaaattccagatactgaatctttaaaagatacatatgagagagtaattaaatattatagtgaagatattaaaaatgaattaaaaaataaaaatattttaatttctgcacatggaaattcaataagagctttatgtaagtatctttttaacttagataacaatcaaatttcaaaattggaaatacctactggtaaccctttaatgataaaatttgattccgataataaaatattaaattgtgggtatcttgactctgaacgagctaaagatcttttagtttattaaa

SEQ ID NO: 291474 - DNA, 600 bp, Unknown
  Bacterial polypeptide expressing nucleotide sequence isolated from the Sargasso Sea
cgggtgaactcattaaagatcagcaaataaatattgatctatattactcatcatttcagttaagagccaaaaatactatgaaaattatacaagaacaattagatgactataagaaagtcaaatctgcttggcaactcaatgaaagacactatgggtctcttactggtttaaacaaagatgaaatgaaaaaaaaacttggagaagaaaaagttcaccaattcagacgctcttgggatctaagacctgatccactagataaaagtaacagttaccatcctctaaatatcaatacatataaagatatacctatcgataaaattccagatactgaatctttgaaagatacttatgggagagtaattaaatactataatgaggatattaaaaatcatttaaaaaataaaaatattttaatttctgcacatggcaattccataagagcgttgtgtaaatatctttttaatttagataacaatcaaatttcaaaattggaaatacctacaggtaaccctttactgataaaatttgatactgacaataagatattaaattgtgaatatcttgactctgaacgagctaaagatcttttagtttattaaa

SEQ ID NO: 291475 - DNA, 304 bp, Unknown
  Bacterial polypeptide expressing nucleotide sequence isolated from the Sargasso Sea
aagaaattaaatatagaatttaatgcatactttacctccgaattaaaaagagcagtaaataccttaaatctaatattagaagttctggaaaagcctgatgttaaaattaataaagcctgggaattaaatgaaaggcactacggagatctaactggtaaaaataaggacgaaattatagcaaaatatggagataaacaggtaagcatatggagacgaagctatgatacacggccaccaccaatagacatacaaaatccttataaagacaaaattaaatctaaaattctatgtgaatcattgaagg

SEQ ID NO: 291476 - DNA, 412 bp, Unknown
  Bacterial polypeptide expressing nucleotide sequence isolated from the Sargasso Sea
aatgaatgattttctagaaaatggaaaactaatttatgagagaaaccaaagtttaaatgaaagagattatggtgacctagtaggtttaaataaagctgaaactgcggagaaatttggaaaagaacaagttcatatatggagaagatcttatgatactcctcctccaaaaggagaaagtttaaaagacgtagtagagcgagtatcaccttatttcaaagaacaaattgaaccattattattagcagaaaaaaatatattaatatctgcccatggaaattcattaagggcaataatgattaaagttggtctttataagcctgaagaaatttcttccattgaacttcctacaggctgcccattgtgcttagaatatgaaaaaggtatattaattaataattattatttagattaa

SEQ ID NO: 291477 - DNA, 655 bp, Unknown
  Bacterial polypeptide expressing nucleotide sequence isolated from the Sargasso Sea
atgggtagatgttgatttgtccaaaaaaggaattttagaggctcagaaatctggccaattaattaaaaatctaaatgttaatatagatgtttcctacacatcttttttaaaaagagctatcaaaactcttactgccatactccaagaaaatggtttggaacttaaatttaatacttcttgggaattgaatgagagacattatggatctttaacgggtttaaataaagaagaaaccaaaaagaaaattggtgaagagcagtttaaaaaatatagaagatcttgggatataccgccgccgccaatgactgagaacgacaaaaatcattctttatttagtcctttaaacccaagtatacccgtggggatgataccttttacggagtctttaaaagatacatacaaaagagtaattccttattatgaaaaagaaattcaaaaaaatattaaagaaaataaaaacgttttaatatcagctcatggcaattcgctaagatcactatgcaaatatctatttaaaatttctgatcaaaagataaatgaattagaaattcccacaggaaatcctctgataattgaattcgataataatcttgaaattgaaaaatattattatctggatgaaactagagctaaaactattatttttaatcaataa

SEQ ID NO: 291478 - DNA, 505 bp, Unknown
  Bacterial polypeptide expressing nucleotide sequence isolated from the Sargasso Sea
atgagtcatttaattttagttcgacacggtcaaagtacttggaatcttgaaaaaaaatttactggttgggtagatgttgaattaacaccagagggtaaattggaagcttgtaaagctggtgaattaattaaagcgctaggtttagaaataaattatttttacacatcatatcaaaagagagctgtggaaactcttaatttaatattaaatactattaatgttaaaaatgatgaagttgtcaaagcttgggaacttaatgaaagacattatggtgcacttacagggttaaataaagatgaaatgaaaaaaatttatggtgaagaaaaaatacataaattaagaaggtcttgggatatttcaccagaacctttaagtaaaaaaagtccttatcacccaaataatattaaaatttataaagatataccaaaagaaaaaattcctgatacagaatctcttaaagatacatttgaaagagtaatgccctatttgaaaaaaatatactaaa

SEQ ID NO: 291479 - DNA, 220 bp, Unknown
  Bacterial polypeptide expressing nucleotide sequence isolated from the Sargasso Sea
tatgaatcttgttttgttgcgtcatggtgaaagtgaatggaatcttttaaacaaatttacaggttggactgatgttggtttaactgaaaacgggattgatgaagccaaattttcaggcgaacaaattttaaaacaaaattttacaattgacactattcacacttcattgcttgtaagagcgatacatactgctgagatttgttcagatattattggtttt

SEQ ID NO: 291480 - DNA, 113 bp, Unknown
  Bacterial polypeptide expressing nucleotide sequence isolated from the Sargasso Sea
gatgattaaacttgtattacttcgacatgggcagagtgcatggaacttagaaaataaatttacaggctggaaggatgttgattttactaaaaaaggtgaagaggaagcaaaag

SEQ ID NO: 291481 - DNA, 439 bp, Unknown
  Bacterial polypeptide expressing nucleotide sequence isolated from the Sargasso Sea
tatgaagaaaattttattgtgtattttagacgggtgggggttaggaaaacaaaataaacataatgctatagcagttgcaaaaacagacaattttgatgccattactaaaaaatttggaatgggaaaactctatgcgtctgaaaaaaaagtaggattacctagtggacagtttggaaattctgaggttggtcatatgaatattggaggaggaagaattattcttcaagatattttgagaatagataaatctttaaaaaatggtgattttgaaaaaaattctaacttcttaaacatgcttaataaatcaaaaagaattcatcttttaggtatcttatcatctggaggtgtccatggtcatcaggatcactttatgaaaattattgatattttggttaaaaaaaaaaaagaagctttattacattgttttttagatggtaga

SEQ ID NO: 291482 - DNA, 652 bp, Unknown
  Bacterial polypeptide expressing nucleotide sequence isolated from the Sargasso Sea
ggttgatgtagatttagctcctcagggaaagctagaagcttgtaaagcaggtgaattaataaaagataaaaaaattaatatagattattttttcacttcttatcaaaaaagagcaataaatactttggaattaatacttaatactttaagaattaaaaatacaaatataattaaggcttgggagttaaatgaaagacattacggtgctctaacaggattaaataaagatgaaatgaaaaaaaaattaggagaaaaaaaggtgcaagtgttcagaagatcatgggacatttctccagatccgctaaataaaaataacccctatcatccaataaatattgaaatctacaaagatattccaataaaaaatatacctgatacggaatctcttaaagacacatatgaaagagtactaccttattttaaaaaagaaattcaaaacaaattagaaaaaaagaaaaatataattatatccgctcatggaaattcattaagggccatatgcaaatatttatttaaacttgatgaaaataaaataactaaattagaaattccaacaggcaatccattatttataagttttaacgataaaattgaaatttctaaatgttactatttagataatgaaagagcaaaggacttaatagttttttaa

SEQ ID NO: 291483 - DNA, 585 bp, Unknown
  Bacterial polypeptide expressing nucleotide sequence isolated from the Sargasso Sea
aaagcaaaaatatcaaaattgatttttattacacttctcttcaattaagagcgaataatactcttaaaataattcaacaggaattaaaagataaaaaaaattttacaagagcttggcaattgaatgaaagacactatggggcactgactggtttaaataaaattgaaatgagtaaaaaaattggtgaggataaaatttatgagtttcgtagatcttgggatttaagaccagatccactaaacaaagaaagcccatatcatccacttaatattgactcttataaacaaattccaagagaattattacctagcactgaatctttaaaagatacttacgaaagagttataaattattttgaaaaaaacgtaaaagaaaatttaaaaaataataatgttttaatatctgcacacggaaactctataagagctttatgtaagaatttgtttaatttagacaatattcaaatttctaatttagaaataccgaccggaaacccaatgttgataaaatttagagaaaattttgaaataacaaattgcgaatatcttgataaagaaagagctaaagatcttttaattttttaaa

SEQ ID NO: 291484 - DNA, 146 bp, Unknown
  Bacterial polypeptide expressing nucleotide sequence isolated from the Sargasso Sea
tatgagtaaattaatcttagtaagacacggtcaaagtgtatggaatgcagaaaacagatttactggatgggtagatattgacttgtccaaaaaaggaatattagaagctcaaaaatcaggtcaattaattaaagatcttaatatta

SEQ ID NO: 291485 - DNA, 334 bp, Unknown
  Bacterial polypeptide expressing nucleotide sequence isolated from the Sargasso Sea
atgaataatctaattttagtcagacatggtcaaagtcagtggaataaagaaagaagatttactggctggatggatataggtttaacagacctaggaaaatctgaagctaaatatgctggagaattaattaaaaaattagatatagattttcatacctgttttacttcaaaccttaaaagggcaattaatagcttagaaattattttagaaaatttaaataataaagatatcaatgttatcaaaactgatttactaaatgaaagacattacggtggattaactggacttaataaagatgaaacaattaaaaaatatggagaaaaacaagttaaaa

SEQ ID NO: 291486 - DNA, 474 bp, Unknown
  Bacterial polypeptide expressing nucleotide sequence isolated from the Sargasso Sea
aggcttttgaaattacagaagctactcttgcaaggcttgaaaaaaagagttttgactttgggcggataaattttgctaactgtgacatggtaggtcacagtggtgatcttgaagcctctgttacagctttgtctgttgttgatctgatgcttggaagacttattgaagcttgtaaaaaaaccggctacacacttgttgttactgcagatcacggtaactgtgatgagatgtttttagatggagatgaaaagagctttcctcagtggaaagaacttggtcgtggtcttcgtccaaaggcaaagacctcacacagtttatcgcaagttcctttttacgtatttgaagcacaaaaaaaaccaagaaagcttttagcttctggtgagggacggctttcacaggtggcaagtactttgcttgagcttatggaacttaaagggcaagctcattttgaaccttctctttttagttcttaga

SEQ ID NO: 291487 - DNA, 595 bp, Unknown
  Bacterial polypeptide expressing nucleotide sequence isolated from the Sargasso Sea
gttgataattgacggtatgagtgatcgtccagtttttgaactgaaccacaaaactcccctgcaggctgcttatctcccaaatataaatcaactagttaaggaaggacaatgtgggaccgcagatcctgtaaaaccagggattgtagcatctacagtttcaggtactttagcgattctaggttatgatcctttagaaaaaactgtgtcacgtggtgttgttgaagcgttaggatgtggaatgaaaatcaatgttggtgatgtggcctttcggggaaattgggctacactggatgaaaaagggctgattattgatcgccgtgcaggacgcatcagggaagggataaatgaactggctttaagcatcacaggacaaaagattgataatgtccgcattgatgttgcagcagggacggaacatcgtattgctgtggttatgcgaggatcagaacttcaagactgtgtttcaggaagtgaccctggtgaccacttccattctggtataaatccccggccaataaaaccgctaaataaaaataaccctaaatgcttgcgtacagctgaactgcttaatattttcgaatttaaagcaagagag

SEQ ID NO: 291488 - DNA, 217 bp, Unknown
  Bacterial polypeptide expressing nucleotide sequence isolated from the Sargasso Sea
tattgttgcgcatggaaattcattaagagctattataaaaatattagatcaaatatcaaatgaacatattattaaattaaatatacctactggtattcctttagtttatgaattaaataaaaaaataactccgataaaaaattattatcttggggataaacagaaaattaaaaaaaaaatatcttatgtggccaatcaaggaaaagtgaagaaatag

SEQ ID NO: 291489 - DNA, 379 bp, Unknown
  Bacterial polypeptide expressing nucleotide sequence isolated from the Sargasso Sea
ttggacccacatccagtatttcagggttgttcaggtccagttctcgtagttgtcgccgacggtgtaggaattgcccccgatgcaccacataacgcagttacacaggcatccacgccaactcttgatgcgcttctcgcgtcagatttctctacgaagttagcggcccatggaacagccgtcgggcttccaaccgatgatgatatgggaaatagtgaggtagggcacaacgccattggcgcggggcgcatatttgcgcaaggagcaaagcttgtaaacaaagcgttggaatctggatctatttacaacactgacgtttggaacgaagctatcagccatggagaaaccaggtacgctgcatttcattgggcttcattctaac

SEQ ID NO: 291490 - DNA, 316 bp, Unknown
  Bacterial polypeptide expressing nucleotide sequence isolated from the Sargasso Sea
actgaatgccagtatacctgtaggaatgaccccttttactgagtccttaaaaaatacatatgacagagtggtacctttttatgaaaatgaaattaagaaaaatcttttagaaaataagaatattttaatttcagctcatggaaattctctaagagctttatgtaaatatttatttaatatttcggatacaaaaataaatgaattggaaataccaacaggtaatccgctattaattgaatttggtgataatttaaaaattgaaaagtattattatttagacaagtccagagctagagatataatttttaatcaataa

SEQ ID NO: 291491 - DNA, 565 bp, Unknown
  Bacterial polypeptide expressing nucleotide sequence isolated from the Sargasso Sea
gaatattattactcatctcttcaattgagagcaaataatacattagaaataataaaaaaagttttaaacgataaaaaagattttattaaagcctggcaactaaatgaaagacactatggaattcttacaggtttaaacaaaactgaaatgagtgaaaaacttggtaaaaaaaaaattcatgaatttagaagatcttggaatattaaaccagatgctcttagcaaagaaagtccctatcatccaataaatattgacacatataaagaactgccggaagaaataattcctgatacagagtccttagaagatacttatcaaagagtttttaaatactttaaagatgaaattgaggaaaaattaattaataagaatgttttaatttctgcacatggaaattctattagggctctttgtaaatatttatttaaattggataataatcaaatttcaagtttggaaatacccactggtaatccattgatgatagaatttgataaatcgctgaaaatattaaattgtaaatatcttgatgtagaaagatctaaagatcttttaattttttaaa

SEQ ID NO: 291492 - DNA, 650 bp, Unknown
  Bacterial polypeptide expressing nucleotide sequence isolated from the Sargasso Sea
attgataattgacggtatgggggatcgtccagtttttgaactcgaccacaaaacaccccttcaggcagccattctacctacaataaataaactgaccaaggaaggacaatgtggaatagcagatcctgtaaagcctgggattgttgcttctacagtctcaggaactttagcgattctaggttatgatcctctagaaaaatgtttgtcccgtggtgttgttgaagcatttggatgtggaatgaaaatcaatattggcgatgttgcatttcgaggcaattgggctacattggacaaaaaaggactgattgttgaccgccgagcgggacgtattagagaggggacaaatgaattggccttaagcatcacagaacaaaagattgataatgtccgtatttacgttgctgcaggtacagaacatcgtatcgctgtagttatgcgaggatcagaacttcaagactgtatttcaggaagtgaccccggcgaccacttccattttggtataaatccccggccaataaaaccgcttaaaaaaaataatccaaaatgcttgcgcacagctgaattacttaaaatgttcgaattgaaagcaagagaaattttaaccaaacaccctgtgaatattaaaagagtttcaaataatcttttgcctg

SEQ ID NO: 291493 - DNA, 498 bp, Unknown
  Bacterial polypeptide expressing nucleotide sequence isolated from the Sargasso Sea
catgaaaaataaaaatacagttgtcctttgcattttggacgggtggggtgttggcgaagatattttttctaatgctattaagcgtgcgaacaccccaaactttgattatttagttaacaactttcctacctctcgattgagagctgatggagaatttgtaggccttctgcctggtcaaataggaaattcggaggtgggacatattacaattggggcaggtcgacccataccaatgagtcttcctaccattaacaaaagcataaaagatgattctttaaaagaccatccagtgatacgaagatttgtcaattcgttaaagaggactggtggggtagcgcatttggcgggtttattttccagtggaggagtacatgcgcatcgagatcatatgatatatctagctaacgccttagctaatgaaagtattaatgttaatttgcatttgttttctgatggtagagacgttcttctaaaacagcgatttatgatattaaacga

SEQ ID NO: 291494 - DNA, 187 bp, Unknown
  Bacterial polypeptide expressing nucleotide sequence isolated from the Sargasso Sea
atgagttttttaatattgataagacatggacaaagtatttggaatttagagaagagatttactggctgggttgatgttgttcttacagatagaggtagggccgaagcagaaaaagcaggtttgttaataaaaaaaaagaatattgcaattcattattattacacttctctacaattacgagcaaata

SEQ ID NO: 291495 - DNA, 169 bp, Unknown
  Bacterial polypeptide expressing nucleotide sequence isolated from the Sargasso Sea
atggaagatttgaattacttaatcttagtgcgtcacggacaaagtgaatggaacgcaaaaaacctattcactggatggaaagacccagacctaactgatcaaggaagaaatgaagcagaaaaagccggcaagcttctactcgagaaaaaaattaatttagatgaactct

SEQ ID NO: 291496 - DNA, 520 bp, Unknown
  Bacterial polypeptide expressing nucleotide sequence isolated from the Sargasso Sea
actgataatcgacggtgtgggggatcgtccagtttttgaactggaccacaaaacacccctgcaggctgccaatctccctacaataaatcaactggccgaggaaggacaatgcggggccgcagatcctgtaaaacccggtattgttgcttcgacagtctcaggtactttagcgattctgggttatgatcctctagaaaaaaccgtggcacgtggtgttgttgaagcattgggatgcggaatgaaaatcaatattggcgatattgcctttcgtggtaattgggctacactggacgaaaaaggtttgattgtcgatcgccgcgccggccgcataagggaggggataaatgaactggcattaagcatcactggacaaaagattgataatgttcgcattgatgttgcctcaggtactgaacatcgtatcgctgtggttatgcgagggtcaggacttcaagactgtgtttcaggaagtgaccctggtgacaacttccattcaggaataaatcccaggccagtaaac

SEQ ID NO: 291497 - DNA, 295 bp, Unknown
  Bacterial polypeptide expressing nucleotide sequence isolated from the Sargasso Sea
tatgaatagcttaattcttcttagacatggacaaagtcaatggaatctagaaaatcgttttactggatggaaagatgtacccttaactgaaaaagggattgaagaagcgaataaagcaggtttattaattaaagaaaataaaattaaagttgatattatttttagcagtatactacaaagagctaacaaaactgccgaattagctcttaaaaaaaaggattttgctcatttatggaaagataatcagttaattatgacaaaaagtcaaaatcttaatgaaagagattatggcgac

SEQ ID NO: 291498 - DNA, 262 bp, Unknown
  Bacterial polypeptide expressing nucleotide sequence isolated from the Sargasso Sea
ggatcgcgtcgagcaggcctaccacctgatcgtcgacggcgccggccagttcaacgccgccagcgccgtggcaggcctgcaggccgcctacgaacgcggcgagagcgacgaattcgtcaaggccaccaccatcggtacaccggtgcaggtcgaggacggagacgccgtggtgttcatgaacttccgcgccgaccgcgcccgcgaactgacccgcgccttcgtcgagcctggtttcaaggaattcgagcgcaagcgtgcaccg

SEQ ID NO: 291499 - DNA, 275 bp, Unknown
  Bacterial polypeptide expressing nucleotide sequence isolated from the Sargasso Sea
atcattaaaagatacttataatcgcacagttccctactataataaaaatatcgagccattgttaaaaaaatcagaaaatgttttaatttctgctcacggaaatagtttacgggcactttgtaagaaaatatttcaaatttctgatgatatgattgttaaattagaaattccaacagggaatcctatacacattcaatttgaaaaagatctgcaactaaaaaattataaatatttagataaaacacgcgcaaaagaatttattgttaaaaaataat

SEQ ID NO: 291500 - DNA, 586 bp, Unknown
  Bacterial polypeptide expressing nucleotide sequence isolated from the Sargasso Sea
cctggtacgccatggggaaagcgagtggaaccgtgaaggccggattcagggacaatttaattccccgttgactgaatttggcgttgcccaggctaaggtcattagttcttttttgtccgatcacctttcttatggtcagattcagatctactctagccctctcggcagagcacaacagaccgcagagattattgcagagggtatcaatcaatctgcggaatctatcgtcatcgaacccagattgaatgatttcaatcttggagagattgccgggacctacgggtgggataaagtcgctgaattatatccggaactggcccatttacggctcaacaatcccatgcacttccatcctcccggtggagaaagcggtgctgattttaaagcgcggctcatggaattcatggatgaaatcgcagaccatgaaactcccaaactgctggtcagccacggtatcgtcaataaattcatcagggggattcgcaagaatctttccggaaaacaaatgatcgaactcggagagtcacaggatacgatttaccatttgaacaacacacaggatcaggaaatcaaggttcctgattgg

SEQ ID NO: 291501 - DNA, 274 bp, Unknown
  Bacterial polypeptide expressing nucleotide sequence isolated from the Sargasso Sea
gatgaatgcatttggaaagatttttgaacaatgtaaaaaaaacggatattcacttattctgacttcagatcatggtaatgcagaaagtatgttcgatgagaaaaaaaatatagcatgtacaactcattcactaaacttggttccctttactatttgtgagaaaattaattattcaattaaaactggtaagcttgcagacattgctccaacagtattgaagcttcttggcattgaaattccaaatgtaatgaaaggaaaaccactaattaaatga

SEQ ID NO: 291502 - DNA, 670 bp, Unknown
  Bacterial polypeptide expressing nucleotide sequence isolated from the Sargasso Sea
tggacttacaaaaaggtttactggatgggttgatgttgagttaactccacaaggaaaattagaagcttgcaaagctggagaattaataaaagatttgaatttaaattttgatcattttttttgttcttatcaaaaaagagctatcgaaacattaagcttaattttaaatactctaagaataaaaaacgataatgtaacaaaagcttggcaattaaatgaaagaaattatggatctttaacaggtttaaataaagaagaaatgaaaaaagctctgggtgaaaaaaaaatccatgaatttagaagatcatggaatatagctcctgaaccactaaataaaaaaaatccttatcatcctttaaatattgaagcatataaagatatacctaaaaatatgattcctgatacagagtcactgaaagatacttatgaaagagtggtgccatattacgaaaaaaatatacatcctttaattaataaaaatataattattgctgctcatggaaattctattcgttcactatgcaaatacttatttaaaatcgatgattctaaaatctcacgattagaaatccctactggaaatgctttggctttaaatttcgaaaataaaaagttagtaaatgcaaaatatttagataaagaaagagctaaagacttactagttttttga

SEQ ID NO: 291503 - DNA, 418 bp, Unknown
  Bacterial polypeptide expressing nucleotide sequence isolated from the Sargasso Sea
gaaattattatcaaaggtcttaatattagagagtatagcctggttaaatgccaagagttgaatgaaagagactatggagatttaactggccttaataaggatgatgcgagaaagaaatggggagaagagcaggtgcatatttggaggagatcatttgatatacccccgccaaatggagaaagtttaaagaataccgcagaaagagtagtgccttttttcttatctgaaatttttactaagctaaagcttgaagaaaatgtatttattagcgctcatggtaattcacttcgttcattaataatgcatattgagaatttatcttcagaacaaatccttgagagggaaatcgcaacaggtaaaccacttgtatatgaatttgatccatcaaaagaactatattctctaaagtatgaataag

SEQ ID NO: 291504 - DNA, 898 bp, Unknown
  Bacterial polypeptide expressing nucleotide sequence isolated from the Sargasso Sea
ggcgctagatcccagtgaagacagcatcctcgtggatgccaccttcggacgcggcggacatacccgggctctgcttgaccgactgggcaccaatgggcgtgtctacgcaatggatcgggatcccgaggcgtgtgcgattgcccgggactgggcacagggggagcaccggttaacagtggtgcacgcccctttctcgaaactctccgatgaactgcatgcagccggaatcgcgggacaggtttctggcatcgtgcttgacctgggcgtgtcatcaccgcaactggatgatcccgggcggggattcagttttatgcgcgatggacccctggacatgcgcatggatccctcgcagggtgttcccgtgcaggactggcttgccgatgtctcagaggaagacctggtcgatgttttaaggcgttttggcgaagagcgttatgcccgccgtattgcgcgagctatcgtcgatgcccggactgaagcccccctgaccacgacgggtgagttgtcgtctctggtggacgcctgcgtgcctacccgggagccgggaaagcatcccgctacccggacttttcaggcacttcgcttattcatcaatcaggaactcgcggaactggacgcggtcctgccgcaggcgattgagatgcttgaaccaggcggtcgtctggtcgttatcagttttcactctctggaggaccgacgggtcaaaagattctttcacgacaccgctaaggcggacccctttccgccagatcttccggtgcgagcggacgagatttcaccggccatcctgcgcccggcaaagccccaacggccctctgccggtgaggtggcagctaacccgcgcgcccgcagcgcgattctgcgctgggcacaaaaaacacccggcggtgatgcatga

SEQ ID NO: 291505 - DNA, 244 bp, Unknown
  Bacterial polypeptide expressing nucleotide sequence isolated from the Sargasso Sea
atgaataatttaatacttgttagacacggacaaagcgtatggaatctggaaaaccgttttactggctgggtagatgtaggtttggctgcaaaaggcaaacttgaagcttgtaaggcaggagaattaattaaggaattaaaccttgaattatcttatttttatacatcattacagacaagatcgatcgaaacactaaatttaatccttaatactatgagaattaaagatcaaagtggttattaat

SEQ ID NO: 291506 - DNA, 162 bp, Unknown
  Bacterial polypeptide expressing nucleotide sequence isolated from the Sargasso Sea
tatgaataaactaatcttgttaagacatggtcaaagtcaatggaatcttgaaaacagatttacaggctggaaagatgtgccacttacagaaaaaggaattgaagaagcaaaaaaagcaggagaattattaattaaaaatagaataattggtgatatggtttt

SEQ ID NO: 291507 - DNA, 652 bp, Unknown
  Bacterial polypeptide expressing nucleotide sequence isolated from the Sargasso Sea
ggttgggttgatgtcgatcttacagatcaaggcaaatcagaagctgagaaagctggtttacttatcaaaagtcaaaatataaatatagatttttattattcctcgtttcaagttagggcaaaccatactcttaaaataatacaaaaagtattaaaatcacaaaaggattttgtaagggcatgggagctaaacgaaagacactatggtgagcttacagggttaaataaaattgagactgcaaaaaaaattggtgaagataaagtttttaaatttcgaagatcttgggatataagacctggaaaactaagcaaagaaagctcttatcatccactaaatattgaaacttataaaaaaatacccaaagagcttattcctgacacagagtctttaaaagatacattcaacagagttttggggtatttcaaaaaagaaatacagcctaaactaataaataaaaatatattaattacagcacacggaaactccataagagctttatgtaaatatctattcaatttagataataatcaaatcacaagtttagaaattcctacgggaaatcccttaataatcaatttcggtgaaaatttgaaaataaatgaatgtaaatatctagataaagagagatctaagaatcttttagttttttaaa

SEQ ID NO: 291508 - DNA, 430 bp, Unknown
  Bacterial polypeptide expressing nucleotide sequence isolated from the Sargasso Sea
aagagagactaagaataaaattggtgaagagcagttcaaaaaatataggaggtcttgggatatagctcctcctccaatggaagaaaaaagtgagtaccaaaatttgttcagtccactaaatgctagtatacctacaggtatgaaaccgtttacagagtctttaaaaaatacttttgacagggtagtgcccttttataaaaatgaaattaaaaaaaaccttatagaaaataaaaatgttttaatttcagcgcatggaaactcccttagagctttatgtaaatatttattcaatatttcaaatacaaaaattaacgaattggaaataccaacaggtaatcctttgattattgaatttggagataatttaaaagttgaaaaatattattatttagataagtcaagagctaaagatattttttttaatcagtaa

SEQ ID NO: 291509 - DNA, 140 bp, Unknown
  Bacterial polypeptide expressing nucleotide sequence isolated from the Sargasso Sea
cggcaattcattaagagctttagtaaaatttattgaagaaatctctgaagaggaaatagtgaagttagaaattgctacaggcgaaccgattttttatgaattcaatgaaaacaaattgcaaagaaagctcaactggtaag

SEQ ID NO: 291510 - DNA, 302 bp, Unknown
  Bacterial polypeptide expressing nucleotide sequence isolated from the Sargasso Sea
acccaaaaataaaattcctttgacagaatccttaaagaatacatatgaaagagttattcctttttatgatattgaaataaataagaatttgaaaaatggaaaaaatattttgatatcagctcatggaaattcattgagagcattgtgtaaatatctctttaaaatttcagacacaaagattaatgaactagaaattccaacaggaaatccactaataatcgaatttgataatcaattaaaaattcaaaaatatttttatttagatgcttctagggcaaaaaaaataatatttaatcaataga

SEQ ID NO: 291511 - DNA, 308 bp, Unknown
  Bacterial polypeptide expressing nucleotide sequence isolated from the Sargasso Sea
tgaaaaatttgggaaggaacaagtacatatttggagaagatcatttgatatatctcctccaaatggtgaaagtttaaaaaatgttcttgatagagtttctccttattttaaagaaaaaattaaacctcttttagacaaaaataaaaatatactaattgcagctcatggtaactctttaagagccttgatgattgagcttgaaatatataaaccagaggaaatttcttctattgaactgcctacaggttcaccgttatgtattaatttagataagggaaaattagttgattttttttatctcaattaat

SEQ ID NO: 291512 - DNA, 112 bp, Unknown
  Bacterial polypeptide expressing nucleotide sequence isolated from the Sargasso Sea
atgagtattttaattttagtgagacatggtcaaagcacatggaatcttgaaaaaagatttactggttgggttgatgtagatcttacagagattggaaaatcagaggcggaaa

SEQ ID NO: 291513 - DNA, 213 bp, Unknown
  Bacterial polypeptide expressing nucleotide sequence isolated from the Sargasso Sea
ttaaagaaaataaaaacgttttaatatcagcccatggtaattcactaagagcactatgcaaatatctatttaatatctcagatcaaaagataaatgaactagaaattccaacaggaaatcctttagtaattgaatttgataacaatcttcagactctaaaatattattatctggatgaagctagagctaaaactattatttttaatcagtaat

SEQ ID NO: 291514 - DNA, 205 bp, Unknown
  Bacterial polypeptide expressing nucleotide sequence isolated from the Sargasso Sea
atgcctttatcaactaaacgccgtcccgttgtcctttgtatcctggacgggtgggggtggcgaccagaagtgtctgagaacgccatcgctttagcctccaccccgatattcgatagattgatgagcgaatgccctactgcgtttttacaaacctgtggaatagatgtcgggttaccagacgaccaaatggggaattcagaagttg

SEQ ID NO: 291515 - DNA, 631 bp, Unknown
  Bacterial polypeptide expressing nucleotide sequence isolated from the Sargasso Sea
ctaactgctcaaggtaagttggaagcttgtaaagctggagagctaatcaaagatttaaaaattgaaattagtcatttctattcatcatatcaagctagagctattaatactttaaaactaatattaaatacgattagggtacaagataggaaattcataaaagcatgggagctaaatgaaaggcattatggtgagcttacaggacttaataaagatgagatgaaaaaaaaatttggtgaagaagaaatatttaagttgagaagatcttgggattatcctccaagaccattgagtaagaataatccatatcatccaatgaatattgagacttataatgacatccctagagatagattgcctgatacagagtcattgagagatacatacaatagggttgttaaattttacgatgaaactataaaaaaaaatttaaatacaaatatattaatagctgctcatggaaattctataagagcattatgtaaatatttatttaatttagataataaagaaatttctaaattagaaattccaactggaaatcctttattgattgaaacagataatcataaagtaaaacgagctagatatttagataattctagagcaaaagatttgcttaaattttagt

SEQ ID NO: 291516 - DNA, 310 bp, Unknown
  Bacterial polypeptide expressing nucleotide sequence isolated from the Sargasso Sea
aatgggggagaagaacaggttcatattttggaggagatcttttgatgtttcaccgccaggtggggagagtttaaaagatacggcggaaagagtattaccattttttaatatctcaatcctgccgaaaatcatagaaggtaaaaatatattagttgctgctcatggaaattcactcagatctttggtgatgcagcttgataatttatcaaaggaagaaatagtatctctagaaattccaacaggtgcgccaataatctactcctttgaagctaatgaatctccaacttataaagagaacctttttgaataa

SEQ ID NO: 291517 - DNA, 562 bp, Unknown
  Bacterial polypeptide expressing nucleotide sequence isolated from the Sargasso Sea
tgatcattatttttcttctgttcaattaagagccaacaacacattaaaaataattcaagaagaattaaaggataataaagctcctactgaagcatgggaattaaatgaaagacattatggtgcgcttactgggcttaacaaggatgaaatgaagataaaattgggagaagataaggttcatcagttcagaagatcctgggatttgagacctgatcctcttaacaaagaaaacccataccatccatcaaatatagaaatttataaaaatatacctaaagataaaatccctagtacagaatctcttaaagatacatatgaaagagtaatagatttttataaaaagaaaattgaaatcgtaaatgataaaaatattttaatatctgcacatggaaattctattagagctctttgcaaatatctatttcatttagataatggtgaaatatcaaaattagaaataccaacaggtaatcctttacttattgaattaagtaatgagaaaaaaattacaagtgccaaatatttggactcagatagggctaaagatcttttagttttttga

SEQ ID NO: 291518 - DNA, 196 bp, Unknown
  Bacterial polypeptide expressing nucleotide sequence isolated from the Sargasso Sea
atgaacaaacttgttttacttaggcatggccaaagtcagtggaatttagaaaataaatttactggctggaaggatgttccattaactgaaaaaggtataaatgaagcaaataatgcaggcattttattaaaaaaaaataatataaaaattgataaaatttttagtagtgttttagaaagagcaaataaaacagcag

SEQ ID NO: 291519 - DNA, 470 bp, Unknown
  Bacterial polypeptide expressing nucleotide sequence isolated from the Sargasso Sea
tatgaatttagtttttgtacgccacgggcaaagtatatggaatttaaaaaataaatttacaggctgggtagatattggcttaagcgatcaaggaatacaagaagctattaatgcaggtaaaacgctaatagaaaataattttatgcctgaaatttgttttacatcttacttaagtagatctatagaaacctcaaataatttattaaatgagtatgaaccaactcttgttaacgaaataaacatttttaaaagatggcaattaaatgaaagacattatggagcattacaaggtttggacaagatagacactgcaaaaaaatatggtgaaaagcaagtcctcgagtggaggagagggtataaaacaaaaccaccattaattaaaaaagattcaaaatttgatccaaatcatgacaaagcttatgaagatattgaaattactttaccattaggggagtcactagaagatgtag

SEQ ID NO: 291520 - DNA, 88 bp, Unknown
  Bacterial polypeptide expressing nucleotide sequence isolated from the Sargasso Sea
tatgtcatatttatctcttgtaagacacggccaaagtgaatggaatgaaaagaatttgttcaccggttgggagaatccaggcttaaca

SEQ ID NO: 291521 - DNA, 214 bp, Unknown
  Bacterial polypeptide expressing nucleotide sequence isolated from the Sargasso Sea
ttcctatttggaatctgatatcgctccattcataaaatcaggaaaaaatgctttgattgttgcacatggtaattcccttcgtgctcttattaaatatttgaataatatatcggatgaagacatatcaaattttaacattccaactggaatcccattaatccttagacttaacaatgatttaaatacaactcaattctttttcttagattcataa

SEQ ID NO: 291522 - DNA, 562 bp, Unknown
  Bacterial polypeptide expressing nucleotide sequence isolated from the Sargasso Sea
tattattattcatcaatccaacttagagccattaatactctaaaaattatacaaaagcatttaaacgataaaaaaaagtttaaaaaagtttggcagcttaatgaaaggcattatggaatattaacaggtcttaataaaatcgagatgagtaaaaaacttggtgaggaaaaagtacatcaattcagaagatcctgggatctaaggccagatcctttgagcaaagaaagtgaattccacccattgaatattagtacatacaaagaaattccgactaaatttatcccagacgctgagtctttaaaagatacatacgatcgggtaatgagtttttttgagtctgaaataacagataaaattaagaatgccaacatactaatatcagctcatggaaattctataagagcattatgtaaatacctgtttaaacttgatgaaaaacaaattagtaaattagaggtccctactggaaatccattattaataaatattgataaaaactttattatatcagagtgtaagtatttagatcaagaaagagctaaagatcttttagttttttaaa

SEQ ID NO: 291523 - DNA, 663 bp, Unknown
  Bacterial polypeptide expressing nucleotide sequence isolated from the Sargasso Sea
aaaataaatttacaggatgggtcgacgttgaactcgcaccacaaggtaaattagaagcttgtaaagccggcgaattcataaaaaaattaaatttagacatcaaacatttttatacttcttatcaactaagatcgattgatactttaaaactcattttaaatacaatcagagtaaaaccagataatattattaaggcctggcaattaaatgaaagacactacggatcgctgacaggattaaacaaagatgaaatgagaaaaaagttaggagaagaagaagttcacaaattcagaagatcttgggataatccaccaaaacctttaaatataaatagtccataccatccaaaaaatataagtatttacaatgatataccccgtaacctaattccagatacagagtctcttaaagatacttatgaaagagttgtgccctattttattgaaaacatagaaaaaaatttgcaggataatataattatatctgctcatggtaattctattagatcacttttaaaatatttatttaaaattgatgaaaatgaaatttctaaacttgaaataccaacaggaaatcctctacttttgaaatttgaaaaaaagaatataaaagaggctaaatacctagatcagagtagatccagggatttaattaaattctaac

SEQ ID NO: 291524 - DNA, 487 bp, Unknown
  Bacterial polypeptide expressing nucleotide sequence isolated from the Sargasso Sea
tatgagtcatttaattttagtaaggcatggccaaagtgtttggaatttggagaaaaaatttacaggatgggttgatgttgaattaacgccacaaggtaaattggaggcatgcaaagctggtgaattaattaaagaacttaaaatgccatttggtcatttttattcatcttaccaaaaaagagcagtggaaacattaaatttaatactaaacactataagaattaaacaagaaaaaattgttaaggcttgggaattaaatgagaggcactatggatcacttacaggattaaataaagatgaaatgacaaaaatttatggagaaaaaaaaattttagattttcgaagatcttgggataaaaatcctgaacctttaaacaaaaataatccatatcatccaataaatattgagatttataatgatattccaaaagataaaattccagatactgaatcacttaaagatacatatgaaagagtaattccatat

SEQ ID NO: 291525 - DNA, 610 bp, Unknown
  Bacterial polypeptide expressing nucleotide sequence isolated from the Sargasso Sea
gaagcctgtaaagctggggaattgataaaagaacttagattaaatatagatttctttttctgctcttatcaaaaaagggctatagaaacattaaatttagttttgaatacacttagaattaaaaataataatattattaaatcctgggaattaaacgaaaggcattacggatcccttacaggtttaaataaagatgagatgaaaagaaaacttggagaaaaaaaaattcaagaatttagaagatcttgggatattgcaccagaacctttaaatcaaaatagtccatatcatccattaaatattgaaatttataaaaatgtaccgagagataaaattccagatacagagtcactcaaagatacctttgagagagtaacaaaatattacgaggaaaagatatctgataaaatagaaaaaaatataattatagccgcacacggtaattcaattagagctttgtgtaaatatttatttaaaataagtgaaaaagatatttcaaagcttgagataccaactggaaatcctctgttaatagaatttgaaaataacagtgttaaaaatgctagatatctcgacaaggaaagagctcaagatttaattaatttttagt

SEQ ID NO: 291526 - DNA, 532 bp, Unknown
  Bacterial polypeptide expressing nucleotide sequence isolated from the Sargasso Sea
aatggaggcaaagaatgcaggccttttactaaaaaaaaataatatcaatattgataaagtatttagtagtgttcttgaaagagctaataaaacagcagaaattgcaataaaagcatctggaataaaaaatctttataaaaatgatttacttaattatcaaagagataaacgacttaatgagcgagattatggtgatttagtaggtttaaataaagatgaaacagcagataaatttggaaaagaacaagttcatatctggagaagatcatatgatatacccccaccaaatggagaaagtctcaaagatgtagttgatagagtctcgccatatttttctgaaagtataaaaccttttatcttggataaaaaaaatattttaattgcagctcatggtaattctttaagagctattatgattaaagttggtatgtacaagcctgaagagatatcatcaattgagctcccaactggtagtcctttatgcttaaattacgataatggtaaactaaaagaatactactatttagattaa

SEQ ID NO: 291527 - DNA, 430 bp, Unknown
  Bacterial polypeptide expressing nucleotide sequence isolated from the Sargasso Sea
aaagaagatatgaagaaaaaatatggagaagagaaaatccatcaatttagaagatcatgggatgtcaaacctggagctttagataggaaaagcccctaccatccgctcaatatagaaacttataaggatattccagtgtctgatattccagatactgagtcattaaaagatacccataaacgggtagtggattgttataatgaattaatcttaaaagatcttcaaaatggtaaaggtgtatgcatctcagcccatggaaattctttaagagctctatgcaagtatctttttaaaatcaatgagagggaaatttctaaaatggaaataccaactggaaatcctcttttaataatttttgaggacaaacttcagatttcatctgtaacatatcttgatcaaggaagagccaaaaatttagttgctttttaga

SEQ ID NO: 291528 - DNA, 520 bp, Unknown
  Bacterial polypeptide expressing nucleotide sequence isolated from the Sargasso Sea
aatgacagaagtattgataataacaaaattataagagatttagtaataaaactaaaagacaatggcaaaaaatgccacttaattgggcttctatctcatggaggagttcactctaaacaatctcatattctagagcttgcaaaaatattatctgatcataatattaaaacagatattcatgctattcttgacggccgagatagccccccaatgagtgcttataaacttttaaatgaatttatagatcaactcccaaaattgacaaaaattgtttcaatatcaggaagatactttgctatggatagggataatagatgggaaagaactgagctctattacaattctttatttggtattaattcaaataaatttaaatcaccattagatttaatcaaggatttttatgataaaaaaacatatgatgaatttatacctccttgtattcacgaaaattacgtaggaatacaagacggagatggattgttagtagctaattttagagcagatagagtaaggcaaa

SEQ ID NO: 291529 - DNA, 370 bp, Unknown
  Bacterial polypeptide expressing nucleotide sequence isolated from the Sargasso Sea
catagcacctcctcctatggctaaagatagtaaataccttgaaaatttcagtcctttaaacagtggaattcctcaaaataaaattcctttaaccgagtctttaaagagtacttatgaaagagtaatcccttattatgataatgaaataaataagaatttgaaaattggaaaaaatattttgatatcggctcatggaaattcattaagagcattgtgtaaacatctctttaagatttcagatacaaagattaacgaactagaaattccaacaggaaatccactaataatcgaatttgataatcaattaaaaatacaaaaatattattatctagataattctaggtcaaaaaatatcatttttaatcaatag

SEQ ID NO: 291530 - DNA, 244 bp, Unknown
  Bacterial polypeptide expressing nucleotide sequence isolated from the Sargasso Sea
cctttcttcgatgatgaaattaaaaaaaatttgaaaagtggaaaaaatattttgatttcagcccatggaaattcactgagagccttatgcaaatatttatttgaaatttcagatacaaaaataaacgaacttgagatacctacgggaaatccaatggttattgaatttaataaaaaattaaaaattcaaaaatactactatctagacaagtcaagagctaaagatataatttttaatcaatagt

SEQ ID NO: 291531 - DNA, 172 bp, Unknown
  Bacterial polypeptide expressing nucleotide sequence isolated from the Sargasso Sea
atgaatctaattcttttacgacatggtgaaagtcaatggaaccttgaaaatagatttacaggttgggaagacattgatcttacggaaaaaggaattgaagaagctactttttcaggacatcaaattaatttagccaatatccaaattagtagtattcatacatctttatgaa

SEQ ID NO: 291532 - DNA, 421 bp, Unknown
  Bacterial polypeptide expressing nucleotide sequence isolated from the Sargasso Sea
aaaagaaaattgggtgaagaacaatttaaaaagtatagaagatcttgggacgtagcacctcctctcttagctaaagatagtaattaccttgaaaatttcagccctttaaacagcggaatacccaataacaaaattcctttgacagaatccttaaagaatacttacgaaagagtcattcctttttatgatatggaaataaataagaatttgaaaaatggaaaaaatattttgatatcagctcatggaaattcattgagagcattgtgtaaatatctctttaagatttcagacacaaagattaatgaactagaaattccaacaggaaatccactaataatcgaatttgataatcaattaaaaattcaaaaatatttttatctagatgcttcaagggcaaaaaaaataatatttaatcaataga

SEQ ID NO: 291533 - DNA, 569 bp, Unknown
  Bacterial polypeptide expressing nucleotide sequence isolated from the Sargasso Sea
attaaatattgatatgtattattgttcatttcaattaagagcaaaaaatacacttaaaataattcaagatgaattaaatgatcataaagagattaaagaagcctggcagttaaatgaaagacattatggtgctcttacaggcttgaataaagatgaaatgaagataaaaataggagaagaaaaagtccaccaatttagaagatcttgggatttaagaccagacccactagaaaaaacaaacctttttcaccctttaaatatcgaaacatacaaagaaattcctagaaataaaattccagatacagagtcattaaaagatacttatgagagagttattgaattttataaaaatgaaatagaaataaataatggtaaaaatattcttatttctgcacatggaaattctataagagctctttgtaaatatttatttattttagacaataataaaatatctaaacttgaaattcctacaggtaatccactgttaattgagtttgaaaataataaaatttctaagtgcaaatatcttgataaagaaagagctaaagatcttttagttttttaaa

SEQ ID NO: 291534 - DNA, 964 bp, Unknown
  Bacterial polypeptide expressing nucleotide sequence isolated from the Sargasso Sea
cttcccacgatttggccgatgaatacccgggacctgatcgatcaattcaaggaacgcggtccgctagtgcatgtggttctcgatggatggggcgtggcaccggaaggtcctggaaacgccattgtgcaggccaatctgcctgtttttcaaaaattacgcgggcaaagtgcctacacacaactttggactcatggactgcatgtcggccttcccggaaagaaagaccttggaggttcggaagtgggccacatgaccatgggagccggagtggtgatggaacaggggcccacactgatcaatcatttgatcgactccggagcattgtttgaaactgaagccatgcagatggtaatcgggaacagcatccgtgaaaaggttcccctgcatctgatggggctcctttctgacggaaacatccacagccatatcagtcacttcgaggcagtcatccgacatgctttcagaaccggggtgaagcagtgttatgttcatgcattgcttgatggtcgggatgtgctggtccaatctgcccatgaatataccgagcggttggaagctttatttcgggagttgaggcaacaggatcccgaatgcgattatgcatttgccagcgggggtggcagggaaaccgtgaccatggaccgcgataataactggagtaaaatcgaattgggatggaagattcatgtggaaggaaaacatgaaaatagctttccaagcatttcagatgcgatcgagcattttcggaaattgaacccgcaggtcatcgatcaggatctcccggcattcgtaatcacccaaaatggaaaaccggtagggccaatcgaagaccggcattctgtgatcttcatgaatttccgtgctgaccgtgccatcgaattcagtgaagcgatggtccgggaggatttttcgcactttccccgagatcctttccccacgtgtctgttttgcgtcgatgatgcag

SEQ ID NO: 291535 - DNA, 718 bp, Unknown
  Bacterial polypeptide expressing nucleotide sequence isolated from the Sargasso Sea
catgaagaccactatttttgaattaataaaatacttaaaaaaaaataatttaagatttttattacatatgattttagatggtagagatacttctccaaaaaatgcattaaataatttaaaaaaaataaaatttttctttggtgacttagattttgttgtatctatatctggaagatattttgcaatggatagagatcaaagatggaatagaacagagaaattttacagaactatagtttatagagaaggagaaaaatttgatgatcctgaaacgttcatcaaaaagcaatatagtaaagaaattaatgatgaatttgttaaaccatctgtttctataaactatactggaatagattataaaagggatggtgtaatttttatgaattttcgttctgatagaatgagacaaataacccatgctttatgtgatgaaaatttcaaaaatttttttactgatagaaagcctatttttatttcagcaataagtttggtttcttattcaagtagtcttgaaaaatttgtagaaactttatttccaaaaattgacattaaaaatacgcttggtgatgttttgtcaaaaatggatttaaaacaattaagattatcagaaacagaaaaatatgctcacgtcacatatttcttcaattgtgggaatgaaaaaattttaaagggagaggataggatattaattaatagtccaaaagttatgacttatgat

SEQ ID NO: 291536 - DNA, 124 bp, Unknown
  Bacterial polypeptide expressing nucleotide sequence isolated from the Sargasso Sea
aatgaaacttattcttttacgccacggcgagagtcagtggaatctagaaaatcgatttacaggatggaaagatgttgatttaacaaagaatggagttgaggaagcggaatttgctggcaatcaa

SEQ ID NO: 291537 - DNA, 302 bp, Unknown
  Bacterial polypeptide expressing nucleotide sequence isolated from the Sargasso Sea
catgaatctagttttaatcaggcacggtaaaagtgtttggaatttagaaaataaatttactggatggtatgatattgagttagctccagagggtgttattgaagctgaaaaagctgcatcttttttagcagataatgaacttaagctagacgtgtgctttacttcatatcttcaacgagcaaataagactctcgaaattatcttaaatcatatgccagtaaagatggttaaagatattgaaattattaagtcgtggaaacttaatgaaagacattatggggcgttacaaggtcttaataaga

SEQ ID NO: 291538 - DNA, 343 bp, Unknown
  Bacterial polypeptide expressing nucleotide sequence isolated from the Sargasso Sea
aatgagttatttaattttagttagacatggtcaaagtgtatggaatcttgaaaagaaatttactggatgggttgatgtagatctaacagaaaatggaaagtcagaggcaaaaaaggctggtgaattaataaaacaagaaaaaattgaagttaatctgtattactcgtcttttcaattaagagctaaaaataccttaaaaattatacaggaagaactgcaagattttaaagaagtaaggagtgcatgggaattaaatgaaagacattatggcgctctcactggattaaataaagatgaaatgaaaaaaaaactggagaagataaagttcatcaatttagacgtt

SEQ ID NO: 291539 - DNA, 168 bp, Unknown
  Bacterial polypeptide expressing nucleotide sequence isolated from the Sargasso Sea
ctggaaaaaatgtacttatatctgcgcatggaaattctctgagggctttaaggaaatatttagaaaacttttcagaagatgaaatagtaaatatagaaataggtactggagaaccaatattttatacctcgacaaatggagatatcaaaaaatatgattgggtctgaa

SEQ ID NO: 291540 - DNA, 544 bp, Unknown
  Bacterial polypeptide expressing nucleotide sequence isolated from the Sargasso Sea
aatgaacaatctaattttagttcgtcatggacagagtttttggaataaagaaagaagatttacaggttgggctgatatcggtttaaccgagcagggtaaatcagaagctagatacgctggacaattaattaaagaattgcatattgaatttgatgcctattttacatctgttcaaaaaagggcgatcaatacaatagaaataattttaggcgtcttaaataaaggaaattcagaaatcaaaaaatcttgggaattaaatgaaagacattatggagcattaactggtcttaacaaagatgaaatgatgaaaaaacatggaaaaaaacaagtccacatttggagaagatcttttgacgtgcctccacctcctatggaaaaaacaaacccaaatcacccttctaaaaataaagcctatataaacattccaactaacaaaattcccaattgtgaatctttaaaaaatacttttgatcgagttatacctttttatgaaaaaaatataaaaccaatactttcctctaataaaaatattttgatttctgct

SEQ ID NO: 291541 - DNA, 472 bp, Unknown
  Bacterial polypeptide expressing nucleotide sequence isolated from the Sargasso Sea
aatgcatggggaattaaacgaaagacattatggcgctctcacaggattaaataaagatgaaatgaaagtaaaactcggagaagaaaaagttcatcaatttagacgttcttgggatcttaggcctgaacctctagataaaaaaaatccatatcatcccctaaatattgaaacttacaaagaaattcctttagaaaaaattcctgacactgagtcactaaaagatacatatgaaagagtaataaaattttattgtaaagagatagaatgcaaaacaaatgaaaatattctcatttctgctcatggaaactccattagagctctttgcaaacatttgttcaatttagatgacaatgagatctctaaacttgaaattcctacaggaaacccacttttaattgaattagaaaacagcaaaatttctagttgcaaatatcttgatcaagaaagagctaaagatcttttagttttttaa

SEQ ID NO: 291542 - DNA, 118 bp, Unknown
  Bacterial polypeptide expressing nucleotide sequence isolated from the Sargasso Sea
atgagtcatttaattttagtaaggcacggtcaaagtgagtggaatttagaaaaaaaattcactggatgggtagatgttgaactaacaccaaatggtaaattagaagcttgcaagtctg

SEQ ID NO: 291543 - DNA, 439 bp, Unknown
  Bacterial polypeptide expressing nucleotide sequence isolated from the Sargasso Sea
aatgagttatttaattttagtaagacatggccaaagtatttggaatcttgaaaaaaaattcacaggctgggttgacgtagacttgaccgaaaatggtaaatctgaagctataaaagccggtgaacttataaaaacgaaaaatataaatattgatatttattattcatcttttcaattaagggcaaaaaacaccttaaaattaataaaacaaacactgcaagatacaaaagtttcaaaagaggcttggcaattaaatgaaaggcactatggatccctgacaggtttaaataaagatgaaatgaaattaaaacttggtgaagaaaaagttcatcaatttaggcgttcttgggatttacgaccagacccattagataaaaaaaatcctcatcatcctataaatattgatgcctataaagaaataccaattgataaaatccag

SEQ ID NO: 291544 - DNA, 205 bp, Unknown
  Bacterial polypeptide expressing nucleotide sequence isolated from the Sargasso Sea
aataaaaatattttaatttcagctcatggaaactccctaagagctttatgtaaatatttatttaatatttcggatacaaaaataaatgaattagaaataccaacaggtaatccgctattaattgaatttggtgataatttaaaaattgaaaaatattattatttagacaagtccagagctagggatataatttttaatcaataat

SEQ ID NO: 291545 - DNA, 523 bp, Unknown
  Bacterial polypeptide expressing nucleotide sequence isolated from the Sargasso Sea
aaatactttaaaaataattcaggaagagttgcaagattttaaagaggtaaagagtgcatgggaattaaacgaaagacattatggggccctgacaggattaaataaagatgagatgaaaaaaaaacttggagaagaaaaagttcatcaatttagacgttcttgggatcttagaccagaccctttagataaaaacaatccatatcacccaattaatattgtaacatacaaaggaattcccttagaaaaaatacctgatactgagtcacttaaagacacatatgaaagagtaataaaattttataacaaagagataaaaaacaaaacaaatgaaaatattctcatttctgctcatggaaactcaataagagctctttgtaaacatttgtttaacttagataacaatcaaatttctaaacttgaaatacctacaggaaacccacttttaattgaattagaaaacagcaaaatttctaattgcaattatcttgataaagaaagagctaaagatcttttagttttttaa

SEQ ID NO: 291546 - DNA, 471 bp, Unknown
  Bacterial polypeptide expressing nucleotide sequence isolated from the Sargasso Sea
tatgaatcttgtatttatacgacacggtcagagcctctggaatttagaaaataaatttacaggatgggttgatatagatttgtctgaaaggggtgaagttgaagcaaaaactgctggtgttaccttgattgataataacttttatccagaaatttgttttacctcttatttaaaacgatcaattaatactgctgcccatatcgttgaaagctataaaaaaatgaatattacttttgaaaatgtgaaaaagtgggagcttaatgaaagacattatggagctctacaaggcttagataaaattgaaacagcaaagaaatatggacaagaacaagtacaaatatggagaagaagtttcgatacatcacctcccatggcagagaaaaattcagaacatgatccaaaaactcatgaattatataatgatattgaatcaaagcttccactaggtgaatctttaaaagatgttgtttt

SEQ ID NO: 291547 - DNA, 432 bp, Unknown
  Bacterial polypeptide expressing nucleotide sequence isolated from the Sargasso Sea
caggtttaaataaaaaagagatggaagacaaatttggaagtgaccagatttttaaatggagaagatcttgggatgtagctcccccggatattgaagcggataacccttactatagtaaaatacttgacagtcataaaaatataccagaaaaaaaaataccaagatcagaatctttgaaagacacttttaacaggtcagtgccttattttgaagaaaaaatttacccattaattgagaaaaataatattattatttcggctcatggtaactcattaagagcattatataaaaaaatttttaatatctctgaacaagatatttgcgaactgaatattccgactggcaatccacttttaattgaattcaaaaatttaaaagaaattagaaatttccaatatttagacaaaaatagagagaaaaaaataatataag

SEQ ID NO: 291548 - DNA, 437 bp, Unknown
  Bacterial polypeptide expressing nucleotide sequence isolated from the Sargasso Sea
aaacaaagaagagactaaaaagaaaattggtgaggaacaatttaaaaaatatagaagatcttgggatatacccccgccaccaatggctgagactgataaaaatcaatccttatttagtcctttaaacgcaaatatacctttaggcatgataccttttacggagtccctaaaagatacttataaaagagtaattccttattatgaaaaagagattcaaaaaaatattaaggaaaataaaaacattttaatatcagctcatggaaactcactaagagcactatgtaaatacctatttaaaatttctgatcaaaagataaatgaattagaaattccaacaggaaatcctctaataatcgaatttgataataatcttgaaattaaaaaatattcttatatggatcaaactagagctaaaactattatctttaatcagtaat

SEQ ID NO: 291549 - DNA, 114 bp, Unknown
  Bacterial polypeptide expressing nucleotide sequence isolated from the Sargasso Sea
gatgagttatataatacttataagacacggacagagtgtatggaatcttgaaaatagatttactggatgggtagatgttgacttaaatgaaaatggaagaaatcaggcaagaaa

SEQ ID NO: 291550 - DNA, 82 bp, Unknown
  Bacterial polypeptide expressing nucleotide sequence isolated from the Sargasso Sea
atgagtaatttaatattagtaaggcatggacaaagtgtatggaacttagaaaacagatttactgggtgggttgacgttgacc

SEQ ID NO: 291551 - DNA, 178 bp, Unknown
  Bacterial polypeptide expressing nucleotide sequence isolated from the Sargasso Sea
aatgccgggctgtttccttgccccctcagacgcagagcgagccagttcaatgagtgccacgccaaaacccttggttctgatcatcctcgacggcttcggtcacagcgacaaacccgagtacaacgccatccacgctgccagcacgccggtctacgaccgcctgcgcgccacctacccg

SEQ ID NO: 291552 - DNA, 307 bp, Unknown
  Bacterial polypeptide expressing nucleotide sequence isolated from the Sargasso Sea
agatgagtgcttggcagagattctggcggtagttgatgagcatccggagtgggttgtccttgtgaccgctgatcacgggaactgcgaagtgatgatcgattcgtccggaagggtacagactgcacacacgacgactcccgttgacttgatgttttatgacccactgggtggtgacgcgtcgcttgctcacgaaggaagacttggagatgtcgcaccgactgtgctgggtcagatgaagatagaccagccaccggagatgacgggtcgtgatctggttaccaggccggatattctggagactgactga

SEQ ID NO: 291553 - DNA, 676 bp, Unknown
  Bacterial polypeptide expressing nucleotide sequence isolated from the Sargasso Sea
ttgagcttcttaattttagttagacatggaaaaagtttgtggaacgaagaaaacagattcacaggctggacagatatagatttatcaaatgctggaataattgaagcaaaagaagcagctaaaaagatcaagaagaaaaatatacaaataagtatggcttatagttctatattttctagagctcacgacacatgcaaaataatattagatgaactaggattatcaagtttacaaataataaaagattggcgcattaacgaaagacattatggaaatttacaaggattaaataaaaaagaaacatcggatatatatggtaaagagcaagtatttgaatggagaagaaactatactacgaaaccacctttattagaagaaagtagattcataaatgataaatctttaccaatatttaaggaaattccaaaaaataagttcccaagaggagaatcattaaaagatactcttggcagagtagaagtattctgcaaagaaataatatacaacagtctagaaaatgaaaaaaatatacttatttcagctcatggtaacagcataagggcaatgataaagttattcgaaaatattgatgatgaaagtatagataaattagaggttccaactggagaacctatattctacaaatatcaatctaagaagttattaagaaattaat

SEQ ID NO: 291554 - DNA, 628 bp, Unknown
  Bacterial polypeptide expressing nucleotide sequence isolated from the Sargasso Sea
ttgacagaaaatggaaaatcagaggcaaaaaaagctggtaaattaataaaacaggaaaaaattgaagttaatctatattactcttcttttcagctaagagctaaaaatactttaaaaatcatacaagaagaattgcaagattttaaagaagtaaagagtgcatgggaactaaacgaaagacattatggtgctctgactggattaaataaagatgaaatgaaagaaaaacttggagaggaaaaagttcaccaatttagacgttcttgggatcttagacctgaccctttagataaaaaaaatccatatcatccgctaaatattgaaacttacaaagaaattcccttagaaaaaattcctgacactgagtcgctaaaagatacatataaaagagtattaaaattttatagtaaagagatagaatacaaaacaagtgagaatattctcatttctgctcatggaaactccattagagctctttgcaaacatttgttcaatttagataataatgagatctctaaacttgaaattcctacaggaaacccacttttaattgaattagaaaacagcaagatttctaattgcaaatatcttgatcaagagagagctaaagatcttttagttttttaaa

SEQ ID NO: 291555 - DNA, 235 bp, Unknown
  Bacterial polypeptide expressing nucleotide sequence isolated from the Sargasso Sea
tatgtcaaagattagcagcaaaaatataaaaagtttaagtgttcctcagagccctgtagttcttgcaatactagatggctggggatatcgaaaagaaaaatcagataatgctataaaaagtgccagtacaccaatcatggactcattatggcatgcttacccccacacccttataagtgctagtggatctgatgtaggcctaccagatggtcaaaaatgggcaattcagaggtag

SEQ ID NO: 291556 - DNA, 331 bp, Unknown
  Bacterial polypeptide expressing nucleotide sequence isolated from the Sargasso Sea
atgaagctcgaaataaatgggggtgatgaacaagttaagctatggagacgttcctatgatattgccccagaaaatggggaaagtctgaaagatacatgcaaccgtactatcccgtactcaaagaaaaatatacttcccaaattacatgatggtgaaaatgtcattattaccgctcatggtaactcacttagatccataataatgcatgtggaagatttaagtgaggaggcaattgtgaatgttgaaataacaactgggataccaattgtttatgaatatgaaaataagaaaataatcaaaaaaactgagttatttgtaaaaagatattaga

SEQ ID NO: 291557 - DNA, 634 bp, Unknown
  Bacterial polypeptide expressing nucleotide sequence isolated from the Sargasso Sea
cttacagatcagggtaaaattgaggcagaaaaagctggtaatttaattaaagaaaaaaaaatagtcattaattatttctattcttcattacaattaagggccaataaaactttggaaataatccagtctattctaaatgaaaaaaaaggctttaccaaagcatggcaactgaatgaaagacactatggagccttaacaggtttaaacaaagttgaaatgataagaaaacttggagaaaaaaaagtacatgaatttagaagatcctggaatattagacctgaaccattaaataaagaaagtccctatcatccaaaaaatattgaaacttacaacaatattccaaaagaaaaaatacccgatactgaatctttgaaggatacttatgaaagagtaataagtttttataaacaagaaattagggataaattaaataaaaataatgtacttatttcagcacatggaaattcaataagagctttatgtaaatatttatttaaattagatgaaattcaaatttctagtttagaaatacctacgggcaatcctcttttaattaatattgaaaatgatcataaaatttttaaaagtgagtatcttgataaaagtagggctaaagatcttttaattttttaaa

SEQ ID NO: 291558 - DNA, 448 bp, Unknown
  Bacterial polypeptide expressing nucleotide sequence isolated from the Sargasso Sea
tctattcttgatagagccattatcactgcagaaattattatcaaaggtcttaatattagagagtatagcctggttaaatgccaagagttgaacgaaagagactatggagatttaactggtcttaataaagatgatgcgagaaagaaatggggagaagagcaggtacatatttggaggagatcatttgatatacccccgccaaatggagaaagtttaaagaataccgcagaaagagtagtaccttttttcttatctgaaatttttactaagctaaagcttgaagaaaatgtatttattagcgctcatggtaattcacttcgttcattaataatgcatattgagaatttatcttcagaacaaatccttgagagagaaatcgcaacaggtaaaccacttgtatatgaatttgatccatcaaaagaactatattctctaaagtatgaataag

SEQ ID NO: 291559 - DNA, 318 bp, Unknown
  Bacterial polypeptide expressing nucleotide sequence isolated from the Sargasso Sea
aatgaatctaattttaataagacatggtcaaagcgagtggaatgccctaaatcaatttactggatggaaggacccagatcttacggcaacaggtattcaagaggcgcataatgctggaaagataataaataaccttaaaattaattttgacttagccttcacatctgcattaataagagctcagaacacagctgaaataattctcaaagaaataaatcaatcattatcaaccataaaaaatcaggctctcaatgaacgaaactatggagaccttgcaggccttaataaggatgacgcaagaaaaagatggggtgatga

SEQ ID NO: 291560 - DNA, 482 bp, Unknown
  Bacterial polypeptide expressing nucleotide sequence isolated from the Sargasso Sea
gatgagttatttaattttagttaggcatggacaaagtatatggaatctagagaaaaaatttacaggatgggttgatgttgatttaactgaaaatggaaaattagaggccaaaaaggcaggtaatttgattaaagaaaaaaaaatcaaaattgatctatattactcatctgtacaattaagagccaaaaatacactaaaaattattcaagaaattttacaagacacaaaattttcaaaaaaagtatggcagcttaacgaaagacactatggagctctcacgggtttaaataaagatgaaatgaaaaaaaaactaggtgaggataaagtccatcaatttagacgttcatgggatttacaacccgaaccattaaataaagataatccataccacccattaaatattgaaacctataaagatgtaccaattaacaaaattccagatacagagtcacttaaagatacttatgagagagtattagaat

SEQ ID NO: 291561 - DNA, 343 bp, Unknown
  Bacterial polypeptide expressing nucleotide sequence isolated from the Sargasso Sea
tctgcaaggcctaaacaaagatgaatgtagagaaaaatggggggaagaaaaagtccaaatgtggagaagatcatatgagatgggtccgccaggcggagaaacattaaaagaaactggagaaagggttattccatattttaaagaagaaattaaccccttaatattaaaaggtaaaaatatattgatagcagctcatggtaattctttaagatcattaataaaatttttagatagtgtttctgatgaagatattgtaaaacttgaaattcctacaggcgctcctattcattatatttttaatgaagatggagatatcattaaaaaacaagaccttatagattaa

SEQ ID NO: 291562 - DNA, 364 bp, Unknown
  Bacterial polypeptide expressing nucleotide sequence isolated from the Sargasso Sea
tatgaaaccaactatactttgtataatggatggctggggggtagggccaaatacgaaatataacgctatcgcccaagcgaacacgcctatttttgaccgcttaattaaacaatggcctaacagtttaatgcaggcttcaggcgaatatgtggggctcccccatggccaaatgggtaactcagaggttggtcatatgaacataggcgctggccgtatcgttgtccaagaccttccgaagatcaatcaagttatccaatcggacaagctatctgaaaataatatattgaagaagtttatttccgataccaaaaaagctaaagggaaatgtcatttagttggattactttcaaccaggtggggtaca

SEQ ID NO: 291563 - DNA, 231 bp, Unknown
  Bacterial polypeptide expressing nucleotide sequence isolated from the Sargasso Sea
aatgatatcaaaaaaaaatgaacaaactattttatgtattttagatggttggggaatttcaaaaagagttaaaggtaatgctataaaattagcaagaacacctaattttgataatttggtaaataattgcccaaatgccactctagttacacatggacccttagttgggttaccagaaaatcaagtaggaaattcagaagtaggacatatgaatctaggagctggaaggaa

SEQ ID NO: 291564 - DNA, 541 bp, Unknown
  Bacterial polypeptide expressing nucleotide sequence isolated from the Sargasso Sea
atgagttatttaattttagtaagacatggccaaagtgtatggaaccttgaaaaaaaatttactggatgggttgatgtagatttaactgaaaatggaaaactagaagcaaaaaaagcaggtcagttaataaaacaaaaacaaattgagattaatctttattattcatcctttcaattaagagcgaaaaataccttacaaattatacaaaaagaattgagggattttaaagatgtaaagagtgcttgggaattaaatgaaaggcattatggagcactgacaggattaaataaagatgaaatgaaaaaaaaacttggggaggataaagttcatcaatttagacgttcttgggatcttagacctgaccctttagataaaaaaaatccataccatccaataaatattcaaacctacaaagaaattccattagaaaaaattcctgatactgagtcattaaaagatacatatgagagagtaataaaattttataaccaagaaatagaaaacaaaacaaatgaaaatattcttatttctgctcatggaa

SEQ ID NO: 291565 - DNA, 274 bp, Unknown
  Bacterial polypeptide expressing nucleotide sequence isolated from the Sargasso Sea
atgtctcactcaaaaaaaatttcaactttagttcttgttaggcatggacaaagtcattggaataaagaaaacttattcacaggttggaaagatccagatttgactgaaaaaggaattgaagaggctattaatgcaggtaaaaaaataaaacaaactaacattaattttgacttacatttcacttcaaaactaaaaagagctcaaaggacaggcaatctcatcatgaaagagcttggagaagatgtccccacgtctgaaaataaagcccttaacg

SEQ ID NO: 291566 - DNA, 621 bp, Unknown
  Bacterial polypeptide expressing nucleotide sequence isolated from the Sargasso Sea
atggtaaatcagaagcaaaaaaagcgggtgaattaattaataaaaataacctattaattgatctttatttctcctctgttcaattaagagctaaaaatacattaaaaattattcaagaagaattaaaggataacaaagttcctactgaggcatgggaattaaatgaaagacattatggcgcgcttactgggcttaacaaggatgaaatgaggataaaattgggagaagataaggttcatcagtttagaagatcgtgggatttgagacctgatcctcttaacaaagataacccataccatccatcaaacatagaaatttataaaaatatacctcaagataagatacctagtacagagtctcttagagatacttatgagagagtaatagatttttacaaaaagaaaattgaaatcctaaatgataaaaatatcttaatatctgcacatggaaactcaattagagctctttgcaagtatctatttgatttaaataatagtgaaatatcaaaattagaaataccaacaggcaatcctttacttattgaattaagtaatgagaaaaaaattacaagtgctaaatatttggactcagatagggctaaagatcttttaattttttaaa

SEQ ID NO: 291567 - DNA, 184 bp, Unknown
  Bacterial polypeptide expressing nucleotide sequence isolated from the Sargasso Sea
atgagtcacttaatacttgttagacatggtcaaagcgaatggaatttagaaaataaatttacaggatgggtcgacgttgagcttgcaccgcaaggtaaattagaagcctgtaaagctggagagtttataaaaaaattaaatttagaaataaaacatttttatacttcatatcaactaagatcga

SEQ ID NO: 291568 - DNA, 175 bp, Unknown
  Bacterial polypeptide expressing nucleotide sequence isolated from the Sargasso Sea
atgcatacacttgttttattaagacatggtgaaagtcaatcgaatcaagacaacctttttactggatggtcagatgttgatcttactgagaaaggagccaaagaagctaaaaattcaggaattttattaaaaaaacataattatcaatttgataaaatatttacttcagtgctta

SEQ ID NO: 291569 - DNA, 115 bp, Unknown
  Bacterial polypeptide expressing nucleotide sequence isolated from the Sargasso Sea
atgagttcattagttctggtgaggcatggaaaaagtttgtggaatttagaaaatagattcacaggttggacagatgtatctctatctaaagagggagaaaaagaagcaaaattag

SEQ ID NO: 291570 - DNA, 316 bp, Unknown
  Bacterial polypeptide expressing nucleotide sequence isolated from the Sargasso Sea
tttactgcagcagtaaaagcggtcgaagtaattgatacctgtctgaaaaaaattataaatgccatcaaagaagttaatggccaacttttagttaccgctgaccatgggaatgtagagcaaatgttggatacaacaactaatcaaccgttaacttcacatacgaaaggccccgttcctctcgtatatgtcggtaacaagaaaatcaagtttaaagcactaggaagcctttgtgatattgctccaactatgctcgctttgatggatatgcctatcccagatcagatgaccggcacagttttagtagaagacacgtaga

SEQ ID NO: 291571 - DNA, 712 bp, Unknown
  Bacterial polypeptide expressing nucleotide sequence isolated from the Sargasso Sea
atgagtcacttaatacttgttagacatggtcaaagcgaatggaatttagaaaataaatttacaggatgggttgacgttgagctcgcaccacaaggtaaattagaagcttgtaaagctggtgaattcataaaaaaattaaatttagaaataaaacatttttatacttcatatcaactaagatccattgatactttaaaacttattttaaatacaattagagtaaaaccaaataatataattaaggcttggcaattaaatgaaaggaactacggatcacttacaggattaaataaagatgaaatgaaaaaaaaactaggagaagatgaagttcacaaatttagaaggtcatgggataacccaccaaaacctttaaatataaatagtccgtaccatccaaaaaatataagtatttacaatgatataccccgtaacctaattccagacacagagtctcttaaagatacttatgaaagagttgtgccctattttattaaaaacatagagaaaaatttgcaggataatataattatatctgctcatggtaattctattagatcacttttaaaatatttatttaaaattgatgacaatgaaatttccaaacttgaaatacctacgggaaatcctctacttttgaaatttgaaaaaaagaatataaaagaagctaaatacctagatcagagtagatctagagatttaattaaattctaat

SEQ ID NO: 291572 - DNA, 276 bp, Unknown
  Bacterial polypeptide expressing nucleotide sequence isolated from the Sargasso Sea
aactaagtgatttagaaattccatctactgagagcctaaaagacacgttaaaccgactacttcctatttggaatcaggatatcgctccattcataaaatcaggaaaaaatgctttgattgttgcacatggaaattcccttcgtgctcttattaaatatttgaataatatatcggatgaagacatatcaaattttaacattccaactggaatcccattagtccttagacttaacaatgatttaaatacaactcaattctttttcttagattcgtaaa

SEQ ID NO: 291573 - DNA, 319 bp, Unknown
  Bacterial polypeptide expressing nucleotide sequence isolated from the Sargasso Sea
atgtcaaaattaattatattaagacacggtgaaagcgagtggaacaaactaaatctatttactggatgggaagatgtaaatcttacagatcagggtaaaatagaagcgaaattagctgcatttgcgatccagaatttaaaggttgatgtgaatcacgcttatacgagcgcactgaagagagccggcaaaacactagaaattgttcttaatgtattaaaaaaagatatcccaataatatcagacccagcattaaatgagagaaactatggcagcttaactggcatgaacaaagatgaagctcgaaataaatgggggtgat

SEQ ID NO: 291574 - DNA, 643 bp, Unknown
  Bacterial polypeptide expressing nucleotide sequence isolated from the Sargasso Sea
ctgggttgatgtagatctagctcctcaaggaaaattagaagcatgtaaggcaggagaacagattaaagaactaaacattaattttaattattttttcacttcattccagaaaagagcaattaatacattaaaacttatattaaatacattaaggataaaaaataaagaggttattaaatcttggcaattcaatgaacgacactatggttttttaactggattaaataaagatgatatgaaaaaaaagtttggagaggatatgatatttaaatttagaagatcctgggattaccccccagaagcattagacaaaagaaatccatatcatccaataaatatatcttcatatgatgaagtacctagaaaattactacctgacactgaatctttaaaagatacatataatagagttatccctttttttaaaaaaaatgttgagattcttgatggtaatattttaatatcagcacatggaaattcattaagaagcatgtgtaaatatttgtttaatattgataaaaatgaaatacctaaattagaaatcccaactggaaatccactcttgataaaatttaaagataaaaaagttatttcggctaactatttggataaagatagaggaaaagatttactagttttttga

SEQ ID NO: 291575 - DNA, 541 bp, Unknown
  Bacterial polypeptide expressing nucleotide sequence isolated from the Sargasso Sea
attaagagcaaaaaataccctaaaaattatacaaaaacaattagatgactataaaaaagttaaatctgcttggcaacttaacgaaagacactatggatctcttactggtttaaataaggaagaaatgaaaaaaaaacttggagaagaaaaacttcaccaattcagaagatcttggaatctaagacctgatccactagagaaaagtaacagttatcatcccctaaatataaatatatataaagatatacctatcgataaaattccagatacagagtctttgaaagatacttatgagagagtaatcaaatattataatgaagaaattgaaaataacctaaaaaataaaaatattttaatttctgcacatggaaattcgataagagctttatctaagtttttatttaatttggataataatcaaatatcaaaactagaaatacctactggtaaccctttgctgataaaatttgattctgacaataagatattaaattgtgagtaccttgactctgaaagagctaaagatcttttagtttattaa

SEQ ID NO: 291576 - DNA, 501 bp, Unknown
  Bacterial polypeptide expressing nucleotide sequence isolated from the Sargasso Sea
ctgggaaaataattaatagtcttggcataaattttgattatttgtatacatctgctttggtaagagcacaactaaccggctcaattattttaagtgaaattaatcaaaaaaatgtaaatactattgaaaataaagctttgaatgaaagattttatggagatcttcaaggcctaaataaagatgaatgtagaaaaaaatggggagatgaaaaagttcagatgtggagaagatcatatgatcagggacctcccggtggtgaaactttaaaacagacaggcgaaagagtagtcccatattttatagaagaaatagaacccttagtgaagaatggttcaaatatactaattgcagctcatggtaattcactcagatcgctcataaagtttttggatgatgttacagacgaagatatcgtaaaacttgaaataccaactggagcacctattcactatgttttcgatagtaatggaaaagttatgcaacgaaataatcttttttaat

SEQ ID NO: 291577 - DNA, 259 bp, Unknown
  Bacterial polypeptide expressing nucleotide sequence isolated from the Sargasso Sea
atgtctcttctcatcctgatgcgccacggtcaatcgatgtggaatgctgcaaatcttttcacaggctgggttgatgttccacttacaaataaggggattgaagaagcgattgaaggtggtaaatcaattgcaaatctgccaatagatgaggtccatgtctctactttaatccgctctcagatgaccgctatgctggctttggctcagcaaggaactggtaaagttccaatcttccaatatccagacaattctgaatcaa

SEQ ID NO: 291578 - DNA, 388 bp, Unknown
  Bacterial polypeptide expressing nucleotide sequence isolated from the Sargasso Sea
ttgatcaattttgcgaacgccgacatggtcgggcacaccgggaatcttgaagccgcagttcaagcagtggaatcggtggatcaggctctcgggccgatggttgaggcggtgaaagcggtcaatggattcatggtcatcaccgcagaccatggaaacgccgatgagatgctgacaaagaaccgggtcagcggggaaaccgaggcctcaaccaagcattcactgaatcctgttccattcctgatttatgaccccttgtatgatggcagttaccgtcttaaggactttgctgcaaaccaggatctcaatttgagtcatgttgcagctaccaatttaattttgatgggcatggaagttcccgatgacctggcccctccactttttctttagt

SEQ ID NO: 291579 - DNA, 1255 bp, Unknown
  Bacterial polypeptide expressing nucleotide sequence isolated from the Sargasso Sea
cctgatcgatcaattcaaagggcggggtccgctggtgcatgtggttctagatggatggggcgtggcaccggaaggtcctggaaatgccattgcgcaggctaatcttcctgtatttcacatcttacgcgggaaaagtgcctacacacaactttggactcatggactacatgtcggccttcccgggaagaaagaccttggaggttcggaagtgggccacatgaccatgggagccggaatagtaatggaacaggggcccaccctgatcaaccatttgatcgactccggagcattgtttgaaaccgaagccatgcagatggtgatcgggaacagcatccgggaacaggttcccttgcatctgatgggtctgctttctgacggaaacatccacagccatatcagtcacttcgaggtagtcatccggcatgcttttcgaaccggggtgaagcaatgttatgtccatgcattgcttgatggtcgggatgtgccggtccagtctgcccatgaatataccgagcgtttggaaggtttgttccgggagttgaagcaacaggatcctgactgcgattatgcctttgccagtgggggtggcagggaaaccgtgaccatggaccgtgataataattggagaaaaatcgaactgggatggaagattcatgtggaaggaaatcatggaaacggttttccaagcatcggggatgcgatcgagcatttccggaaattggatccgcaggtcatcgatcaggatctcccggcattcgtaatcacccaaaatgggaaaccggtagggccaatcgaagaccggcattctgtgatcttcatgaatttccgtgctgaccgtgctatcgaattcagtgaagcgatggtcaaggaggattttgagcactttccccgagatcctctcccccgtgtctgttttgcatcgatgatgcaatatgatctggataatggattccccgagcattttttggcagggactccgagggtggacaatccttttggcaaaaggctggtggagcagggcataaagcaattcaggctcactgaaacccagaaatttccccatgtcacttttttctacaacggtggttaccgtgagccacttgacccaaaaatagaagattaccatttgattccctcagacaaggtcccgacttttgcagatgcgcccatgatgaaagcatctgaaatcggaaagagggcggtggaattcatttattccggagtatacggttacgggttgatcaattttgccaac

SEQ ID NO: 291580 - DNA, 256 bp, Unknown
  Bacterial polypeptide expressing nucleotide sequence isolated from the Sargasso Sea
aatgaaaggatctgaaggagaaccatggacagcacacacaataaataaagttccattaattttgatagaaggtgaaaaaagaaaaataccaaatatgggaaatgaaattaatttaagagaaaacgcgggcttagcagatattgctcccactttattgcaattattaaatctaccaataccaagagaaatgacaggcaaatcgcttattcaagaaattgaattaaagggttataataaggtagttcaacacgtttaa

SEQ ID NO: 291581 - DNA, 562 bp, Unknown
  Bacterial polypeptide expressing nucleotide sequence isolated from the Sargasso Sea
cctggtacgccatggggaaagcgagtggaaccgtgaaggccggattcagggacaatttaattccccgttgactgaatttggcctagcccaggccaaggccattagttcttttttgtccgatcacctttcttatgatcagattcagatctactccagcccccttggcagagcacaacagaccgcagagattattgcagagggtatcaatcaatctgtggaatcaatcatcatcgaacccagattgaatgatttcaatcttggagagattgccgggacctacgggtgggataaagtcgctgaattatatccggaactggccagtttaaggctcaacaatcccatgcacttccatcctcccggtggagaaagcggtgctgattttaaagtgcggctcatggaattcatggatgagatcgcaaaccatgagactcccaaactgctggtcagccacggcattgtgaataaattcatcaggggcattcgcaagaatctttccggaaaacaaatgatcgaactcggtgagtcacaggacacgatttaccatttgaataacacacaggat

SEQ ID NO: 291582 - DNA, 259 bp, Unknown
  Bacterial polypeptide expressing nucleotide sequence isolated from the Sargasso Sea
aatggaagatttgaattacttaatcttggtgcgtcatggacaaagtgaatggaacgcaaaaaacctattcactggatggaaagacccagatctaactgatcaaggtagaaatgaagcagaaaaagctgggaaacttcttttcgagaaaaaaattgatttagacgaaatgtttacctccgttttaattagagcaattaatactgggaatataattttagatcagctcggaattaaatcattacctatcacaagggatcaa

SEQ ID NO: 291583 - DNA, 301 bp, Unknown
  Bacterial polypeptide expressing nucleotide sequence isolated from the Sargasso Sea
aatgaaaaatacaagtttaattttagttaggcacggtcaaagcgaatggaatgaaaaaaatctttttactggttgggaaaatccaggactgacaaaaaaaggaactgatgaagcaaaacatgctggcttattaataaacgatctcgatatcgaatttgatcacttatttacatcagttttagatagagccaaactcactggagaaatcattctagagaatatcgatcaaaaagatctagattctattgaaaacaaagctctcaatgaaagattctatggtgaccttcaaggtcttaataaa

SEQ ID NO: 291584 - DNA, 256 bp, Unknown
  Bacterial polypeptide expressing nucleotide sequence isolated from the Sargasso Sea
aatgaaaggatctgaaggagaaccatggacagcacacacaattaataaagttccattaattttgattgaaggtgaaaaaagaaaaataccaaatatgggaaacgaaattaatttaagagaaaacgcgggcctagcagatattgctcccactttattgcaattattaaatctaccagtaccaagagaaatgacaggcaaatcgcttattcaagaaattgagttgaagggttataataaggtcgttcaacacgtttaa

SEQ ID NO: 291585 - DNA, 209 bp, Unknown
  Bacterial polypeptide expressing nucleotide sequence isolated from the Sargasso Sea
agctgatcatggtaattgtgagagaatgattaatgatgatggctcaataaacacatctcatactatcaatccagtacctattattctagttaattctgaaaacaaagaaattaataatggagtactcgcagatattgctccaactatacttgatattcttggtatagaaactccaatagaaatggaaggggaatcattactaatatgaa

SEQ ID NO: 291586 - DNA, 310 bp, Unknown
  Bacterial polypeptide expressing nucleotide sequence isolated from the Sargasso Sea
gatgcaagaaagaagtggggagaagaacaagtacatatctgagagaaggtcattcgatgtgcctccacctgggggagaaagtcttaaaaatactggagagcgagttatgccctactacaaaaaagagattgctccgaaaatagctgctggtaaaaatgtgctagttgttgcccatggaaattctttaagatcattaatcaaagaaatagataaaattagtgaccaagaaatagtgaaattagaaatacctactggagcaccaattatttatagatatagcaaagatgagcaagccttcattaaagattaa

SEQ ID NO: 291587 - DNA, 451 bp, Unknown
  Bacterial polypeptide expressing nucleotide sequence isolated from the Sargasso Sea
atgaaagctcgagaaataagtaacaaggcagttgaattgatctgctccggtgaatatcaatatggactaataaatttcgcaaatgctgacatggttggccatacaggcgattttcaggctgcattaaatgcagttgaaactgtagatattgcattggacttaattttaaaagcaattactgaaatgaaaggtctattggtgattactgctgatcacggcaatgcagaccagatgcttataaagaactgtaatggagtaatggagatcaatacaaaacattctctgaatcccgtgccttttataatatttgaccctttgtataatggtaattatcatctcaagccatttggtgaagattacaacaataatttgagcaacgtggcagcaacaaattttattttactaggtcagcctgtgccagatgacctggctccaccgctgtttggttaat

SEQ ID NO: 291588 - DNA, 411 bp, Unknown
  Bacterial polypeptide expressing nucleotide sequence isolated from the Sargasso Sea
cctggtacgccatggggaaagcgagtggaaccgtgaaggccggattcagggacaatttaattccccgttgactgaatttggcgtagcccaggctaaggccattagttcttttttgtccgatcacctttcttatgatctgattcagatctactccagccccctcggcagagcacaacagaccgcagagattattgcagagggtatcaatcaatctgcggaatcgatcgtcatcgaacccagattgaatgatttcaatcttggagagattgctgggacctacgggtgggataaagtcgctgaattatatccggagctggcccatttgcggctcaacaatcccatgcacttccatcctcccggtggagaaagtggtgccgattttaaagcgcggctcatggaattaatggatga

SEQ ID NO: 291589 - DNA, 575 bp, Unknown
  Bacterial polypeptide expressing nucleotide sequence isolated from the Sargasso Sea
tattaatatagattattctttttcttctttacaaattagagcaattaatactttaaaacttgttcacaatacaatgagaataaaagaaacttttacaaaggcatggcaattaaatgaaagacattacggagctttaactggactaaataaagatgaaatgaaaaaaaaatttggagagaaaaaagttcacgagtttagaagatcctggaatattaaacctgaacctttaaataaaaataacccctaccatccaattaacattgaaacctataaggacattcctaaagaaaatttgcctgatacagagtctttagaagatacatataatagagttttaccgtattataaaaaaaatattcaaaataagattcttgatggaaaaaatgtcctcatagttgctcatggtaattcaattagagcaatatgcaaatatctttttaaattagatgaaaaaaaaatatctttacttgaaattccaacaggaaatccattggttattaattttgaaaaaaataaaatagttaaatgcaaatacttagataaatccagggcaaaggatctaattgccttttaat

SEQ ID NO: 291590 - DNA, 468 bp, Unknown
  Bacterial polypeptide expressing nucleotide sequence isolated from the Sargasso Sea
tatttacaagcgaattaaaaagagctcaagaaaccgctaaaataattcttcaaaaccttggtcagtgggattttttaaataatgaaggaaaaataatctcaaacattaatttaaatgagagagactatggcgatctcacgggtttaaacaaaaaagaaactgctgaaaaatttggagaagaacaagttcataaatggagaagaggttattctgatcaaccccctaacggtgaaagtcttgaggatgtggtaagaagagtaacaaaatattttgaggaagtaattcaacctgctattcaaagtgatgaaaatggtaatgttttaattgcagcacatggaaactctctaagagcgcttctaattgtaatgaatatttatgaaccaaataacattaattctgttgaactctcaactggtgttccaatacatgttatcttaaaagataataagtttagtattaaagattaat

SEQ ID NO: 291591 - DNA, 178 bp, Unknown
  Bacterial polypeptide expressing nucleotide sequence isolated from the Sargasso Sea
gctgttgaaagtgatgagaatgataatattttaatcgcagcacatgggaattctctcagagcgctattaattgtaatgaatatttatgaaccaattaatattaattctgttgaactctcaactggtgttccaatacatattatcttaaaagataataagtttagtattaaagattaat

SEQ ID NO: 291592 - DNA, 321 bp, Unknown
  Bacterial polypeptide expressing nucleotide sequence isolated from the Sargasso Sea
gccgcttagaaaaggctgccttagaggtagatgccacattgcttataactgctgatcatggaaacgctgaaaccatgacagatccagattccgggaaaccttttacatcacataccacaaacaaggtgcctttgattttggtaaatgcatcgagtgatattaccaaccttaaagatgggaagctcgctgacgtggccccaacattaatagagctactaggtttgtcgaagccgagagaaatgacaggacaatctcttttggaaacaaccgagtgtataacaagccgcagagattcaaacccctgcacggcaaatggttaaa

SEQ ID NO: 291593 - DNA, 856 bp, Unknown
  Bacterial polypeptide expressing nucleotide sequence isolated from the Sargasso Sea
atgagtcttggctcaggtagaattgttctacaatctttaccaagaattaacttagcatttaaaaaaaatattataaaagaaaataatcaactactagaatttttaactaaacatcaaactaaaaaaactattcatgttttaggtctttgcagtaatggtggagtccattctcataaagatcatataatagagctgacaaaaattttaaatgaaaaaaaatttaaaatttgcttacatttgttttctgatggacgtgattgtgctccaaatgaatttggaaatataattcaaaaaataatgagtaaacttccacctgaaattaaaatctctactttgattggtagatattattccatggatagagataacagatgggatagaattaaaaaatgttacgacctaattatcaatgcaaaatcagcgtataatttcaagaatgtttttcaggcgataaattttgcttatgatagaaatgaaactgatgaatttgtttctcctaccctcattggtgactatgaaggagtaaaagagggagacagccttttaattacaaattttcgtgctgatagagttagagaaattttagaggctttcttatttccaaaattttttcattttaaaagatcaaaaaacaaacctccatttaaaaatgcactaggcatgactgagtattcagacaaactcaatccttatataaaatctatttttaaaaatgaacatattaaagatactttgggtgaagttatatcaagatcgggtcttacacaattaagattagcggaaacggaaaaatatccacatgtaactttcttttttaatgggggcaaagaacaaaaatatctaaagaagatagaat

SEQ ID NO: 291594 - DNA, 718 bp, Unknown
  Bacterial polypeptide expressing nucleotide sequence isolated from the Sargasso Sea
atgagtcacttaatactagttagacacggccaaagcgaatggaatttggaaaatagatttacgggctgggtagatgtagatttatctccaaaaggaaagttagaagcctgtaaagctggtgaatcactcaaagaacttaatattaatattaatcatttttttacatcttatcaaaaaagagcaataaatactttaaaactcattttaaatactatgagaataaaagatgacaaaattataaaagcttgggaattaaatgaaagacattatggttctttaacaggtttgaataaagatgagatgagaaaaaaattgggcgaagaacaagttcaaatttttagaagatcttgggatatttcacctgagccattaagtaaaaataatccatatcatccattaaatattgaaatttataaaaacataccaaacgaaaaaatacctgatactgagtcattaaaaaatacttatgaaagagtaattccattttttaaggaaaaaatagaaaaaaaattaagtgaaaatgttatcatttcagctcatgggaattcaattagatcactatgcaaatatttgtttgatataagtaatgaagaaatctcaaaattagaaattccaacaggaaatcccttaattttgaaattcgatgaaaataataagttactaaatgcaaaatatttggataaagaaagagcaaaaaatttaattaagtttggttaat

SEQ ID NO: 291595 - DNA, 663 bp, Unknown
  Bacterial polypeptide expressing nucleotide sequence isolated from the Sargasso Sea
ttgaaaatagatttacaggttgggtagatgtggaattatcaaaaaaaggtgaggaagaggctattaaggcgggaaatcttataaaagatttggatataaatatagatggtatttttacatcatatttaacaagagcaattaagactttagaattaataatgaaagttaataagtttaaaaatttaccattcacaaaagcatgggagttaaatgaaaggcattatggtgctctaacaggtttaaataaagacgaaatgaaaaaaaaattaagtgaggataaagtgcatgaattgagaagatcatgggataagcccccagataaactcgatgctagtagtatttatcacccgaataatattgatatttataaaaatatttctaaagataagataccaaacacagagtcgttaagagatacatacgagagggtagtgccgtactataaaaaaaatattaacaatataaacaaaaatattttaatttctgctcacggaaattctatcagagcactttgcaaatatttatttgatttaaacaatgacaatatttctaaattggaaattccaactggcaacccactactgttggaaatagaaaatgataaagctaaaagcggaaaatatttggactcggaaagagctaaagatttaattattttttaat

SEQ ID NO: 291596 - DNA, 115 bp, Unknown
  Bacterial polypeptide expressing nucleotide sequence isolated from the Sargasso Sea
atgagtcatttaattttagttagacatggtcaaagtgagtggaaccttgagaaaagatttactgggtgggtagatgtagatcttgctcccaatggaaaaatagaggcttgtaaat

SEQ ID NO: 291597 - DNA, 411 bp, Unknown
  Bacterial polypeptide expressing nucleotide sequence isolated from the Sargasso Sea
aatgagtcatttaattttaattagacacggacaaagtgaatggaatttaaagaatagatttactggatgggtagatgttgaactatcagctcaaggaaagttagaagcttgtaaagctggagaattgattaaagggcaaaagttaaagtttgattatttttatacctcataccaaaaaagagcgatagaaacgttaaaattgatcacaacaaccttaagagtaaaagatgttgagacaactaaggcttggcaattaaatgagagacactatggtgctttaacaggtttgaataaagatgagatgaaaaaaaaaattggagaaaaaaaagttcatgaatttagaaggtcctggaatatttcacctgagcctttaagcaaaaacaatccatatcatccattaaatatagacac

SEQ ID NO: 291598 - DNA, 355 bp, Unknown
  Bacterial polypeptide expressing nucleotide sequence isolated from the Sargasso Sea
tatgactaaactaattctcacaagacatggccaaagtgtttggaatgcagaaaataggtttactggctgggtagatgtagatctttctgataaaggagtccaggaagcagaaaaatctggtcagattattaaagatttaaatattaaaatagatttctcttatacatcgtatttaaagagagcgattaaaactcttacaactattcttaaaaagaatagactagaacttaaattcaatactgcttggcaacttaatgaaaggcactatggatctttaacaggtttaaacaaagaagaaacaaagaataaaattggtgaagaacaattcaaaaagtacaggagatcctgggatata

SEQ ID NO: 291599 - DNA, 439 bp, Unknown
  Bacterial polypeptide expressing nucleotide sequence isolated from the Sargasso Sea
atgagtaaattaatcttaacaagacatgggcaaagtacctggaatgctgaaaatagatttacgggctgggttgatgttggtctttcagagaaaggtaaagaagaggctaaaaagtcaggtgagttaattagtgagttgaatataaaaatagatatcaattatacttcttatcttaaaagagcaattgagacgctcacaattatcttaaaaacattaaatttatctatgaggtttaatacagcttgggaattaaatgaaagacattatggttcattaacgggtttaaataaggaggaaacaaaaaagaaaattggtgaagaacaatttaaaaaatacagaagatcttgggacgtggcacctcctcttatggctaaagatagtaaataccttgaaaattttagccctttaaacgatggaattccccaaattaaaattcctt

SEQ ID NO: 291600 - DNA, 289 bp, Unknown
  Bacterial polypeptide expressing nucleotide sequence isolated from the Sargasso Sea
atgagtcacttaatacttgttagacatggccaaagcgaatggaatttagaaaataaatttacaggatgggtcgatgttgaactcgcaccacaaggtaaattagaagcctgtaaagcaggagagtttataaaaaaattaaatttagaaataaaacatttttacacatcttatcaactaagatcgattgatactttaaaacttattttaaatacaatcagagtaaaaccaaataatataattaaggcctggcaattgaatgaaaggcactacggatcactgacaggataaa

SEQ ID NO: 291601 - DNA, 712 bp, Unknown
  Bacterial polypeptide expressing nucleotide sequence isolated from the Sargasso Sea
atgagtcacttaatacttgttagacatggtcaaagcgaatggaatttagaaaataaatttacaggatgggtcgatgttgagcttgcaccacaaggaaaattggaagcctgtaaagccggagagttaataaaaaaattaaatttagaaattaaacatttttatacttcttatcaactaagatcgattgatactttaaaactcattttaaatacaatcagagttaagccagataatatgattaaggcctggcaattaaatgaaaggcactacggatcgctgacaggattaaacaaagatgaaatgagaaaaaaattaggagaagaagaagttcacaaattcagaagatcttgggataatccaccaaaaccgttgaatacaaatagtccatatcatccaaaaaatataagtatttacaatgatataccccgtaacctaattccagatacagagtctctcaaagatacttatgaaagagttgtgccctattttgttgaaaacatagaaaaaaatttgcaggataatataattatatctgctcatggtaattctattagatcacttttaaaatatttatttaaaattgatgacaatgaaatttctaaacttgaaataccaacaggaaatcctctacttttgaaatttgaaaaaaagaatataaaagaggctaaatacctagatcagagtagatctagggatttaattaaattctaac

SEQ ID NO: 291602 - DNA, 718 bp, Unknown
  Bacterial polypeptide expressing nucleotide sequence isolated from the Sargasso Sea
tatgagtcatttaattttagtaagacacggccaaagtgagtggaatttagaaaaaaaattcactggatgggtagatgttgagctcgcaccaaatggaaaattagaagcttgtaagtctggtgagcttattaaagaacttaatttaaatttagattattttttttgttcttaccaaaaaagagcaatagaaactttaaacttaatattaaatactttaagaataaaaaataatgatgtgatcagagcctgggaacttaatgaaagacactatggtgctttaactggtcttaataaagatgaaatgaaaaaaactttaggagaagataaagttttagaatttaggaggtcttgggatattagaccagaaccactaaacaaaaataacccttaccatcctattaatgttgagatttataaaaatattccaaaggagaaaattcctgatactgaatctttaaaagatacttatgaaagagtaattccttattttaaaaaaaatatctcaaataaactaaataaaaatataattattgcagctcatggaaattcgatcagagctttatgtaaacatttatttaatatagataatgaaaaaatttcaaaactagaaattccaacaggaaatcctttgttaattaaatttgataataataaaaaagttaaagaggcttcgtatttagataagaaaagagctaatgatttaattatttttaactaa

SEQ ID NO: 291603 - DNA, 150 bp, Unknown
  Bacterial polypeptide expressing nucleotide sequence isolated from the Sargasso Sea
aatgaaacatcttattcttataagacatggacaaagtgaatggaaccaacaaaaaagatttactggttgggtcgatgttgaactaacacaaaaaggcagggctgaggctaaaagagcaggagaattaataaaagagaaaaaagtaaaact

SEQ ID NO: 291604 - DNA, 472 bp, Unknown
  Bacterial polypeptide expressing nucleotide sequence isolated from the Sargasso Sea
atgaatctaattttaataaggcatggtcaaagcgagtggaatgctctaaatcaatttactggatggaaggatcctgatcttacagccacaggaattcaagaggccaagaatgctgcaaagataataaataacttaaaaattaattttgacttggttttcacttctgcactaataagagctcagaatacagctgaaataattctcaaagaaataaatcagcctctatcaactataaaaaatatggctcttaatgaaagaaactatggagaccttgcaggtctcaataaggatgatgcaagaaaaagatggggtgatgaacaagttcatatttggagaagatcctatgatatccctcctccgggtggagaaagtcttaaagatactggtgaaagagtgctcccattttttatgaaagaaattcatccacatgtttgtaatggtaagaatgttttagttgcagctcatgggaact

SEQ ID NO: 291605 - DNA, 277 bp, Unknown
  Bacterial polypeptide expressing nucleotide sequence isolated from the Sargasso Sea
tatgaataagcttattttacttcgacatggggagagtcagtggaatttagagaacagatttacaggatggactgatgtatctttgaccaaaaatggagaatatgaagctaaaaaagctggtattttattaaataataataatattcatattgatatagcttacatatcttacctacaaagagctgttaaaacgtataaaatatgccaaaaacaacttaaaaagactaatatcaaggtaaagtatgattggagattaaatgagcgtcattacggaagt

SEQ ID NO: 291606 - DNA, 697 bp, Unknown
  Bacterial polypeptide expressing nucleotide sequence isolated from the Sargasso Sea
aatgaatagtcttgttttagttcgtcatggacagagcctttggaataaagagcgaagatttactggatgggcagatattgatttaacagaacaaggtaaatctgaagcaaaatatgctggagaattaattaaaaatttaaatgtaaattttgatgctttttttacatcagaattaaaaagagcaattcatagcatggatttaattttggaagttttaaaaaaaactgatgtaaaaattattaaaaatagttctttaaatgaaagacattatggaggacttacctcattaaacaaggacgaaacaattaaaaaatatggtaatgaacaagttcacacgtggagaagaagttatgaaattccacctcctccaatggatgaggatcatccatacaaaaataaaattaaatcaaaaattttaagtgaatctttaaaggatacatttaatcgagtagttccttactatgaaaaagaaattaaaccccttatttctattaaaaaaaatattttaattgtcttccatggtaatagttgtagagcgcttctaatgcgaatttttaatatttctaaagaaaaaattataaaatttgaaattcctaccggaaatcctttgctaattgaatttgatgaaaaattacttataaaaaaatataaatatcttgattctaaaagatcaaaaaaaatattatttaatatttaa

SEQ ID NO: 291607 - DNA, 598 bp, Unknown
  Bacterial polypeptide expressing nucleotide sequence isolated from the Sargasso Sea
tatgagtcatttaattttagtaagacacggccagagtgagtggaatttagaaaaaaaattcactggatgggtagatgttgagcttgcaccaaatggaaagttagaggcttgtaagtctggagagcttattaaagaacttaatttaaatttagattattttttttgttcttatcaaaaaagagcaattgaaaccttaaacttaatattaaatactttaagaataaaaaataatgatgtgatcaaggcctgggaacttaatgaaagacactatggtgctttaactggtcttaataaagatgaaatgaaaaaaactttaggagaagataaagttttagaatttaggaggtcttgggatattagaccagaaccactaaacaaaaataacccttaccatcctatcaatattgaaatttataaaaatattccaaaggataaaattcctgatactgagtctttaaaagatacttatgaaagagtaattccttattttaaaaaaaatatctcagataaactaaataaaaatataattattgcagctcatggaaattcgatcagagctttatgtaaacatttatttaatatagataatgaaaaaatt

SEQ ID NO: 291608 - DNA, 337 bp, Unknown
  Bacterial polypeptide expressing nucleotide sequence isolated from the Sargasso Sea
agagattatggagaactaacagggctaaataaggatgaggcaagagaaaactttggtgtagatcaagtccagaaatggagaagaacctatgatacgccaccacctggaggtgaaagtcttaaagaaacttataatagagttattccttattttgagagtgaaatacttcctctaatgaaagaaaaaaacgtacttatctcagcgcagggaaattcattaagagcattagttaagtatttagacagtatttctgaaaaggacatcgtaaaactcgaaatagcaacgggagaacctatattttataaattcacggatggaaagtgcattaaagaataac

SEQ ID NO: 291609 - DNA, 487 bp, Unknown
  Bacterial polypeptide expressing nucleotide sequence isolated from the Sargasso Sea
aagaaagcttgggaattaaatgaaagacactacggtgctttaaccggtcttaataaagatgaaatggtgaaaaaacatggtaaagaacagattcatgtttggaggagatcatttaatgtaccgccaccgccaatggaaaaaacacatcctaatcatccatctaataatgaagcttacataaaaatacccgctaataaaattcctaatagtgaatctttaaaaaatacatttgatcgtgttataccttattatgaggaaaatattaaaccactattatcttctaataaaaatattttagtttcagcacatggaaattccttgagggctctttgtaaaaaaatattaaatatttctgataaaaaaattatagattttgaaatccctactggcaatcctcttttaattatttttggaaaaaacatgaaagttgaaaaatataaatatctggatcctaatagagcaaaaaaaataatatctaatctttaaa

SEQ ID NO: 291610 - DNA, 511 bp, Unknown
  Bacterial polypeptide expressing nucleotide sequence isolated from the Sargasso Sea
aatgagttatttaatacttgtaagacacggtcaaagtatatggaatcttgaaaatagatttacaggatgggtagatgttgatttaaatgataatggaagagctcaagcaaaaaaatcaggtgagctaatcaagaagaagcaaataaatatagatctatattactcatcatttcaattaagagccaaaaatactctaaaaattatacaagaacaattagatgactataaaaaagttaaatctgcttgggaacttaacgaaagacactatggatctcttactggtttaaataaagatgaaatgaaaaaaaaacttggagaagaaaaagttcaccaattcagacgctcttgggatctaagacctgatccactagataaaaataacagctatcatcctctaaatatcaatatatataaagatgtacctgtcgaaaaaattccagatactgaatctttaaaagatacatatgagagagtaattaaatattatagtgaagatattaaaaatgattaa

SEQ ID NO: 291611 - DNA, 829 bp, Unknown
  Bacterial polypeptide expressing nucleotide sequence isolated from the Sargasso Sea
aaacaagatttggtaattataaatgaagcaatatcaagttctaagttttttagaaacgaagcaattttaaatgctattacgactacaaagaaaaaaaataaaaagaatgatcttcatctgctaggtcttatttcctttggtggagtgcattctcacatcgatcatctgattgctattttaaagatgtgtaaagcatatggagtatctccaaaattgcatttatttacagacggtagagatgcagaccccaaatcagctctagaaatattcgagtatctaaataaatatctaacagaatatggtggggaaatttatacggtatctggaagatactatgcaatggatagagaccagagatgggatagaactgaattggcatgggacgcaatagtaaataataaaggcgaaaaagctaacaattttattgatgcaatagaaaactcatatgcaaaagatacaacagatgaattcatattacctactgtattaaaaggtgcaaaacgtttgaaaaaaaatgattcattattattttttaacttccgtaatgacagaactcgacaaattgccagagcattaaatgtcgaaagatttgataactttaaaagaacaaataataatacagcttactctattacaaccatgactgaatatgatccatatttctcatgtccagttgcctttaggacaaaagcacctactacgactttaggaagcgtagttagtgacttaggtctgaaacaatttcattgcgcagaaacagaaaaatatccacatgtaacatattttataaatggggggagagaagacccataccccgggaaaaaagagt

SEQ ID NO: 291612 - DNA, 715 bp, Unknown
  Bacterial polypeptide expressing nucleotide sequence isolated from the Sargasso Sea
atgagttttttaattctagtaagacatggtcaaagcacttggaatcttgaaaaaagattcactggctgggtagatgttgaacttacagagaagggtaaatcagaggctaaaaaagctggtcttttagtcaaaacaaaaggaattaaaataaacctttattattcatccctacaattacgggcaaatcacactatgaaaattattcaagaaattttaaaagaaagaaaagaatttactaaagcttggcaacttaatgagagacattatggagcgttaacaggactgaacaaaaccgagatgagtaaaaaaattggtgcagatagagtacatgaatttcgaagatcttgggatgtaagaccagaagctcttaaaagagatagtcaatttcaccccctaaacattaaaacttataaagatgtgccaaaagagttaatacccgatacagagtctcttaaagatacatatgaaagagtaataaagtatttcagagaggaaattttagataaattaaaggaaaataatattttgatttctgcccatggcaactcaatcagagcattatgtaaaaatctatttaatttagatgaaaatcaaatctcaaaattagagattcctacaggaaatcctttaattattgaatttaattcacaaaatgagataattttatgtgagtatctggacaaagaaagagctaaagatcttgtagttttttaaa

SEQ ID NO: 291613 - DNA, 487 bp, Unknown
  Bacterial polypeptide expressing nucleotide sequence isolated from the Sargasso Sea
atgtctgctctaattcttgttcgacatggccaaagtgaatggaatgaaaaaaatctttttactgggtggaaagatccagaccttacgtctaaaggagaagtcgaagccaaagaagcaggaaaatctttaaataagttagatattaagtatgacctgatgttcacttctgtcttacttagagcaaaaagaacagcccaaataatcttaaatgaattaaaccagagagatataaaaataataaaagataaagctataaatgaaagggattatggcaatttatcgggactgaataaagatgaagcaagggagaaatggggagaagagcaagtacataagtggagaagatcatataacatagcgccaccaggcggagagagcttaaaggataccgctgaaagagtacttccatattacaggaaaaatatattacctcatgtaaatgaaagaaaaaatattattgttgcagcaccatggaaattcgcttaga

SEQ ID NO: 291614 - DNA, 601 bp, Unknown
  Bacterial polypeptide expressing nucleotide sequence isolated from the Sargasso Sea
aagattaattaaaaatctagacataaaaatagacgtttcttacacatcttttttaaaaagggctattaaaactcttaccactatacttaaagaaaacggcctagatcttaaatttaatacttcttgggaattaaatgaaagacattatgggtctttaacagggttaaataaagaagaaacaaaaaagaaaattggtgaagagcagtttaaaaaatatagaagatcttgggatacacggccaccgccaatggctgaaagtgacaaaaatcattctttgtttagtcctttaaatgcaagtatacctttgggcatgataccttttacagaatctttaaaagattcttataaacgagtcataccttattatgaaaatgaaattcaaaaacatattaaggaaaataaaaacgttttaatatcggctcacggaaattcactcagagcactatgtaaatatttatttaagatttctgataaaaaaataaatgaattagaaattccgactggcaatcccctagtaattgaatttgataccaatcttaaaattgaaaaatgttattatttagataaatccagagctaaaactattatctttaatcagtaa

SEQ ID NO: 291615 - DNA, 247 bp, Unknown
  Bacterial polypeptide expressing nucleotide sequence isolated from the Sargasso Sea
atgggaaaactcatagcaatcagacacggacaaagtacctggaatgcagagaatcgttttacagggtgggtggatgttgatctttcagagaaaggtgttgctgaagcagaaaaatcaggaaagttaataaaagaattaaatatagatttcgatatgtgttttacctcttaccttaaaagagcaataaatacccttgagatagtattagaggttcttggaaaaaaatataaataccacgaaagcttgg

SEQ ID NO: 291616 - DNA, 748 bp, Unknown
  Bacterial polypeptide expressing nucleotide sequence isolated from the Sargasso Sea
atgaataaattagtgattttaaggcatggtgaaagcctatggaacttagaaaataaatttacaggatggatagatatagacttgtcaaaaaatggcgaaaacgaggcatcaagcgcaggaaagcttttaaaaaaagagggctttattttcgatttagcatatacatcgctacttaaaagagcaaataatactttagagatatgcatgaaaaatatggatattgaaaaaagtaaaaaattaaaaatcatcaaaaactggagactgaacgaacgacattatggagccttacaaggccttaacaagaaaaaaacctcggagaaatatggtcaagaacaagttttaaaatggaggagaagttttgatattcaaccaccagcttcaaaaaagacaattaatgattctgaactttcttttgaaataagtaaaaaacacattcctctttccgagtcattaagagatgttataaataggtttaagccttattggaaaaatgaaattttaaaaaaactaaaagcggggaaaaagattcttattgtggctcatggaaattctttgagagctttactaatgattataaaaaatatttctaaagaaaatatcgtcaacctaaacatcccaactggaataccattggtgattgaaatggataagaaccaacaaccaattagagattattatttaggatcaaaagatagtatcgcaaaaaaaatacactctgttgcatcgcaaggatcgataaatacttaat

SEQ ID NO: 291617 - DNA, 478 bp, Unknown
  Bacterial polypeptide expressing nucleotide sequence isolated from the Sargasso Sea
aatggaaacaaattatcttgttctagtaaggcatggccaaagtacttggaatcaaaaaaatttattcactggttggaaagacccagggttaacagaattaggtaaagaagaggcatttaaggctggccaacatataaaaaaacaaaacattaaatttaatttacttttcacttctgctttaaaaagagcacaagatacagcttcgataattctagaagtaattgaagacagtggtatcaatatttttaaaaacgaagcattaaacgaacgtgattatggtgaccttaccggattaaataaagatacggctagacaagagtttggcaaagaacaggttcaaatttggcgtaggtcttattcagacggtccaccaaatggtgaaagtcttgaagatacatataacagagttatcccctactttgaaaatgagattatgcctgttttacaaaaaaataagaatgtaattattctgctcacg

SEQ ID NO: 291618 - DNA, 409 bp, Unknown
  Bacterial polypeptide expressing nucleotide sequence isolated from the Sargasso Sea
aatatcaatcagaaagatctagattctattgaaaacaaagctctcaatgaaagattctatggtgaccttcaaggtcttaataaagatgaatgtaggcaaaaatggggtgctgaacaggtacaaatttggagaagatcttatgatgttggtccgcctgggggagagtcacttaaagaaactggagagagagttttaccatattatttaaatgagatttacccattaatacttcaaggcaaaaatattttggtttctgcacatggaaattctcttagatctttaattatgcatttggacaaattatcttctgatgaaattgttaaattggaaataccaactggggcccctattcaatatatctttgatgatcagggtaaagtattaattaaaaagaatttaattggataat

SEQ ID NO: 291619 - DNA, 709 bp, Unknown
  Bacterial polypeptide expressing nucleotide sequence isolated from the Sargasso Sea
catgagttttttaatattagtaagacatggtcaaagtgtttggaatcttgaaaaaagatttactggatgggtcgatgttgatttaacagtgcagggtaaagctgaagctgaaaaagcaggtgtcttaattaaagaaagaaatattgaaatagacttttattactcttctctacaattacgagctaataatacccttaaaattattcaaaaaattttaaatgacgaaaaagattttattagaacgtggaaacttaatgaaagacactatggatctctcacaggcttaaataagattgagatgattaagaaaattggtgaagacaaaatacataaattcagaagatcatgggacattaaaccaggagctcttagcaaagaaagtccttttcatcctttaaatatcgaaacgtataaagaaatgcctaaagaggctattcctgacactgagtctctaaaagatacatatgaaagagttgttaatttttttcaagaagagattaaagcaaagttaatgacaaacaatattttaatctcagctcatggaaattcaataagagctttatgtaaaaatttatttaatttggataatgaacaaatttctaaattagaaatacctactggtaatcctatgttgatcgagctaaattctaatacggaaataaaaaaatgtgagtatcttgacaaggacagagctaaagatcttgtagtt

SEQ ID NO: 291620 - DNA, 316 bp, Unknown
  Bacterial polypeptide expressing nucleotide sequence isolated from the Sargasso Sea
tatgagcaaattaatcctaataagacatggccaaagtgtatggaacgcggaaaacagatttactggatgggtagatgttgatttatccgaaaaaggaattttagaggctcaaaaatcaggtcaattaattaaaaatctaaatgtaaatatagatgtttcctatacatcttttttaaaaagagccatcaaaacccttacaaccatacttcaagaaaatagtttggaacttaaatttaatacctcttgggaattaaacgaaagacattatggatctttaacaggtctaaataaagaagaaaccaaaaagaaaattggt

SEQ ID NO: 291621 - DNA, 646 bp, Unknown
  Bacterial polypeptide expressing nucleotide sequence isolated from the Sargasso Sea
aatgagttatttaatattagtgagacacggccaaagcgtttggaaccttgaaaagaaatttacaggatgggtagatgttgatttaacagaaaatggaaaattagaggctaaaaaggctggtgaattaataaaacatgaacaaattcaagttagtctttattattcatcatttcaattaagagcaaaaaatactctaaaaattatacaagatgagttggaagatcataaaaaagtaagaagtgcatgggaattaaatgagagacattatggggctcttactggtcttaataaagataaaatgaaaaaaaagcttggagaagaaaaagttcatcaatttagacgttcttgggatataagacccgagccattggagaaaaaaagtccatatcatccaataaatataaaaacttataaagaaattccactagataaaattcctgacactgagtcactgaaagatacttatgaaagagtaatcaaattttacaatgaagaaatagagagtaatattagtaaaaatattcttatttcagctcatggaaattctataagagcactttgcaaatatttatttggtttaaataataaagaaatttctaatcttgaaattcctactggaaacccacttttaattgaatttgaataa

SEQ ID NO: 291622 - DNA, 116 bp, Unknown
  Bacterial polypeptide expressing nucleotide sequence isolated from the Sargasso Sea
tatgaataaacttgttttacttagacatggtcaaagtcagtggaatttagaaaatagattcactggttggaaagatgttccattaactgaaaaaggtattaatgaagctaataatg

SEQ ID NO: 291623 - DNA, 418 bp, Unknown
  Bacterial polypeptide expressing nucleotide sequence isolated from the Sargasso Sea
tatgaacaaacttgttttacttagacatggtcaaagtcagtggaatttagaaaacaaatttactggctgggaggatgttccactaactgaaaaaggtattaaagaggcgaataatgcaggtattttactaaaaaaaaataatatagaaattgataaaatttttagtagtgttttagaaagagcaaataaaacagtagaaattgcaatgaaggcatctggaatagaaaatttacataaaaatggtgttctaatttatgaaaaagatcaaagacttaatgaaagagattatggtgatttagttggcttaaacaaagcagaaacagcagagaaattcggtaaagaacaagtacaaatttggagaagatcatatgacactccaccaccaaacggtgaaagtcttaaagatgtagttgataga

SEQ ID NO: 291624 - DNA, 274 bp, Unknown
  Bacterial polypeptide expressing nucleotide sequence isolated from the Sargasso Sea
atgtcaaagattagcagcaaaaatataaaaagattaagtgttcctcagagccctgtagttcttgcaatactagatggatggggatatcgagaagataattcagataatgcaataaaaagtgccagtacaccaattatggactcattgtggcatgcttatccccacaccctaataagtgctagtggatctgatgttggcctaccagatggtcaaatgggaaattcagaggtaggacaccttaccattggttcgggaagaatcatacaacaagaac

SEQ ID NO: 291625 - DNA, 889 bp, Unknown
  Bacterial polypeptide expressing nucleotide sequence isolated from the Sargasso Sea
acttggttctggaagagtggtactacaaactctaccaaaaataaataaagcttttgacaataatgaaatagaaaaaaataataattttcagaattttatttcaaatcatgataaaaataagactgttcatctgctcggtttgtgtagtgaaggtggagtgcattcacattcatatcacatgattgaaatgtcaaaacttctaaaaaaaaataattgtaaaacttggatacacattttttcagatgggcgagattgttctccaaaacaattaggccaggatattaaaaaatttgaaatgtccctcccaaaaaatatcaagatagcatcacttgtaggtagatacttttcaatggatagagattatagatgggagagagtgaaaaaggcttttgatcttattgtatgcggaaaatatgacagaaagttttctaatgtatcagaaggaatagaagaagcttataaaaataatgaaactgacgaatttatttcaccaactctgattggaaattataaaggatttgaagatggtgatagtttaattatgataaactttcgagcggaccgagttagagaattattaacagcattactagatcctacatttagaaaatttgaaaaagattttaatactccaattttatcgaataatcttggaatgacagaatattcaacagaattgtcaaaatttatgaattctatttttgttaaagaaaatattaaggacacacttggagaggtcatttcaaaagcgaatttaaaacaattaagactagctgaaacagaaaaatatcctcatgttactttcttttttaatggaggagaggagacggtttaccctggtgaaacaagagtaatgataccttcaccaaaaatatctacatatgattta

SEQ ID NO: 291626 - DNA, 709 bp, Unknown
  Bacterial polypeptide expressing nucleotide sequence isolated from the Sargasso Sea
atgagtcatttaattttagtaagacacggccagagtgagtggaatttagaaaaaaaattcactggatgggtagatgttgagcttgcaccaaatggaaaattagaagcttgtaagtctggtgagcttattaaagaacttaatttaaatttagattattttttttgttcttaccaaaaaagagcaatagaaactttaaacttaatattaaatactttaagaattaaaaataatgatgtgatcaaggcctgggaacttaatgaaagacactatggtgctttaactggtcttaataaagatgaaatgaaaaaaactttaggagaagataaagttttagaatttaggaggtcttgggatattagaccagaaccactaaacaaaaataacccttaccatcctattaatattgaaatttacaaaaatattccaaaggataaaattcctgatactgagtctttaaaagatacttatgaaagagtaattccttattttaaaaaaaatatctcagataaactaaataaaaatataattattgcagctcatggaaattcgatcagagctttatgtaaacatttatttaatatagataatgagaaaatttcaaaactagaaattccaacaggaaatcctttgttaattaaatttgataataataaaaaagttaaagaggcttcatatttagataagaaaagagctaatgatttaattattt

SEQ ID NO: 291627 - DNA, 433 bp, Unknown
  Bacterial polypeptide expressing nucleotide sequence isolated from the Sargasso Sea
aatgagtcatttaattttaataaggcatggacaaagtgagtggaatttacaaaataaatttactggatgggtcgatgttgatctaacaccaaaaggtaaacttgaagcatgtaagtctggagaattaataaaagacttaaacttagatataaattatttttatacctcttatcaaaagagagctatcgaaaccttaaaacttatacttaatacttgtcgcattaaaaatgacaaaattataaaagcttgggaactaaacgaaagacattatggttcattaacaggattaaataaaattgaaatgaaagagacttatggagaaaaaaaaatccatgaatttagaagatcgtggaatattagacctgaacctttaagcaaaaatagcccatatcatcctgaaaacataagtacttataaagatatacctagagat

SEQ ID NO: 291628 - DNA, 492 bp, Unknown
  Bacterial polypeptide expressing nucleotide sequence isolated from the Sargasso Sea
ttcttgtcccatccccaaaagtcccaacgtatgacttagctccagatatgagtgccaagggaataccggaccagttcgtaaacgacatcaataaacagcagcacgatgtgatcatctgcaactttgccaacgccgatatggtcggtcacacaggaaagctcgatgcaacagttcaggctgtatcaacccttgaccaatgccttgaacgaatcgtcaaagcaatgacccgtgttgatggcactcttctgattaccgccgaccacggaaacgcagagcaattatgggactctaaacggcaagggcctcacacagcacatactcgtaatcccgttcctatcgtcttggtaaacaattcggtggctggtcgaaatctaaaacttcgagacgggtcactgcgagatgtagcccctacgctactccacgtcgcaggcgtcaaaactccccctgaaatgaccgggaaagatctgaggccttgggaagacaaattgtagt

SEQ ID NO: 291629 - DNA, 491 bp, Unknown
  Bacterial polypeptide expressing nucleotide sequence isolated from the Sargasso Sea
atataaggcgagaaaaagggttttagttccctctcctgatgttgctacttatgatttaaaaccggaaatgagttgccaagaagtatcaacagaagtaataaatgcccttaaaaacgacgaatataagcttatagtagtgaattatgcaaatggtgacatggttggtcatactgcgaaaagagaggctattatagaagccatggagtgtcttgatagaaatctaggtgatgttttaaaggctgcattagagaatggggttgctactctcgtaaccgctgaccatgggaatgtagatgaaattcttgatgcggagggtaatccaaaccctaaacattcatgcaaccctgttccatgcgtagtagttgataggttaaagaaatggaagatgtctagcagcggtgggttatctaatatagccccaactatgctcgatctcatgaatattgaaaaaccaaccgcaatggatagaagcttaattgattctgactaat

SEQ ID NO: 291630 - DNA, 351 bp, Unknown
  Bacterial polypeptide expressing nucleotide sequence isolated from the Sargasso Sea
actggcgtctaacgagcagcactatggggctttagaaggattgagcaaaactaaaacggcggaaaaacatggggaggaacaggtctttatctggcgaagaagttacgaggtttctcctcctgctcttgatctaaatgataaaagacatccacgatttgatcaacgttatagggggctgggagatcatcagtttccctcaactgaaagcttaaaagacacattacatcggttactcccactatggaatgaatccatagaaccattcattaaatcaggaaaaaaggtgttgattgttgcacatggaaattctctccgggcgctggttaaacatctcaacggaatttctgatga

SEQ ID NO: 291631 - DNA, 280 bp, Unknown
  Bacterial polypeptide expressing nucleotide sequence isolated from the Sargasso Sea
tatgttcaaacttgtcctattacgacacggagaaagccagtggaatctggaaaatcttttttcgggatgggccgatatcggactcacagagaaaggaaggtcagaagcgaaacgttcaggtttgttgttaaaagaacaaaactacaggtttgatttagtttttacttctgtcctaaaaagggccattaagaccatggaaatctgcctcagtgaaatggggtccattgatattcctaccattcatgactggcgtctaacgagcagcactatggggctttag

SEQ ID NO: 291632 - DNA, 292 bp, Unknown
  Bacterial polypeptide expressing nucleotide sequence isolated from the Sargasso Sea
cttgaaaattaataaaaaagtacttctcatgattttggatggttggggaattgctgaccagccagaaaaatctgcaatctcaaaagcacacacaccaaattacgatgattatttaaaaaaatacccaaacgctcaattgttaactcacggctcacatgttggtttgccaaaaggtcaaatgggaaatagtgaagttggtcacatgaatattggaagtggaagagtggtaatgcaagaacttgcaaaaattaaccatgatattgaaaataatagttttgataaagacgaagtc

SEQ ID NO: 291633 - DNA, 539 bp, Unknown
  Bacterial polypeptide expressing nucleotide sequence isolated from the Sargasso Sea
tatgagtcatttaattttagttcgtcatggtcaaagcgagtggaacttacaaaaaaggtttaccggatgggttgatgttgaattaactccacaaggaaaattagaagcttgcaaagctggagagttaataaaaaatttgaatttaaattttgatcattttttttgttcttatcaaaaaagagctttcgaaacattaagcttaattttaaatactctaagaataaaaaatgatagtgttacaagggcttggcaattaaatgaaagaaattatggatctttaactggtttaaataaagaggaaatgaaaaaaactttgggtgaaaaaaaagttcatgaatttagaagatcgtggaatatcgctcccgaaccactaaataaaaaaaatccttatcatcctttaaatattgaggcatataaagatatacctaaaaatatgattcctgatactgagtccctgaaagatacctttgaaagagtagtgccatattacaaaaaaaatataagtcctttaattaataaaaatataattattgctgctc

SEQ ID NO: 291634 - DNA, 682 bp, Unknown
  Bacterial polypeptide expressing nucleotide sequence isolated from the Sargasso Sea
atgaatcttgtatttatacgacacggacagagcctctggaatttagaaaataaatttacaggatgggttgatatagatttgtctgaaaggggtgaagttgaagcaaaaactgctggtgttaccttgattgataataacttttatccagaaatctgttttacctcttatttaaaacgatcaattaatactgctgcccatatcgttgaaagttataaaaaaatgaatattacttttaaaaatgtgaaaaagtgggagcttaatgaaagacattacggagctctacaaggcttagataaaattgaaacagcaaagaaatatggacaagaacaagtacaaatatggagaagaagtttcgatacgtcacctcctatggcagagcaaaattcagaacatgatccaaaaactcatgaattatataatgatattgaatcagagctaccactaggtgaatctttaaaagatgttgttttacgggttgtaaaaacctatgaacaaataatagcaacagctaaagaaaagtccgttttagttgtagcccatggcaacagcataagagctatggttaaattgctcgacaatttatctgacaaagatatagtggccgttaacattccgactggaattccactagcatataatatttcagataataatattgaaaaaaattggttatttaggtgac

SEQ ID NO: 291635 - DNA, 338 bp, Unknown
  Bacterial polypeptide expressing nucleotide sequence isolated from the Sargasso Sea
tatgagcaaattaatcttaactagacacggccaaagtgtgtggaatgcagaaaataaatttactggatgggtagacgttgatttatctgaaaaaggaattttagaagctaagaaatctggtcaattaattaaaaatttaaatataaatttggatatttgctacacatcttttctaaaaagggccatcaaaactcttactaccatacttcaagagaacgaattggaacttaagtttaatacttcttgggaattaaatgagagacattatggttctttaactggtttaaataaggaagaaaccaaaaagaaaattggtgaggaacaatttaaaaaatata

SEQ ID NO: 291636 - DNA, 187 bp, Unknown
  Bacterial polypeptide expressing nucleotide sequence isolated from the Sargasso Sea
atgttcaaacttgtcctattacgacacggagaaagtgagtggaatctggaaaatcttttttccggatgggctgatatcggactcacagagaaaggaatgtcagaagcgaaacgttctggcttgttgttaaaaggacaaaacttcaggtttgatgtggtttttacttctgtcctaaaaagggccatta

SEQ ID NO: 291637 - DNA, 588 bp, Unknown
  Bacterial polypeptide expressing nucleotide sequence isolated from the Sargasso Sea
tatgaacaaacttattttacttcgacatggtcaaagccaatggaatcttgagaataaatttactggttggaaaaatgttccactcactcaaaaaggcgaaatagaagcaaaaaaagctggtgaattgattaaaaaaaatgaaattcatattgattatgtgtttagcagtgttttagcgagagcaaataaaactgcagaaatagcaattaaagaagctgggatcagtgatttattggataatgataaattgattatgatcagaaatgaaaatttaaatgagagagattatggagatttagttggtttaaataagcaagaaaccgcagataaatttggtaaagaacaagtacataaatggagaagatcatatgacatatcacctccaaatggagaaagtctgaaaaatgttgtcgatagagtatctccttattttcaaaaaaatatcaaacctttgatagatcaaaataaaaatatattaattgctgctcatggcaattctttaagagcaatgatgattgagcttggaatttataaacctaatgaaatttcttcgattgaaattccaacaggatcccctctttgcataaa

SEQ ID NO: 291638 - DNA, 248 bp, Unknown
  Bacterial polypeptide expressing nucleotide sequence isolated from the Sargasso Sea
attgaacaagaaagtcttactattaattcttgatggttggggaattgcagataacaaagatgcatctgcacctgacaaggcagatactccaaattttaattcgttaattgaaaattacccaaataattttttaataactcatggtgaaaaagttggtttgccgaaaggtcaaatgggaaatagtgaagttggtcatatgaatattggttcgggaaggatagttctgcaagatcttcttaaaattaata

SEQ ID NO: 291639 - DNA, 603 bp, Unknown
  Bacterial polypeptide expressing nucleotide sequence isolated from the Sargasso Sea
tatgagtcatttaattttagtaagacacggccagagtgagtggaatttagaaaaaaaatttaccggatgggtagatgttgagcttgcaccaaatggaaaattagaagcttgtaagtctggtgagcttattaaagaactaaatttaaatttagattattttttttgttcttaccaaaaaagagcaatagaaactttaaacttaatattaaatactttaagaattaaaaataatgatgtgatcaaggcctgggaacttaatgaaaggcactatggtgctttaactggtcttaataaagatgaaatgaaaaaaactttaggagaagataaagttttagaatttaggaggtcttgggatattagaccagaaccactaaacaaaaataacccttaccatcctattaatattgaaatttacaaaaatattccaaaggataaaattcctgatactgagtctttaaaagatacttatgaaagagtaattccttattttaaaaaaaatatctcagataaactaaataaaaatataattattgcagctcatggaaattcgatcagagctttatgtaaacatttatttaatatagataatgaaaaaatttcaaa

SEQ ID NO: 291640 - DNA, 88 bp, Unknown
  Bacterial polypeptide expressing nucleotide sequence isolated from the Sargasso Sea
atgagtcatttagttttagtaagacatggacaaagtgagtggaatttacaaaaaaaattcactggctgggtagacgttgatctaactc

SEQ ID NO: 291641 - DNA, 565 bp, Unknown
  Bacterial polypeptide expressing nucleotide sequence isolated from the Sargasso Sea
atgagttttttaatattagtaagacatggtcaaagcatttggaaccttgaaaaaagattcactggttgggtagatgttaaactcacaaaaaatggggaatctgaggccaaaaaagcaggttttttaataaaagatacaaatattagaattgatcaatattattcatctctccaattaagagcaaaccataccttagagataatacaggaagtattaaatgataaaaaaaagttttcacgagcttgggaactcaatgagagacattatggtgcacttacaggtttgaataaaattgaaatgagtaaagaaattggggaagagaaagttctcaaatttcgaagatcttgggatataagaccagatccacttgataaagataatccttatcatccatcaaatatcttaacttacaataacttacctaaagagaaaattccagatactgagtctttaaaagatacatatcaaagagtgacaaaattttttaagtatgagattgagaaaaagttgataactaataatatcttaatatcagcccatggtaactctatcagagcattatgca

SEQ ID NO: 291642 - DNA, 546 bp, Unknown
  Bacterial polypeptide expressing nucleotide sequence isolated from the Sargasso Sea
aaagagccatcaagactcttactaccatacttcaagaaaatgatttaaagcttaaatttaatacttcttgggagttaaatgagagacattatggatctttaactggattaaacaaagaagaaactaaaaagaaaattggtgacgaacagtttaaaaaatatagaagatcttgggatataccgcccccgccaattaatgagaatgataaaaatctttctttatttagtcctctaaacccaagtatacctgtaggcatgattccttttacagagtctttaaaagatacatataaaagagtaattccttattatgaaaaagaaattcaaaaaaatataaaagaaaataaaaacgttttaatatcagctcatggcaactcactcagagctttatgtaaatatctatttaaaatttctgatcaaaagattaatgaattagaaattccaactggaaatcctttgttgattgaatttgataataatattgaaattaaaaaatattattatttggatgaaatgagagcaaaaactatcatttttaatcaataat

SEQ ID NO: 291643 - DNA, 387 bp, Unknown
  Bacterial polypeptide expressing nucleotide sequence isolated from the Sargasso Sea
aatgggtaaactcatagcaatcagacatgggcaatcaacgtggaatcgagaaaatcgatttaccggttgggtagatgtagatttatcagaccgaggtgtagaggaagcagaaaagtctggaaaattattaaaagaattaaacataaattttgagatctttttcacttcatatctaaaacgggcaataaatacattagagataatattaaaagttcttaaaaaaaatgaaaaatatacaaaagcatgggaacttaatgaaagacattatggggccctaacaggtttaaacaaagatgaaaccaaaaaaaaactgggtgaggaacagtttaaaaaatatagaagatcttgggatattcctccaccaatattagataaaaattctaaatt

SEQ ID NO: 291644 - DNA, 370 bp, Unknown
  Bacterial polypeptide expressing nucleotide sequence isolated from the Sargasso Sea
atgagtcatttatttttagttagacatggacaaagtgagtggaatttacaaaaaaaatttactggatgggttgatgtcgatctcgcaccacaagggaaattggaggcctgtaaggctggagaagttataaaatcaacaaatgttaaaattgacttatttttcagctcttatcaattaagagcaataaatacattaaagttaataaaaaatactttaagaaataattcagaaattataaaagcatgggagcttaatgaaagacattatggatcgctcacaggtctaaataaagaagaaatgaaaattaaacttggagagaaacaaatacaagagtttagaagatcttgggacgttagacctgatccttaaa

SEQ ID NO: 291645 - DNA, 715 bp, Unknown
  Bacterial polypeptide expressing nucleotide sequence isolated from the Sargasso Sea
gatgggcaaactcatagcaattagacatggacaaagtacctggaatgctgaaaatcgtttcactggttgggtagatgtcgatctatcaaacaaaggcgtacaagaagctaaaaaatcaggagaattaataaaggatctaagtataaattttgatatctgttttacttcatatcttaaacgagccataaatacattagatattgtattagaagttattggaaagaaatataattatacaaaagcctgggaacttaatgagagacattatggtgctctgacgggtttaaacaaattagaaacaaaggaaaaaataggcgaggaacagtttaaaaaatacagaagatcctgggacattccgcccccaatattagacaaagattctaaatataactcagaaaaagaccccatatataaaagtgttaaaaaaatacctttaacggagtctttaaaaaacacctatgatcgggtggtaccctattttgaaaaaaatatagaaaaacatttaatattaaataaaaatattttactttcagcccacgggaatacgattagagctttgggtaaaaaaatttttaatatatccgacaaaaatattaatttactcgaaataccgactgggaacccgttgttaattaattttgataattcaggtaagtttattgatgcaaaatacttggatgattcgagaaagtctaaaataataactaatcaataa

SEQ ID NO: 291646 - DNA, 542 bp, Unknown
  Bacterial polypeptide expressing nucleotide sequence isolated from the Sargasso Sea
tgagacagagaaatatgctcatgttacttatttttttaatgggggagtagaggaaaaatttgaaggagaggatagaattttagttccctctccgagagttgaaacatatgatcgaaagcctgaaatgtcagcatttgaagttaaagataaagttttagagaatttacagaaaaaaaaacatgacttgatagttacaaattttgctaatcccgatatggtaggtcacacaggggacattcaagcaacaataaaagctgttgaagttgttgataaatgtttgggtgaaatatatgagagttgtaaagacaatggatattcgctcattattacatcagatcatggaaatgcagataatatgtatgataataaaaaaaatttagcatgtaccactcactcaattaatccagttccctttattatctgtgataatgtaaactttaacgtcaagtcaggcaatttggcagatatagcgcctacaatcctgaaaatgttaaatgtgaagattccaatagaaatggatgggattcctttaataaaatgaa

SEQ ID NO: 291647 - DNA, 241 bp, Unknown
  Bacterial polypeptide expressing nucleotide sequence isolated from the Sargasso Sea
tatgatcattaataaacttgttttattacgacatggtgagagtcagtggaatctagaaaatagatttacaggatggactgatgttgatttaacaaaaaatggaattaatgaagcgaaaaatgcaggcgtattattatcagaaaataatattgaatttgataaagtatatgtatcttgtctcaaaagagctattaaaacgctcaaaatatgcttaaaacagctaaacaaatctaataatgat

SEQ ID NO: 291648 - DNA, 667 bp, Unknown
  Bacterial polypeptide expressing nucleotide sequence isolated from the Sargasso Sea
catgagtcatttaattcttgttcggcacggtcagagtgagtggaacctggaaaatcgttttacaggttgggtagatgttgatttagctgctaatggtaagttagaagcgtgtaaggctggtgaattaataaaggaattaaatttaaaatttgaatatttttatacatccttgcagaaaagatcaattatgacacttgatttaatattaaatactatgagagtcaaaaaccaagatgtagtaaatgcatgggagttaaatgagagaaactatggagctttaacaggtttaaataaggacgaaatgaaaaaactttatggtgaagaaaaaatacatatttttagaagatcatgggataatccaccagaggcactcaaaaaaacaagtccatatcatccattaaatattgatatatataaaagcgttccaaaggataaaattcctgatacagagtcattaaaaaatacttatgatagagtcataccttattacaaaaacaatattgaaccaaaattatataaaaatataattgtttctgctcatggaaattctataaggtcactatgtaaatatttgtttagtctggataatattcaaatttccagtttagaaatccccacaggaaatcctcttttaatagaaactgaaaaaggtaagattaaaaatgct

SEQ ID NO: 291649 - DNA, 270 bp, Unknown
  Bacterial polypeptide expressing nucleotide sequence isolated from the Sargasso Sea
ttattccttacttcgaaagtgatatcaaaccgcaaattcaagctgggaaacaggttttaatctgcgcccatggcaatagtctgcgtgcgctggtgaagtatctcggcgacatttctgacgaagaaatcgtaaagctcaacatccctactggagtgccgatggtttatgagctggacgacaatctcaaacccattaaaaactactatttgggcgatgccgaagctgcagcgaaagcggcagaagcagtcgccaaccaaggtaaggcgtaag

SEQ ID NO: 291650 - DNA, 277 bp, Unknown
  Bacterial polypeptide expressing nucleotide sequence isolated from the Sargasso Sea
atgaataataggcttgttctgcttcgccacggacaaagcatttggaatttagaaaacaaatttactggatggactgatgtagggctcactaaaaaaggtattaaagaggcagagagagcagggaatgttttatcgaaaaatgattacttttttgacactgtatatacatctttcttgagaagggcaaaagatacaatgcgaatatgtcttgggcaaattgataatcaaccattgaatatcattacaaattggagattaaatgaacgtcattacggat

SEQ ID NO: 291651 - DNA, 313 bp, Unknown
  Bacterial polypeptide expressing nucleotide sequence isolated from the Sargasso Sea
aatggagatacctgtggcaggcaaactagtcttatgcagacatggtcaaagtaagtggaatttagaaaataaattcactggctgggaggatgttgatctaacccaattgggagaagaagaagcacaaaaagcaggcatggaattaaagtccactggaattgcttttgatattgcattcacatccctattgaaaagagcaaataagactttgttttcaattcttgagcaaatggatttaacctggatccccatcactcatgcatgggagctgaatgagagacactatggtgctctacagggaaaaaataaagct

SEQ ID NO: 291652 - DNA, 754 bp, Unknown
  Bacterial polypeptide expressing nucleotide sequence isolated from the Sargasso Sea
atgaatttaatttttgttagacacggtcaaagcatttggaatttggaaaataaatttactggatgggttgatgttgaattatcagaaagaggagtaaaagaagctgaagaagctggaagaactcttttatcatacaaatttacacctgaaatatgtgcgacatcatttctccaaagatctaaatcaacagcagaaataattttaaacaaaatgagagaagaaattgaactcaatattgaaaccaaacaaatttggcagcttaatgagagacattatggcgcattacaaggcttagataaagttgaaacagcaaagcaatacggggaagaccaggtgcaactttggagaagaagttatgatgtacttccaccgcctgctaaaaaaggttctaagtttgatcctaagacagataaaaaatacgaaaatattaatgaagaattacctttaggtgagtcattagaaaaagttgtagaaagagtaaattcgacttttacaaatctattagaattagcaaaaacaaagcaagtattagtggttgcacatggtaatagcattagagctatggttaagatgctagacaacttatctaatacagagatagtagatgtcaacatacctacaggaattccactagcatataaaatatctgaaaatgaaaatgtaaaaataggatatttaggcgatacagataagattgaacaacttcaaaaagaagttgaacttcagtcaaaagtaaaagatgagaaaggctaat

SEQ ID NO: 291653 - DNA, 319 bp, Unknown
  Bacterial polypeptide expressing nucleotide sequence isolated from the Sargasso Sea
tatgagtaaactaatcttaacaagacatggccaaagtacttggaatgctgaaaatagatttacgggctgggtagatgttgatctttcagagaaaggcaaagaagaagctaaaaagtcaggtgagttaataagagaattgaatatcaaaataaatattagttatacttcttaccttaaaagagcaattgaaacgctcacaattgtcttaaaaactttaaatttacccatgaagtttaatacttcttgggaattgaatgaaagacattatggttcattaacaggtttaaataaggaggaaacaagaaagaaaatttggtga

SEQ ID NO: 291654 - DNA, 220 bp, Unknown
  Bacterial polypeptide expressing nucleotide sequence isolated from the Sargasso Sea
atgccgcctgtagttttatgcattttggatggatggggtttatccaaagataagattagcaatgccccgttgctagcaaaaacacccaactatgaccatttatggcaaacttgcccaaaaacaaaacttttaacccatggggtagatgttggattgccaaaaggccaaatgggaaactcagaagtggggcatatgaatattggtgccggcgaggataatc

SEQ ID NO: 291655 - DNA, 512 bp, Unknown
  Bacterial polypeptide expressing nucleotide sequence isolated from the Sargasso Sea
agaaaatggtttggaacttaaatttaatacttcttgggaattaaacgagagacattatgggtctttaactggtcttaataaagatgaaacaaagaagaaaatgggagaagagcaatttaaaaaatacagaagatcttgggatataccaccgccaccattatctgaaaatgacaaaaatcattccttatttagtcctttaaacgcaagtatacctttgggtatgataccatttacagagtctttaaaagatacttttgcaagggtagttccttattatgaaaaagaaattaaaatacatattaaaaaaaacaaaaacgttttaatatcagcgcatggaaattcattaagagctttatgcaaaagtttatttaaaatttctgatcaaaaaataaatgagttagaaattccaactggtaatcctttgataattgaattcgataataatcttgaagttaagaaatatcattatttagatgagactagagctaaaactattatatttaatcaataat

SEQ ID NO: 291656 - DNA, 511 bp, Unknown
  Bacterial polypeptide expressing nucleotide sequence isolated from the Sargasso Sea
aaacatgctggtttattaataaaagaactcaatatagaatttgatcgattatttacttcagttttagatagagcaaaactcactggaacaatcattttagagaatatcaatcagaaagatttagatgtaatagaaaacaaagctctcaatgaaagattctatggtgaccttcaaggtcttaataaagatgaatgcaggcaaaaatggggtgctgaacagatacaaatttggagaagatcttatgatgttggtccgcctgggggagagtcacttaaagaaactggagagagagttttaccatattatttaaatgagattcacccattaatacttcaaggcaaaaatattttggttgctgcacatggaaattctcttagatcattaataatgcatttagacaaattatcttctgataaaattgttaaattggaaataccaactggggctcctattcaatatatctttgatgatcagggcgaagtattaacaaaaaagaatttaatagaataat

SEQ ID NO: 291657 - DNA, 527 bp, Unknown
  Bacterial polypeptide expressing nucleotide sequence isolated from the Sargasso Sea
catgagtcatttaatattaattagacatggtcaaagtgagtggaatttagaaaatagatttactggctgggttgacgtagatcttgcaccaaaaggaaagctagaggcatgtaaatcaggggaattaataaaagaaaaaggcttaaaaattgacttttattttacctcttatcagaaaagagcaataaatactttaaatttaattttaaatacaatgagaattaaagatatagaaataattaaggcatggcagctgaatgaaagacactacggatcgttaacaggtctaaataaagatgagatgaaaaaaaaattgggtgaaaaaagagtacatgaatttaggagatcatggaatatagcacccgaacctttgagtaaaaataatccttatcatcctataaatatagagacgtataaaaatgtacctcgccaaaatatgcctgacactgaatctttaaaagacacttatgatagagtttttccttattttaaaaaagaaatattaactaagttagttaaaaaaaaaa

SEQ ID NO: 291658 - DNA, 363 bp, Unknown
  Bacterial polypeptide expressing nucleotide sequence isolated from the Sargasso Sea
aatgagtcatttaatattagttagacacggacagagtgaatggaatttacaaaaaagattcactggatgggtagatgttgatctgacagctaatggaaaactagaagcatgtaaagccggtgaattaattaaagatttaaatattgaaattacttatttctattcctcatatcaaaaaagagctctgaatacgttaaaactaatattaaatactatcagagtaaaaaatgaaaaaattgttaaagcttgggaactaaatgaaagaaactatggcgaacttacaggattaaataaagatgaaatgaaaaaaaaatatggtgatgataaaatttttaagtttagaagatcttgggacatacttcc

SEQ ID NO: 291659 - DNA, 371 bp, Unknown
  Bacterial polypeptide expressing nucleotide sequence isolated from the Sargasso Sea
tatgagcaaattaatcctagtaagacatggtcaaagtgtatggaacgcagaaaacagatttacaggatgggtagatgttgatttatcggaaaaaggaattttagaggcccagaaatctggtcaattaattaaaaatctaaatattaatatagatgtttcttacacatcttttctaaaaagagccattaaaactcttaccaccatacttaaagaaaatggcttggagcttaaatttaatacttcttgggaattgaatgagagacattacggatctttaacgggtttaaataaagatgaaactaaaaagaaaataggtgaggaacagtttaaaaaatatagaagatcttgggatataccaccgcccccaatag

SEQ ID NO: 291660 - DNA, 578 bp, Unknown
  Bacterial polypeptide expressing nucleotide sequence isolated from the Sargasso Sea
aatgagttatttaattttagtaagacacggtcaaagtgtatggaatcttgaaaaaaaatttactggatgggttgatgtagatttaacagaaaatggaaaatcagaagcaaaaaaagctggtgtattaataaaacaagaaaaaattgaatttaatctgtattactcttcttttcaattaagagccaaaaatactttaaaaattatacaggaagaactaaaagattttaaagatgtaaaaaatgcatgggaattaaacgagagacattatggagctctgacaggattaaataaagatgaaatgaaaataaaacttggagaagaaaaagttcatcaatttagacgttcttgggatcttagacctgaccctttagataaaaaaaatccatatcatcccttaaatattcaaacttacaaagaagtccctactgataaaattcctgacactgaatcgttaaaagatacatatgaaagagtaataaaattttatagtaaagagatagaaaataaaacaagtgaaaatattcttatttctgcacatggaaattctattagagccctttgtaaatatttgttcaatt

SEQ ID NO: 291661 - DNA, 288 bp, Unknown
  Bacterial polypeptide expressing nucleotide sequence isolated from the Sargasso Sea
aatgggaaaactcatacttatcagacacggacaaagcacttggaatgcagaaaatcgttttactggttgggttgacgttgatctttcagaaaaaggtgtatttgaagcagaaaagtctggaaagttattaaaagagttaggtttagagtatgaagcttgttttacttcatgcctcaagagggcaataaaaacattagagatagcattaaagattgctggaaaagaaagtaaatatactaaagcttgggagcttaatgaaagacattatggagctttaacaggattaga

SEQ ID NO: 291662 - DNA, 250 bp, Unknown
  Bacterial polypeptide expressing nucleotide sequence isolated from the Sargasso Sea
atgagtaatcttatacttgtaagacatggacaaagcgagtggaatttagaaaatagatttactggttgggtagatgttgatttagcaccaagaggaaaacttgaagcttgtaaagcaggggagttaataaaaaaacttaatataaatataaaccatttttattcttcttatcaaaagagagcaatagacactctagaactaatattgacaacaatgagaataaagaatgataaagttatcaaagcatggg

SEQ ID NO: 291663 - DNA, 499 bp, Unknown
  Bacterial polypeptide expressing nucleotide sequence isolated from the Sargasso Sea
atgagttttttaatattgataagacatggacaaagtatttggaatttagagaagagattcactggctgggttgatgttgatcttacagatagaggtagagctgaagcaaaaaaagcaggttttttaataaaaaaaaagaatattgaaattcactattattactcttctctacaattacgagcaaataacacacttaaaattattcaaaaagttttaaatgataagaaaaaattttctagagcttggcaacttaatgaaagacattatggtgctcttactggattaaataaaattgagatgagtaataaaattggagaggataaagtatatgaaattcgtagatcatgggatattaaaccagaacctcttgataagaaaaatccttatcatccaataaatatagaaacatacaatagtatggctaaagaggatcttccagatgctgaatctttaaaagacacttacgaacgagttacaaaatatttggagaagaaataaa

SEQ ID NO: 291664 - DNA, 304 bp, Unknown
  Bacterial polypeptide expressing nucleotide sequence isolated from the Sargasso Sea
catgccaagaagaaaaccaccagttgctctcgtcgtgcttgatggatggggcattagcttcgaacgcgaccataacgcggtcatgcttggaagcacacctagctacgatgaattgctcgaccgtttcccgcacggttcgcttgtcacgagcggagaagccgtcggtcttcccccaggtcagatgggaaattcagaggtaggccatatgaatctcggtgcaggacgtgtggtttatcaggatttgacgagaatcgaccacagcatccgaaccggcgatttcttcaaaaatgacgcccctttgtaa

SEQ ID NO: 291665 - DNA, 532 bp, Unknown
  Bacterial polypeptide expressing nucleotide sequence isolated from the Sargasso Sea
attggttttgataaaaacaaaattgtatatgactggagactaaatgaaagacattatggtgcattagaaggtttaaataaatcagaaacagctggtaaatatggagaaaaacaagttctaatatggagaaggagttttagcactcctcccccacttcttaaaaataatgattttagacaccccaaaaattcaatgctttttaaagatatttcaattgataaacttccatcaggagaaagtcttaaagatgttattataagattgaaccctttttgggaaaaatttttaaaaaatgttaaacaaagttcacaaaatcacttaattgttgctcatagtaattcactgagagcaattgttaaaattttggaaaatctttcagagaaagaaatattaaatgtaaatattcctacaggaattcctctggtgtacgagctagataccaaatttaatataattatgaaaaattatttgatcgatagtaatactcttaaagaaaaacaggctttagtagaaaatcaaggtaaaaaatgaa

SEQ ID NO: 291666 - DNA, 657 bp, Unknown
  Bacterial polypeptide expressing nucleotide sequence isolated from the Sargasso Sea
tatgagtcatttaattttagtaagacacggccagagtgagtggaatttagaaaaaaaattcactggatgggtagatgttgagctcgcaccaaatggaaagttagaggcttgtaagtctggagagcttattaaagaacttaatttaaatttagattattttttttgttcttatcaaaaaagagcaatagaaaccttaaacttaatattaaatactttaagaataaaaaataatgatgtgatcaaggcctgggaacttaatgaaagacactatggtgctttaactggtcttaataaagatgaaatgaaaaaaactttaggagaagataaagttttagaatttaggaggtcttgggatattagaccagaaccactaaacaaaaataacccttaccatcctatcaatattgaaatttataaaaatattccaaaggataaaattcctgatactgagtctttaaaagatacttatgaaagagtaattccttattttaaaaaaaatatctcagataaattaaataaaaatataattattgcagctcatggaaattcgatcagagctttatgtaaacatttatttaatatagataatgaaaaaatttcaaaactagaaattccaacaggaaatcctttgttaattaaatttgataataataaaaa

SEQ ID NO: 291667 - DNA, 631 bp, Unknown
  Bacterial polypeptide expressing nucleotide sequence isolated from the Sargasso Sea
atgagtcatttatttttagtaagacatggacaaagtgagtggaatttacaaaaaaaatttactggatgggtcgatgttgatctaactgctcaaggaaaactagaggcttgcaaagctggggaagtaataaaatcgacaaatatcaaaattgatctatttttcagctcttaccaattaagagcaataaatacattaagattaataaaaaatacattaagagataattctgaattcacaaaagcttgggagcttaatgaaagacactatggttcactaacaggtctaaacaaagacgaaatgaaaaatcaactaggagaaaaaaaaatacatgagtttaggcgatcatggaatacaaggcctgatcctttaaaccaaaatagtccttaccatcctataaatattgatatttataaaaatattccaaaagaaaatattccagatacagagtctctcaaagatacatataacagagtggttaattatttttctaaaaaaattaatacggaaattaaaaatgaaaaaaatattcttatatcagcacatggaaattcagtaagagcactttgtaagtttttatttaaattagatgaaaaacagattcctaaacttgaaatacctacaggaaatcctc

SEQ ID NO: 291668 - DNA, 631 bp, Unknown
  Bacterial polypeptide expressing nucleotide sequence isolated from the Sargasso Sea
aatgacatatttaatattagttcgacatggtcaaagcaaatggaatcttgaaaagagatttactggttgggttgatgtagatttaaccaaagaaggtaaattagaggcagaaaaggctggatttttaattaaaaaaaaaaatatctctattgatctatattattcatcacttcaactaagagcaaataatacccttaaaattattcaagaggttttgaatgatgaaaaaaattttataaaagcttggcaaataaacgagagacattatggagctttaacaggactaaacaaaacggaaatgagccacaaacttggtgaggataaattacataaatttagaagatcttgggaaagtaaaccggagcctttaagtaaggaaagcccttatcatccatttaatattggtgcatacaaaaatgtgccaaaggagaatatacctgatactgagtctttaaaggatacctatgaaagagtaattaagttttatgatgaagaaattaaaaaccaattaggaaataagaatatcctcatttcagcacatggaaactctataagagctttatgtaaatatttatttaaattggataatgatcaaatctctaaattagaaatacccactgggaaacctttt

SEQ ID NO: 291669 - DNA, 382 bp, Unknown
  Bacterial polypeptide expressing nucleotide sequence isolated from the Sargasso Sea
ctgcgtcatggagaaagtcaatggaatctagaaaaccgttttactggatggactgatattaatcttacagaaacaggtgaaaaagaagcggtaaaagcaggaatattattaagaaaggaattatttcaatttgatttagtttttagctcagtattaaagcgtgctattgatacaatgcaaatatgcttatccacaatgaattttgatgattctatacctattgagtatgattggcgtcttaatgaacgccattatggcgctcttcaaggtttaaataaatctgatacaacaaaaaaatacagcgaaaaacaagttcttttatggcgaaaaaggtataacactcctcccccactattagattttaaagataaaagacacccta

SEQ ID NO: 291670 - DNA, 121 bp, Unknown
  Bacterial polypeptide expressing nucleotide sequence isolated from the Sargasso Sea
atggtgcaccttgtattaataagacatggacagagtgaatggaatagtcaaaataagtttactggatgggttgatatagatttatctgaaaaaggtaaaagagaggcaataactgctggta

SEQ ID NO: 291671 - DNA, 613 bp, Unknown
  Bacterial polypeptide expressing nucleotide sequence isolated from the Sargasso Sea
atgagttttttaatattagtaagacatggtcagagtatttggaatcttgaaaaaagattcaccggttgggttgatgttgatcttacagatcaaggtaaaatagaagctgagaaagctggtctacttatcaaaaatcaaaatataaatatagatttttattattcttcgtttcaattaagggcaaaccatactcttaaaataatacaaaaagtattaaaatcaaaaaacgattttgtaagagcatggcagctaaacgaaagacactatggtgagcttacagggttaaataaaattgagactgcaaaaaaaattggtgaagataaagtttttgaattccgaaggtcttgggatatcaaacctggaaaactaagtagagaaagctcttatcatccactaaatattgaaacatacgaaaaaatacccaaagagctaattcctgacacagaatctttaaaagatacatacaatagagtttttgagtatttcaaaaaagaaatacagcctaaactaataaataaaaatatattaattacagcacacggaaactccataagagctttatgtaaatatatattcaatttagataacaatcaaatcacaagtttagaaattc

SEQ ID NO: 291672 - DNA, 364 bp, Unknown
  Bacterial polypeptide expressing nucleotide sequence isolated from the Sargasso Sea
atgagtcatttaatattagttagacatggacaaagtaattggaatttagagaatcgctttacaggttgggtagatgtggagctatcttcgaaaggaaaggaggaagcaattaaggcaggacagttaataaaagagctagatattaaaatcgaaagtttttttacatcatatttaataagagcaataaaaactttagaattaattatgaacaatagcattaataacaatatcaaagtcaaaagggcatgggaacttaatgaaaggcattatggtgcattgaccggattaaataaaaatgagatgaaaaagaaattaagtgaagaaaaagtgcacgaacttaggaggtcatgggaccaactccaga

SEQ ID NO: 291673 - DNA, 442 bp, Unknown
  Bacterial polypeptide expressing nucleotide sequence isolated from the Sargasso Sea
tatgaatttaatttttgtaagacatgggcaaagtgtttggaatttagagaacaaatttactggatgggttgatgtaggattatcagaaaatggggtaaaagaagcgtcaaatgccggcgatttattagttaacgaaaaatttacccctgatatttgctttacgtcgtttctcaaaagatctatagatactgctgatattttgttaaataaatatgaaaataaattaaataacaattttcaattgattagagattggaggctaaatgagcgtcattatggatctttacaaggcttagataaattagaaactgcaaaaaaatttggtgaagataaggtccttcaatggagaagaagttttaatatacagccaccactagtaaatgagaattcagaatttgatccaaataatgacgatttatataagggtattgatattgaatta

SEQ ID NO: 291674 - DNA, 819 bp, Unknown
  Bacterial polypeptide expressing nucleotide sequence isolated from the Sargasso Sea
ctgtgatcttcatgaatttccgtgctgaccgtgccattgaattcagtgaagcgttggtcaaggaggattttgcgcactttcccagagatcctttcccccgtgtctgttttgcgtcgatgatgcaatatgatctggataatggattccccgagcattttctggcaggcacaccgagggtggacaatccctttggcaaaaggctggtggagcagggcatcaaacaattcaggctcactgaaacccagaaatttcctcatgtcacttttttctacaacggcggataccgtgaaccacttgacccaaaaatagaagattatcatctgattccctcggacaaggttccgacttttgcagatgcacccatgatgaaagcatctgaaatcgggaaaagggcggtggaattcattcattccgaagcatacggttacgggttgatcaattttgcgaacgccgacatggtcgggcacaccggggatcttgaagccgcagttcaagcagtggaatcggtggatcaggctctcggacagatggttgaggcggtgaaagcggtcaatggattcatggtcatcaccgcagaccatggaaacgccgatgagatgctgacaaagaaccgggtcagcggggaaaccgaggcctcaaccaagcattcactgaatcctgttccattcctggtatatgaccccttgtatgatggcagttaccgtctcaaagactttgctgcaaaccaggatctcaatttgagtcatgttgcagctaccaatttcattttgatgggcctggaggttcctgatgacctggcccctcaactttttctttagt

SEQ ID NO: 291675 - DNA, 511 bp, Unknown
  Bacterial polypeptide expressing nucleotide sequence isolated from the Sargasso Sea
atgaaaccaacgatactctgtataatggatggctggggaataagctcaaacaaaaagtataacgctgttagtcaggcaaaaacccccattttcgatcagctggttagacaatggccaaatagtttaatgcacgcttcaggcgaacatgtagggctacctgagggtcaaatgggaaattccgaagtaggacatatgaacataggggctggacgtgttattctacaggacctgcccagaattaaccaagcaatcaaatcaaataagctatctaaaaataaagtattaaaagacttcatttcagctactaaaaaatccgggggcaaatgcaatctcgttggattactatccgatggtggcgtccatagccatcagacccacattgaagcactcgcaaaaaccatagcaagttccggagttccagttgtgcttcacgggattttagatggacgcgacactgctccaagcagtgctttgaaattcattgaaaactttttacatactgcaaatgaaa

SEQ ID NO: 291676 - DNA, 415 bp, Unknown
  Bacterial polypeptide expressing nucleotide sequence isolated from the Sargasso Sea
tggagatatcattcttagctgtatggaccaaaggaacattgaggtagtttctgactctgcacttaatgaaagggactatggtgagcttacagggatgaacaaggatgaagcgagaaaaaattttggggaatctcaagtccaaatatggagacgatcttatgatatgccacctcctggtggagaaagtttaaaaaatacttttgaaagggtgttgccctactttaataaatatatccatccaagattaagcaatggtgagagcattctcataacagcacatggaaattctttacgatcgcttgttaagcaccttgaggaaatatctgaggaaaaaattgtaaaactagagattgctaccggtgaaccaattttttacgagttcataaatggaaaggtacagaagattgttaggtaa

SEQ ID NO: 291677 - DNA, 373 bp, Unknown
  Bacterial polypeptide expressing nucleotide sequence isolated from the Sargasso Sea
tatgaacaaacttgttttacttagacatggtcaaagtcagtggaatttagaaaatagatttactggctggaaagatgttccattaactgaaaaaggcattaaagaagctaataatgcaggatatttattaaaaaaacataatataaaaattgataaagtttttagtagtgttttagaaagagcaaataagacagcagaattagctataaaagcatcagaaatagaaaatttacataaaaatggaaaattaatttatgtaaaaaaccaaaatctaaatgagagggattatggagatttagttggtttaaataaagctgaaactgccgataaatttggaaaagaacaagtgcatatatgggagaagatcttatga

SEQ ID NO: 291678 - DNA, 157 bp, Unknown
  Bacterial polypeptide expressing nucleotide sequence isolated from the Sargasso Sea
atgagctatttgattcttgtgagacatggtcaaagtgaatggaacaaagaaaatagatttactggatgggtagacattgatcttgcagctaatggcaaattagaagcctgcaaagcaggagaattaataaaagaattgcgtattaatttagatcatt

SEQ ID NO: 291679 - DNA, 544 bp, Unknown
  Bacterial polypeptide expressing nucleotide sequence isolated from the Sargasso Sea
atgaattatttaattcttattagacatgggcaaagcacttggaatctagagaaaagatttacaggctgggtggatgtagatttgacaaaaaatggaaaatcagaagcaaaaaaggccggccaattaattaaaaatgaaaaaataaatatagatctatattatacatcatttcaattaagagcaaaaaatactttaaagataatccaaaatgaattgaaagataacaaagatgtaaaaaatgcttgggaacttaatgaaagacattatggtgctctgacaggactaagcaaagataaaatgaaaataaaacttggagaggataagatctatcaatttagacgttcttgggatcttaagcctgatccattagacaaaaaaaatccatatcatcccttaaatatcgaaacttataaagaaatttcaaaagataaaataccagatactgagtcattaaaagatacatacgaaagagttataaaattttataaggatgaaatagaaaataaaaataataaaaatattcttatttctgcacatggaaatt

SEQ ID NO: 291680 - DNA, 610 bp, Unknown
  Bacterial polypeptide expressing nucleotide sequence isolated from the Sargasso Sea
aagattaaatttgatttaatatatgtatcctatcttaaaagggctataaatactcataaaatatgcctaaaacagttagaaatggaacctaatgaaactatttaccattggaggttaaatgagcgtcattatggcaacctacaaggtttaaataaaactgaaacagcaaaaaaatatggagataaccaagttttaatatggagaagaagttatgatattcctcctcctaaacttgatttgaatgataaacgccatcctaagtatgatattttatataaagatgttgatgctcgtgagctccctgattctgaatctctaaaagatactcttaaaagagttaacccattatggactaatcaaattgttcctcaattaaaaaatagtaaaaatgttatgatcgttgcccatggcaattctttaagagctattgttaagattttgaaaaaaatatctgatgaagatatagttaatgtaaatataccaacaggaattccatatatttttgagtttaatgatgattttagtgttaagagagattattttctaggaaaccaagataagatattgaaaaaaattgaagatatttctaagcagggaaattcaaaataat

SEQ ID NO: 291681 - DNA, 286 bp, Unknown
  Bacterial polypeptide expressing nucleotide sequence isolated from the Sargasso Sea
atgagttttttggtattagtaagacatgggcagagtacttggaatctcgaaaaaagattcacaggttgggttgatgttgatctaacagatcaaggtaaaatagaagctgagaaagctggtttacttattaaaaatcaaaatatagatatagatttttattattcttcatttcaattgagagctaacaatactcttaagataatacaaaaaatattaaaaacaaaaaaagattttgtaagagcatggcagctaaacgaaaggcattatggtgagcttacaggatgaa

SEQ ID NO: 291682 - DNA, 295 bp, Unknown
  Bacterial polypeptide expressing nucleotide sequence isolated from the Sargasso Sea
tatgagttttttaattttagtaagacatggccaaagtctttggaatcttgaaaaaaggttcactggttgggtagatgttgatcttacagataatggtaaattagaggcaaaaaaagctggtcatctgatcaaagaaagcaatattgatataaatttttattattcctctcttcaattacgtgcaaataatactctaaaaataatacaaaaaattctgaaagatgaaaaagatattgttaaagcttggcaactaaatgagcgacactacggggctttcaccggattaaataaaatt

SEQ ID NO: 291683 - DNA, 709 bp, Unknown
  Bacterial polypeptide expressing nucleotide sequence isolated from the Sargasso Sea
aatgagttacttaattttagttagacatggtcaaagtgtctggaatctagaaaaaaaatttactggatgggtggatgtagatttaacagagaatgggcaatcagaagcaaaaaaggctggccaactaataaaacaagaaaatattgaaattaatctttattattcttcgtttcaattaagagcaaaaaatactttaaaaataatacaagaagaattgaaagattttaaagaagtaaaaagtgcatgggaattaaacgagagacattatggagctctgacagggttaaataaagatgaaatgaaaaaaaaacttggagaagaaaaagttcatcaatttaggcgttcttgggatcttagacccgaccctttagataaaaaaaatccatatcacccactaaatattgaaacatacaaaaaaattcctttagaaaaaattcctgatactgagtcactaaaagatacatatgaaagagtaataaaattttatagtaacgagatagaacagaaatcaagtgaaaatattcttatttctgctcatggaaattccattagagctctttgcaaacacttgtttaatttagatgacaatcaaatctctaaacttgaaattcctacgggaaatcctcttgtaatcgaattagaaaatagaaaaatttctaattgcaaatatcttgatcaagaaagagctaaagatcttttaattttttaa

SEQ ID NO: 291684 - DNA, 421 bp, Unknown
  Bacterial polypeptide expressing nucleotide sequence isolated from the Sargasso Sea
atgaataaacttgttttacttagacatggccaaagtcaatggaatctagaaaataaatttactggatggaaagatgtgcctctcacagagcaaggaattagtgaagctagaaatgctggaaaactaataaaaaaaaataaaattaaatttgataaaatattcagtagtgttttagaaagagccaatcatactgctaaaatagcagtaaaagaagcagaaatgaatgatttttttgataatgataatttaatttatacaagaaaccaatctttaaatgaaagagattatggcgatttggtaggtttaaataaagctgaaacagctgagaaatttggaaaagaacaagtgcatatttggagaaggtcatatgatactccacctccaaatggtgaaagccttaaagatgtagttcagcgtgtct

SEQ ID NO: 291685 - DNA, 374 bp, Unknown
  Bacterial polypeptide expressing nucleotide sequence isolated from the Sargasso Sea
aatgagtcatttaatacttgtcaggcatggtcaaagcgaatggaatttagaaaataaatttacaggatgggtcgatgttgaacttgcaccacaaggtaaattagaagcctgtaaagctggagaatttataaaaaaattaaatatacaaattagacatttttatacttcttatcaactaagatcaattgatactttaaaactcattttaaatacaatcagagtaaaaccaaataatataattaaggcctggcaattaaatgaaaggcactatggatctcttacaggattaaataaagatgaaatgaaaaaaaaattaggagaagaggaagttcacaaattcagaagatcttgggataatccgccaaaaccattga

SEQ ID NO: 291686 - DNA, 283 bp, Unknown
  Bacterial polypeptide expressing nucleotide sequence isolated from the Sargasso Sea
gaaggcatgccgagttgatgcaggtccggatggccaagcctggacagcccacaccaccaatcctgtgcctgcgatcctgatcgaaggagaacggcgcaaactgcctggccatggcaacgcaatcacacttcgcgacaacggggggctggccgatatcgctccgacgttgctgcaaattcttgaccttccgcaaccggcggccatgactggccaaagcctgattgcacccatgtccaacatggaccccacccccaagaccgctcgccttcctctttccgtttga

SEQ ID NO: 291687 - DNA, 454 bp, Unknown
  Bacterial polypeptide expressing nucleotide sequence isolated from the Sargasso Sea
atgagttttttaatattagtaagacatggccaaagtacttggaatttagaaaaaagatttactggatgggttgatgttgatctcactgatacagggaaatctgaggcaaaaaaagctggttttttaattaaagaaaaaaatataaaaattcatttttattattcatctcttcaattaagagcgaataacactcttaaaataattcaaaatgttttaaatgatgaaaaaaaattcactagagcttggcaacttaatgaaagacactatggatctttgactggattaaataaagtggaaatgagtaaaaaaattggggaggataaagtatatgaatttcgcaggtcttgggatatcaggccagaagctcttgataaaaaaagtccatatcacccacaaaatatagaaacatacgatagcatcccaagagaaattcttcctgacacagaatcttaaa

SEQ ID NO: 291688 - DNA, 445 bp, Unknown
  Bacterial polypeptide expressing nucleotide sequence isolated from the Sargasso Sea
atgtgtaaggctaaaaagaaatctattgttttgtgtgtcctcgatgggtttggattaagagaaaaaaaaagaggtaatgcagtatctttagcaagtacaccaaatatagaccgacttctcagaaattaccccaatagtactttaacaacatttggtaaagaagttggtctgcccgaaaatcaaatgggaaattctgaagttggtcacatgcatataggtgcgggaagaataattcaaagtatgttgccaaggatagacgatgcgatatccagtggggctttgattaacaataatgatttattaaagatactatcggatacaaagttaagtggaggtgaaactcatattgctggactgatctccgatggaggtgtgcatggacactctaggcaccttaaaagtttgatgaaggttgcctcaaaaaaaagttcaaaggtcaacttgc

SEQ ID NO: 291689 - DNA, 467 bp, Unknown
  Bacterial polypeptide expressing nucleotide sequence isolated from the Sargasso Sea
ttttttgttcacatctgctttgattcgagctcaattaacagggtcaaaaatcttggaaaaaattggtcaagaaaatatcaacataattaaaaataaatcactaaacgagagattttatggggaccttcagggtcttaataaagatgaatgtagaaaaaaatggggtttggatcaagttcaaatatggagaagatcttatgacgttggtccaccaggcggagagtctctaaaagaatgtggggaaagagttctgccctactttttagacaaaatatatccattggtattagagggcaaaaatattatagtttctgctcatggcaattccttaagatcattgattaaacatttagataaattatcagctgatgaaatcattaagttagaaatccccactggtgctccaattcattatcttttcagtgatgaaggattaatattaactaagaaaaacttaattgagtaat

SEQ ID NO: 291690 - DNA, 265 bp, Unknown
  Bacterial polypeptide expressing nucleotide sequence isolated from the Sargasso Sea
tatgaataatttaatacttgttagacacggacaaagtgaatggaaccttgaaaaccgttttactggctgggtggatgtaggtttagctgctaatggcaaactagaggcttgtaaggcaggagaattaattaaggaattgaaccttgaattatcctatttttatacatctttacagacaagatcgattgaaacactaaatttaatactcaatacaatgagaattaaagatcaagatgttgtaaatgctgggaataaacgagaggca

SEQ ID NO: 291691 - DNA, 615 bp, Unknown
  Bacterial polypeptide expressing nucleotide sequence isolated from the Sargasso Sea
tatgagtcatttaattttagtaagacacggccaaagtgagtggaatttagaaaaaaaattcactggatgggtagatgttgaattggcaccaaatggtaaattagaagcttgcaagtctggtgagcttattaaagaacttaatttgaatttagattattttttttgttcttaccaaaaaagagcaatagaaactttaaacttaatattaaacactttaagaattaaaaatgatgatgtgataaaagcctgggaacttaatgaaagacactatggtgctctaaccggtcttaacaaagaagaaatgaaaaaaactttaggagaagataaagttttagaattcagaagatcctgggatattagaccagaaccactaaacaaaaataatccttatcatcctattaatattgaaatttataaaaatatacctaaggatagaattcctgacaccgagtctttaaaagatacttatgaaagagtgattccttattttgaaaaaaatatcttagataaactaaataaaaatataattattgcagctcatggaaattcaattagggctctatgtaaacatttatttaatatagataataaaaaaatttcaaaactagaaattcc

SEQ ID NO: 291692 - DNA, 337 bp, Unknown
  Bacterial polypeptide expressing nucleotide sequence isolated from the Sargasso Sea
tgaaaggaccgtcaatttcgcatcgacacttggcatgattgaatattccgatgcgctcaattcattaattgaaccgttattcccttcaattggattgaagaatgtgttcggagatattttagcacaatccggtcgcaaacagctccggattgcagaaacagaaaaatacgcgcatgtcacattctttttcaacggcggccgtgagcagaaatttgctggcgaggagcgcatgttggtcgcctcacccgacgttgctacatatgatatgaagccagagatgtcggcacctgaagtcacagacaaactaattgcggcaatccgttcgggtaggtttgat

SEQ ID NO: 291693 - DNA, 463 bp, Unknown
  Bacterial polypeptide expressing nucleotide sequence isolated from the Sargasso Sea
tccctctcctgatgttgctacttatgatttaaaaccggaaatgagttgccaagaagtatcaacagaagtaataaatgcccttaaaaacgacgaatataagcttatagtagtgaattatgcaaatggtgacatggttggtcacactgcgaaaagagaggctattatagaggccatggagtgtcttgataaaaatctaggtgatgttttaaaggctgcattagaaaataacgttgctactcttgtaaccgctgaccatgggaatgtggatgaaattcttgatgcagagggtaatccaaatcctaaacattcgtgcaatcctgttccatgcgtagtagttgataggttaaagaaatggaagatgtctaacagcggtgggttatctaatatagccccaactatgctcgatctcatgaatattgaaaaaccaaccgcaatggatagaagcttaattgattctgactaa

SEQ ID NO: 291694 - DNA, 712 bp, Unknown
  Bacterial polypeptide expressing nucleotide sequence isolated from the Sargasso Sea
atgaataatttaatacttgttcgacacgggcaaagtgagtggaaccttgaaaaccgttttactggctgggtagatgtaggtttagctgccaaaggcaaacttgaagcttgtaaggcaggagagttaattaaagaattaaaccttgaattatcttatttttacacatccttacaaacaagatcgattgagacacttaatttaatactcaataccatgagaattaaaaatcaagatgttgtaaatgcttgggaactaaatgagagacactatggagcgttaacgggattaaataaagatgaaatgaaaaaacattatggagaagaaaaaattcatacttttagaagatcctgggacaacccaccagagccacttaaaaagacaagcccatatcatcctttgaatataaatatatataaaaatgttccgaaagataaaattccagatacagagtcattaaaaaatacttatgaaagagtaatacctttttataaaaaaaatattgaacctaaattagataaaaatattattgtatcagctcatggaaattcgattagatcattatgtaaatacttatttaaattagataatgaaaatatttcgagcttagaaataccaaccggcaatcctttattgattgaaactgaaaaaggaaagattaagaatgtaagatatttagataaagatagagcaaaagatcttttagttttctaaa

SEQ ID NO: 291695 - DNA, 432 bp, Unknown
  Bacterial polypeptide expressing nucleotide sequence isolated from the Sargasso Sea
tatgagtcatttaattttagttagacatggtcaaagtgaatggaatatgcaaaaaaaattcactggatgggtagatgttgaactgacaccaaatggaaaattagaagcatgtaaagctggtgaacttattaaagaacttaatttaaattttgactattttttctgttcttatcaaaaaagagcgattgaaactatgaatttaatcttaaacactttaagaattaagaatgataaagttattagagcctgggaacttaatgaaagacattatggtgcattaaccggacttaataaagatgaaatgaaaaaaactataggagaagaaaaagttcaagaattcagaagatcttgggatgttaggccagaacctttaaataaaaataacccttaccatcctattaatattgaagcttataaaaatataccaaaaga

SEQ ID NO: 291696 - DNA, 256 bp, Unknown
  Bacterial polypeptide expressing nucleotide sequence isolated from the Sargasso Sea
atgcagccgaaaaagccgttagtcttactgatattggatggatggggatacagagaagaacgtgagtccaacgccattttacaagccaataccccggtaatggacaagttatgggcagagtatcctcatacgctgatttctggctctggtctggatgtaggtttgccagatggtcagatgggtaactctgaagtaggtcatgtcaatttaggctcaggccgtgtggtgtatcaggattttacccgcataaccaaag

SEQ ID NO: 291697 - DNA, 505 bp, Unknown
  Bacterial polypeptide expressing nucleotide sequence isolated from the Sargasso Sea
atgagtcatttaattttagttagacatggacaaagtgagtggaacttagaaaatagatttacaggctgggttgatgtagatttagcggcaagaggaaaactagaggcttgcaaagctggagaattaataaaagagttgaatattagtatcgatttttattttagctcatatcaattaagagctatcaatacattaaatttaattctcaatacaataagaaaaaaaaatgtgaacataactaaagcttggcaattaaatgaaaggcactatggctctctaactggtttaaataaagatgaaatgaaaaagaaactaggtgagaaaaaagttcacgagtttagaaggtcttgggatatcgctcctgaaccactaagtaagaataatccatatcatccaataaatattgatgtttataaaaatattccaaagaatctaatacccgatacagagtcactaaaagatacttatgaaagagtattcccttatttgaaaaagaaatattaaa

SEQ ID NO: 291698 - DNA, 319 bp, Unknown
  Bacterial polypeptide expressing nucleotide sequence isolated from the Sargasso Sea
catgagttttttaatactagtaagacacggtcaaagtgtttggaatcttgaaaatagatttaccggctgggtagatgttgaccttacaaaaaatggaatgttagaggctgaaaaagcaggttttttaatcaaaaataaaaatattaaaatcgataaatatttttcatctctacagttgagagcaaataatactttaaagataatacaaaaaattttaaatgatgaggatgatttccctagagcttggcaactaaatgaaagacactatggagccttaactggtcttaataaaatagaaatggctcaacaaattgggtga

SEQ ID NO: 291699 - DNA, 499 bp, Unknown
  Bacterial polypeptide expressing nucleotide sequence isolated from the Sargasso Sea
gaagataataaataacttaaaaattaattttgacttggttttcacttctgcactaattagagctcagaatacagctgaaataattctcaaagaaataaatcagcctctatcaaccataaaaaatcaggctctaaatgaaagaaactacggagaccttgcaggtctcaataaggatgatgcaagaaaaagatggggcgatgaacaaattcatatttggagaagatcctatgatatacctcctcctggtggagaaagtcttaaagatactggtgaaagagtgctaccattttttatgaaagaaatactcccatatgtttgtgaaggtaagaatgttttagttgcagctcatggaaactctcttaggtcattaataaagtttcttgatagcatttcggacgaagacattgttaagttagaaatcccaactggggcgccaatacattatgtaatcaatgaggatggttcagttaagtcgaaacaagacttcttcaatgaatag

SEQ ID NO: 291700 - DNA, 340 bp, Unknown
  Bacterial polypeptide expressing nucleotide sequence isolated from the Sargasso Sea
atgggaaaactcatagcaattagacacggacaaagcacctggaatgcagaaaatcgtttcactggctgggttgatgtagatctttcagaaaaaggcgtgcgggaagcagagaaatccggaaaattgttaaaagaattaaatatagattttgatatgtgttttacctcttatcttaaaagagcaataaatactcttaaggttgtaataaaaattctagaaaaaaattacaaatatactaaagcttgggaacttaacgagagacactatggggctttaactgggttaaataaagaagaaaccaagaaaaaattaggtgaaaataaatttaatgaatatagaa

SEQ ID NO: 291701 - DNA, 688 bp, Unknown
  Bacterial polypeptide expressing nucleotide sequence isolated from the Sargasso Sea
catgagttttttaatattagtaagacatggtcaaagcgtctggaatcttgaaaaaagatttactggatgggtcgatgttgatttaacagcacagggtaaagctgaagctgaaaaagcaggtgtcttaattaaagaaagaaaaattgaaatagacttttattactcttctctacaattacgagctaataatacccttaaaattattcaaaaaattttaaatgacgaaaaagattttattaaaacgtggcagctaaatgaaagacactatggagctctcacaggcttaaataagattgagatgataaagaaaattggtgaagataaaatacataaattcagaagatcatgggacattaaaccagaagctcttagcaaagaaagtccttttcatcctttaaatattgaaacgtataaagaaatgcctaaagaggctattcctgacactgagtctctaaaagatacatatgaaagagttgtcaatttttttcaagaagaaatcaaagcaaagttaacggcgaacaatattttaatttcagctcatggaaattcaataagagccttatgtaaaaatttatttaatttggataatgaacgaatttctaaattagaaatacctactggtaatcctatgttaatcgagctaaattctgatacagaaataaagaaatgtgagtatcttgacaaggac

SEQ ID NO: 291702 - DNA, 632 bp, Unknown
  Bacterial polypeptide expressing nucleotide sequence isolated from the Sargasso Sea
gatgagttatttaattttagtaagacacggccaaagcatatggaatcttgaaaagaaatttactggctgggttgatgtagatttaactgataatggaaaattagaagcaaaaaaagcaggtcagttaataaagcaaaaacaaattgagattaatctttattattcatcctttcaattaagagcgaaaaacaccttaaaaataatacaaaatgaattaggagattttaaagatgtaaagaatgcttgggaattaaatgaaagacattatggagccctcacaggattaaataaagatgagatgaaaaaaaaactaggggaaaaaaaagttcatcaatttagacgttcttgggatcttagaccagaccctttagataaaaaaaatccgtatcatccactaaatattgaaacttacaaagaagttcctttagaaaaaattcctgatactgagtcattaaaagatacatatgaaagagtaataaaattttacagtaaagaaatagaaaataaaacgaatgaaaatattctcatttcagctcatggaaactctataagagctctttgtaaacatttgtttagtttagatgacaatgaaatctctaaacttgaaattccacaggaaaccctcttttatt

SEQ ID NO: 291703 - DNA, 491 bp, Unknown
  Bacterial polypeptide expressing nucleotide sequence isolated from the Sargasso Sea
cgagaaaaaaattaatttagatgaactctttacctcagttttaattagggcaattaatactgggaatataattttagatcagttaggcattgaatcattgccgaccacaagggatcaatcgttaaacgagaggaattatggtgatcttgctggcctcaataaggatgatgcaagaaagaaatggggagaagagcaagttcatatttggagaagatcatacgatgtgcctccaccgggaggagagagcctaaaaaatactggagaaagagtacttccatactttgaaaataaaattagaccgctcatagcagaaggaaaaaatatcttgattgcggctcatggcaattcgctgcggtctcttattaaggagcttgataatctcagtgatgatgagattgtaaagctggaaattccaaccggtgctccaattatttattcctttcgagatgggttaattgaaaacaaagaagagctttttgataaccaatagt

SEQ ID NO: 291704 - DNA, 354 bp, Unknown
  Bacterial polypeptide expressing nucleotide sequence isolated from the Sargasso Sea
ttgatgataaatattcttctatacaatcagatatccttcctgatggtgaatgcctaaaagatacggtagatcgtttcatgccttattggcttgattcaataaagcctgatattgaatcaggaaaaaatgtgttgattgtggcacatgggaattcattaagagcgcttgttaaatatttagacaaggtgtctgatgacgatattgttgaactaaatattcctacaggtgttcctttggtctatgaattggatgatgcaatgaatcctgttaaaagttattatttaggtgatcaagaagagatatcaaaaaggacagcagaagtagctgcgcagggtaaaaacagatctatttgaa

SEQ ID NO: 291705 - DNA, 454 bp, Unknown
  Bacterial polypeptide expressing nucleotide sequence isolated from the Sargasso Sea
aatgagtcatttaattttagtacgacatggtcaaagtgagtggaacttacaaaaaaggtttactggatgggttgatgttgagttaactccccaaggaaaactggaagcatgtaaggctggagaattaataaaaaacttaaaactaaatttaaatcattttttttgctcttatcaaaaaagagctattgaaacattaaatttaattttaaacacgataagaataaaaaacaataatgttataaaagcttggcaattaaatgaaagaaattatggcgcattaacaggtttaaacaaagaagaaatgaaaaaaactttgggagaaaaaaaagtttatgagtttagaagatcatggaatattgctcctgaaccattaaacaaaaataatccctaccatcctttaaatattgaagcatataatgatgtgcctaaaaataaaattccagatactgagtca

SEQ ID NO: 291706 - DNA, 668 bp, Unknown
  Bacterial polypeptide expressing nucleotide sequence isolated from the Sargasso Sea
aatgaattatttaatattagttcgtcatggccaaagttcttggaatcttgaaaatagatttacagggtgggttgatgttgatttaactgaaaatggtaaacttgaagcagaaaaagcaggtttattaataaaaaaaaagaatattttaattaatctttattattcatcagtacaacttagagctaacaatactctaaagattatacaaaaaattttaaaagataaaaaaaaatttattaaagcttggcagctaaatgaaagacattatgggtctcttactggacttaataaaattgaaatggccaacaaactaggtaaagaaaaagtgcatgaatttagaagatcttgggatttaaaacctgaacctttaaacaaagatagtttatttcacccaaaaaatattgagacctacaagaatattccaggaataatttttcctgatacagagtctttaaaagatacttatgaaagagttacgaaatattttgatgagcaaataaaaaataaattagaaaataataatattttaatatctgctcatgggaattctattagagcattatgtaaaaagttatttcatttagatgataatcaaatttcaaatcttgaaatacctacggggaaccccctagtaattgaatttattgaaaaattaaaaataaaaaaat

SEQ ID NO: 291707 - DNA, 373 bp, Unknown
  Bacterial polypeptide expressing nucleotide sequence isolated from the Sargasso Sea
atgagtcacttaatacttgttagacatggtcaaagcgaatggaatttagaaaataaatttacaggatgggtcgacgttgaactagcaccacaaggaaaattagaagcatgtaaagccggagagttaataaaaaaattaaatttagaaatcaaacatttttatacttcttatcaactaagatcgattgatactttaaaactcattttaaatacaatcagagtgaaaccaaataatatgattaaggcctggcaattaaatgaaaggcactacggatcgctgacaggattaaacaaagatgaaatgagaaaaaaattaggagaagaagaagttcacaaattcagaagatcttgggataatccactcaaaaccttta

SEQ ID NO: 291708 - DNA, 715 bp, Unknown
  Bacterial polypeptide expressing nucleotide sequence isolated from the Sargasso Sea
atgagttatttaattttaattagacatggtcaaagtacttggaatttagagaaaagatttacgggttgggtagatgttgatttaacagataatggcaagttagaggctaaaaaagcaggaaaattaataaaagatctaggtataaaaattgaatattattattcatcactacaacttagagcaaataacactcttaagttaattcaagaattattaaacgataaaaaagattttactagagcatggcaactaaatgaaaggcattatggagcactcacaggtctaaataaaattgaaatgagtaaaaaattaggcaaagaaaaggtgtttgaatttagaagatcatgggatctaaaaccagaacctttagaaaaaaaaagcccattccacccatctaatattgatatatataaaaatctttcaactgatcaaattccagatactgagtctctaaaagatacttatgtaagagttataaattattatgactctgaaattaaaaataatctaaataatggaaatgtattaatatcagcccatggaaattccataagagctttatgtaaatatttacttaagattgacgaaatacaaatttctaatttagaaatacctacaggaaatcctttattaatagaaatcaataaagatcaaacaattaaagattgtaaatatttagataaaaatagagctaaagatcttgtagttttttgaa

SEQ ID NO: 291709 - DNA, 517 bp, Unknown
  Bacterial polypeptide expressing nucleotide sequence isolated from the Sargasso Sea
aatgaaaaatattttattaattcgacatggccaaagtgagtggaataaattaaatctttttactggcttcaaaaatattgaattatctgatcaaggaatagaagaagctgacaaagctggacaaaatttcaaaaatttaaatattaaatttgatatcgtattcactagtaagttaaaaagagcgcaagaaacagctaaaataattctcaaaaatcttaatcaatgggatcatttatacgaaaagggaaaaattaaaacagatattaacttaaatgagagagattatggtgatcttaccggtctaaataaaaaagaaacggctgacaaatttggagaagagcaagttcacaaatggagaagaggttattcagatcaacctcctaatggagagagtttggaggacgtagtcagaagagtaaaaatatattttgaagaatcaatcaaccctgccatccagagcgctgataacaataatatattgatagcagcacatggaaattctttaagggccttacta

SEQ ID NO: 291710 - DNA, 505 bp, Unknown
  Bacterial polypeptide expressing nucleotide sequence isolated from the Sargasso Sea
aaatgaagctgttgaggccggtaaatcgttaaaggctgaagacatgaattttgacatcatgttcacttcagatctatttagagctcaagagacaggtcgtttaattttaaaagagatggatcaaactgatataccctttgtaaagcatcaaagcctcaatgaaagaaactatggagatttggctggcttaaataaagatgacgccagagagagatggggtgaagaacaagtccatatatggcgaaggtcttttgatattccacccccgggaggtgaaagtttaaaaaatacagccgaacgagttcttccttattttgagtctgaaataatgccaaaaatagatgaaggtctaaatgttctcatagctgcacatggcaattctctgagggctcttgtaatgcaattagagaatattggtcctgaagagatagtaaaattagaaatagccactggtgatccattgatatacgattgcacgcatcaaacaatcaccagaagaaactaa

SEQ ID NO: 291711 - DNA, 295 bp, Unknown
  Bacterial polypeptide expressing nucleotide sequence isolated from the Sargasso Sea
atgaataatttaatacttgttagacacggacaaagtgagtggaacctggaaaaccgttttactggctgggtagatgtaggtttagctgccaaaggtaagcttgaagcttgtaaggcaggagagttaattaaagaattaaaccttgaattatcttatttttacacatccttacagacaagatcgattgagacacttaatttaatactcaataccatgagaattaaaaatcgagatgttgttaatgcttgggaactaaatgagagacactatggagcattaactggtttaaataaag

SEQ ID NO: 291712 - DNA, 712 bp, Unknown
  Bacterial polypeptide expressing nucleotide sequence isolated from the Sargasso Sea
atgagttatttagttttagttagacacggtcaaagtgtttggaatttagaaaaaaaattcacaggatgggtagatgttgatttgacagaaaatggtaaatctgaagcaaaaaaagcaggtgaattaattaataaaaataacctaacaatagatctttatttctcatctgttcaattaagagccaaaaatacattaaaaataattcaaggagaattaaaggacaataaagttcctagtgaggcatgggaaataaacgaaagacattatggtgcacttactggtctaaacaaagacgaaatgaaggtaaaattaggggaagataaggtacatcagtttagaaggtcttgggatttaagacctgatcctctagacaaacaaaatccatatcatccatctaatatagaaatttataaaaatattcctgtagataaaatacctagtacagagtctctaaaagacacttatgagagagtaatagatttttacaaaaagaaaattgaaatcataaatgataaaaatattttaatatctgcacatggaaattcaattagagctctttgcaagtacctatttaatttggataatgatgtaatttcaaaattagaaataccaacaggtaatcctttactcattaaagtaaatggagataaaaaagttttaagtgctaaatatttagactctgatagagctaaagatcttttagttttttgag

SEQ ID NO: 291713 - DNA, 496 bp, Unknown
  Bacterial polypeptide expressing nucleotide sequence isolated from the Sargasso Sea
atgaacaaacttgttttacttagacatggacaaagtcagtggaatttagaaaataaatttactggttggaaggatgttccattaactgaaaaaggtataaatgaagcaaataatgcaggtctattattaaaaaaaaataatataaaaattgataaaatttttagtagcgttttagaaagagcaaataaaacagcagaaattgctattaaagcctcagaaattgaaaatttacataaaaatggactgcttatctatgaaaaagatcaaagactaaatgagagagattatggagatttagttggtttaaataaaactgaaactgctgaaaaatttggaaaagaacaagtacatatttggagacgatcatatgatacgccaccacctaacggtgaaagtcttaaggatgtagtagatcgagtatcgccatattttagagaaataattcagccatttatcttagataaaaaaaatgttctgattgcagcgcatgggtaat

SEQ ID NO: 291714 - DNA, 235 bp, Unknown
  Bacterial polypeptide expressing nucleotide sequence isolated from the Sargasso Sea
atgattagcagcaaaaatataaatagattaaatcttcctcagagccctgtagttcttacaatattagatggatggggagatagagaagatgcatcaaataatgcaataaaaagtgcatctactccgatcatggactcattgtggcatgcttatccccatactttaataagcgccagtggatctgatgtaggccttccagatggtcaaatggggaattcagaggttggtcacctta

SEQ ID NO: 291715 - DNA, 712 bp, Unknown
  Bacterial polypeptide expressing nucleotide sequence isolated from the Sargasso Sea
atgagtcatttaattttaatacgccacggtcaaagtgagtggaacttacaaaaaaggtttactggatgggttgatgttgaattaactccgcaaggaaaacttgaagcttgtaaggctggagaattaataaaaaatttaaaaataaacctaaatcattttttttgttcttatcaaaaacgagctattgaaacattaagtttaattttaaatacgcttagaataaagaacgataatgttacaaaagcttggcaattgaatgaaagaaattatggatctttaactggtttaaataaagagcaaatgaaaaaaatgttgggagaaaaaaaaattcatgaatttagaagatcgtgggatattgccccaaaaccactagataaaaataatccttaccatcctttaaatattcaagcatataaagatatacctaaaaatatgattcctgatactgagtctttaaaagatacctatgaaagagtagttccatattacaaaaaaaatattcttcctttgattaatgaaaatataattgttgctgctcatggaaattctattcgttcactatgtaaatatttatttgaaatagatgattctaaaatatcacgattagaaatccctactggaaatcccttggctttgaattttgaaaataaaaagttggtaaatgcaaaatacttggataaggaaagagctagagatttattagttttttgaa

SEQ ID NO: 291716 - DNA, 613 bp, Unknown
  Bacterial polypeptide expressing nucleotide sequence isolated from the Sargasso Sea
atgaaaacaaataaattggttctggttagacatggacaaagcatatggaatgaaaaaaacctttttacaggctggaaagatattgggctaactaagaagggcatcaatgaagccgaaagtgttggagagaaaattaagagaattgggaccaaatttgatgcgatgtacacctcctcgcttgtgagggcccaaaaaacgggtgaaattattcttgaatttatttcgcaaaaagaaattgaaattatttcagatcaatcactaaatgagcgtaattatggagaattaactgggcttaataaggatcaggcaaaaaaggattttggtgaatctcaagtgcaaatatggagaagatcttatgatatccctccacctaacggcgagagccttaaagacacttatgaaagggttgttccgtattttataaaaataattttaccgagactattacatggggaaaatattttaatcacagctcatggaaattctttacggtcactagttaagtatttggagaaaatctctgaagatgagattgtaaaattagagattgctactggtgaaccaatattttatgaattgattgatgaaaaggtgcaaagaattgtctggtagc

SEQ ID NO: 291717 - DNA, 129 bp, Unknown
  Bacterial polypeptide expressing nucleotide sequence isolated from the Sargasso Sea
aatgagtcatttaattttagtacgacatggtcaaagcgagtggaacttacaaaaaaggtttactggatgggttgatgttgatctaactccccaaggaaaactggaagcatgtaaggctggagaattaat

SEQ ID NO: 291718 - DNA, 82 bp, Unknown
  Bacterial polypeptide expressing nucleotide sequence isolated from the Sargasso Sea
tatgaaattagtcttattgagacatggagagagtcaatggaatctagaaaatagatttactggatggaaagatgtatctcta

SEQ ID NO: 291719 - DNA, 280 bp, Unknown
  Bacterial polypeptide expressing nucleotide sequence isolated from the Sargasso Sea
ctggagaagaagttataactctggtccgcctggaggtgaatcacttaaagatactagtgatagagttttaccttattatttagatgaaattcatcctctaattttaagtggcaaaaatatcctcatagctgctcatggaaattctcttagatcgctagtaaagcatttagatataatttctgaaaaagaaattgttgaactagaaattccaactggtgcgccaattcattacctatttgataaaaatggtgaggttataaagaaaaaaaacttaatttaa

SEQ ID NO: 291720 - DNA, 361 bp, Unknown
  Bacterial polypeptide expressing nucleotide sequence isolated from the Sargasso Sea
atgtcaaatgaattaaaaaattttctagttttgatcagacacggacaaagtgaatggaatgaaaaaaatcttttcacaggctggaagaatcctcctttaacaaggttgggtgaattggaagcagaacgtgcggggtcaaaaataaaatctttaaagatagattttgatattcatttcacatcggaattaatcagagcacaaagtacgggttccattattcaaagagttatcgaaaaaaatatagacacgataaaaaatgttgctcttaacgaaagagattatggagatctatctggcttaaataaagacgaagctaggaaaaagtggggagatgaacaggtttatattggcgcagatctta

SEQ ID NO: 291721 - DNA, 709 bp, Unknown
  Bacterial polypeptide expressing nucleotide sequence isolated from the Sargasso Sea
atgagttatttaattttagttagacatggtcaaagcttgtggaaccttgaaaaaaaatttactggatgggttgatgtagatctaacagaaaatggaaaatcagaggcaaaaagggctggtaaattaattaaacaagaaaatatagaaattaatttttattattcatcttttcaattaagagcaaaaaatactttaaaaataatacaggaggaattgcaagattttaaagacgttaaatatgcatgggaattaaatgaaagacattatggggctctgactggattaaataaagatgaaatgaaagtaaaacttggagaggaaagagttcatcaatttagacgtgcttgggatcttagaccagaccctttagataaaaaaaatccatatcatccaataaatattgaaacttacaaagaagttcctttagaaaaaatacctgacactgagtcacttaaagatacatatgaaagagtaataaaattttatagcaaagagatagaatacaaaacaaaagaaaatattctcatttctgctcatggaaactctattagagctctttgcaaacgtttattaaatttagatgacgatgagatctctaaacttgaaattcctacaggaaacccgcttttaattgaattagaaaatgacaaaatttctaattgtaaatatcttgaccaagaaagagctaaagatcttttagttttttaaa

SEQ ID NO: 291722 - DNA, 274 bp, Unknown
  Bacterial polypeptide expressing nucleotide sequence isolated from the Sargasso Sea
tgtactaccgtactggcatgacgttattcgtccagatatccaagcgggcaagcgcgtaattattgctgcgcacggcaacagtcttcgtgcccttgttaagtaccttgatggtatgtcagacgaagaagtactaggtctgaacattcctacaggtgtaccactagtatacgaactagatgaaaaccttaagccaatctctaaagagtaccttggcgatgcagacgctatcaaagcaatgatggatgctgtcgctaagcaaggcaaagcgaagtaa

SEQ ID NO: 291723 - DNA, 662 bp, Unknown
  Bacterial polypeptide expressing nucleotide sequence isolated from the Sargasso Sea
aatgagttttttgattttaatcagacatggtcaaagtacttggaatcttgaaaacagatttacgggttgggttgatgtagatttaacagaaaatggaaaattagaggcaaaaaaggcgggcgatttaatcaaaaattcaaatattaaaattgattattattactcttcgcttcaattacgagctaatcatactcttaaaattatacaaaaatccttaaatgatgaaaaagattttaatagatcatggaagcttaacgaaaggcattacggtgggcttacaggacttaataaagttgaaatgagtaataaactaggtgaagaaaaagtacatcaatttagaagatcttgggatttaagaccagatccgttagataaaaatagtgaattccatccacttaatattgaaacttataaaagtatgtctagtaaagaaattccagataccgaatctttaaaagatacttatcaaagggttatgaatttctatgattcagacattaaaaacaaaattaaaaataagaatatattaatatctgcacatggtaattctataagagctttatgcaaatatttattcaaacttgatgaaaaacagatttctaaactcgaaataccaactggcaatcctttacttatagaaattgatgaaagtgaaaaaatta

SEQ ID NO: 291724 - DNA, 607 bp, Unknown
  Bacterial polypeptide expressing nucleotide sequence isolated from the Sargasso Sea
atgagttttttgatattagtaaggcatggtcagagtatttggaatcttgaaaaaagattcaccggttgggttgatgtagatctcacagatcaaggtaaaatggaagctgagaaagctggtttacttatcaaaaatcaaaatataaatatagatttttattattcctcgtttcaagtgagggcaaaccatactcttaaaataatacaaaaagtattaaaatcaaaaaaggattttgaaaaagcgtggcagctaaacgaaagacactatggtgagcttacagggttgaataagattgagactgcaaaaaaaattggtgaagataaagtttttgaatttcgaagatcttgggatataaaacctggaaaactaagtagggaaagctcttatcatccgctaaatattgaaacatatgagaaaatccctaaagagctcattcctgacacagaatctttaaaagatacatacaacagagttttggagtatttcaaaaatgaaatacagcctaaactaataaataaaaatattttaatcacagcacacggaaactccataagagctttatgtaaatatctgttcaatttagataacaatcaaattacaggtttag

SEQ ID NO: 291725 - DNA, 858 bp, Unknown
  Bacterial polypeptide expressing nucleotide sequence isolated from the Sargasso Sea
aaaatgaaaaaccggtagggccaattgaagaccggcattctgtgatctttatgaatttccgtgctgaccgtgccatcgaattcagtgaagcgttggtccaggaggattttgcgcactttcccagagatcctttccctcgtgtctgttttgcgtcgatgatgcagtatgatctggataatggattccccgagcattttctggcagggactccgagggtggacaatccttttggcaaaaggctggtggagcagggcatcaagcaattcaggcttactgaaacccagaaatttcctcacgtcacttttttctacaacggcggataccgtgaaccacttgacccaaaaatcgaagattatcatctgattccctcggacaaggttccgacttttgcagatgcgcccatgatgaaagcatctgaaatcggaaagagggcgttggaattcattcattccggagcatacggttacgggttgatcaattttgccaacgccgacatggttgggcacaccgggaatcttgcagccgccgttcaagcagtggaatctgtggatcaggctcttggaccgatggttgaggcggtgaaagcggtcaatggattcatggtcatcaccgcagaccatggaaacgccgatgagatgctgacaaagaaccggttcagcggggaaaccgaggcctcaaccaagcattcactgaatcctgttccattcctggtttatgatcccttgtatgatggtagttaccgtctcaaggactttgctgcaaaccaggatctcaatttgagtcatattgcagctaccaatttcattttgatgggcctggaagttcccgatgacctggcccctccactttttctttagt

SEQ ID NO: 291726 - DNA, 565 bp, Unknown
  Bacterial polypeptide expressing nucleotide sequence isolated from the Sargasso Sea
agccacaaaaactctctccataattcttgatgaaatgaatttaacttggatacctgtaattaaatcctgggaattaaatgaaagacactatggagcacttcaaggattatacaaatctgaagtcgctaaagaatacggggaagatcaagtaaaaatctggagaagaagttatgatacccctcccccaatgatggctgaagatgacgcttcacaccccagatttgatccaaaatacgatgggattgatgaactaccaagctctgaaagtcttaaagacacccttacaagagtaaagccctactggcaggacaaaatattgcccgatcttttagggaacaaggatgttctaattgtagcccatggcaacagccttagatctctggtaaaaataattgataacattagcgatgaagagattgtaaacctaaatatcccaacaggaataccattgctctatgaatttaatgaaaatcttaatcccacctcaaaattatttcttggggatgaagaagcaataaaaaaagctactgaaatggttgctaagcaaggcagcataaaaaaataa

SEQ ID NO: 291727 - DNA, 493 bp, Unknown
  Bacterial polypeptide expressing nucleotide sequence isolated from the Sargasso Sea
gcgggtaaattactaaaagataaaggaataaagtttgatatagcttttacatctgcacttaagagggcacaagatactttaactatcattctaaaagagatagaccagacttccctcaaaataataaaagatcaatctttaaatgagagagattatggggacctatcaggtttaaataaagatgaggctagaaaaaaatggggggaagacaaagtccaccagtggagaaggtcttttgatatacctccccctggaggagaaagtttaagaaacacagcagacagagtattgccttattataaaagcaatatagttccaagaattaatgaaggtttaaacatcttaattacagcacatggaaactcgcttagatctcttgttatgcacttagataatataagatccgaggatatagttaaattagaaattggtactggagtgcccctgatttatgaagctgaaagttctgaaaatataaaaagagtaaattaaa

SEQ ID NO: 291728 - DNA, 133 bp, Unknown
  Bacterial polypeptide expressing nucleotide sequence isolated from the Sargasso Sea
tatgagtaaactaatcttaacaagacatggccaaagtacctggaatgctgaaaatagatttacgggctgggtagatgttgatctttcagaaaaaggcaaagaaaaagctaaaaagtcaggtgtgttaataaga

SEQ ID NO: 291729 - DNA, 265 bp, Unknown
  Bacterial polypeptide expressing nucleotide sequence isolated from the Sargasso Sea
aatgaaaaagttagttttgttacgccatggagaaagtcagtggaatttagaaaatagatttacaggatggaccaatgtagacctaacagaaaaaggagaagatgaagcaagggaggctggagaattattaaatcaagaggcaattaagtttagcattgtacacacatcattgttgaaacgagcaaaccggacaatggaaatatgtattgatgaaatgggccttagtaatgtctccaaaaagtttgattggagattgaacgaaaga

SEQ ID NO: 291730 - DNA, 478 bp, Unknown
  Bacterial polypeptide expressing nucleotide sequence isolated from the Sargasso Sea
tatgaataatttagttttggtaagacatggtcaaagtcaatggaatttggaaagaagattcactggatgggcagatattgacctaacagaacaaggaaaattagaagctaaaaaagcaggagagctgattaaaaaattaaatattgaatttcactcttcatttacatcaaatttaaaaagagcagtaaatagtttagatataattttaaaaatattaaataaccaacacatcaaagttttaaaaactcaaaacctaaatgaaagacattatggcggtctaaccagtcttaataaagatgaaactataaaaaaatatggtaatcatcaagttcagctttggagaagaagttttgatatacctccaccacctatggagtccacacatccatataaaaatattattaatacaaaaattctaagtgaatctttaaaagacacttttaatcgtgtagttccgtattatgaaaaaaaatattaa

SEQ ID NO: 291731 - DNA, 906 bp, Unknown
  Bacterial polypeptide expressing nucleotide sequence isolated from the Sargasso Sea
ttttgggcttgtatcgcctggcggggtacatgcccatcaagatcatatgctggcggttgtaaaaggactagctcaagctgaggtgcctgtggttgtccatggatttaccgatggccgtgatgtgttgccgcgcgatgcttggatcactttaccaggcttcttgtctcaattgcctgaaaatgccacgcttggcagcctcactggacgctattttggtatggaccgtgatcaccgctgggatcgaacccagagagcctatgatgccatcgcccttggacaggcagagtttcatgcagataacggcttgcaggccctgcaggaaggttatgttcgcggcgaaagcgacgaatttctgcaggcgacaattgtcggtgaatatggcggcatgcgcgatggtgacgcgctggtgatgatgaatttcagagctgaccgggcgcggcagattcttgattgtttctatcgaccagaaacgacgtcttgcaagacccagccaattttactaagcacggcttttggcatgacaagctattctactaacctagatgaatttgtaaccccgctttatccgccaactgagattgcggaaactttgggcgaagttgtcgcggcagcagggcaccgacaacttagacttgctgaaaccgaaaaatatccgcatgtcacatttttctttaatggcggtgacgaaaccatgcacgacggcgaagaccgagccttagtgccatcaccaaaagtgtcaacctacgaccagttgcctcagatgagcgctggcggggtgctggccgaagccatggctagccttgcggccaaatcacatgacttgttagtaattaattttgctaatcctgatatggtcggccatacaggtaatcttgcggcgggcatctccgcagttgaaactgttga

SEQ ID NO: 291732 - DNA, 553 bp, Unknown
  Bacterial polypeptide expressing nucleotide sequence isolated from the Sargasso Sea
catgagtcatttaattcttgttcggcacggtcagagtgagtggaacctagaaaatcgttttacaggttgggtagatgttgatttggctgctaaaggtaagttagaagcgtgtaaggctggtgaattaataaaggaattaaatttaaattttgaatatttttacacatctttgcagaaaagatcaattgagacacttgatttaatattaaatactatgagaatcaaaaaccaaaatgtagtaaatgcatgggagttaaatgagagacactatggagctttaacaggtttaaataaggacgaaatgaaaaaactttatggtgaagaaaaaatacatatttttagaagatcatgggataatccaccagaggctctcaaaaaaacaagtccatatcatccattaaatattgatatatataaaagtgttccaaaggataaaatccctgatacagagtcattaaaaaatacttatgagagagtaataccctattacaaaaaaaatattgaaccaaaattagataaaaatataattgtttctgctcacggaaattctata

SEQ ID NO: 291733 - DNA, 661 bp, Unknown
  Bacterial polypeptide expressing nucleotide sequence isolated from the Sargasso Sea
gaaaaaaaatttactggatgggtagatgtagatttaacagaaaatggacaatcagaagcaaaaaaagctggccaactaataaaacaagaaaatattgaaattaatctttattattcatcttttcaattaagagcaaaaaatactttaaaaataatacaagaagaattgaaagattttaaaaaagtaataagtgcatgggaattaaacgaaagacattatggtgctctgactggattaaataaagatgaaatgaaagtaaaacttggagaagaaaaagttcatcaatttagacgttcttggaatcttagacctgaccctttagataaaaaaaatccatatcatccgctaaatattgaaacttacaaagaaattcctttagaaaaaattcctgacacggagtcactaaaagatacatatgagagagtaatgaagttttatagtaaagaaatagaacacaaaacatttgaaaatattctcatttctgctcatggaaactccattagagctctttgcaaacatttgttcaatttagatgacaatgagatctctaaacttgaaattccaacaggaaacccacttttaattgaattagaaaacagcaaaatttctagttgcaaatatcttgatcaagaaagagctaaagatcttttagttttttaaa

SEQ ID NO: 291734 - DNA, 328 bp, Unknown
  Bacterial polypeptide expressing nucleotide sequence isolated from the Sargasso Sea
aatgagttatttaattttagttaggcacggacaaagtgtttggaatcttgaaaaaagatttactggatgggttgatgtagatctgacagaaaatggaaagtcagaggcaaaaaaagctggtgaattaataaaacaggaaaaaattgagattaatgtgtattactcctcttttcaattacgggctaaaaatactttaaaaattatacaggaagaattacaagattttaaagaagtaaagagtgcatgggaattaaacgagagacattatggagctctgacagggataaataaagatgaaatgaaaaaaaaactggagaggaaaaagtac

SEQ ID NO: 291735 - DNA, 825 bp, Unknown
  Bacterial polypeptide expressing nucleotide sequence isolated from the Sargasso Sea
tttctaaaagatatagtggaataaataccaaaaaggatggtataatctttatgaattttcgttcagataggatgatacagatcagcagtgcattctgtgatgatcaattccaagatttttcaactgataccaaaacaatttttatttcaccaatgagtttggtttcatattccaagcgattagataaatttattacacctttatttccaaaagttaaaattaaaaatactattggagaagtagtttcgaaaactggacttaagcaacttagattatcagaaactgaaaaatatgcacacgtaacatatttttttaactgtgggaatgaacaaaaatttaaaggtgaagatagaattttaattcaaagcccaaagataaagacctatgatttgcaaccagaaatggctattgaaaaagttactttaagtttaataaaagaacttgaaacatttaaatatgattttgttgtagttaacttcgcaaatcctgatatggtaggccattctggaaatttaacagctgctatcaaagcatgtgaggcagtagataattcactaaaaaaattaattgatggagtaaaaaaaacaaaatccaatcttttgatagtagcagatcacggtaattgtgaggaaatgatcaactataaaacaaatcagccacacaccgcacatactttaaatttagtacccattatattaatttctaatgatcaaaatttaaaaataaggagtggtaatctctctgatgttgccccgacactattggacttgatgaagattaataagcctagggaaatgacaggtagatcattaataataaaataat

SEQ ID NO: 291736 - DNA, 220 bp, Unknown
  Bacterial polypeptide expressing nucleotide sequence isolated from the Sargasso Sea
aatgagtcatttaatattagtaagacatggtcaaagtgagtggaatctggaaaatagattcactggttgggtcgatgtagatcttgcaccaaaaggtaaacttgaagcatgtaaatcaggagagtttataaaagaacaaaaaattaaaattgattatttttttacctcatatcaaaaaagagcaataaacactcttaaattaatacttgatactttaaga

SEQ ID NO: 291737 - DNA, 472 bp, Unknown
  Bacterial polypeptide expressing nucleotide sequence isolated from the Sargasso Sea
tatgcctaacatagtactaataagacatggtcaaagtaaatggaatcttgaaaacaaattcacaggttggaaagatattgacctaagtgaaaacggaatcaatgaagcaatagaagctggcagactaataaaaaaacatgccctgacgtttgatgtagcatttgcttctgtactgcaaagagctaaaaaaacaatgagcattattttaaaagaaaacaacttaacaaatattcctatatttaatacatacaggcttaatgaaagacactatggtggattaacaggattaaacaaaaaagaaacagcaaaaatccatggagatgaacaagtatataagtggagaagaagttataaaacaaaacctcctaaatcaagtaaagaatttacaacaagtttacaaaaagattcaaaatattttaatttggataccataccagaatcagaatcactagaagacacagtaaatcgtgtg

SEQ ID NO: 291738 - DNA, 681 bp, Unknown
  Bacterial polypeptide expressing nucleotide sequence isolated from the Sargasso Sea
aatgcaaaaacactcttttatagataaacttctagataaatattctagtgcagaattaatcactaatggaaatcatgtcggcctcccgggtaaccaaatgggaaatagcgaggttggacacttaaatatatcagcaggaagaatagtgtatcaagatttattaaaaatagataattcaatttctgataaatcatttagaaaaaataagctcattcttaatgctattgattattccaagaaaaaaaataaatcaattcatttaatgggtttgttgtcagatggaggtgttcactcacatattagtcacttagaagaattattattaattcttagtgaaagttcttgcaaaaaagtttatttacacctatttacagatggaagagatgttgatccgaaatcaggaatcaaatatgtaaaaaaactagaaagttttttaaaaaagacaacaggaaaaatagtctcaatcattggtcgttactattcaatggatagagatttaaattttgacaggacaagaaaagcttataaattgcttgttaatggtgttgggaaaaaaacaaatgacttcaaaaaagacattgaattatcatataacaaaaacctcacagatgagtttttagaacctttgtccataggagaagaaagttatttgattgaagaaggagacgttgttatttcatt

SEQ ID NO: 291739 - DNA, 421 bp, Unknown
  Bacterial polypeptide expressing nucleotide sequence isolated from the Sargasso Sea
tctgagacgccgtcgagcgggtcggacgccgtcgcgccgaagcgtcgcgtcgagcgtcaagcggtcgtttcacgcaggctggtacgactgccctttgtcggagaaaggtcatgaagaagcaacggaagccggccgcctcgtcgccgccgaagggttcaaattcgacgtcgccttcacgtctacgctcaagcgagccatccgcaccttagatcacgcgctcgaagagacggaccacatgtggatcccggtaactaaagcctggcagctcaacgaaagacattacgggggcctccagggcctcgacaagcagcagaccgtcgacaagcacggcatcgagcaggttaccgtctggcgaagaagctacgacattccccctccggattcgaacaagtcctcggagcactggcccgggaatgatccc

SEQ ID NO: 291740 - DNA, 715 bp, Unknown
  Bacterial polypeptide expressing nucleotide sequence isolated from the Sargasso Sea
tatgagttttttaatattagtgaggcatggacaaagtacttggaatttagagaaaaaatttactggttgggttgatgttgatttgaccgataaaggtatattggaggcaaaaaaagcaggatttttattgaaaaacaaaaacatcaaaattgatttttattacagttctcttcaattaagagcaaataatactcttaaaataattcaacaagaattagatgataaaaaaaattttactaaagcttggcaattgaatgagagacattacggagcactaactggattgaataaaattgaaatgagtaaaaaaattggtgaggataaaatttatgagtttagaagatcatgggatctaagaccagatccactaaaaaaggaaagtccatatcatccacttaatattgatacttataaacaaattccgagagaattattacctgacactgagtctttaaaagacacttatgaaagagttataaatttttttgaagaatatgtgaaagaaaatttaaaaaataataatgttttaatatctgcacacggaaactctattagggctctatgtaagaatttatttaatttagataataaacaaatttctaatttagaaatacctactggaaacccaatgttgatagaatttaaagaaaattttgcaatagcgaaatgtgaatatcttgataaggaaagagctaaagatcttttagttttttga

SEQ ID NO: 291741 - DNA, 715 bp, Unknown
  Bacterial polypeptide expressing nucleotide sequence isolated from the Sargasso Sea
atgagttttttaattttagttagacatggacaaagtgcttggaacctagaaaaaagatttactgggtgggttgatattgatcttacaaataaagggaaattagaggctgaaaaagctggttctttaattaaaaataaaaatattataatagattattactattcatctcttcagagaagagcaaaaaataccttggaaataatacaaaaagttttgaataatgaaaaaatttttacaaaagcttggcaacttaatgaaagacattacggagctcttactggtttaaacaaaattgaaatggctaaaaaacttggagaggataaggtatataaattccgaagatcatgggatattagaccagaacctcttgatagagagagtccatatcatccaatgaatatagaaacttataaaaaaatatctcaagatataattccagatactgagtctttaaaagatacttatgaaagagttttaaaatattttaaacaagaaatccaaaaaaaattaataaataaaaatgttttgatatcagctcatggaaattcaataagagcattatgtaaatatttatttaaattagataataataaaatctccaatctggaaatacctactgggaaccctctggtaattgaacttaataaagagcttgaaataaaaaattgtgagtatcttgataaagatcgggctaaaaatcttttaattttttaaa

SEQ ID NO: 291742 - DNA, 692 bp, Unknown
  Bacterial polypeptide expressing nucleotide sequence isolated from the Sargasso Sea
aatgagttacttaattttagttagacatggtcaaagtgtctggaatcttgaaaaaaaatttactggatgggtagatgtagatttaacggaaaatggacaattagaagcaaaaaaagctggccaactaataaaaaaagaaaatattgaaattaatctttattattcatcttttcaattaagagcaaaaaatactttaaaaataatacaagaagaattgaaagattttaaaaaagtaataagtgcatgggaattaaacgaaagacattatggtgctctgactggattaaacaaagatgaaatgaaagtaaaacttggagaagaaaaagttcatcaatttagacgttcttggaatcttagacctgaccctttagataaaaaaaatccatatcatccgctaaatattgaaacttacaaagaaattcctttagaaaaaattcctgacacggagtcactaaaagatacatatgagagagtaatgaagttttatagtaaagaaatagaacacaaaacatttgaaaatattctcatttctgctcatggaaactccattagagctctttgcaaacatttgttcaatttagatgacaatgagatctctaaacttgaaattccaacaggaaacccacttttaattgaattagaaaacagcaaaatttctagttgcaaatatcttgatcaagaaagagcaaaag

SEQ ID NO: 291743 - DNA, 568 bp, Unknown
  Bacterial polypeptide expressing nucleotide sequence isolated from the Sargasso Sea
tatgaataatttaatacttgttagacacggacaaagcgaatggaacctagaaaaccgttttactggctgggtagatgtaggtttagctgccaagggcaaacttgaagcttgtaaggcaggagaattaattaaggaattaaaccttgaattatcttatttttatacatcattacagactagatcgatcgaaacactaaatttaattctcaatactatgagaattaaagatcaaaatattgttaatgcttgggaactaaatgagaggcactatggggcattaacaggtttaaacaaagatgaaatgaaaaaactttatggagaagaaaaaatacatacttttagaagatcttgggataacccgcctgagccactaaaaaaaactagcccatatcatcctttaaatattaatatttataaaaatgttccaaaagataaaattccagatacagagtcattaaaaaatacttatgagagagtgatacctttttataaaaaaaatattgaacctaaattagataaaaatattattgtgtcggctcatgggaaattcaataagatcattatgtaa

SEQ ID NO: 291744 - DNA, 703 bp, Unknown
  Bacterial polypeptide expressing nucleotide sequence isolated from the Sargasso Sea
atgagttttttaattcttataagacatggtcaaagtacctggaatcttgaaaaaagatttactggttgggttgatgttgatcttacaagaaatggaaaattagaggctgaaaaggcaggacttttgatcaaaagaagaggtttaaaaatcgatttttattattcttcttttcaattacgagccaacaacactctaaaaataataaaaaaaattttgaatgaaaaaaggagttttactagagcttggcaacttaatgagagacattatggagcattaacaggacttaacaaaattgaaatgaataaaaaaattggtaaagataaagtgcacgagtttagaagatcctgggatgtcaggcctgaagctctcaatagagatagtaaatttcaccccctaaacattgaaacttacaaaaacataccaagagaattaattcccgatacagaatctctcaaagatacctatgacagagtagtaaaatactatgaggaggaaattaaagataaattgaaagataataatattttaatttctgcacatggcaattcgatcagggcattatgcaagaatttatttaatttagacaatattcaaatttcacaattagagatacctacaggaaatccacttattattgagatgaattcattaaataaaataattctttgtgaatatttagataaagaaagggctaaagaccttg

SEQ ID NO: 291745 - DNA, 631 bp, Unknown
  Bacterial polypeptide expressing nucleotide sequence isolated from the Sargasso Sea
atgaataaattaattttacttagacacgggcaaagtcaatggaattttgagaataaatttactggttggaaagatgttcctttaaccgaaaagggtcaaaatgaagccaaaaaagcaggacaattaataaaaaaacacaaaataaagattgataaaatatttagcagtaatctccaaagagctaataaaactgcagaaatagctataaaggaagctgaaattatagatttatgggaagagaataaattaataatgtcaacagacgatagtcttaatgaaagagattatggtgatttagtaggtttaaataaaaaagaaactgcaaaaaaatttggtgaagatcaagttcatatttggagaagatcttatgatacccctccaccaaatggagaaagcttgaaagatgtagtaaatagagtttcaccttactatgaaagagaaattcttccttatattaatgataataaaaatgtattgattgctgctcatggaaactcacttagagctactatgatccaagtaggactttataaacctgagcaaatatcttctattgaattacctactggtagtcctttttgtatagattttattaacggtatattagaaaagtcttattttttaagttaat

SEQ ID NO: 291746 - DNA, 712 bp, Unknown
  Bacterial polypeptide expressing nucleotide sequence isolated from the Sargasso Sea
atgagtcatttaattttaatacgtcatggccaaagcgagtggaacttgcaaaaaagatttaccggttgggttgatgttgaattaaccccacaaggaaaattagaagcttgcaaagctggagagttaataaaaaatttaaaattaaatctaaatcattttttttgttcttatcaaaaaagagcaattgaaacattaagtttaattttaaatacgctgagaataaaaaacgataatgtaacaaaagcttggcaattgaatgagagaaattatgggtctttaactggtttaaataaagaagagatgaaaaaaactttgggtgaaaaaaaagttcatgaatttagaagatcatggaatattgctccagagccactaaataaaaataatccttaccatcctttaaatatcaagacgtataaagatatacctaaaaatatgattcctgatacggagtctctgaaagatacctatgaaagagtggtcccatattacgaaaaaaatatactacctttgattaacgaaaatataattattgctgctcatggaaactctcttcgtactctatgtaaatatttatttaaaatagacgattctaaaatttcaagattagaaatacctaccgggaatcccttggctttaaattttgaaaataaaaaattagtaaatgcaaaatatttggatgaggaaagagctaaagatttaatagttttttgat

SEQ ID NO: 291747 - DNA, 1594 bp, Unknown
  Bacterial polypeptide expressing nucleotide sequence isolated from the Sargasso Sea
tctggtgcatgtggttctcgatggatggggcgtggcaccggaaggtcctggaaacgccattgcgcaggccaatcttcctgtatttcacaaattacgtgggcaaagtccttacactcaactttggactcacggactgcatgtcggccttcccgggaaaaaagaccttggaggttcggaagtgggccacatgaccatgggagccggagtgttaatggaacaggggcccaccctgatcaaccatttgatcgactccggagcactgtttgaaaccgaagccatgcagatggtgatcgggaacagcatccgggaacaggttcccctgcatctgatgggtctgctttctgacggaaacatccacagccatatcagtcacttcgaggtagtcatccggcatgcttttcgaaccggggtgaagcagtgttatgtccatgcattgcttgatggtcgggatgtgccggtccagtctgcccatgaatacaccgagcgtttggaaggtttgttccgggacttgaagcaacaggatcctgaatgtgattatgcatttgccagcgggggtggcagggaaaccgtgaccatggaccgcgataataattggagtaaaatcgaactgggatggaagattcatgtggaaggaaatcatgaaaacagctttccaagcatggcggatgcgatcgaacatttccgaaacgtggacccgcaggtcatcgatcaggatctcccggcattcgtaatcaccgaaaatggaaaaccgttagggccaatcgaagaccggcattctgtgatcttcatgaatttccgtgctgaccgtgccatcgaatatagtgaagcaatggtcaaggaagatttttcacactttgcccgagatcctttcccccgtgtctgttttgcgtcgatgatgcagtatgatcttgataatggattccccgaacattttctggcaggcacaccgagggtggaaaatccttttggcaaaaggctggtggaacatggcatcaaacaattcaggctcactgaaacccagaaattcccacatgtcacttttttctacaacggcggataccgtgaaccacttgaccataaaatagaagaatatcatctgattccctcggacaaggttccgacttttgcagatgcgcccatgatgaaagcatctgaaatcgggaaaagagcggtggaattcattcattccggatcatacggttacgggttgatcaattttgccaacgccgacatggtggggcacactgggaatcttgaagccgcagttcaagcggtggaatcggtggatcaggctcttggactgatggttgaggcggtgaaagcggtcaatggattaatggtcatcaccgcagaccatggaaacgccgatgagatgctgacaaagaaccgagtcagcggcgaaaccgaggcctcaaccaagcattcattgaatcctgttccattcttggtttatgatcccttgtacgatggcagttaccatctcaaggattttgctgcaaaccaggatctcaatttgagtcatgttgcagctaccaattttattttgatgggcatggaaattcctgatgacctagcccctccactttttctatag

SEQ ID NO: 291748 - DNA, 625 bp, Unknown
  Bacterial polypeptide expressing nucleotide sequence isolated from the Sargasso Sea
atgaaaaaaagaaatcttattttagttcgacatggtcaaagcgaatggaacgcaaaaaatcttttcactggatgggaaaatcctggtttaactgaaacaggaaaagcagaagcaaaaaatgcaggagatctaatcaataatttagacattgactttgactgtttatttacttctgcacttattagagctcaattaacaggaacagttattttaaaaacaattaatcaagaggatatcaagatcattgaaaataaagcccttaatgaaaggttttacggcgatctccaaggtatgaataaagacgaatgtaaacaaaaatggggtgaagagttagttcaaacctggagaagatcatatgaacttggtcctcctggaggagaaactttgaaagagaccggagatagggttctcccctattatttaaacgagattcatccaatgctaatgcaagatatgaatatactcgtcgctgctcacggtaattcacttagatcattaataaaatacttagataaagtttctgatgaagatatagtcaagttagaaataccaactggcgcaccaatacattatcgatttaatgaagatggtaaggtcatgtataagaaaagcttaattgaataac

SEQ ID NO: 291749 - DNA, 574 bp, Unknown
  Bacterial polypeptide expressing nucleotide sequence isolated from the Sargasso Sea
catgagcaatctgattctaatcaggcacggtcagtccgtgtggaacgctgcaaatcgcttcacaggatggactgacgttgagctctccgaggttggagtctccgaggccgaggaagcgggtcgaagcctgagttcccataggattgacgtagtccacaccagcgatttgatcagagcgcagaggactgctgagatcatcatgagcctgaatgagtcatccgagggatactcaaccaagttcgactggaggctcaacgagaggaactacggttctctgcaggggctgaacaaggccgagaccgcagagaagttcggagcagagcaagtccacatttggaggaggtcgttcgatgtagcacctcccgatggtgagagtctggagatgactgccgagaggaccattccttacttcgaagaggagattctgccggacctgcaagccgggaagggcgtacttgtctcggctcatggcaactcactcagatccatagtgatgcacatcgaggacatttcgcccgaggacatagtatccttggaaatacagacgggttcacccatgttctacgagttcgag

SEQ ID NO: 291750 - DNA, 613 bp, Unknown
  Bacterial polypeptide expressing nucleotide sequence isolated from the Sargasso Sea
atgtcatatctatctcttgtaagacacggccaaagtgaatggaatgaaaaaaatctatttacaggttgggaaaatccagggttaacagacaaaggacttgctgaagccaaggaagcaggaatcaatttaaataatcttggaataacttatgaccattattacacttctattcttgatagagccattatcactgcagaaattattatcaaaggtcttaatattagagagtatagcctggttaaatgccaagagttgaacgaaagagactatggagatttaactggccttaataaagatgatgcgagaaagaaatggggagaagagcaggtacatatttggaggagatcatttgatatacccccgccaaatggagaaagtttaaagaataccgcagaaagagtagtaccttttttcttatctgaaatttttactaagctaaagcttgaagaaaatgtatttattagcgctcatggtaattcacttcgttcattaataatgcatattgagaatttatcttcagaacaaatccttgagagagaaatcgcaacaggtaaaccacttgtatatgaatttgatccatcaaaagaaatatattctctaaagtatgaataag

SEQ ID NO: 291751 - DNA, 616 bp, Unknown
  Bacterial polypeptide expressing nucleotide sequence isolated from the Sargasso Sea
aatgaatctaattttaataagacatggtcaaagcgagtggaatgccctaaatcaatttactggatggaaggatcctgatcttacggccaaaggtattgaagaggcacataatgctggaaagataataaataacttaaaaattaattttgacttagttttcacatctgcattaattagagctcagaatacagctgaaataattctcaaagaaataaatcagcctttatcaaccataaaaaatcaggctcttaatgaaagaaactatggagaccttgcaggccttaacaaggataatgcaagaaaaagatggggtgatgaacaagttcatatttggagaagatcctatgatatccctcctcctggtggagaaagtcttaaagatacgggtgaaagagtgctcccattttttatgaaagaaatactcccacatgtttgtgaaggtaagaatgttttagttgcagctcatgggaactctcttagatcgttaattaagtttcttgataacatttcgaacgaagacattgttaagttagaaatcccaactggggctcctatacattatgttattaacgaggatggttcagttaaatcaaaaaaagatttcttcaatgagtag

SEQ ID NO: 291752 - DNA, 631 bp, Unknown
  Bacterial polypeptide expressing nucleotide sequence isolated from the Sargasso Sea
atgaataatcttgtattattaagacacgggcaaagtcaatggaatttagagaataaatttactggctggacagatgtacctttaactgaaaagggtatcaacgaagctaaaaatgcaggtgaattattaaaaaaaaataacataaaaatagatcaagtttttagtagtgtattagaaagagcaaataaaactgcagaaattgcaattcgccaagctcagatgaaacatttgttaattgataatcaattaaattatattaaaaatcaaagtctaaatgagagggattatggtgatttggttggtctaaataaatcagaaacagctgaaaaatttggtaaagaacaagtacataaatggagaagatcatatgatattcctccaccaaatggtgaaagtttgagagatgttgttgagcgtgtttctccttattatgttaataatattcaaccattattatttaataatagaaatattttaatagttgcacatggaaattctttaagagcaattttgattaaaattggtttatataaacccgaagaaatttctgatattgagcttcctaccggacaaccactatgtctcgaatataataataaaatattaataaaaaactattatttagaataat

SEQ ID NO: 291753 - DNA, 622 bp, Unknown
  Bacterial polypeptide expressing nucleotide sequence isolated from the Sargasso Sea
tatgaaacaaagaaatcttatattagttcgacatggtcaaagtgaatggaatgaaaaaaatctttttactggttgggaaaatcctgggctaactcaaaaaggcgaaaaagaagctaaagatgctgggaaaataattaatggtcttggcataaattttgattatttgtatacatctgctttgataagagcacaactaaccggctcaattattttaagtgaaattaatcaaaaaaatgtaaatactattgaaaataaagctttgaatgaaagattttatggagatcttcaaggcctcaataaagatgaatgtagaaaaaaatggggagatgaaaaagttcagatgtggagaagatcatatgatcagggacctcccggtggtgaaactttaaaacagacaggcgaaagagtagtcccatattttagagaagaaatagaacccttagtgaaaaatggatcaaatatactaattgcagctcatggtaattcactcagatcgctcataaagtttttggatgatgttacagacgaagatatcgtaaaacttgaaataccaactggagcccctattcactatgttttcgatagtaatggaaaagttatgcaacgaaataatcttttttaa

SEQ ID NO: 291754 - DNA, 715 bp, Unknown
  Bacterial polypeptide expressing nucleotide sequence isolated from the Sargasso Sea
atgggacatttaattttgataagacatggccaaagtgaatggaatttacaaaataagtttacaggatgggttgatgtcgaactctctccgcaaggcaaacttgaagcatgtaaagcaggtgaacttataaaagaattaaattttaaaattgattactttttttgctcctatcaaaagagatctatagatactcttaagcttatattaaacacaatcagaggaaaagatgatcaaattataaaagcatgggagttaaatgaaagacattatggagccttaactggtttaaataaagatgaaatgaaaaaaaagttaggagaagagcaagttcatatttttagacgatcatgggatactccacctgaacctttaagtaaaaatagcccttatcatcctttaaatattgaaacttataaagatattccaagagaaaaagtgcctgatactgagtctttaaaagatacctatgaaagagtaattccttattataagtctcaaatcgaaaataaattggataataatattgttgtttctgctcacggaaattcaataagatcaatgtgtaaatgtttatttgaactagataattatgaagtaactaaactagagataccaactggcaatcctttgaaaatcacatttaatagtgaaaaaaaattaaatgatgcaacttatctagacaaaactagagcgaaaaaccttatcaaattttaag

SEQ ID NO: 291755 - DNA, 715 bp, Unknown
  Bacterial polypeptide expressing nucleotide sequence isolated from the Sargasso Sea
atgagttttttaatattagtgaggcatggacaaagtacttggaatttagagaaaaaatttactggttgggttgatgttgatttgaccgaaaaaggtattttggaggcaaaaaaagcaggatttttattgaaaaacaaaaacatcaaaattgatttttattacacttctcttcaattaagagcaaataatactcttaaaataattcaacaagaattagatgataaaaaaaattttactaaagcttggcaattgaatgagagacattacggagcactaactggtttgaataaagttgaaatgagtaaaaaaattggcgaggataaaatttatgagtttagaagatcatgggatctaagaccagatccactaaaaaaggaaagtccatttcatccacttaatattgatacttataaacaaattccgagagaattattacctgacactgagtctttaaaagatacttatgaaagagttataaatttttttgaagaacacgtgaaagaaaatttaaaaaaaaataatgttttaatatctgcacacggaaactctattagggccctatgtaagaatttatttaatttagataataaacaaatttctaatttagaaatacccactggaaaccctatgttgatagaatttagagaaaattttgcaatagcaaaatgtgagtatcttgataaggaaagagctaaagatcttttagttttttgaa

SEQ ID NO: 291756 - DNA, 721 bp, Unknown
  Bacterial polypeptide expressing nucleotide sequence isolated from the Sargasso Sea
tatgactaaattaattctcacaaggcatggacaaagtgtttggaatgcagaaaataagtttacaggttgggtagatgtagatctatccgataagggagtcctagaggcggaaaaatcaggtcaaattataaaagatttaaatattaaaatagatatttcttatacatcttatttaaaaagagcgattaaaacacttacaactatacttcaaaaaaataacttagaaattaaatttaatgctgcttggcaacttaatgaaaggcactatggatctttaacaggattaaacaaagaggaaactaagactaaaattggggaggaaaaattcaaaaagtataggaggtcttgggatatagcgcctcctccaatggaagaaaaaagtgaataccagaatttattcagccctttgaatactagtatacctttgggcatgacaccatttactgagtctttaaaaaacacatatgaaagagtagtacctttttatgaaaatgaaattaagaaaaaccttacagaaaataaaaatgttttaatttcagctcatgggaactctattagagctttatgcaaatatttattcaatatttcagatacaaaaatcaatgaattagaaataccaacaggtaatcctatgataattgaatttggagaaaatttaaaagttgaaaaatattattatttggataaatccagagctaaagatattatctttaatcaatga

SEQ ID NO: 291757 - DNA, 712 bp, Unknown
  Bacterial polypeptide expressing nucleotide sequence isolated from the Sargasso Sea
atgaataatttaatacttgttagacacggacaaagtgaatggaaccttgaaaaccgttttactggctgggtggatgtgggtttagctgctaatggcaaactagaggcttgtaaggcaggagaattaattaaggaattaaaccttgaattatcctatttttatacatctttgcagacaagatcgattgagacactaaatttaatactcaatacaatgagaattaaagatcaagatgttgtaaattcttgggaattaaatgagaggcactatggtgctttaacaggtttaaataaagacgaaatgaaaaaactttatggagaagaaaaaattcatacttttagaagatcttgggatcacccaccagagccgcttaaaaaaacaagcccatatcatcctttgaatattgatatatataaaaatgttccgaaagataaaattccagatacagaatctttaaaaaatacttatgaaagagtaatacctttttacaaaaaaaatattgaacctaaattagataaaaacattattgtatcagctcatggaaattcaatcagatcattatgcaaatacttatttaatttagataataaaaagatttcaagcttagaaataccaactggtaatcctttattgattgaaactgaaaaaggaaagattaaacacgcaagatatttagataaagatagagcaaaagatcttttagttttctaaa

SEQ ID NO: 291758 - DNA, 634 bp, Unknown
  Bacterial polypeptide expressing nucleotide sequence isolated from the Sargasso Sea
gatgagtcatttaattttagtaaggcatggacaaagccaatggaaccttgaaaaaaggtttacaggttgggtggatgttgatttggcgccaaatggtaaattagaagcctgcaaggcaggagaactaattaaagagcttaaattaaatttagatttttttttctgttcatatcaaaaaagagcaattgaaactttagacttaattttaaatacacttagaattaaaaataataatgttataaaatcttggcagctcaacgaaagacattatggtgccttaacgggtttaaataaagatgaaatgaaaataaagttaggagagaaaaaaataaaagaatttagaagatcttgggatgttgctccagatccattaaatcaaaatagtccatatcacccaataaatattgaaacttataagaacgtacccagagataaaattccagatacagagtcacttaaagatacattcgaaagagtaacaaattattatgaaaaaaatatatctgataaaatagataaaaacatagttatagctgctcatggaaattctattagagctttatgtaaatatttattcaaaataaacgaaaatgatatttcaaaactggaaataccaacaggtatcctcttttaa

SEQ ID NO: 291759 - DNA, 154 bp, Unknown
  Bacterial polypeptide expressing nucleotide sequence isolated from the Sargasso Sea
aatgggaaaactcatagcaattagacacggacaaagcacctggaatgcagaaaatcgtttcactggctgggttgatgtagatctttcagaaaagggtgtacgggaagcagagaaatccggaaaattgcttaaaagaattaaatatagattttga

SEQ ID NO: 291760 - DNA, 496 bp, Unknown
  Bacterial polypeptide expressing nucleotide sequence isolated from the Sargasso Sea
atgaaagaaagaaatttattactagttcgtcatgggcaaagtgaatggaatgagaaaaatctttttactggttgggaagatcctggcctaacaaaaaaaggtgaggatgaggcccaaaatgcgggacttctaatcaaagaacttggaataaattttgatcatctatttacttctgcattaataagagctcaattaaccggttctataattcttaatgagattggtcaaaatgaaatacctaccactaaaaatcaagcgcttaatgaaagattttatggagatctgcaaggcctaaataaagatgaatgtagagaaaaatggggagatgaaaaagtccaaatgtggagaagatcatatgagatggggccgccaggcggagaaacattaaaagaaactggagaaagagttattccatattttaaagaagaaattaaccccttaatattaaaaggtaaaaatatattgatagcggctcatggtaattctttgagatcat

SEQ ID NO: 291761 - DNA, 241 bp, Unknown
  Bacterial polypeptide expressing nucleotide sequence isolated from the Sargasso Sea
ggtgaaagtcttaaagatacttataatagagttattccttatttggagagtgaaatacttcctctaatgaaagataaaaacgtacttatctcagcgcatggaaattcattaagagcattagttaagtatttagacagtatttctgaagaggacatcataaaactcgaaatagcaactggagaacctatattttataaattcactgatggaaagttcattaaagaattacatagggaataaa

SEQ ID NO: 291762 - DNA, 712 bp, Unknown
  Bacterial polypeptide expressing nucleotide sequence isolated from the Sargasso Sea
tatgaataatttaatacttgttagacacggacaaagcgaatggaacctagaaaaccgttttactggctgggtagatgtaggtttagctgccaagggcaagcttgaagcttgtaaggcaggagaattaataaaggaattaaaccttgaattatcttatttttatacatcattacagactagatcgatcgaaacacttaatttaatcctcaatactatgagaattaaagatcaaaatattgttaatgcctgggaactaaatgagagacactacggagccttaacaggtttaaataaagatgaaatgaaaaaactttatggagaagaaaaaattcatacttttagaagatcttgggataacccacctgagccactaaaaaaaactagcccatatcatccagtgaatattgatatatataaaaatgttcccaaagataaaattccagatacagagtcattaaaaaatacttatgaaagagtaatacctttttataaaaaaaatattgaacctaaactagataaaaatattattgtatcggctcatggaaattcaattaggtcattatgtaaatatatatttaatttagataatgaaaatatttcgaatttggaaataccaactggcaatcctctattgattgtatctgaaaaaggaaagattaagaatgcaaagtatttagataaggatagagcaaaagatcttttagttttctaa

SEQ ID NO: 291763 - DNA, 610 bp, Unknown
  Bacterial polypeptide expressing nucleotide sequence isolated from the Sargasso Sea
attaaaggctgctcagttaatttcaaaagtaaatcttcgtcctacagtagcatttacttcatacttaaagagagctcaagaaacactaaacataatactaaaaaatttaaaattacatgatattgaagtgaattatgcatgggaattaaatgaaagacactatggcgctcttcaaggtttaaataaaaatgaagttaaagagaaatatggagaagagcaatttctgaaatggcgcaggggatataatactcctccaccagcgttaaatactgatagtgagatgaacccgaaacttgatcctttatacaagggaatttcaaatttgcctttaacagaatgtttagcagatacttatgaaagagtgatcccatactgggagaataacataaagccaatagtactaaaaaatactactattatttcagcacatggaaacagcttgcgtgctctttgcaaatatcttttttctgtttcagacaaagatatagtgaaacttgaaattcctacaggaaacccactgatgataaccttaaataatagttgcaaaatacagtcggcaagttatcttgatgccctcagatcagaaaatttgccagatattggcgcttaa

SEQ ID NO: 291764 - DNA, 712 bp, Unknown
  Bacterial polypeptide expressing nucleotide sequence isolated from the Sargasso Sea
tatgaataatttaatacttgttagacacggacaaagcgtatggaacctagaaaaccgttttactgggtgggtagatgtaggtttagctgccaaaggcaaacttgaagcttgtaaggcaggagaattaattaaggaattaaaccttgaattatcttatttttatacatcattacaaacaagatcgatcgaaacactaaatttaatccttaatactatgagaattaaagatcaaaatgttattaatgcttgggaactaaatgagaggcactacggaactttaactggtttaaataaagatgaaatgaaaaaactttatggagaagaaaaaattcatacttttagaagatcttgggataacccacctgagcctctaaaaaaaacaagtccctatcatcctttgaatattgatatatataaaaatattcccaaagataaaattccagatacagaatcattaaaaaatacttatgaaagggtaatacctttttataaaaaaaacattgaacctaaattagatgaaaatattattgtatcagctcatggaaattcaattagatcattatgtaaatacttatttaatttagataatgaaaagatttcaggtttagaaataccaactggtaatcctttattgattgaaactgaaaaaggaaagattaaacacgcaagatatttagataaagatagagcaaaagatcttttagttttctaa

SEQ ID NO: 291765 - DNA, 715 bp, Unknown
  Bacterial polypeptide expressing nucleotide sequence isolated from the Sargasso Sea
aatgagttatttaatacttgtaaggcacggtcaaagtgtatggaatcttgaaaatagatttacaggatgggtggatgttgacttaaatcaaaatggaatggctcaggcaaaaaaagctggtgagctgattaaagggaaaaaaataaatattgatctctattactcctcatttcagttgagagccaaaaatacactaaaaattatacaagaacaattagatgacaataaaaaagttaaatttgcttgggaacttaacgaaagacactatggatctcttactggtttaaataaagatgaaatgaaaaaaaaacttggagaagaaaaagttcaccaattcagacgctcttgggatctaagacctgatccactagataaaaataacagctatcatcctctaaatatcaatacatataaagatgtacctgtcgaaaaaattccagatactgaatctttaaaagatacatatgagagagtaattaaatattatagtgaagatattaaaaatgaattaaaaaataaaaatattttaatttctgcacatggaaattcaataagagctttatgtaagtatctttttaatttagataacaatcaaatttcaaaattggaaatacctactggtaaccctttactgataaaatttgattccaataataaaatattaaattgtgagtatcttgactctgaacgagctaaagatcttttagtttattaa

SEQ ID NO: 291766 - DNA, 664 bp, Unknown
  Bacterial polypeptide expressing nucleotide sequence isolated from the Sargasso Sea
atgagttatttaatacttgtaagacacggtcaaagtatatggaatcttgaaaatagatttacaggatgggtagatgttgatttaaatgataatggaagagctcaagcaaaaaaagctggtgatctcattaaagagcaaaaaataaatattgatctctattactcttcatttcagctaagagccaaaaatactctaaaaattatacaagaacaattagatgactataaaaaagttaaatctgcttgggaacttaacgaaagacactatggatttcttactggtttaaataaagatgaaatgaaaaaaaaacttggagaagaaaaagttcaccaattcagacgctcttgggatctaagacctgatccactagataaaaacaacagctatcatcctctaaatatcaatacatataaagatgtacctgtcgaaaaaattccagatactgaatctttaaaagatacatatgagagagtaattaaatattatggtgaagatattaaaaatgaattaaaaaataaaaatattttaatatctgcacatggaaattcaataagagctttatgtaagtatctttttaatttagataacaatcaaatttcaaaattggaaatacctactggtaaccctttactgataaaatttgattccaataataaaatattaa

SEQ ID NO: 291767 - DNA, 601 bp, Unknown
  Bacterial polypeptide expressing nucleotide sequence isolated from the Sargasso Sea
aatgagttacttaattttagtaagacatggtcaaagtgtttggaatcttgaaaaaaaatttactggatgggtagatgtagatttaacagaaaatggacaatcagaagcaaaaaaagctggccaactaataaaaaaagaaaatattgaacttaatctatattattcatcttttcaattaagagcaaaaaatactttaaaaataatacaagaagaattgaaagattttaaaaaagtaataagtgcatgggaattaaatgaaagacattacggtgctctgactggattaaataaagatgaaatgaaagtaaaacttggagaagaaaaagttcatcaatttagacgttcttgggatcttagacctgaccctttagataaaaaaaatccatatcatccgctaaatattgaaacttacaaagaaattcccttagaaaaaattcctgacactgagtctctaaaagatacatatgaaagagtaataaagttttatagcaaagagattgaatacaaaacaagtgaaaatattctcatttctgctcatggaaactctattagagctctttgcaaacacttgtttaatttagatgacaatgaaatctctaaa

SEQ ID NO: 291768 - DNA, 715 bp, Unknown
  Bacterial polypeptide expressing nucleotide sequence isolated from the Sargasso Sea
atgagttttttaatactagtaagacatggtcaaagtgtttggaatcttgaaaatagatttactggctgggtagatgttgaccttactaaaaatggaatgttagaggctgaaaaagcaggttttttaatcaaaaataaaaatattaaaattgataaatatttttcatctctacagttaagagcaaataatactttaaagataatacaaaaaattttaaatgatgagcatgatttccctagagcgtggcaactaaatgaaagacactatggagccttaactggtcttaataaaatagaaatggctcaaaaaattggtgaagataaaatatttgagtttcgaagatcctgggacacaaaaccagaaccactagataaaaaaagcccttatcatccttttaatattgaaacttacaaaaatataccaaaagaaataattccagacaccgagtcactgaaagatacatatgaaagggttctcaaatactttcatgatgaaattgaaaaaatacttttaaataagaatgtattagtttcagctcatggcaattcaataagagcattatgtaagtatttatttaaactagatagttctcaaatctctaagttagaaataccaacagggaatcctctcgtaatagagttcgatgataaattcaaaataaaaaattgtgaatacttagataaagaaagatctaaagatcttctaattttctaaa

SEQ ID NO: 291769 - DNA, 244 bp, Unknown
  Bacterial polypeptide expressing nucleotide sequence isolated from the Sargasso Sea
atgtctaaattaatccttattcggcatggacaaagtgaatggaatgagttgaacttatttactggttggaaaaatcctggattaactaaaaaaggagaaaaagaagctactgatgcgggtaaattactaagagagaaaggaattatatttgatatagctttcacttctgcgcttaagagagcacaagatactttaactatcattctaaaagagatagaccagacttccctcaaaataataaagg

SEQ ID NO: 291770 - DNA, 378 bp, Unknown
  Bacterial polypeptide expressing nucleotide sequence isolated from the Sargasso Sea
tgacaaaaagtcaaaatctcaatgaaagggattatggcgacttagtacgattaaataaagaagaaacttcacagaagtttggaaaagagcaagtacacatttggagacgatcttatgatgtttctcctcctggtggagaaagtctaaaaaatgtagttgatagagtaggaccatattttgaaaaatacatacaacctcatttatttattgataaaaatgtaattattgttgctcatggaaattctttaagagctataatgattaaaattggcctttataaaccagaagaaatttctaaaattgaattacctacaggcagtccttttgttgttaatttttcttcaggcaatttaaaagatgcaaattatttaaattaat

SEQ ID NO: 291771 - DNA, 447 bp, Unknown
  Bacterial polypeptide expressing nucleotide sequence isolated from the Sargasso Sea
aatgagtcatttaattttaataagacatggccagagtgaatggaacttgcaaaatagatttactggatgggtagatgttgatttagctccaaagggcaaattagaagcctgtaaagctggagaatctattaaagagttaaaaattaatattaatcatttttttacatcttatcaaaaaagagcaataaatacattaaagcttattttaaatactatgagaattaaagaagacagaattgtaaaagcttgggaattaaatgaaaggcattatggtactttaactggactagataaagatgaaatgaaaaaaaaattaggtgaaaaaaaagttcaaatgtttagaaggtcttgggatatttctccagaacctttaagtaaaaataatccattccatccactaaatattgaaatatataaatatgtaccaaaagaaaaataccagatact

SEQ ID NO: 291772 - DNA, 625 bp, Unknown
  Bacterial polypeptide expressing nucleotide sequence isolated from the Sargasso Sea
atgaaaaataaaaatttaattttagtgcggcatggtcaaagcgagtggaatcaaaagaatatatttactggttgggaaaatcctgggctaactcaacagggacgagaagaagcaaaacttgctggaatattaataaacgatttagaaataaaatttaattacttatttacatcggccctagtaagagctcaactaactggatcaataattttagagaatgttaatcaagagaatgtcaaaataataaaaaataaagcattaaatgagagatattatggagatcttcaaggtttgaataaagatgaatgcagaaataaatggggagaagatcaggttcaaatttggagaagatcatatactgtaggccctcctgggggagaatcgttaaaagaaactggagaaagagttatgccctactttctaaatgagattttcccattaatattaaaaggagaaaatattatagtttctgcccatggtaattctttaagatcactaattaaatatttggataaattatcctctgaggaaattgttaaattggagatacctactggatctccaattcattatctttttgatgatgatggagaaatattaaataaaaaaaacttaattgaataat

SEQ ID NO: 291773 - DNA, 394 bp, Unknown
  Bacterial polypeptide expressing nucleotide sequence isolated from the Sargasso Sea
tgaagcaatagtatcgaacagatatgatgcgataatttgtaattatgcaaatggggatatggttggccacactggtaattttactgcagcagtcaaagcggtcgaagtaattgatacctgtctgaatgaaattataagtgccatcaaggaagttaatggccaacttttagtgaccgctgaccatgggaatgtagagcaaatgttggatacaacaactaatcaaccgctaacatcacatacgaaaggcccggttcctctggtatatgttggtaataagaaaatcaagtttaaaacgcttggaagcctttgtgatattgctccaaccatgctcgctttgatggacatgcctatcccaaatcaaatgaccggcacagtgctaatagaagacacttag

SEQ ID NO: 291774 - DNA, 715 bp, Unknown
  Bacterial polypeptide expressing nucleotide sequence isolated from the Sargasso Sea
aatgagttatttaattttagtaagacatggccaaagtatatggaatcttgaaaaaaaattcacaggttgggttgatgtagacttgaccgaaaatggtaaatctgaagctataaaagctggtgaactaataaaaacgaaaaatataaatattgatatttattattcatcttaccaattaagagcaaaaaacaccttaaaattaataaaacaaacactgcaagatacaaaagtttcaaaagaggcttggcaattaaatgaacgacactatggatccctgacaggtttaaataaagatgaaatgaaattaaaacttggtgaagaaaaagttcatcaatttagacgttcgtgggatttacgaccagacccattagataaaaaaaatcctcaccatcctatcaatattgatgcctacaaagaaataccaattgataaaattccagacacagagtctcttaaagatacttatgaaagagtattagagttttatacacaagaaattgaaaatgaaatttcaaaaaataatattttaatttctgcgcatggaaattcaattagagcattatgcaaatacttatttaaattagatgaaaatcaaatctctaaattagagattccaactggaaatccactattaataaatttagataaaaagaataatattactgattgcaaatacttagacaaagaaagagctaaagaccttgtagttttctaa

SEQ ID NO: 291775 - DNA, 600 bp, Unknown
  Bacterial polypeptide expressing nucleotide sequence isolated from the Sargasso Sea
tatgaaagaaagaaatttattactagttcgacatgggcaaagcgaatggaatgagaaaaatctttttactggttgggaagatcccggtctaacaaaaaaaggtgaggatgaggcacaaaatgccggacttctaataaaagaacttggaataaattttgatcatctatttacttctgcattaataagagctcaattaaccggttctataattcttaatgagattggtcaaaatgaaatgcctaccactaaaaatcaggcacttaatgaaagattttatggagatctgcaaggccttaacaaagatgaatgtagagaaaaatggggtgaagaaaaagtccaaatgtggagaagatcatatgagatggggccgccaggcggagaaacattaaaagaaactggagaaagagttattccatattttaaagaagaaattaaccccttaatattaaagggtaaaaatatattgatagcggctcatggtaattctttaagatcattaataaaatttttagataatgtttccgatgaagatattgtaaaacttgaaattcctacaggtgcacctattcattatatttttaatgaagatggcaatgtcat

SEQ ID NO: 291776 - DNA, 712 bp, Unknown
  Bacterial polypeptide expressing nucleotide sequence isolated from the Sargasso Sea
tatgaataatttaatacttgttagacatggacaaagtgaatggaacctagaaaaccgttttactggctgggtggatgtaggtttagctgccaagggtaaacttgaagcatgtaaagctggagaactaattaaggaattaaaccttgaattatcttatttttatacatctttacagacaagatcgattgaaacattaagtttaatactcaacacgatgagaattaaagatcaaaatgttattaatgcttgggaactaaacgaaaggcactatggagcgttaacaggtttaaataaagatgaaatgaaaaaactctatggagaagaaaaaattcatatttttagaagatcgtgggataacccaccagagcctttaaaaaaaacaagcccatatcatccattgaatattgatatatataaaaatgttcctaaagataaaataccagatacagagtcattaaaaaatacttatgaaagagtaatacctttttataaaaaaaatattgaacctaaattagacaaaaatattattgtatcagctcatggaaattcaattagatcattatgtaaatatttatttaatttagataacgaaaagatttcaagcttagaaataccaactggtaatcctttattgattgaaactgaaaatggaaaggttaagaatgtaagatatttagataaagatagagcaaaagatcttttggttttctaa

SEQ ID NO: 291777 - DNA, 697 bp, Unknown
  Bacterial polypeptide expressing nucleotide sequence isolated from the Sargasso Sea
acacggtcaaagtgagtggaattttcagaaaagatttactggctgggttgatattgatctaaccgcacaaggtaaactagaagccgtaaaagcgggtgaactaataaaggaaaaaaaagtaaaaatagatttcttttattcgtcccttcaaaaaagagccgttaatacattaaaattaatattaaatactttaagaattaaagatgaaaaaattataaaagcatgggagttaaatgaaaggcattatggtgctttaacaggattaaataaagatgaaatgaaaaaaatttatggagataaaaaaattttagaatttagaagatcttggaatatttcgccagagcctttaaatagaaataatccttatcatccaataaacatagaggtctacaataatatacctagagataaaattccagatactgagtcactaaaaaatacatacgatcgagtagtgaaatattttgaaagcaatgttcttccaatgttaaaaaaaaataataatattttaatatctgctcacggtaattcacttcgaggtctatgcaaatttttatttgaaattgatgatgttaaaatatctaaattggagataccaactggaaatcccttggtgattaattttaatgaaaaaacagaaatcttagatgcttcctatttagatagatcaagagcaaaagatctagttgttttttga

SEQ ID NO: 291778 - DNA, 436 bp, Unknown
  Bacterial polypeptide expressing nucleotide sequence isolated from the Sargasso Sea
atgagtcatctaattttaataagacatggtcaaagtgagtggaatttacaaaatagattcactggatgggtagatgtagatcttgctccaaatggtaaacttgaggcatgtaaagcaggtgaactattaaaagagaaaaacttagaatttgattattttttttcatctttccaaaaaagagcaacagatacattaaaacttatactaaatactttgagacttaaagatgatgtaattttaaatgcttgggaattaaatgaaagacattatgggaatttaaccggattaaataaagatgagatgaaaaaaaaatttggtgaagaagtaattcataagtttagaagatcttgggataatccacctgaaccattaaatagaaataacccataccatccattgaatataaaggcttacgaaaaagtccaaaagaaaaaat

SEQ ID NO: 291779 - DNA, 440 bp, Unknown
  Bacterial polypeptide expressing nucleotide sequence isolated from the Sargasso Sea
tatgaaaccgacgatactctgtataatggatggctggggaataagctcaaacgcaaaatacaacgctgttactcaggcaaaaacacccattttcgatcagctggttagacaatggccaaataatttaatgcacgcttcaggcgaacatgtaggactgcctgagggtcaaatgggaaattcagaagtgggacacatgaatataggcgccggccgtgttattctgcaggacctgcccagaatcaaccaagcaatccaatcaaacaagctatctaaaaacaaagtattaaaagatttcatttcagctaccaaaaaatccgcgggcaaatgccatctcattggattgctatccgatggcggcgtccatagccatcagacccacatcgaagcgctcgcaaaaaccatagcgagttccagtgttccggttgtgctcacgggattta

SEQ ID NO: 291780 - DNA, 625 bp, Unknown
  Bacterial polypeptide expressing nucleotide sequence isolated from the Sargasso Sea
atgaaaaaaagaaatcttattttagttcgacatggtcaaagcgaatggaacgcaaaaaatcttttcactggatgggaaaatcctggtttaactgaaacaggaaaaacagaagcaaaaaatgcaggagatctaatcaataatttagacattgactttgactgtttatttacttctgctcttattagagcccaattaacaggaacaattattttaaaaacaattaatcaagaaagtatcaagattgtagaaaataaagctcttaatgagaggttttacggcgatcttcagggtatgaataaagatgaatgtaaacaaaaatggggtgaagagttagttcaaacctggagaagatcatatgaacttggtcctcctggaggagaaactttaaaagaaactggagatagagtgcttccttattatttaaacgaaatccatccaatgctaatgcaagataagaatatactcgtcgcagctcacggaaattcacttagatctttaataaaatacttagataaagtttctgatgaagatatagtcaaattagaaataccaactggcgcgccaatacattatcgatttaatgaagatggcaagatcacgtataagaaaagcttaattgaataac

SEQ ID NO: 291781 - DNA, 715 bp, Unknown
  Bacterial polypeptide expressing nucleotide sequence isolated from the Sargasso Sea
atgagtcacctaatactagttagacatggtcaaagcgaatggaatttggaaaatagatttactggttgggtagatgtagatttagctccaaaaggaaagctggaagcttgtaaagctggtgagttaataaaggagctcaatttagaaattaatcattttttctcatcctatcaaaaaagagcaatcgaaactttaaaattaatgttggtcacgatgagaattaagaatgataaaataattaaagcttgggaactaaatgaacgacactatggatctttaactggtttaaataaagatgaaatgaaaaaaaaactaggagaagataaaattcatatttttagaagatcatgggataaaccacctgaaccattaaataaaaataacccttatcatcctttaaatattgaaatttataaagatataccaaaagataaaatacctgatacagagtctttgaaaaacacttatgatagagtaattccatattttaaaaaaaatatagaaaaaaaaataagtgaaaatgtaatgatttctgctcacggaaattctatcagatctctatgtaagtatttatttgatatcagtaatgatgaaatttcaaaattggaaattcctactggaaatcctttaattttagaatttgataataataatttacttaacgcaaaatatttagatcaagaaagagctaaagatttacttaagtttagttaat

SEQ ID NO: 291782 - DNA, 712 bp, Unknown
  Bacterial polypeptide expressing nucleotide sequence isolated from the Sargasso Sea
aatgaattatttaattcttattagacatgggcaaagtacttggaatcttgagaatagattcacaggttgggtagacgtagatttaacagataaaggaaaaacagaagcaaaaaatgcaggaaatttgataaaaaaagaaaatatagaaattaattatttttattcctcatttcaatcaagagcaaataatacactaaaacttattcaagaagttttagggaataataaaaactttaccagagcctggcaattgaatgaaagacattatggtgctttaactggtctaaataaaactgagatgagtgaaaaattaggtgaagaacaagtatacaaatttagaaggtcatgggaccttagacctggtcccttaaataagaatagttcttttcatccatcaaacatcgatatttataaaaatgttcctaatgaaaatattccagatacagagtctttaaaagatacatattcaagagtagtaaaatattatgaaaaagaaataaaagaaaagttaaatagagaaaatatattaattgctgctcatggtaattcaattagagctttatgcaaatatttatttaaacttgatgaagttcaaatctctaaacttgaaataccaacaggcaatcccctattgatagaatttaataatactcaaattaatagttgtagatatctagataaagacaaagctaaaaatcttttagttttttga

SEQ ID NO: 291783 - DNA, 376 bp, Unknown
  Bacterial polypeptide expressing nucleotide sequence isolated from the Sargasso Sea
gatgggcaaactcatagcaattagacacggacaaagtacttggaatgcagaaaatcgtttcactggttgggtagacgttgatttatccgaaaaaggtgtgcaagaggctagaaggtcagggaaattattaaaacagttggatataaattttgatatctgctttacctcatatcttaagcgagccatagatacattagagattgtattaaaagttcttggagagaaatatgaatatacaaaagcatgggagcttaatgagagacattatggagcattaacaggattaaacaaaaaagaaacagaagaaaaaataggagaagagcaatttaaaaaatatagaagatcttgggatattcctccgccaatattagataaa

SEQ ID NO: 291784 - DNA, 718 bp, Unknown
  Bacterial polypeptide expressing nucleotide sequence isolated from the Sargasso Sea
catgagtcacttaatactagtaagacatggtcaaagcgaatggaatttagaaaatagatttactggttgggtagatatagatttagccccaaaaggaaaactagaagcctgtaaggcaggtgagttaataaaagaactcgatttagatataaaccattatttttcttcctatcaaaaaagagcaattgaaacgttaaaattaattttaaacaccatgagaattaagaatgataatataattaaagcttgggaattgaatgaaaggcactatggctctttaactggtttaaataaagaggaaatgaaaaaaaaactaggtgaagataaaattcatatttttagaagatcttgggataaaccacctgaaccattaaataaaaataacccctatcaccctttaaatattgaaatttataaagatataccaaaagataaaatacctgatactgagtctttgaaagacacttataatagagtaattccatatttcaaaataaatatacaaaaaaaaataagtgagaatgtaataatttctgctcatggaaattctatcagatcactctgcaagtatttatttgatattagcaatgaagaaatttcaaaattggaaattccaacaggaaatcccttaattttagaatttgatgataatattaaattacttaatgcaaaatatttagataaagaaagagctaaagacttacttaagtttggttaa

SEQ ID NO: 291785 - DNA, 715 bp, Unknown
  Bacterial polypeptide expressing nucleotide sequence isolated from the Sargasso Sea
atgagtcatttaattttagtaagacacggccaaagcgaatggaatttagaaaaaaaattcactgggtgggtagatgttgaattagcaccaaatggtaaattagaagcctgcaaatctggtgagcttattaaagaacttaatttgaatttaaattattttttttcttcttaccaaaaaagggcaatagaaacacttaacttaatattaaatactttgagaattaaaaataatgatgttatcaaagcttgggaacttaatgaaagacactatggtgctctaactggtcttaataaagatgaaatgaaaaaaaatttaggagaagataaagttttagaatttaggagatcttgggatattagaccagaaccattaaatagaaataacccttatcatcctattaatattgaaatttataaaaatataccaaaagataaaattcctgatactgaatctttaaaagatacttatgaaagagtaattccttattttgaaaaaaatattttaaataaattgaataaaaatataattattgctgctcatggaaattcaattagagcattatgtaaatatttatttaatatagataataaaaaaatttcaaaactagaaattccaacaggaaatcctttactaattaaatttgataataataaaaaagttaaggaagctttgtatttagataaaaaaagagctaatgatttaattattttttaac

SEQ ID NO: 291786 - DNA, 513 bp, Unknown
  Bacterial polypeptide expressing nucleotide sequence isolated from the Sargasso Sea
catgagtcacttaattttaattagacatggccaaagtgaatggaatttagaaaatagatttacaggatgggtggatgtagatttagcaccaaaaggaaaacttgaagcttgcaaagctggggaattattaaaaaaactaaatctaaatataaattatttttttacttcttatcaaaaaagagcaattgatactttaaagttaatattaaacacaatgagaattaaagatgataaaataactaaagcgtgggaattaaatgaaaggcattatggttcattaactggtcttaataaagacgaaatgaaaaaaaaattaggtgaagataaaatccatatatttagaagatcttgggataaccctcctgaacctttaagtaaaaataatccatatcatccgttaaatattgaaacttataaagatataccaaaagaaaaaatacctgatactgagtcgctaaaagatacatatgaaagagttattccatatttcaaaagagaaatagaaaaaaaaat

SEQ ID NO: 291787 - DNA, 406 bp, Unknown
  Bacterial polypeptide expressing nucleotide sequence isolated from the Sargasso Sea
ttaattttagaaaatatgaatcaacttgatatacctgtaattaaaaatcaaagcctcaatgaaagaaactacggtgatcttgctggtctaaataaagacgatgcgagagaaaaatggggagaagaacaggtacatatatggagaagatcatttgatatacctccacctggcggagaaagtttaaaggatacagctgaaagagtgcttccttattttcattctgagattttaccgaaagtagaagaaggattagatgttcttgttgctgctcacggaaattctttaagagccttagttatggaattggaaggaataagctcagatgagatagtaaaactagagatagcgactggagatcctttgacttatgaactcacagagggaaagatcacaagaacaaattaag

SEQ ID NO: 291788 - DNA, 631 bp, Unknown
  Bacterial polypeptide expressing nucleotide sequence isolated from the Sargasso Sea
tatgaacaaactgattttgcttagacacggtcaaagtcaatggaactttgaaaacaaattcacgggttggcaagatgtcccattgactgaaaaaggtgaaatcgaagccaaaaaagcaggtgaattaattaaaaaacacaaaatacacattgattatatctttagcagtgttttagacagagctaataaaacagctgaaatagctattaaggaagctaatctcacaaatctcatagataataataaattgattatgacaaggaatgagaacttaaatgagagagattacggtgatttagtaggtttaaataaagaagaaacggcaaataagtttggtaaagaacaggtacatatttggaggcgatcttatgatactcctccaccaaatggtgaaagtttaaaaaatgttgttgaaagagtatcgccttattttaaaaaaaatataaaaccactgttagacaaaaataaaagtattttgatcgcagctcatggaaactctttaagagcaatgatgattgagttaggcatgtacaagcctgaagaaatttcttccatagaacttcccacaggctcacctctgtgcattaatttagatgaaggaaaactagttgacttcttttatttgatttga

SEQ ID NO: 291789 - DNA, 571 bp, Unknown
  Bacterial polypeptide expressing nucleotide sequence isolated from the Sargasso Sea
tctgaatcaattcaccggatggaaggatcctgatcttacagccacaggaattcaagaggcctacaatgctggaaagataataagtagccttgaaattaattttgacttggtttttacatctgcgttaataagagcacagaatacagctgaaataattctcaaagaaataagtcaacctttaccaacaataaaagatcaggctcttaatgagagaaattatggagaccttgcaggccttaacaaggatgatgcgagaaaaaggtggggtgatgaacaagttcatatttggagaagatcatatgatattcctcctcctggaggagaaagtcttaaagatacaggtgaaagagtgctcccattttttatgaaagaaatactcccacatgtttgtgaaggtaagaatgttttagttgcagctcatgggaactctcttagatcgttaattaagtttcttgatgacatttcggacgaagatattgttaagttagaaatcccaactggggctccgatacattatgttattaacgaggatggttcagttaaatcaaaaaaagatttcttcaatgaatag

SEQ ID NO: 291790 - DNA, 721 bp, Unknown
  Bacterial polypeptide expressing nucleotide sequence isolated from the Sargasso Sea
tatgtctcatttaattttagtcaggcatggacaaagtgaatggaatttagaaaatagattcactggttgggttgatgttgatcttaccccaaaaggtaagcttgaagcttgcaaggctggtgagcttttaaagatacaaaaaattaaaattaattatttttttacatcatttcaaaaaagagcaataaatactttaaaattaattctcaatactttacgagtaaaagactctcaaataattagagcttggcaaattaatgaacggcattatggatctctcactggattaaacaaagatgagatgaaaaaaacttatggagaaaaagaaatacaagaatttagaagatcttgggataaacttcctgaacctttaaacaaaaatagtccatatcatccattaaatattaatgcttacaaagatgttcccacaaaaaatatacctgacactgaatctcttaaagatacatatgaaagagtttttccttactttgaaaaagaaattataagtaagttaaagcaaaacaaaaatatacttatatctgctcatggcaattctttgagagcaatatgtaaatatttgtttaagttagacgaaaatcaaataaataaattagaaattccgactgggaacccattattgataaatttcaataataaattagaaattataaaatgtttttatctagataaagaaagagcaaaaaatttaatagtcttttaa

SEQ ID NO: 291791 - DNA, 625 bp, Unknown
  Bacterial polypeptide expressing nucleotide sequence isolated from the Sargasso Sea
atgaaaaatattttattaattcgccatggtcaaagcgagtggaataaattaaatctttttactggattcaaaaatattgaattatctgaacaaggcattgaggaagcgaataaagcagggcaaaacttcaaaaatttagatattaaattcaatattgtatttacaagcgagctgaaaagagctcaagaaacagctaaaattattcttcaaaaccttgatcagtgggattttttaaataatgaaggaaaaataatctcaaacattaacttaaatgagagagattatggtgatctcacgggtttaaacaaaaaagaaactgctgaaaaatttggagaagaacaagttcataaatggagaagaggttattctgatcaaccccctaacggtgaaagtcttgaggatgtggtcagaagagtaaaaaaatattttgaagaaataattcaacctgctattcaaagtgatgaaaatgataatattttaatcgcagcacatggaaattctctcagagcgcttctaattgtaatgaatatttatgaaccaaataatattaattctgttgaactctcaactggcgttccaatacatgttatcttaatagataataggttcagtattaaagattaat

SEQ ID NO: 291792 - DNA, 613 bp, Unknown
  Bacterial polypeptide expressing nucleotide sequence isolated from the Sargasso Sea
atgtcatatttatctcttgtacgacacggccaaagcgaatggaatgaaaagaatttgttcaccggttgggagaatccaggcttaacagaaaaaggtcttgttgaagccaaggaagcaggggtcaaattaaataatctcggaatacattatgaccattactatacatctactcttgatagggccattattactgctgaaattattataagtggccttaatattaacgagtataacttagttaagtgccaagagcttaatgaaagagactatggagatttaactggcctaaataaagatgatgcgaggaagaagtggggagaagaacaagtacatatttggaggagatcatttgatatacctccgccaaatggcgaaagtttgaaggatacagcagaaagagtaataccttttttttcatctgagatctttactaagctaaaggatcaggaaaatgtatttatcagcgctcacggcaattcacttcgttcgttaataatgcatattgagaatttatcttcagaagaaattcttaagagagaaatcgctactggtaagccgcttgtatatgaatttgattcatttaaagaaacctattctctaaaatatgaataag

SEQ ID NO: 291793 - DNA, 256 bp, Unknown
  Bacterial polypeptide expressing nucleotide sequence isolated from the Sargasso Sea
aatgaaaggagctgaaggagaaccatggacagcacatacaacaaataaagtcccactaattttaattgagggtgaaaaaagaaaaataccaaatatgggaaatgaaattaatttaagagataatgccggtttagcagatattgctcccactttattgcaactattaaatctcccagtgccaagagaaatgacaggcaaatcacttattcaagaaattgaattaaaaggttataataaagttgttcaacacgtttag

SEQ ID NO: 291794 - DNA, 379 bp, Unknown
  Bacterial polypeptide expressing nucleotide sequence isolated from the Sargasso Sea
ggacttaaacaatacagaaccgcggaaactgaaaaatatcctcacgtatcatactttttcaatggaggagttgaaatacctttacctggagaagagagacatttgattccatctccaagagtcgcaacttatgatatggaacccgaaatgtctgcggaggaattaactattagttgctcaaaagcaattaaaagcgggaattatgcttttgttgtcatcaattttgccaatcctgatatggttggtcatacaggcaacatggatgcaacaattaaagctatagaaaaagtagataaatgtgtaggtcaaatagttaatgctactggagaaatgggcgggagcattgttattacagccgatcatggtaacgcagagtaat

SEQ ID NO: 291795 - DNA, 359 bp, Unknown
  Bacterial polypeptide expressing nucleotide sequence isolated from the Sargasso Sea
tatgagtaaattaatcctaactagacacggacaaagtatttggaacgcggaaaatcgatttactggatgggttgacgttgatttatcaaaaaaaggagtgattgaggcagaaaagtcaggtgagttaattagaaaatcaaatattaatattggtgtttcctacacttcttatttaaaaagagcgatcaaaaccttaacaacaatacttaaacaaaataaaaaggagctgaaaatttatacagcttggcaattaaatgagaggcattacggctctttaactggtttggataaagaggaaattaagaagaaaattggtgaagaacaattaaaagatatagaagatcgtgggacacgccccc

SEQ ID NO: 291796 - DNA, 712 bp, Unknown
  Bacterial polypeptide expressing nucleotide sequence isolated from the Sargasso Sea
tatgaattatttaattctcgtgagacatggacaaagtgaatggaacctagaaaatcgtttcacaggctgggtagacgttgatttagctgccaaaggtaagcttgaagcttgcaaagcaggagaattaattaagaaattaggtattgaattatcttatttttacacatctttacaatcaagatcgattgagactcttaatttgatattaaatactatgagaataaaaaatcaggagattgtaaatgcatgggaattaaatgagagacattacggatctttaacaggtctaaataaagatgaaatgaaaaagctttatggtgaagaaaaaattcatatttttagaagatcatgggataatccaccagaagcacttaaaaaaacaagtccatatcatccattgaatatcgatatatacaaaaacgttccaagagataagatccctgataccgagtcattgaaaaatacctacgaaagagtgataccattttataaaagaaatatagagccaaaattagataaaaatataattgtttcagctcatggaaattcaattagatcattgtgtaaatacctatttgatttagataacaaaaaaatttcaagtctggaaataccaacaggtaatcctctattaatagaaattgaaaaaggaaaaattaaaaatgctagttatttagataaagacagagcaaaagaccttttagttttctaa

SEQ ID NO: 291797 - DNA, 625 bp, Unknown
  Bacterial polypeptide expressing nucleotide sequence isolated from the Sargasso Sea
atgaaaaaaagaaatttaattcttgtaagacatggacaaagtgaatggaatgaaaaaaatctatttacaggttgggaggatccaggtcttacaaaaaaaggctctgatgaagcaataaatgctggtcttttgatagataaactagaattagaatttaattacttatttacttctgccctgatcagggctcaaataactggaaatataattcttgaaagtattgatcaagacaatgttgatatcataataaataaagcactcaatgaaagattttatggcgatcttcagggattaaataaagatgaatgtagaaaaaaatggggcgatgagcaggttcaaatatggagaaggtcatttgatataggtcctccgggcggagaatcactaaaggaaactggagaaagagtaatgccctactttctagaaaatatacacccattaatattaagaggtgaaaacgtaataatttctgcccatggcaattcattgcgatcattgataaagcatttagataaattatccgcagaagaaattgtcaaattagaaattccaactggagctcctattcattacctttttaatgaaaacggagaggtattaaacaaaaaaaatctaattgaataat

SEQ ID NO: 291798 - DNA, 667 bp, Unknown
  Bacterial polypeptide expressing nucleotide sequence isolated from the Sargasso Sea
ggatttagaaatagatttacaggctgggtagatgttgatttgacagaaaatgggaaatcagaggcaaaaaaagctggccaattaattaaaaatgaaaaaataaatattgatctatattattcctcatttcaattaagggcaaaaaatactttaaagataatcaaaaatgaattgcgagataacaaaaattttaaaagtttctgggagcttaatgagagacattatggtgctctaactggactaaataaagatgaaatgaaaattaaacttggagaggagaaagtacatcaatttagacgatcatgggatcttaaaccagatcctctagataaaaatgatcctcatcatccattaaatattaaaatttataaaaaaatttcaattaaaaaaattccagacacagaatctttaaaagatacatatgaaagagtagtaaaattttataagaatgaattagaaaagaaaaataataaaaatgtcctcatttctgctcatggaaattctataagagcattatgcaaatatttatttaatttagataataatgaaatttctaaacttgaaataccaactggaaatcctcttttaataaaatttaaagaaaataaagttatcagtggcaaatatcttgatgttaaaaggtcaaaaaatcttttagttttttaaa

SEQ ID NO: 291799 - DNA, 335 bp, Unknown
  Bacterial polypeptide expressing nucleotide sequence isolated from the Sargasso Sea
cggcaaccttgaagcagcggtaaaagcatgtgaagcagtagacgctggactgggtcaattgatggcttctgtaaaagaaaaaaatggatgccttgtgattacagcagatcatggaaattgcgaggttatgatagatccagaaactaaattaaatcataccgcccacacaacacatctggtaccatttgcaatttatggagtagatcaggatatagaaataagaaaacacggtcgccttgcagatgtggcgccaacagtgctttgcttaatgggattacaacagcctcctgaaatgacgggtaaaagcatgatagagaaaaaaaattgcgattaac

SEQ ID NO: 291800 - DNA, 751 bp, Unknown
  Bacterial polypeptide expressing nucleotide sequence isolated from the Sargasso Sea
atgaatttagtttttgtacgccacggacaaagtatatggaatctagaaaataaatttaccggttgggtagatgttggcttaagtgataaaggcattcaagaagctattaaggctggaaaaacgctaatagaaaataattttaaacctgaaatttgttttacatcttacttaagtagatcaatagaaacttcaaatcatttattaaatgagtatgaacaagctcttgttaatgaaataaacattattaaaaggtggcaattaaatgaaagacattatggagcattacaaggtttggacaagatagatactgcaaaaaaatatggtgaaaagcaagtccacgagtggaggagagggtataaaacaaagccgcctttaattgaaaaagattcaaaatttgatccaagacaagatgaagcttatgaagatattgatattgctttaccattaggggagtcactagaagatgtagtagcaagagttgaatcaactttaaatgaaattattgagctatcagaaaataaaaatgtacttgttgttgcacatggaaatagtattagagctatgttgaaaactattgaaaatatttcagatgactcaatagttgaggttaatattcctactggaatacctctcgcttttaatattaacaatgataaaataactaagattggataccttggtgaccaagaaacaatagaagagttagaaaaagaaatagaacaacaatcaaaaatagaaaaggataattaaa

SEQ ID NO: 291801 - DNA, 715 bp, Unknown
  Bacterial polypeptide expressing nucleotide sequence isolated from the Sargasso Sea
atgagttttttaatacttgtaagacatggacaaagtacttggaatcttgagaaaaaatttacaggatgggttgacgtagatattacagaaacaggcaaatcggaagctaaaaaagcgggtcagcttattaaggaacaaaatcttaaaataaattattattattcatctgttcaattaagagcaaagcataccataaaaattataaaagaaattttaaatgacgaaaaagagttcaaatctgcctggcaacttaacgagagacactatggagctcttactggcttaaataagatagaaatggcaaaaaaaattggtgaaaaaaaagtgcacgagtttcgtagatcttgggatatgaaaccagatgccctaagtaaagaaagtccacaccatcctagtaacataagtacttacaaagatgttccagaggagcttattccaagcacagagtctttaaaagatacttacgatagagtcgttaaattttttgaagaagaaatccaagaaaaattgagagatactaatattttaatttcagcccatggcaattctattagagctttatgcaaaaaactttttgaattagataataatctgatttcaaatctagaaatacctacaggaaatcctttattgataaagttagacaataatttgaaaatcacaaaatgtgagtatcttgataaaaagagggctaaagatcttttagttttttgaa

SEQ ID NO: 291802 - DNA, 181 bp, Unknown
  Bacterial polypeptide expressing nucleotide sequence isolated from the Sargasso Sea
atgaattatttaattctcgtgagacatggacaaagtgaatggaacctagaaaatcgtttcacaggctgggtagacgttgatttagctgccaaaggtaagcttgaagcttgcaaagcaggagaattaattaagaaattaggtattgaattatcttatttttatacatctttacaatcaagat

SEQ ID NO: 291803 - DNA, 277 bp, Unknown
  Bacterial polypeptide expressing nucleotide sequence isolated from the Sargasso Sea
attgagtaataaagttttattattaattcttgatggctggggtatagcttctgacaaaaaagcctctgctcctgatattgcaaaaactccaaattacaactctctaaaagataaaaatccattcaattatttaattactcatggcgagaaagtaggactcccacctggtcaaatgggtaatagtgaggttggacatatgaatattggttctggaagaatagttccacaagatctacttcgaattgataagtcaatcaagaatggtcaattttttgaa

SEQ ID NO: 291804 - DNA, 418 bp, Unknown
  Bacterial polypeptide expressing nucleotide sequence isolated from the Sargasso Sea
aattttagataatattaatcaagagaatgtcaaaataataaagaacaaagcattaaatgaaagattctatggagatcttcagggtttaaataaagatgagtgcagaaagaaatggggagaaaatcaagttcaaatttggagaagatcatatgacataggtccacctggaggagaatcattaaaagaaactggagaaagagttatgcccttctttttaaatgaaatttttccattaatattaaaaggagaaaatattatagtttctgctcatggtaattctttacgatcactgattaaatatttagacaaattatcctctaaagaaattgttaaattagagatacctactggctctccaattcattatctttttgatgatagtggagagatattacataaaaaaaacttaattgaataa

SEQ ID NO: 291805 - DNA, 709 bp, Unknown
  Bacterial polypeptide expressing nucleotide sequence isolated from the Sargasso Sea
atgagttatttaattttagtaagacacggtcaaagtctgtggaatcttgaaaagaaatttactggatgggttgatgtagatctgacagaaaatggaaaatcagaggcaaaaaaagctggtgaattaataaaacaagaaaaaattgaaattaatgtgtattactcctcttttcaattaagggctaaaaacactttaaaaattatacaggaagaattacaagattttaaagaagtaaagagcgcatgggaattaaacgagagacattatggagctctgacagggttaaataaagaagaaatgaaaaaaaaacttggagaagaaaaagttcatcaatttagacgttcttgggaccttagacccgaccctttagataaaaaaaatccatatcacccactaaatattgaaacatacaaaaaaattcctttagaaaaaattcctgataccgagtcactaaaagatacatatgaaagagtaataaagttttatagtaacgagatagaaaagaaatcaagtgaaaatattcttatttctgctcatggaaattccattagagctctttgcaaatatttgtttaatttaaataacaatgagatctctaaacttgaaattccaacaggaaacccacttttaattgaattagaaaacaacaaaatttctaattgcaaatatctcgatcaagaaagagctaaagatcttttagttttttaaa

SEQ ID NO: 291806 - DNA, 712 bp, Unknown
  Bacterial polypeptide expressing nucleotide sequence isolated from the Sargasso Sea
atgagtcacttaatacttgttagacatggtcaaagcgaatggaatttagaaaataaatttacaggatgggttgacgttgagctcgcaccacaaggtaaattagaagcttgtaaagctggtgaattcataaaaaaattaaatttagaaataaaacatttttatacttcatatcaactaagatccattgatactttaaaacttattttaaatacaattagagtaaaaccaaataatataattaaggcttggcaattaaatgaaaggcactacggatcacttacaggattaaataaagatgaaatgaaaaaaaaactaggagaagatgaagttcacaaattcagaagatcatgggataagccaccaaaacctttaaatataaatagtccataccatccaaaaaatataagtatttacaatgatatacctcgtaacctaattccagatacagagtctcttaaagatacttatgaaagagttgtgccctattttgttgaaaatatagagaaaaatttacaggataatatagttatatctgctcatggtaattctattagatcacttttaaaatatttatttaaaattgatgaaaatgaaatttctaaacttgaaataccgacgggaaatcctctacttttgaaatttgaaaaaaagaatataaaagaagctagatacctagatcagagtagatctaaggatttaattaaattctaag

SEQ ID NO: 291807 - DNA, 715 bp, Unknown
  Bacterial polypeptide expressing nucleotide sequence isolated from the Sargasso Sea
atgagtaaactcatagcaattagacatgggcaaagtacttggaatgcagagaatcgttttacaggctgggtagacgtcgatctatcagaaaaaggtgtgcgagaagcagaaaaatctggaaaattattacaggagttaaatttaaattttaatatctgttttacctcttatctcaaaagggcaataaacacattggagatagtgcttaaagttcttgaaaaagatattaagtatacaaaagcttgggaacttaatgaaagacattatgggtctctaacaggtttaaataaatctgaaacaaaaaaaaaattaggtgaagagcagtttaaaaaatatagaaggtcttgggatattcctccgcctagtcaagacaaagactctaaatacagctcatacaaagatcctttatataaagatattaaaaatatacctaacactgagtctttgaaagatacttatgatcgtgttgttccttatttcgagaagcatattgaaaaacatctccaacaaaataagaacgtaatgatttcagcccacggaaacacaataagggctctaggaaaaaaaatttttaatatatctgatacgaaaattaatttgctagaaataccaactgggaatccattaataattgattttgatagttctggtaactttttaaatgcaaaatatttagatgaaacaagaaaaacagaaataatatctaatcaataat

SEQ ID NO: 291808 - DNA, 715 bp, Unknown
  Bacterial polypeptide expressing nucleotide sequence isolated from the Sargasso Sea
atgagttatttaatacttataagacatggtcaaagtgtatggaatcttgaaaataagttcacaggatgggtagatattgatttaaatgataatggaagagcccaagcaaaaaaagctggggaactcatcaaagagcaaaaattaaatattgatctctattactcttcatttcagctaagagcaaaaaatactctaaaaattatacaagaacaattagatgaccctaagaaagttaaatctgcttggcaacttaacgaaaggcactatggatctcttactggtttaaataaagatgaaattaaaaaaaaacttggagaagaaaaagttcaccaattcagacgctcttgggatctaagacctgatccacttgataaaagtaacagttaccatcctctaaatatcaatacatataaagatatacctatcgataaaattccagatactgaatctttgaaagatacttatgggagagtaattaaatactataatgaggatattaaaaatcatttaaaaaataaaaatattttaatttctgcacatggcaattccataagagcgttatgtaaatatctttttaatttagataacaatcaaatttcaaaattggaaatacctacaggtaaccctttactgataaaatttgatactgacaataagatattaaattgtgaatatcttgactctgaacgagctaaagatcttttagtttattaaa

SEQ ID NO: 291809 - DNA, 625 bp, Unknown
  Bacterial polypeptide expressing nucleotide sequence isolated from the Sargasso Sea
atgaatgagagaaacctaatattaattcgccacggtcaaagcgaatggaatgaaaaaaatctttttacagggtgggaaaatcctggattaactgaaaaaggaaagaaagaagcaaagaatgctggaactttgataaaaagtttagatattaattttgattatatgtttacctcagcattgatcagagctcaattaactggatcgataattttagaaagccttaatcaatctgaaattaatattattaaaaataaagctttaaatgagagattttatggtgatttacaaggtttaaataaagatgaatgtagaaaaaagtggggtgaagaaaaagtacagatgtggagaaggtcatacgacaaaggtccgcccggtggtgaaacattaaaagaaacaggcgaaagagttctgccatattatttggaagagattcttccattaatacttaaagatatgaatattatcatagctgcacatggaaattcgttaagatctcttattaaatacttagatggtatttctgatgaagatatagttaaattggaaatacctactggtgcgcctatgcactatgtatttgatcagagtggaaaagtaataagtaaaaaaaatctcattgaataac

SEQ ID NO: 291810 - DNA, 203 bp, Unknown
  Bacterial polypeptide expressing nucleotide sequence isolated from the Sargasso Sea
atggaatgaatccatagaaccatacattaaatcaggaaaaaaggtgttgattgttgcacatggaaattctctccgggcgctggttaaacatctcaatggaatttctgatgatgaaattaaagatttgaatattcttactggtgctccatatgtttttgaattagatagtcaattaaaatcacaaaaaaattattatttataat

SEQ ID NO: 291811 - DNA, 508 bp, Unknown
  Bacterial polypeptide expressing nucleotide sequence isolated from the Sargasso Sea
ggaggcaatgagaatccgtatcctggtgaggtgagatgtctggttccgagtcctaaggtatcaacctacgatctttgtccagaaatgtcatctctggaggttacaagcaaactggtaaaagctattgaaagtggaaaatatgaatttatagtagtaaattatgctaatccagatatggtcggtcatagtggaaaaattaaggcgacggtaagcgcttgtgaggcggttgatagggggctaggaaaaatcttaactagtcttagaaaagttggtggacaattgcttctaacatccgatcatggcaattcagaaacgatgttggatgagaaatcaggactgcctcatactgcccatacaatcaatagggtaccaattatttacttctctagtgagaaaaagttaaatattatggatggaactttatcagatatagctccaacaatcctacaattaatgggattagaaaaacccattgagatgactggaaattcgcttataaaactttaag

SEQ ID NO: 291812 - DNA, 919 bp, Unknown
  Bacterial polypeptide expressing nucleotide sequence isolated from the Sargasso Sea
ttggctacagttatgggtagatattattctatggatagggatatgagatgggatagaattaagctagcttatgatgcacttgttagaggaaaaggagttcaatcttataatcttcatgattcaattaaaaaatcatatgataaaaatgttttcgatgaatttattttaccaacagtaggtatggaaaaggataggccgatctgtaaaataaatgatggtgatgttgtttttgcatataattttagatctgatagaatgaggcagctcacttcagttttaacacaaaaagattatataaagtatcaaatgaaaaaaaagaaattatattttctatcaatgacaaattatggagatgaatttaaaaatattaatgtcttatataataaaacaaatattaaaaatacattgggagaagtattaagtaaacacaaaaaaaaacaacttagaatagctgaaacagaaaagtatccacatgtaacatacttcttttcaggtggaagagagaaaagttttttaaacgaagaacgaattttgtgtccatctccaaaagttagtacttatgatctaaaacctgaaatgagcgcttttgatgttgaaaaaaaaattatacaaaaaatagagttggatatctatgattttatttgtttaaatttagcaaaccctgatatggttggccatacaggtgattttgattccacaattaaagcctgtgaggtagttgataaatgctctaataaaatcatcaataaagctcttaaatttaattataatatcattttaatagcagatcatgggaatgctgatattatgataaataaagatggaagccctcacacttaccatacaactaatccagtcccatttatattaattgataaaaaatttaattcaaaattaaaaaaatggaattttagctgat

SEQ ID NO: 291813 - DNA, 510 bp, Unknown
  Bacterial polypeptide expressing nucleotide sequence isolated from the Sargasso Sea
aatgaaagaaagaaatcttatacttgttcggcatggtcaaagcgagtggaatgaaaaaaacctatttacaggctgggaaaatccaggcctaactaaaaaaggtctagatgaagcaaggaatgctggaacattaattgatgaattagatattgaatttcactgcatgtttacttcagcattaattagagctcaattaacaggttcaataatcttagaaaccataaatcagacaaaaattgaggttattaaagataaggctttaaatgaaagattttatggagatcttcaaggtttgaataaagatgaatgtagggaaaaatggggagaagaacaggttcaaatatggagaagatcatatgatggaggtcctcctggaggagaatcattaaaggaaactggagaaagagttcttccatattatctaaatcaaatacatccattaattaatttagataaaaatattattattgccgcgcatggaaattctttaagatcattaataaaacattt

SEQ ID NO: 291814 - DNA, 721 bp, Unknown
  Bacterial polypeptide expressing nucleotide sequence isolated from the Sargasso Sea
atgagcaaattaatccttgtaaggcacggtcaaagtgtatggaacgctgaaaacagatttacaggatgggtggatgttgatttatccgaaaaaggaattttagaggctcaaaaatctggtctattaattaaaaatctaaatattaatatagatgtttcctatacatcttttttaagaagagccatcaagactcttacagccatacttcaagaaaatagtttggaacttaaatttaatacttcttgggaattgaatgagagacattacggatctttaacgggtttaaataaagaagaaaccaaaaagaaaattggtgaagagcagtttaaaaaatatagaagatcttgggatataccaccgccaccaatgcctgagaacgacaaaaatcattctttatttagtcctttaaacccaagtatacccgtgggaatgataccttttacggagtctttaaaagatacatataaaagagtaattccttattatgaaaaagagattcaaaaacatattaaagaaaataaaaatgttttaatatcagctcatggcaattcactaagaacaatgtgcaaatatctatttaaaatttctgatcaaaagataagtgaattagaaattccaacaggaaatcctttgataattgagtttgataataatcttaaaattaaaaaatattattatctggatgagactagagctaaaactattatctttaatcagtaat

SEQ ID NO: 291815 - DNA, 631 bp, Unknown
  Bacterial polypeptide expressing nucleotide sequence isolated from the Sargasso Sea
atgaataaacttgttttattacgccatggacaaagtgagtggaatttagaaaataaatttacagggtggactgatgttcctttgactaaaaagggaatagaagaagctaaaaatggtggttttttattaaataaaaataatattttcatcgatgttatattcagtagtgttttgaaaagagctaatcaaactgcttatatatgcgctaaagaagctaactttatacatttgtttgataatgataaactaatctatactcgtaatgaaaaattaaatgaacgagattatggtgatctagttgggttaaataaggctgaaacagcaaaaaaatttggtaaagagcaagttcatatttggagaagatcttataatacccctccaccaaatggtgagagtttagaagatgttgttaatcgtgtttcaccatattttgaaataaatattttacctttattaaaaaaaaataaaaatatattaattgctgcacatggcaattctctaagagcaattatgattaaaattggtttatataaatctgaagaaatatcatcaattgagttaccaactgggaaaccgttttgtatagattataaaaaaaataaaatcattgataaatattatttaaattaag

SEQ ID NO: 291816 - DNA, 457 bp, Unknown
  Bacterial polypeptide expressing nucleotide sequence isolated from the Sargasso Sea
atgtatagattggttttattaaggcatggacaaagtcaatggaatttggaaaaccggtttacgggttggaccgatgttgacttaactgatcagggaaaaaatgaagccaatattgcaggtggtctttttctaaaagaaggttttacttttgatctcgcctatacctctgttttaaagcgtgcgattagaactttgtggattgttcttgataaaatggacttgatgtggattcctgtcattcgcacttggaaactcaatgaaaggcattacggcgctttacaaggcttagataaagcagagactgcagaaaagcatagtgcagaacaagtaaaaatctggcgtcgcagttatgcaaccccccctcccgccttagatgacgatgacgaacgactgcctgcaaaagatccgaagtattccgaggtcccaattaaccttctacctaaaaccgaggcctgaa

SEQ ID NO: 291817 - DNA, 373 bp, Unknown
  Bacterial polypeptide expressing nucleotide sequence isolated from the Sargasso Sea
gatgcaacaattaaagctatagaaaaagtagataaatgtgtaggtcaaatagttaatgctactggagaaatgggcggaagcattttgattacagccgatcatggcaacgcagagttaatgaaaggatctgaaggagagccatggacagcacacacaacaaataaagttccattaattttgattgaaggtgaaaaaagaaaaataccaaatatgggaaatgaaattaatttaagagaaaacgcgggcttagcagatattgctcccactctattgcaattattaaatctaccaataccaagagaaatgacaggcaaatcgcttattcaagaaattgaattaaagggttataataaagtcgttcaacacgtttaaa

SEQ ID NO: 291818 - DNA, 420 bp, Unknown
  Bacterial polypeptide expressing nucleotide sequence isolated from the Sargasso Sea
caaccgagctgacggataagttagtcgcagcgattgaatccgctcaatacgatgtgattatctgtaactacccgaacggtgatatggtgggtcatactggcaacttcgatgcggcggttaaagcctgcgaagctgtcgatgcctgtatcggccgtgtagtcgatgcgctggcgaaagtaggcggcgaatgtattattaccgctgaccacggcaacgccgagcagatgaccgacgagaccacaggccaagcccatacggcgcataccagtgaactcgtgccctttgtgtttgttggccgtgacgccaccatagatgaaggtggtaaactgagcgatgtcgccccaacgattctgcacctgatgggtgaagccattcccgcagagatgacgggtaagcccttaatccacgtaaaagagtagt

SEQ ID NO: 291819 - DNA, 538 bp, Unknown
  Bacterial polypeptide expressing nucleotide sequence isolated from the Sargasso Sea
tctgaaatgaaaattaaaaatattccaattgaatataattggagattaaacgagcgtcattatggagcattacagggtttaaataaatctgaaacagcggaaaaatatggcgatgaacaagttttacagtggcgtagaagctataatacgcccccacctccacttgaaaaatcagattcgagatggccaggaaatgactctaaatattctaatattgatcaaaatgacattccagcttgcgagtgtctaaaagatacagtggaaaggtttttaccatattggaataattcaataaaaccttcagtacaaaatgggaaaagagttctaatagtggcgcatgggaactcacttcgttcattagtgaaacaccttgataatatatcggataatgatataattagtttaaatattccaacagggatccccttgatttatgaattgagtgatgatttaaatccaataaaaagttgttatttagggaacaaagaagagattgaaaaggctatctcttcagttaagaatcaagcaaaaacttaat

SEQ ID NO: 291820 - DNA, 694 bp, Unknown
  Bacterial polypeptide expressing nucleotide sequence isolated from the Sargasso Sea
atgtcaaagattagcagcaaaaatataaaaagattaagtgttcctcagagccctgttgttcttgcaatactcgatggctggggatatcgaaaagaaaaatcagataatgctataaaaagtgcctctacaccagtaatggattctttatggcatgcttatccccatactcttatcagtgctagtggatctgatgtaggcctcccagatggtcaaatgggtaattcagaggtagggcaccttaccattggttcgggaagaataatacaacaagaacttgtaaggatctcaaatattgtaaaaaataatcaattaggcttcctaaatgagttaaaagagatggctgcttcattaaagaaaaataattctactttgcatatcacaggattatgttccgatggaggagttcatagtcatattgatcacttattaggtttaataaaatgggcatctgataataaacttaaaaaagttgcaatccatattattactgatggaagagacactcctgcaaaaagtgcctctaaatatctaaatcagattgaatcatgtataaaaaaatttaacgtaggcgaaatagcttccatatgcggaagatactggataatggatagaaatcttttatgggatagaacagaaaaagcatattctaatttgactgatccagatattcaaataacaaatatttctcccaggg

SEQ ID NO: 291821 - DNA, 694 bp, Unknown
  Bacterial polypeptide expressing nucleotide sequence isolated from the Sargasso Sea
atgcatacacttgttttattaagacatggtgaaagtcaatcgaatcaagacaacctttttactggatggtcagatgttgatcttactgagaaaggagctaaagaagctaaaaattcaggaattttattaaaaaagcataattatcaatttgataaaatatttacttcagtgctcaaaagagcagtaaaaacaatggatttatgcttaaatgaaattgaacaaaataatattcctattgtttatgactggcgtctaaatgaacaacattatggagatcttgaaggattaaataaatcagaaacagtaaaattacatggtgaagaaaaagtatttaattggcgtagaagttttaatgtgtctccaccccctttagctcttaatgataaaagacatccgcgttttgataatcgatacaaaaaactaagtgatttagaaattccatctactgagagcctaaaagacacgttaaaccgactacttcctatttggaatcaggatatcgctccattcataaaatcaggaaaaaatgctttgattgttgcacatggaaattcccttcgtgctcttattaaatatttgaataatatatcggatgaagacatatcaaattttaacattccaactggaattccattagtccttagacttaacaatgatttaaatacaactcaattctttttcttagattcgtaaa

SEQ ID NO: 291822 - DNA, 622 bp, Unknown
  Bacterial polypeptide expressing nucleotide sequence isolated from the Sargasso Sea
catgcatacacttgttttattaagacatggtgaaagtcaatcgaatcaagacaacctttttactggatggtcagatgttgatcttactgagaaaggagctaaagaagctaaaaattcaggaattttattaaaaaagcataattatcaatttgataaaatatatacttcagtgctcaaaagagcagtaaaaacaatggatttatgcttaaatgaaattgaacaaaataatattcctattgtttatgactggcgtctaaatgaacaacattatggagatcttgaaggattaaataaatcagaaacagtaaaattacatggtgaagaaaaagtatttaattggcgtagaagttttaatgtgtctccaccccctttagctcttaatgataaaagacatccgcgttttgataatcgatacaaaaaactaagtgatttagaaattccatctactgagagcctaaaagacacgttaaaccgactacttcctatttggaatcaggatatcgctccattcataaaatcaggaaaaaatgctttgattgttgcacatggaaattcccttcgtgctcttattaaatatttgaataatatatcggatgaagacatatcaaattttaacattcca

SEQ ID NO: 291823 - DNA, 715 bp, Unknown
  Bacterial polypeptide expressing nucleotide sequence isolated from the Sargasso Sea
atgagttttttggtattaatcagacatggtcagagtacttggaatcttgaaaaaagattcactggctgggttgatgttgatctaacagatcaaggtaaaattgaagctgagaaagctggtttacttgtcaaaaatcaaaatataaatatagatttttattattcctcatttcaagtgagggcaaaccatactctaaaaataatacaaaaagtgctaaaatcaaaaaaaaattttataagagcatggcagctaaacgaaagacactatggtgaacttacagggttgaataagattgagactgcaaataaaattggtgaagataaagttttcaaatttcgaagatcttgggatatcaaacctggaaaactaagtagagaaagctcttatcatccactaaatattgaaacatatgagaaaatacccaaagagctcattcctgacacagaatctttaaaagatacatacaacagagttttggagtatttcaaaaaagaaatacagcctaaactaataaataaaaatgtattaattacagcacacggaaactccataagagctttatgtaaatatctgttcaacttagataacaatcaaatcacaagtttagaaattccaacaggaaatcccttaataatcaatttcggtgaaaatttgaaaataaatgaatgtaaatatttagataaagagagatctaagaaccttttagttttttgaa

SEQ ID NO: 291824 - DNA, 841 bp, Unknown
  Bacterial polypeptide expressing nucleotide sequence isolated from the Sargasso Sea
caccgcaacgacagcgaacacaacgccatccgccagggcgacacgccggtgatggaagcgttgtggcatgcctatccccataccctgattcatgccagcggctcccatgtgggcctgccggatcagcagatgggcaactccgaggtgggccacctcaccatcggcgccggtcggatcatccgccaggaattggtgcggatcagcgacacggtgcgtgacgaccagttgaagaacacccccgcgctggttgaacttgcggagcgtttacggaacggcactggcaccctccacctgctgggactctgctccgatggtggcgtccacagccacgtcaaccacctctgcggactaatccactgggcagcggcggctggcatcgaaaaagtggctgttcatgccatcaccgatggccgggacacgcccacccagagcgcgatgggttccatcacgctggtgctaagggcgattgaggaggctggcgtcggtcatcttgcaagcctctgcggccgttactgggcgatggatcgcgacaaacgctgggatcgcacgggaaaggcctacgacctctacaccgaccccacacgtcccgtcagtaaccagagcccgcagcaactgttgaccgagagctacgccgctggcatcaccgatgaattcctggagcccgtgcgcctcagcaacgacgtgatgcaggacggcgacagcgtgctggtcttcaacttccgccccgatcgggctcgccagatcgcgcagaccctctgcctggacgatttcgacggctttgagcgccggaccacgcccaagctggatgtggtcaccttcacccaggtggaacaggacctgc

SEQ ID NO: 291825 - DNA, 658 bp, Unknown
  Bacterial polypeptide expressing nucleotide sequence isolated from the Sargasso Sea
aatgcaattaatactccttcgccacggtgaaagtcaatggaatctagaaaatcgatttactggctggaaagatgtttctttgacagaagctggagttaaggaagcttcaatatctgctaaaaatctaattgaaaataatattgaggtatcaacaatccatacttcacttcttaaaagagcaattgatacagcaaaaattgtcgcagatttaattgagttcccaacaagaaatattaaatatgactggcgtttaaatgaaagacattatggagcacttcaaggattaaataaatctgaaacagcttctaaatttggtgaggagcaagtaaaaatttggagaagaagttttgatattgcacctccactattgtctgaagatgataaaagacacccgaagtttagttccatgtttaaaaatgtagattttgatcttcctagagcagagagtttaaaagatgtcattttaagattaaaccccttttgggataagtatttcaaggaaatgaaggaagctaaaggtagtcacctcatagtagcgcatagcaattcattacgagctattattaaaatattagataatttatcaaaagatgaaattatgtcagtggatataccaacaggagttccactgattttatactttgataataatttttaa

SEQ ID NO: 291826 - DNA, 757 bp, Unknown
  Bacterial polypeptide expressing nucleotide sequence isolated from the Sargasso Sea
gaatctgatgaattcatatctccaaccgcaattactcaaggtagcaaaaccccagtcgttgttgaagatgatgatgttgttatatttgctaattatagatctgatcgcgcgcgacaattagcgagatcatttacaaaaccaacatttattgcctttgaacgtgaaaggatgccaaaattatctgcctttataagtttaacatcttacaaagcggaatatgagtttcctgtagcatttccatcggcttccttgcccaatgtatttggaaaatatatctctagtcttggcctaaaacaattacgtattgctgaaactgaaaaatatgcgcacgtcacattcttttttaacggtggtgacgaaaatgttttcgatggtgaagatcgtgtcttggtcccatcgcctcatgttcgtacttatgatctcgctcctgaaatgagcgcagagaaaatcactgatcatttagtaaagtcaattaatagccgcaaatatgattcaatagtatgtaattttgctaatgcagatatggttggtcatacaggtaattttaaagcaacaattacagcaatagaggtaatagataagtgtttaggtaaaattatcgaatctacacaaaaagtgggcggtgagattctaataactgcagatcatggaaatgctgaacaaataaaatcatatacaactgaaaaaattaaatcacaagcacatactgcacacacaagtaatttagtgcccttaatttacattggtaggtcagcaa

SEQ ID NO: 291827 - DNA, 361 bp, Unknown
  Bacterial polypeptide expressing nucleotide sequence isolated from the Sargasso Sea
agtcaactttgcaaacccagacatggtaggtcatacaggtgatctcaaggctacaataaaagcagttgagacggttgataattgtattggggaattaactcaacaaatagaagaattaaatggaactattttaattacagcagatcacggtaattgtgaaaatatgtgggattctaatagtaaatcagttcatacagctcatactacaaatttagtaccattcatttttgtaaataatgaacaaaaagatataaaattaaatgatggcaagctagctgatattgctccaacaattattgatttactgggtataaaaaaatcaaaattaatcacaggaaaatcgttaattcgaaaaaactaa

SEQ ID NO: 291828 - DNA, 712 bp, Unknown
  Bacterial polypeptide expressing nucleotide sequence isolated from the Sargasso Sea
tatgaattatttagtacttgtaaggcatggacaaagtgaatggaacttgcaaaatagatttactggatgggttgatgttgatttggctccaaaaggtaaattggaagcgtgtaaatctggggaattgcttaaagaacttgacttaaatataaatcattttttcacatcttatcaaaaaagagcaattgaaactttaaaacttattctgaatacaatgaggattaaagatgataaaattattaaagcatgggaattaaatgagagacattacggctctctaacaggattaaataaagatgagatgaaaaaaaaattaggtgaaaaaaaagttcaacttttcagaagatcctggaatatttcacctgaacctttaagtaaaaataatccttatcaccctttaaatattgaaatctatagagacatacccaaagaaaaaatacctgatacagagtcattagaagatacttacaacagagtaattccttactttgaaaaaaatattaaagataaaataaaagaaaatgtaattgtttcagcacatggaaactcaataagatctttatgtaaatttctatttaaattagatgatactagaatatctaaactagaaattccaacaggcaatccgttaataataaaatttaaaaatgatataattgataaagcttattatcttgatattgcaagaaaaaaaaatcttttagtcttttaa

SEQ ID NO: 291829 - DNA, 796 bp, Unknown
  Bacterial polypeptide expressing nucleotide sequence isolated from the Sargasso Sea
cggtactgggccatggaccgggaccagcgctgggagcggatcgaaaaggcttacaacctctacaccgatcccaacatcgccgtcgacagccggacggcagagcaggtgctggcggagagttatgccgagaacatcaccgatgaattcctcgaaccggtgcggcttcagaacagcgtcatcaaagacggtgacagcgttctggtgttcaacttccgacccgatcgcgcccgccagatcgtgcaagcgctctgcctcaccgatttcgagggcttcgagcgcagccacacgccggagttggatgtggtcaccttcacccaggttgaacaagacctccccgttcaagtggccttcccccccgagccgctcgaccaactgttggggcaggtggtggcagacgctgggctgaagcagtaccgcactgcagagacggaaaagtatccccacgtcacatacttcatgaacggtggcatcgaacagccactggcgggagaagaccgtcacttggtgccctcgccgagggtcgccacctacgacctctcaccggcgatgtcggccgagcaactcaccgacagctgtatttcagccattgagaaggcggactattcgctgattgtgatcaactacgccaaccccgacatggtggggcacaccggtgtgatggaggccgccaaggaagccatccaaaccgttgatgcctgcattggccggttgttggatgcggtgggacgccaatgcggaaccatgctgatcacggctgatcacggcaatgccgaattgatgaagggtccggatggcc

SEQ ID NO: 291830 - DNA, 787 bp, Unknown
  Bacterial polypeptide expressing nucleotide sequence isolated from the Sargasso Sea
gcgatcgaggacggatcattttacgacaatgctgcgcttcaggcctttatcgccaggctgaaggaaaccgggggggcggcgcatctgatgggtcttgtgtccgatggcggcgtgcatggccatgtgacccatatcctggccgcgattaaggcgatccgcgatgcgggcgtgccggtctggctgcatgcggtcaccgacgggcgcgacgtggcgccgaaatcggcgttgggctatttggatcagcttgaggccggtatggcggagggggcgcaaatcgccaccgtcaccgggcgctatttcgccatggaccgcgacaatcgctgggagcgcgtgagccaagcctatgaggccatggtcaagggtgcgggtcagtttaccgcgccgagtgcgaaggcggcggttgaggctgcctatgggcgtgaagagctggatgaattcgtcaaggccacggtgattgacggattcgatggcattcaagacggcgacgggtttttctgcctcaacttccgggcggatcgggcacgggaaatcctgcgcgccattggcgagccggagtttgcagagttcgacaccggcccccggcccgcgctcgcggggctgctgggcatggtggaatattcccagggccacaacgcctatatgaccaccgcctatccgaaaaaggctatcgtcaacacgctgggcgaatgggttgcgaaacagggcaagcgtcagttccgtctggcggagaccgagaaatatccgcatgtgaccttcttcctcaacggtggcaaggaaacacccgagg

SEQ ID NO: 291831 - DNA, 602 bp, Unknown
  Bacterial polypeptide expressing nucleotide sequence isolated from the Sargasso Sea
aatggcatctctagttcttgttaggcacggtcaaagcgaatggaatgaaaaaaaccttttcactgggtggaaggatcctgacctaactgataaaggagaaaaagaggccttaatagcaggtaaagccctaaaagcatctggctataaattcgacattatgttcacttctgtattgttaagagctaagagaacgggaaatattattcttgggcaaatggctcaagaagacataaaaatcgttgagaatgaggccctaaatgaaagaaattacggagatctagcaggcttgaataaagatgaggctagaaaaaattgggggaaagaccaggttcacaaatggagaaggtcttttaacgtagcacccccgggtggagaaagcctaaaaatgactgctgagagagtactgccttattacgaaaaaaatattcttcctctgttaattgataacttagaaatcataatagctgcacacgggaattctcttcgtgctcttgtcatggaattagataaattaagtccagaagaggtagtaaagttagaaatccaaacaggaatgcctatttgctaccaaatgagcaaactaggtgaggttgtagctaaaa

SEQ ID NO: 291832 - DNA, 481 bp, Unknown
  Bacterial polypeptide expressing nucleotide sequence isolated from the Sargasso Sea
attaaagaaaaaaggaataaaatttaatatagcttttttttcaaacctgattagagctcaaaatactttaaatataattcttaaagaacttgagcaaaataatataaaaaatgagagaaatgttgcattgaatgaaagaaattatggagaactagcaggattaaataaagatgatgcaagaaaaaaatggggcgatgaacaagttcaagaatggagaaggtcctatcatactcgcccgccaggtggtgagagcctgaaagataccgcagatagggtgttaccttattttaaaaaaaatataactcctaaaataaaagaaggttctaatattttaattgttgctcatgggaattctttgagagctttggttatgcatattgaaagtattaaaccggaagatattgttagtcttgaaataaaaacaggagttcctcttatttataattctactaaaatcaataatatcgagagaatctactaa

SEQ ID NO: 291833 - DNA, 886 bp, Unknown
  Bacterial polypeptide expressing nucleotide sequence isolated from the Sargasso Sea
atgaattatctaaaacaaagtttcttagttgaaatggttaaggatttgaagaaaagtaaaaaggcggtgcatttacttggattgttatctgatggtggggttcatagtcatcaggatcatatggcttatttggtgaagttttttgctgaaaatgatgtgaagatttatttacatgccttcttagatggaagagatgttgcacaaaaatctgctactgatttatatcaaaaattttgcgcagatgttggtggcgaggataggtttgagctggcaactgtgggtggaaggtattatggtatggatcgtgataataagtgggatcgaattcaacttgcttataatgcttttgcttatgggaaatctggttatgaaagagaattttcttcttttaatgagttggtaaagaattgttatgatcaaaatattactgatgaatttgtgaagccttgtgctatggatggttatgggggtgtggaagagggtgatggattgttattttgtaactttagatcggatcgagcaaggcaaatttctgatgcattgctagatgctgattttggtggctttgagcgtaagaaaatagacttttcccataaagttgccatgacaagatattcagactctttggaaaaatactacgatatattatttccgtcattaaaaattgacaagtctttgccggagattttgtcgcaaaatggtttaaggcaacttagggtagcggaaactgagaagtttgctcatgttactttcttttttagttgcggcaaggaaaatgaatttgagggtgagaaaagaattttagtaccttcccctgatgttgcaacctacgatcttcagccagaaatgtctgccaacaaggtaactgataatttggtgaggctat

SEQ ID NO: 291834 - DNA, 604 bp, Unknown
  Bacterial polypeptide expressing nucleotide sequence isolated from the Sargasso Sea
atgaattcaaattatctagttctggttcgacatggtcaaagtgaatggaatgaaaaaaaccttttcactggttggcgcgatccaggcttaacaaaaaaaggaataaatgaagctcatgctgcaggcaaagctttaaaagaacaaaatttaagttttgatttattattcacttccgatttaatcagggcacaattaactggcgagataattcttgaagaaatgcagcaattagatgtaacaacagttaaagataaaagtttgaatgaaagagcttacggtgatttaacaggtatgaataaggatcaagcaagagccaagtttggtaaggatcaagttcagatttggcgaagatcatatgacatcagtccaccaggaggtgaaagtttaaaagatacttatgacagagtcattcctttctttaagaacaatatagagcctaaactctcatcaaaaaatattcttgtttcagcacatggtaattcactaagagcacttgtaaaacatctggaagatatatcagaacaagagatagtaaaacttgaaatagctacaggagttccaattatttataaattttcaaatggaaattatacaaagcattaat

SEQ ID NO: 291835 - DNA, 718 bp, Unknown
  Bacterial polypeptide expressing nucleotide sequence isolated from the Sargasso Sea
atggtcaaaaaaccaccgtgtttagtgcttctacgtcatgggcagagccaatggaatcttgataatcgtttcacgggctggttcgatatcgacttgaccaagcagggagtcgcagaagcaaaaaaggccggtcattcgctcaacgctgccgggattcaaccagatatcgttcatacctccctccagacccgagctattttgaccgccaacctggctctggctgaatgcaatcgcttatggattccagtacatcgaacttggcgccttaacgagcgccactatggagctcttactggcttaaataaggatgaaacatcagagaagtttggcgttgaccaggtacgaaagtggcgtcgtagctacgcaacccccccgccattgatggaggacgaccacccacacaacccgaacaccgaccagcgttaccgatcagtaccaaatcacctactaccacgaggagaatgcctagccgacgtagtagaacgtctagtccccttctgggatgaggcacttgtgcaagatcttcacgacaacgaggttgtcctgatcgcagctcacgggaacagcttgcgagcgctggtaaaacatttagagaacatcgacgatgaacaaatcgttgatgtcgaaatcccaaccggcgtgccaatcgtctacgaactggactctgactttaatcctttgaaatcaatacctttggtggagagattcttaagctaac

SEQ ID NO: 291836 - DNA, 307 bp, Unknown
  Bacterial polypeptide expressing nucleotide sequence isolated from the Sargasso Sea
aaaatgggtggaagcattcttattacagccgatcatggtaatgcagaggtaatgaaaggaactgaaggagaaccatggacagctcatacaacaaataaagttccactaattttgattgaaggtgaaaaaagaaaaataccaaatatgggaaataaaattaatttaagagataatgcaggcttagcagatattgctcccactttattgcaattattaaatctcccaataccaagagaaatgacaggcaaatctcttattcaagaaattgaactaaaaggttataataaagtcgttcaacacgtttaaa

SEQ ID NO: 291837 - DNA, 688 bp, Unknown
  Bacterial polypeptide expressing nucleotide sequence isolated from the Sargasso Sea
atgagtaaaaatagcactttaatcttggttagacatggccagtctatgtggaatatgaagaatttatttactgggtgggttgatgtaccattgtctaaaaagggtgttgatgaggcccttaaagctggtgagcagattaaagattatgctattgataagatttttgtatctgaattaatgcgagcgcagcaaacagcgatgttgatgatgtctcaaagtagctcagataaagttccagttatgcagcatgatactggtaaaatgtctcagtggggtgagatttatgcagatagtgctttaaaaaatattattccagttattgctgattggcgcttaaatgagcgctattatggtcatttgcaaggagctgataaagaccaagcgcgtgctaagtatggggaagatcaagtgcatatttggaggcgtagttatgatgtgccaccaccggagggtgaaagtttacaattaacagcacagcgaactattccatatttaaacgaacagattttaccagctttagctgagggtaaaaattgtttggttgcagctcacggaaattctttaagatctatagttatggagattgaaggattaactaaagagcaagttttagctttagagttgccgacagggcagcctagagtttataaatattttagtgaagataaggctttgcgcaaagtataaa

SEQ ID NO: 291838 - DNA, 886 bp, Unknown
  Bacterial polypeptide expressing nucleotide sequence isolated from the Sargasso Sea
tgccagtggatctgatgtaggacttccagatggtcagatggtgaactcagaggtaggtcaccttactattggttcaggaagaataatccaacaagaactcgttaggatttcaaatattgtgcaaaataacgaattaggattagtaaatgagttaaaggagatagctgattcattgaagaaaaaaaattcaactttgcatatcactggattatgttccgatggaggagttcatagtcatattgatcatttattaggtttaataaagtgggcatctgataatggcatcaaaaaagtagcaattcatgttattaccgatggaagagatactccttcaaagagtgcatccaaatatattaaccagatagagtcctgcttaaataaatttaaaataggtgagatcgcctctatatgcggaagatactggataatggatagaaaccttttatgggaaaggacagaaaaagcatatgctaatctaactgatccaaatattgaaataacaaatatttctcctcaggattacataaaaaaaagttacaacaaaaacataactgatgaatttatagagcccataagaatgtctgaaaattatcttaaagagggtgatagtttgatttgttttaatttccgtccagacagagcaagacaaataataaaatccctttcagaaaaagcattctcagattttgaaagaaaattctttccaaatctagatttagttacttttacacaatatgatgcaaacttcactgccaaagttgcatttcctccggaatctctcaataattttattggccaaatagtttcagagaatggactaaagcaatacagaacagcagaaacggaaaaatatcctcatgtgacatatttttttaatggaggagta

SEQ ID NO: 291839 - DNA, 634 bp, Unknown
  Bacterial polypeptide expressing nucleotide sequence isolated from the Sargasso Sea
atgaccaatataagaagcaaaaatataaatagattatgtccacctcagagccctgtagtgcttgcaattcttgatggatggggatatcgagaagatgtaaccgacaatgctataaaaaatgccagaacaccaataatggactcattgtggcatgcttaccctcgcactctaataagtgcgagtggttctgacgtaggcctcccagatggccaaatgggtaattcagaggttggacatctaaccattggctctgggagaataatccaacaggaacttgttagaatttcaaatgttgtaagaaataatcagttagaaaaagttgatcatttaaaagagattgcttattcattgaagaaaaataaagcgactttgcacattacaggattatgttctgatggaggcgttcatagtcatattgatcatttattaggtttaataaaatgggcctctgataatggcataaaaaaagtagcaattcatattatcactgatggaagagatacaccagctaaaagtgcgtataaatatctaaataaaattgagtcatgcattaaaaaattcaatacaggtgaaatagcctcaatatgtggaagatactggataatggatagaaatctcttatggacagaacaga

SEQ ID NO: 291840 - DNA, 834 bp, Unknown
  Bacterial polypeptide expressing nucleotide sequence isolated from the Sargasso Sea
aatcagcaatagaatttattaatgaagtaaacccaattttaagtgataaagttcaggttggaacagtaattggtcgctactacgcgatggatcgtgacaatcgctgggaacgtgttgaattggcttacaatgcaatagtttttgggaatagtgaccagaaaacatacaataccgaattggcaattaaaaagtcatataaatctggtgtttcagacgaatttattcttccaactgttattagccaatactcaggaataagaagaaatgatgggtttttttgcttaaatttccgagcagaccgagccagacaaattttgagtgcgattggtgatccaaatttttcaaagctagaaattaagaacagaccccagcttacaaacttagttggaatggttgagtattctgataatcacaacactttcatgtctacctgctatccaaaaccaaaaattaaaaataccctaggagagtgggtatcactggcaaagaaaaagcaatttcgattggccgaaactgaaaaatacccacatgtcacattttttttaaacgggggtaatgagaagcctttaaccggggaagctcgaaatatgcctcactcgcctaaagtggcgacatatgatttaaaacccgaaatgtcctccgaagcagtgaccgaggctttggttggcgccattgaaagtaattatgaccttatagttaccaactatgctaacccagacatggtaggtcatactggaaatttagatgcggcaattcaggcttgcgaagctgttgataaaggtattgggcgtttggtggaagcacttaaaaaagtaaatggaactttattttaac

SEQ ID NO: 291841 - DNA, 631 bp, Unknown
  Bacterial polypeptide expressing nucleotide sequence isolated from the Sargasso Sea
ttgattgagaataaaaagccattagttctttgcgttatggatggctggggggtaagagccaggtcagataacaattctatcgccatggcgaaaacaccaaactttgattttgtaacaaaaaattatcccacgaccttgctgagagctgacggcgtgcatgttgggttgccgtataaccaaatggggaactctgaggtaggccacatgactattggtgctggccgagtgaccatgatgacattacctcggatcaatcagtcaatttcagacggttctttaaaaaaatctacagaattaaataattttatttatgatttaaaaaagagtggcggcgctgctcatttagctgggcttgtttctgacgggggagtgcactcacagcaaaaccatatagaatatatagcaaatatgattgctgagtcgggtgtaaaagtgaaaatacactgtttcctggatggcagagatacgccaccgaaaagtgggatagaatatttttcgcgattgcagaataatttgtcccctgggatagaaattgtgtctttagtaggtagatattttgctatggatcgggacttgcgatgggagcgcacggcaaaagcttatagagttatcatgaaggaaaaggcaagaa

SEQ ID NO: 291842 - DNA, 589 bp, Unknown
  Bacterial polypeptide expressing nucleotide sequence isolated from the Sargasso Sea
gcttgtaagacatggtcaaagtgaatggaataaaaaaaatttattcactggatggaaagatccaaatttaactaaacaaggaataaatgaagcatctgaagcgggaaagcagcttaactctctcggtataaattttgatgtaatgtttacctctgatcttatcagagcccaagaaacgggcagaataatcttaaaagagatgaaccaagaaagcatagctattgtaaagagccaaaaactgaatgagagaagttatggagatttagcaggattaaataaggatgatgctagagaaaagtggggcgaagatcaggttcatatttggagaagatcttttgatgttcctccacctggtggagagagtctaaaaaatactgcagagagagttctaccttactttagatctgaaatcctccctaaaattcaagaagggtcaaatgttttaatcgcagctcacggtaattctctacgagcgctagttatggagttagaaggaattagtccagataagattgtaggcttagaaatagctacaggtgaccctcttatatatgagtgtttagatcattccattaaccgagttaattaa

SEQ ID NO: 291843 - DNA, 727 bp, Unknown
  Bacterial polypeptide expressing nucleotide sequence isolated from the Sargasso Sea
caaagaaaaatcgaacaacgcgatcgcgatggcgcacacccctaattggtccgatttcctgagccgctacccacaccatctgatacaaacctcaggagaatttgtcggactacccaaagggcagatgggtaattccgaagtaggacatatgacaataggcgcgggacgagttatttatcaagatttaccaaggataaatcgagcaatagaaaatggagagtttcagcaaaacccggtgctgctgaatcttattgaccaatcaattaaaaataagtcggctctacatctaataggactactctcagatggcggcgtacacagtcatgaaaaccagatacatgccgctattcaattgtgcaaagataaaaaagtcgacgaccttagaattcatgccattcttgacggccgcgatacgcccccaaaatcagcagagaggaatttatctaaattagcagaactattggacgaaactggagtcggtcaaatttcgaccgtgtcggggcgttttttcgctatggatcgcgatcagcgctgggatcgtgtggagctggcctttaaagcgatggccttaggagagagtacctttcacgcaagttcagccaaagaagcgttaatgaaagcctatgatcgcggcgaaagtgacgagtttgtgagtccgacggtaataagacaaaaagaggctattgagcaaaacattaagcccagtgattcgatcctatttatgaat

SEQ ID NO: 291844 - DNA, 446 bp, Unknown
  Bacterial polypeptide expressing nucleotide sequence isolated from the Sargasso Sea
tttggaaagtaacaaaaaattaattcttttaatacttgatggctggggtatttcatccaacaaagacaagtcagctatcgatcaggctaaaacccctttttatgatagtctaattaataattatcctaatgctcaacttttaacacatggtgaaagtgtcggacttccaaaaggtcaaatgggtaatagtgaggttggacatatgaatatcggggcaggaagaattgtttttcaggagctagctaagattaataaagaaattgaaacaggtaattttagaaataataaaaaattaaacgagcttgtggataatgctatttctaatcaaaaaaacattcacctaattggtttattatctgacggaggagttcactctcacgtttcacatttatatgaattaatagatttaattgaatccaaaaacagtaataatacatttgtacacg

SEQ ID NO: 291845 - DNA, 520 bp, Unknown
  Bacterial polypeptide expressing nucleotide sequence isolated from the Sargasso Sea
atgccgcctgtggttttatgcatcttagatggatggggtttgtcaaaagaaaaaaatagtaatgccccagctttagcaaaaactccaaattttgatcatttatggtcaacttgcccaaaaaccacacttctaacacatgggttagatgttggattaccacatggccaaatgggaaattcagaagtagggcacatgaatattggtgccggtagaatagtctccatggatttaggtcaaatagatttagaaatagaaaacaagaattttttcaataatgaaatacttttgaaccagatcaaaatcattaaaaatacgaggggtcgcgcccacttaatgagccttctttccgatggtggcgtgcatggccacctcaatcacttactggcatcaataaagttgttccagtctcatgctatccctatcacattacatctggtaaccgatggccgtgatgttgcgccgcgatcagccatggagttttttgaaaaaataacaccacatttaagcgctcaatgttgaa

SEQ ID NO: 291846 - DNA, 522 bp, Unknown
  Bacterial polypeptide expressing nucleotide sequence isolated from the Sargasso Sea
tccaaagagtttctacttatgatcaagcaccagaaatgtctgcagaagaattaactattagttgtactagcgcaataaagagtgggaagtattcatttattgtaatcaattttgctaatcctgatatggttggccatacggggaatatgaatgcgactattaaagcaattgaaacagttgatagatgtataggtaagattgtaaatgcgactggaaaaatgggaggcagtcttctaataactgctgaccatggaaatgcggaagttatgagaggcccctctggtgaaccctggactgctcataccataaataaagttcctttgatttttattgaaggcgaaaagagaaaaataccaaatatgggaaacgaaatttacttaagagataatgcgggcttagctgatattgcaccaactttactgcaattattaaatcttcctataccaaaagaaatgacaggtaaatctcttattaaagaaatcgaattaaaaggctataataaagtagttcaacatgtctaaa

SEQ ID NO: 291847 - DNA, 829 bp, Unknown
  Bacterial polypeptide expressing nucleotide sequence isolated from the Sargasso Sea
aatggcaattacgaattcatatgaatccgatgtttcagacgaatttattgttccaactgttattaaccaatactcaggaataagaaaaaatgatggtttcttctgcttaaactttcgggctgaccgggccagacaaattttaagcgcaattggagatccaaattttttaaaactaaaaattaagaatagacccaagctaaccaacttacttggaatggttgaatattcggatattcataacacttttatgtctacttgctatccaaaactaagaattaaaaatactttaggagaatgggtatcactggcaaagaaaaagcaatttcgattggccgaaactgaaaaatatccacatgtcactttttttttaaacgggggtgatgaaaagcctctcgctggggaagttcgaaatatgcctcactcgcctaaagtggctacatatgatttaaaacccgagatgtcctccgaagcagtgaccacggctttagttgacgccattgaaagtaattatgaccttatagttgccaattatgctaatccagacatggtagggcacacaggaaatttaaatgctgccattgaggcttgcgagtcagttgataaaggtattgggcaattggtggaagcacttaaaaaagtagacggaactttgctcttaacggcggatcatggtaattgtgaggttatgactgacccgtttactggaaatcctcatacgtctcatactttaaatccagttcctgccatcttgtttaatggacctaaaaacaaatctttatctaatggaggtcgcctttcagatattgcacccaccaatattagaacttat

SEQ ID NO: 291848 - DNA, 615 bp, Unknown
  Bacterial polypeptide expressing nucleotide sequence isolated from the Sargasso Sea
tatgagtaaattaatcctcacaagacatggtcaaagtgtttggaatgcagaaaatagatttactggatgggtggatgtagatctatcggaaaaaggtgttaaagaagcagaaaaatcaggagagttactaaaaaaacttaatatacaaattgatatttcttatacttcttttttaaaaagagcgataaaaactttaaccaccatacttaaaaaaaataatcttaaacttaaatttaatactgcttggcaattaaatgagaggcattatggatcattaactggacttaataaagatgaaactaaaaagaaaattggtgaggatcagtttaaaaagtatagaagatcatgggatatacctccgcctcctatgccagaagatagtaaatatctatctaatttcagcccactaaatgggagtattccatttggaatgacaccatttacagagtctttgaaaaatacttatgagagagtaatccctttctatgaaagtgaaattaaaaaaaatctctctgaagggaaaaatattttaatctctgcgcatggaaactcattaagagcattgtgtaaatttttgtttaaaatttcagataataaaattaacgaattagaaat

SEQ ID NO: 291849 - DNA, 577 bp, Unknown
  Bacterial polypeptide expressing nucleotide sequence isolated from the Sargasso Sea
atgaattctaaatatcttgtactagttcgacacggccaaagtgagtggaacgcaaaaaatttatttacgggttggaaagatcctggcttaactgataaaggctcacatgaagccaaaagaacaggcatgcaacttgctgaattaaatcttaagtttgatgttatgtatacatccgctctaaaaagagctcaacttacaggaaaaataattttagatgtgctggggcaaagtgatttggaaattattgaaaatgaagccttgaatgaaagagattatggagaactaacaggatcaaacaaagatgaggcaaaagaaaatttcggtactgagcaagtacaaatctggagaagatcatatgaaattcctccgccgggtggagaaagccttagagatacttacaacagagtaattccttattttaagaaagaagtcttgcctttaatggataataagaatgtgcttatgtctgcacatggaaattcattgcgagcattagtaaagtatttagataatatttctgaagaagatattgttaagctcgaaatttcaactggagaacctattttttataaattca

SEQ ID NO: 291850 - DNA, 715 bp, Unknown
  Bacterial polypeptide expressing nucleotide sequence isolated from the Sargasso Sea
tatgagtcatttaattttagtaagacatggccaaagtgagtggaattttcaaaaaagatttactggatgggttgatattgatctaactgcgcaaggaaaactagaggcagtaaaagctggagagctaataaaggaaaaaagagtcaaaataaatttcttttattcatctcttcaaaaaagagcagttaatacactaaagttaatattaaatactttaagaattaaagatgaaaaaattataaaagcatgggaattaaatgaaagacattatggtgccttaacaggattaaataaagatgaaatgaaaaaaatttatggagataaaaaaattttagaatttaggagatcttggagtgtttcacctgagccattaaatagaaataatccttatcatccaatgaacatagaaatctataatgatatacctagagataaaattccagatactgagtcattaaaaaatacatacgatcgagtcgtaaattattttgaaaataatgttcttccgatgctaaaaaaagataataatattttaatatctgctcatggtaattcgcttagaggattatgtaaatttttatttaaaattgatgatgtgaaaatatctaaattagagattcccactggaaatccattgatgattaattttaatgaaaagaacgaaattttagatgcttcttatttagataaatcaagagcaaaagatctagttgtt

SEQ ID NO: 291851 - DNA, 745 bp, Unknown
  Bacterial polypeptide expressing nucleotide sequence isolated from the Sargasso Sea
atggctggaaaattagtgctctgtagacacggtcaaagtgaatggaacttagaaaataaattcactggatgggaagatgttggattgactccgttgggagaagaagaagctttggaggcaggaagacagctgaaagcaattgatatcaattttgatattgcctttacatcattattaaaaagagcaaataagactttgttttcaatactcgagcaaatggatttaacctggatccccatcactcatgcatgggagctaaatgaaagacattacggtgctctgcagggaaaaaataaagctgaagttgcaaaagaatttggtgatgagcaggttcatatatggagaagaagttatgatattcctcccccatcaattgataatgaagatccatcacacccaagatttgattctaagtatgatggaattgatgaattgccatctggagaaagcttgaaagatactctatcaagagtgaagccttactgggaaaatcaaatactgccagaattactgggaaataagaatgttttggttgtcgctcacggaaacagtttgagatcgatgattaaaatcatcgagaaaattgatgatgagtcgatagtggggcttaacttacctactggaattccaattgtttatgaattcaatgaaaatttagagcctgtctcaaaggatttcttggctgattctaaatcacttcaagcagctcaagatgctgtggctaatcaaggcaagtctaaatgat

SEQ ID NO: 291852 - DNA, 676 bp, Unknown
  Bacterial polypeptide expressing nucleotide sequence isolated from the Sargasso Sea
tgcggaaaatagatttactggatgggtagatgttgacctgtctaaaaaaggaattgaagaagcagaaaaatcaggagagctgataaaaaaacttaatatcaaaattgatatttcttatacctctttcttaaaaagggcgattaaaactttgacaactatgctaaaaaaaaacaatcttgaacttaaatttaatactgcttggcagttaaatgaaagacattacggatcattaactggtcttaataaagatgaaactaaaaagaaaattggtgaggaacagttcaaaaaatatagaagatcgtgggatatccctcctcctccaatgcaagaagatagtaaatatctatcaaatttcagtcctctaaatggaagcattccgattggtatgactccatttactgagtctttaaaaaatacctatgagagagtaatgcctttttatgaaaatgagattaaaaaaaatctctctgagggtaaaaatattcttatctcagctcatggaaactccttaagggcgctatgtaaatttttatttaaaatttcagatgataaaatcaacgaattggagattccgactggtaaccctttagtgattgagtttgaaaaaaatttaaagataaaaaaatatttttatttggatgagactagatctaaaaatataatttttaatcaataa

SEQ ID NO: 291853 - DNA, 604 bp, Unknown
  Bacterial polypeptide expressing nucleotide sequence isolated from the Sargasso Sea
agttcattgttttttagacggccgggacactcctccaagggcgggaaaggcaagtttaaattacttcctaaaagaaattaagaatctgaatgattgcaaaatttcatctatgtcggggagatactgggccatggatagagactctaactgggacagagtggccccagtgtacgatgcaatagtgtcggcaaaaggtaagatagaagataacctcattgatagtgtcagcagttattataaagaaaaaattactgatgaattcatcactccgaccatatcgagaggttattctgggatggaagatggggatggattgtttatggcaaatttccgagctgatagggcgaggcagattttaacagcacttgtaggaaaaacttttactgggtttatccgttctaaaatttgcaatttttcctcttgcttgggtatggttgaatattcttcagaattaaacaaatattttgaggcaattttccctgctccagagttaaaggctaacttgggtcaggtgatttcagaggcagaggggagtcaacttcgaatagctgaaacggaaaaatatgcgcacgtgacctatttcttcagcggtggcagggaagag

SEQ ID NO: 291854 - DNA, 610 bp, Unknown
  Bacterial polypeptide expressing nucleotide sequence isolated from the Sargasso Sea
atgaaatcctcttatttagtattagtcaggcatggtcaaagtgaatggaatgaaaaaaatctatttactgggtggaaagatcctaagttgaccccaagaggggtcgatgaagctataaaagctggaaaggaattaaaagaagcaggttatagttttgacaagatgtttacctctgacctatttagagctcaagacacgggaaggattatcctagagcaaatgaatcttgcctcaattgaagtcataaaagacattagtttaaatgaaaggaattatggtgatttagcaggattaaacaaagatgaggcaagaaaagagtggggagaggatcaagttcatatatggagaagatcatttgacatccctcctcctggtggtgaaagtttgagagatacagcggatagagtccttccttattttagagaaaatataatccctgaattaatacaaggtttaaatattctagtagcggctcatggcaactctcttagggcccttgtaatggaactagaagaaattagctctgaagaaatagttgaattagaaatatccaccggggttcctctaatttataaatttgaagaaaataatatagaaagattggactaat

SEQ ID NO: 291855 - DNA, 880 bp, Unknown
  Bacterial polypeptide expressing nucleotide sequence isolated from the Sargasso Sea
tttttatctatcaaagatgagaatatttccttggctagtttaatcggtcgtttttatgcaatggatcgagataatcgttgggaaagggtagaaaaagcatatggcgcaatagttaatgctgacggagagaaactaaatgattttacaatggggattaaaaaccaatatgaactgggcataacagacgagttcgtcgagccactcataaaagataccttcaacggaataaataatggtgattcattattttttgcaaatttccgcgctgatagggctcgcgagttactttcggccatcgtcgatccagcatttacaagttttccgaggacttctttgccaaatttttcagcgaaagctggccttgtttcctattcagatcatttagatagtttcttggacacagtatttcctaaagaaaacttaaatcaaacattgggggagaccattgcaaaacaggatattacgcaattgagaatagcagaaacagagaaatacccacacgtcactttttttctaaatggtggacaagaagttcaattttctggtgaagaacggattctagtaccatcaccaaaagtgttgacctacgacacccaacccgagatgtctgcaaaaatagtcacccaagagcttactaatgcaatcgcgaggaatgaatttggttttatagttgtcaactatgcaaatcctgacatggtcggacatactggaaatattaaggcagcaattaaagcggtagagacagtagaccaatgcgttgggaaagttgttgaatctgtgttagattatgatggaacaatgttacttacggcagaccatgggaattgcgaagttatgttcgatgaagaaagaggtatcccacacaccgcgcatactacaa

SEQ ID NO: 291856 - DNA, 745 bp, Unknown
  Bacterial polypeptide expressing nucleotide sequence isolated from the Sargasso Sea
tatggctggaaaattagtgctctgtagacacggtcaaagtgaatggaacttagaaaataaattcactggatgggaagatgttggattgactccgttgggagaagaagaagctttggaggcaggaagacagctgaaagcaattgatatcaattttgatattgcctttacatcattattaaaaagagcaaataagactttgttttcaatactcgagcaaatggatttaacctggatccccatcactcatgcatgggagctaaatgaaagacattacggtgctctgcagggaaaaaataaagctgaagttgcaaaagaatttggtgatgagcaggttcatatatggagaagaagttatgatattcctcccccatcaattgataatgaagatccatcacacccaagatttgattctaagtatgatggaattgatgaattgccatctggagaaagcttgaaagatactctatcaagagtgaagccttactgggaaaatcaaatactgccagaattactgggaaataagaatgttttggttgtcgctcacggaaacagtttgagatcgatgattaaaatcatcgagaaaattgatgatgagtcgatagtggggcttaacttacctactggaattccaattgtttatgaattcaatgaaaatttagagcctgtctcaaaggatttcttggctgattctaaatcacttcaagcagctcaagatgctgtggctaatcaaggtaagtctaaatga

SEQ ID NO: 291857 - DNA, 457 bp, Unknown
  Bacterial polypeptide expressing nucleotide sequence isolated from the Sargasso Sea
cagaacagctgcggaatatggtgaagagcaggtacatatatggcgcagaagctatacagtcccacctccaaaactagattcagatgatgaaaggcatcccaggtttgatgataaatattcttctatacaatcagatatccttcctgatggtgaatgcctaaaagatacggtagatcgtttcatgccttattggcttgattcaataaagcctgatattgaatcaggaaaaaatgtgttgattgtggcacatgggaattcattaagagcgcttgttaaatatttagacaaggtgtctgatgacgatattgttgaactaaatattcctacaggtgttcctttggtctatgaattggatgatgcaatgaatcctgttaaaagttattatttaggtgatcaagaagagatatcaaaaaggacagcagaagtagctgcgcagggtaaaaacagatctatttga

SEQ ID NO: 291858 - DNA, 721 bp, Unknown
  Bacterial polypeptide expressing nucleotide sequence isolated from the Sargasso Sea
tatgagtaaactaatcttaacaagacatggtcagagtacctggaatgctgaaaatagatttacaggctgggtagatgttgacctttcagagaaaggtaaagaggaagctaaaaaatcaggagagttaattagtgaattgaatattaaaatagatattagttatacctcttatcttaaaagagcaattgaaacgctcacaattatcttaaaaacattaaatttatccatgaagtttaatactgcttgggaattaaatgaaagacattatgggtcattaacaggtttaaacaaggaagaaacaaaaaagaaaattggtgaggagcaatttaaaaaatatagaagatcatgggacattgcaccgccactcatggcaaaagctagtaattaccttgagaactttagccctttaaatgatggaattcccaaaaataaaattccttttaccgagtctctaaagcatacttatgaacgagtagttcctttttataattttgaaataaaaaaaaatttagaaaatggaaaaaatattttgatatcggctcatggaaattcattgagagcattatgtaaatatctatttaagatttcagatattaaaattaatgaactcgaaattccaacagggaacccattaataattgatttcgataatcaattaaaaattcaaaaatattattatttagataaatcaagatctaagaatataatttttaatcaatag

SEQ ID NO: 291859 - DNA, 916 bp, Unknown
  Bacterial polypeptide expressing nucleotide sequence isolated from the Sargasso Sea
ggtcaaattgacttagaaattgagaacggctcattttacaaaaacaacgcgattttgaagttcgttcaatcagtaaaatctagccaaggtatagcacacgtcatcggattgttatcagacggtggcgtccacggacatatagaccatctgcttgcctcgctagaaattttttcaaaagaaagggtaggagtcgcgttacacctcattacagatggacgtgacgttgcaccggtctctgcgctcaaatatgcagacaaattattaatagaaatgccaagcaatgtagtaatttctacggttactggaagatattacgcgttggacagagacaatcgatgggaaagaataagccaagcttacaacgcaattataaaatcagaatctgaagttgtttgtcaaaatattcatgaggcaatcaattccgcgtacaaaagcaatttgaccgatgaattcattccagcaactatcataaacggctaccaaggtgtcaaagatggcgatggtatattttgtttaaattttcgctccgatcgcgcaagagaaatattgagtgcaattggtgacccaagctttgagtcattttcaattggcaacaggccaaaactctcaagcttattaggcatggttgagtactcaaaacaacacaataagttcatggaaacgtgttacccaaaagaaattataaaaaacacactaggcgaatgggttgctaaaaatggcagaacccaatttcgagtggccgaaactgaaaaatatccgcatgttaccttttttcttaatggtggaacggagttaccttttgagggtgaaactagagatatgcccccatctcctaaggttgcaacatatgatttgcagccagaaatgtccgcagaaaaagttacggatagcctagttaacgcaataggagccaaca

SEQ ID NO: 291860 - DNA, 607 bp, Unknown
  Bacterial polypeptide expressing nucleotide sequence isolated from the Sargasso Sea
tatgaaatcaaaacttgttctggtcagacatggtcaaagtgaatggaatgcaaaaaatctattcacgggctggaaggatcctgaattaactgatctaggaattcaggaagcaataaaagctggagatttattagaaaataggaatctgaagtttgatcttatgttcacttcagatttatttagagctcaagagactggtcgcttgatcttagagcagatgaatcaaaccgatacacaagttattaaaaatcagtctctcaatgagagaaattatggagacttagcggggcttaataaagatgaagcgagagagaagtggggagaagaacaagtacatatttggagacgatctttcgatgttcccccgccaggaggagagagtctaaaaaatactgctgaaagagtgctaccttactttgaacttgaaatcatgccgaaggttaaagaaggattaaatatcttagttgctgcacacggaaattctttaagagctttggtgatggaattggaaaagataagttctgaagagatagtgaaattagaaatagctactggcgatcctttaacttatgaatattcgaacggagaatttgttaggattgattaa

SEQ ID NO: 291861 - DNA, 853 bp, Unknown
  Bacterial polypeptide expressing nucleotide sequence isolated from the Sargasso Sea
cgaattaagtaacatattgatagacaatggcctagttattcgattgcatgcgtttcttgatggccgagacacacctccaagcagtagcaaattatttcttagagaagtaattgataaaatagaaaataaaacaaaattttccgtagctactattagtggccgttacttccctatggacagggacaataattgggagagaatagaaaagtcatatttagcaatctctgagtcgagaggttatacgagtgccgattgttttgaagctatagacaaaaactataaagagggaatcacagatgagtttatagagccaacttgtattgaaggttataaaggtgtttgtgatggagatggtctcctggtttgtaattttagagcagaccgaattcgtcaaatattatcggcattcttggacccagattttactgaattttctaggccgaaatttggcaaactatcagcctcttgtggtttagttgaatattccgataaactaagtaaattaatgactaatattttttctagaactgaattaaacaatatattaggagaggtcatatccaataatagtattcctcaactccgcattgccgagacagagaagtatgcccatgttacttttttcttcaacggcggacgagaagaattgtttttacatgaggataggatactaatcccttctcccaaggtgcctacctatgacatgaagccggaaatgtcagctaaggagctgacaaataagttgttagaatcaattgcgggcggcaaatatgggttgatagttgctaactatgctaatggagatatggtgggtcatacaggagtatttgccgcaggcatcaaagctgctgaa

SEQ ID NO: 291862 - DNA, 619 bp, Unknown
  Bacterial polypeptide expressing nucleotide sequence isolated from the Sargasso Sea
tccctccaactatataccaaatacattagggggaagtttttgcaacaatggcttgttacaacttcgtcttgcagaaacggagaaatatgcgcacgtaacatttttttttaatggaggaagagagaagccttttaaatttgaagaaagaatccttattccctctccaaaagtagcaacttatgatcagcaaccagaaatgtcagctgatgaagttacaaataatttgctagaagcaattagaaataatcgcaatgacctaattatagtaaactatgctaacccagatatggtcggtcatacaggtaacttgaatgctgcaatttctgctgttgaatttattgacaaatgtttaaagaaaattattaatgaagtaaaagcaacaaattcaattctaattattactgctgaccatgggaatgtagaatgtatgcaggacgagagtaatcaacaacctcacactgctcacacaactgaagatgttcctataattattattaacgagaaaaaaattaaatctttatcaaatggccggctttgcgatgtttcgccaacaattttggatataattggaattgacaaaccctcaataatgacaggtaaatcgttgataaataaataa

SEQ ID NO: 291863 - DNA, 660 bp, Unknown
  Bacterial polypeptide expressing nucleotide sequence isolated from the Sargasso Sea
tatgagcaaactaatcctaacaagacacggtcaaagtgtatggaatgctgaaaatagatttactggatgggtagatgttgatttatctgaaaaaggaattgcagaagcacaaaaatcaggtcaattaattaaaagtttaaatattaatatagatgtttcctatacatcttttttgaaaagagccatcaaaacccttacgaccatacttcaagaaaatggtttagagcttaaatttaatacttcttgggaaataaacgaaagacattatggatctttaacaggtttaaataaagaagaaacaaaaaataaaattggtgaagagcagtttaaaaaatatagaagatcttgggatatacctccgcctcctatggctgagaatgataaaaatcaatctttatttagccctttaaacgcaagtattccactgggtatgataccttttacagagtccttaaaagatacttataatcgagtaattccttattatgaaaaagaaattcaaaaacatattaaagaaaataaaaatgttttagtttcagctcatggtaattcactaagagcactatgcaaatatctatttaagatttctgatcaaaagataaatgaattagaaattccaacaggcaatcctttaataattgagtttaataataatcttaa

SEQ ID NO: 291864 - DNA, 919 bp, Unknown
  Bacterial polypeptide expressing nucleotide sequence isolated from the Sargasso Sea
cgccattcacttaatgggcttagtatcttatggaggagttcactcttcattatatcacttgttgtctttatgcacattcttaatcgaaaattttaaaggtaaagtatatattcaagggttttcagacggaagagattccagccctaattcgggaatttcagcatttgataaactttatcaacatattgagggaagtaatatttctatttcatcaataattggcagatactatgcaatggatagagatcaaagatgggatcgaattcaaaaagcctatgatctcttaattaatggtaaaggggttttaaaagaaaactttaaaatcgcttttgaagaaagttatgaaaaagaagtttcagatgagtttatgaagccagttaaaataaaaaactttgatggtaatattaaaaataatgatgttgttatatgttttaactttagaacggatagatgtagacaaattacaacagctttaactcaaaaagattttccagactataatatgaaatcaaaatcactaagttattttacaatgacaaattatgataggtcgtttaaaaatattgaggtgatttatgataaagaaaatttatcaatgactcttggtgagattttaagtattaataataaaactcaattaagaatagcagaaacggaaaagtatcctcatgtaacttattttttcagtgggggaagagaagaagagtttataggagaatcaagaatagttgttaattctccaaaagttgctacatatgatttaaaacctgaaatgagtgcaaaagatttaacaagagaggcaataagttttcttgaaaagaataatccagattttatttgtttaaattttgcgaatccagatatggttggtcatactggaattccggaggcaattattaaggcttgtgaaactgtagat

SEQ ID NO: 291865 - DNA, 815 bp, Unknown
  Bacterial polypeptide expressing nucleotide sequence isolated from the Sargasso Sea
aactgatattaaaggagaaaaaatacataattttaataatgatgatatagtcatttcttttaattataggtcagacagggggaggcaacttacatcagctatgtgtgaaaaggatcttactgattttggaatgaaatcagtaactaaaaacttttatacactaacaaattatgatgatacgtttaaagttgttaagcctatttttaaaaaaaatattttaaaaaatactttaggtgagatactgtctaaaaatgaaattcttcaattaagaattgctgaaactgaaaagtatccacatgttacatatttttttaatggcggaatagaggaatcattcttgggtgaagaacgaattctgtgtccttctccaaaagttgcaacatacgatttaaaacctgaaatgagtgctaaggaagttacccaaaacgtaataactgaaattaaaaaaaataaatttggatttatatgtttaaactttgcaaaccctgatatggttggacatacaggtaacttaaaggcagcagttgaagcatgtgagtcagttgataaatcacttggaaaaatagttgaagtagcaaatttgaatgactatgtaactattataattgctgaccatggtaattgtgaaataatgataaatagtgatggcactgaaaatacttcgcatacagttaaccctgttccaataattattgtaaactcaaatagcaataagataaataatggaatattagctgatattgcacctacagttctaaatataatgggtattcaaaaaccagatgagatgactggaaaatctttaataaattgaa

SEQ ID NO: 291866 - DNA, 809 bp, Unknown
  Bacterial polypeptide expressing nucleotide sequence isolated from the Sargasso Sea
tatgactgacaaagcggaacggccggtgcggcccgtggttctgtgcatacttgatggctggggccatcgggaagacgaagccgataatgcgatcaccccctcaaatacgccgaatttccaacgcctgataaaggcgtgtccccattcgttgatcgataccagcggtctcgatgtgggtctgcccgcgggccagatgggaaattcggaggttggccacatgaatctgggggcgggccgaatcgtcaatcaggacatccggcgcgttgacgcggcgattgaagagggatcgctggcgtcgaacccgcggctgactgcctacatcgatgccttgaaggcaactggcggcacctgccacctgctggggctgctatcgcccggcggagtgcattctcatcaggaccatctggcaacgctggtggaaatactggcaaatgaaggcgttccggtcgctattcatgcgtttctggatggccgggatacacccccctcctccgccgccggctttatggaaactttcgagaaccagatcagcggttttaacgacgtcgatgttgctacggtttgtggccggttctacgccatggaccgggatcaacgctgggaccgagtggaaaaagcctatgatctgattgtttcaggaaccggaaacgacgcgccggatgcggtcaacgccattcgggcggcctactatgcggatatcaccgacgagtttgttgaaccggcatcgatcgcgggctatgcaggcgttcagaatggcgacggaattctgatgggcaatttccgtgccgaccgggcacgggaaattctaa

SEQ ID NO: 291867 - DNA, 766 bp, Unknown
  Bacterial polypeptide expressing nucleotide sequence isolated from the Sargasso Sea
cccaatgattacatagaaaaaagttatgccaaaaaaataaccgatgaatttatagagcccatacgaatttctgaaaactaccttaaagatggggatagtttgatttgctttaactttcgtccagatagagcaagacaaatagtcaaatccctttcggtcaaagaattcacagactttgaaagaaaaaaatatccaaatctagattttgttacttttactcaatatgatccgaactttcccgttaaagttgcatttcctcccgaatcactcaataattttataggccaaatagtctcagaaaacggacttaaacaatacagaactgcggaaactgaaaaatatcctcacgtaacatattttttcaatggaggagttgaaatacctttacctggagaagagagacatctgattccatctccaagagttgcaacttatgatatggaacccgaaatgtctgcggaagaattaactattagttgctctaaagcaattaaaagcgggaattatgcttttgttgtgatcaatttcgccaatcctgatatggttggtcatacaggcaatatggatgcaacaattaaagctatagaaaaagtagataaatgtgtaggtcaaatagttaatgctactggagaaatgggtgggagcatagttattacagccgatcatggtaacgcagaggtaatgaaaggatctgaaggagaaccatggacagcacacacaataaataaagttccattaattttgattgaaggtgaaaaaagaaaaa

SEQ ID NO: 291868 - DNA, 778 bp, Unknown
  Bacterial polypeptide expressing nucleotide sequence isolated from the Sargasso Sea
aaaaattttttagaatttgaaaggaaattttttccaaaattagatttaatcacatttactcaatacgacacgaactttcctgttaaaattgcattccctcctgaatctctaaataattttataggtcaaatagtttcagaaaacggactcaaacaatatagaactgcagaaacagaaaaatatcctcacgtcacatatttttttaatggaggagaagaaattcctttacccggagaagagagacatcttattccatctccaagagtcgcaacctatgatattaaacccgaaatgtctgctgaagaattagcaaacagttgctctaatgcaataaaaagtggggactatgcttttgttgtaattaatttcgctaatcctgatatggtggggcatacaggaaatatgaatgcaacaattaaagctatagaaacagtagataaatgtgtaggtcaaatagttaatgctactggagaaatgggtggaagcattctgataacagctgatcatggtaatgcagaagtaatgaaagggccttcaggagaaccatggacagcacacactataaataaagttccattaatttttattgaaggtgaaaaaagaaaaataccgaatatgggcaatgagatttatttaagggacaatgctgggttggcagatattgcaccgactttattgcaattattaaatcttccaattccaaaagaaatgactgggaaatccctaataaaagaagtcgaactcaaagagtataataaagtggtacaacacgcctaaa

SEQ ID NO: 291869 - DNA, 856 bp, Unknown
  Bacterial polypeptide expressing nucleotide sequence isolated from the Sargasso Sea
ttttctcccaaggattacatagaaaaaagttatgccaaaaacataaccgatgaatttatagagcccataagaatgtctgaaaactatcttaaagatggagatagtttgatttgctttaactttcgtccagacagagcaagacaaatagtcaaatccctttcagaaaatgaattctcagactttgaaagaaaaaattatccaaatctagattttgttacttttactcaatatgatcccaactttcccgttaaagttgcattccctcctgaatcactcaataattttataggccaaatagtttcagaaaacggacttaaacaatacagaaccgcggaaactgaaaaatatcctcacgtaacatactttttcaatggaggagttgaaatacccttacttggagaagagagacatttgattccatctccaagagtcgcaacctacgatatgaaacccgaaatgtctgctgaggaattaactattagttgctctaaagcaattaaaagcgggaattatgcttttgttgtaatcaattttgccaatcctgatatggttggtcatacaggcaacatggatgcaacaattaaagctatagaaaaagtagataaatgtataggtcaaatagtgaatgctactggagaaatgggcggaagcattgttattacggccgatcatggtaacgcagaggtaatgaaaggatctgaaggagaaccatggacagcacacacaattaataaagttccattaattttgattgaaggtgaaaaaaggaaaataccaaatatgggaaacgaaattaatttaagagaaaacgcgggcctagcagatattgctcccactttattgcaattattaaatc

SEQ ID NO: 291870 - DNA, 836 bp, Unknown
  Bacterial polypeptide expressing nucleotide sequence isolated from the Sargasso Sea
aaaagagatggctgcttcattaaagaaaaataattctactttgcatatcacgggattatgttctgatggaggagttcatagtcatatagatcatttattaggtttaataaaatgggcatctgataataaacttaaaaaagttgcaatccatattattactgatggtagagacactcctgcaaaaagtgcttcgaaatatttaaatcaaatagaagcatgtataaaaaaatataacgtaggcgaaatagcttccatatgcggaagatactggattatggatagaaatcttttatgggatagaacaaaaaaagcatattctaatttgactgatccagatattcaaataacaaatatttctcccaaggattacatagaaaaaagttatgacaaaaacataaccgatgaatttatagagcccatacgaatgtctgaaaactatcttaaagatggggatagtttgatttgctttaactttcgtccagacagagcaagacaaatagttaaatccctttctgtgaatgaattctcagactttgaaagaaaaaattatccaaatctagattttgttacttttactcaatatgatccgaactttcccgttaaagttgcatttcctcccgaatcactaaataattttataggccaaatagtgtcagaaaacggactgaaacaatatagaaccgcagaaactgaaaaatatcctcacgtaacatactttttcaatggaggaattgaaattcctttacctggagaggagagacatttgattccatctccaagagtcgcaacttatgatatggaaccccgaaatgtatgcggaggaattaaccattagt

SEQ ID NO: 291871 - DNA, 411 bp, Unknown
  Bacterial polypeptide expressing nucleotide sequence isolated from the Sargasso Sea
aatgaataaaaaagtcatcttaatgatactagatggttggggaaaatccccagacccaaaagtatctgcaatagataatgctaacacaccttttatagacagtttatacaccaaatttcctaatgcacaattgcgcacagacggactacatgttggtctgccagaaggacaaatgggaaatagtgaagttggccacatgaatcttggtgcaggacgcattgtttatcaggacttagcaaaaattaatctagcagtagaaaacaacacacttgctaaagaacaagtattaatagatgcttttaattacgctaaagcagaaggtaaaaacgttcattttttaggattagttagtgatggtggcgtacactcgcatattaaccacattaaaggattaattacagctgcaaaaga

SEQ ID NO: 291872 - DNA, 565 bp, Unknown
  Bacterial polypeptide expressing nucleotide sequence isolated from the Sargasso Sea
aatgaataatacaagtttaattttagttcggcacggtcaaagcgaatggaatgaaaaaaatctttttactggttgggaaaatccaggactgacaaaaaaaggaattgatgaagcaaaacatgctggcatattaataaacgacctcgatatcgaatttgatcatctatttacttcagttttagatagagccaaactcaccggagcaatcattctagagaatatcaatcagaaagatctagattctattgaaaacaaagctctcaatgaaagattctatggtgaccttcaaggtcttaataaagatgaatgtaggcaaaaatggggtgctgaacaggtacaaatttggagaagatcttatgatgttggtccgcctgggggagagtcactaaaagaaactggagagagagttttaccatattatttaaatgagatttacccattaatacttcaaggcaaaaatgttttggtagctgcacatggaaattctcttaggtcattaataatgcatttagacaaattgtcatctgatgaaattgttaaattggaaataccaactggggctcct

SEQ ID NO: 291873 - DNA, 659 bp, Unknown
  Bacterial polypeptide expressing nucleotide sequence isolated from the Sargasso Sea
tatgagcaaattaatcctagtaagacacggtcaaagtgtatggaatgcagaaaacagatttacaggatgggtagatgttgatttatccgaaaaaggaattttagaggcccagaaatctggtcaattaattaaaaatctaaatattaatatagatgtttcctatacatcttttttaaaaagagccattaaaactcttaccaccatgcttaaagaaaataatttagaacttaaatttaatacttcttattttttgaacgagcgtcattacggaatcttaactggattaaataaagatgaaactaaaaagaaaataggtgaggaacagtttaaaaaatatagaagatcttgggatataccgccaccaccaatggctgagaatgacaaaaatcattcattatttagtcctttaaactcaagtatacccatggggatgataccttttacagaatctttaaaagatacttataaacgagtaattccttattatgaaaaagaaattcaaaaaaatattaaagaaaataaaaacgttttaatatcagctcatggcaattcactaagagcactatgcaaatatctacttaaaatttctgatcaaaagataaatgaattagaaattccaacgggaaatcctttaataattgaatttgataacaatctta

SEQ ID NO: 291874 - DNA, 715 bp, Unknown
  Bacterial polypeptide expressing nucleotide sequence isolated from the Sargasso Sea
atgggcaaattaatagcaattagacacggacaaagtatttggaacgcagaaaaccgtttcactggttgggtagatgttgatctatcagaaaaaggagttctggaagcagaaaagtcgggaaaattgttaaaagatctaaatttaaactacgatatttgttttacttcgtgtcttaagcgagcaataaaaacattagaaatagtattaaagattgttggtaaagagagtaaatacacaaaagcctgggagcttaatgaaaggcattatggggccttcacagggctagataagtttaaaaccaaagaaaaactaggtgaagaaaagtttaatcagtacagaaggtcttgggataatcctccaccagttctggataaagaatcaaaatatagttcgcacaatgattctttgtataaagggttaaaaagtgtacctaatacagagtctcttaaaaatacttatgatcgagttataccttattttcaaaaaaatattcaagaacatctaaaacaaaataaaaatataattatatcagcacacggaaactctttgagagctttatgtaaatatttatttaacatttctgataaaaaaattaatgagttagaaattcccacaggaaatcctttgataattttttttgacaaaagtttaaaagctgagaagtattactacttagacaaagaaagagaaaaaaaaattatatttaatcaataat

SEQ ID NO: 291875 - DNA, 1021 bp, Unknown
  Bacterial polypeptide expressing nucleotide sequence isolated from the Sargasso Sea
gaaactagttcgaatattaataccgttaaagaaaataaattaatgccaaaccctgctcttaatcaattttctcaatccttgaaaaaaggtggaggtactctccatattatgggacttgcttctgatggaggagttcacagccacatcaaacatttatgtggattaatcgaatgggctgcaagcaagggtctaaaaaatgtttcattgcatttatttactgatggaagagacacttccgcaaaaagtgcgactaaatacataaacacgatagaagcgaaaatcaagtcaacaggagtaggggaaatttcatcactttgcggaagatattgggctatggaccgagataatcgatgggaaaggacatcaaaagcctacgaattacttaccgacccaagatttgctatcagcaagctatctgcggcagaaagcataaataaaagctatcaagagggtataacagatgaatttattgaacccgtaaggctttcctcctcatttttaaaagacggagatggcgtagttttttttaatttccgtcctgatagagctagacagttagtaaaggcacttaaattaaaagattttgatggctttgagaggaaaaacaaaactgatattgacgtccttacttttacacaatacgaatcaggtcttcctgtatcagttgcatttccacctgagcctctaaatgatttgttaggtcaagtaatttctgatcatggtttaaatcaatatcgaacagctgaaactgaaaaatatccacacgtaacttattttttaaatggaggtattgaaaaaccattaaaaggagaagttagacatcttgtgccttccccaagagttgcaacatacgatttacaacctgagatgtcagcagacgaactgactgaaagttgtatccaagcaattgacactggaatttactcattagtggtgatcaattttgctaatccagatatggttggacattctggaataatgaaagcagcaataaaagctaatgaaaaagttgatagctgca

SEQ ID NO: 291876 - DNA, 856 bp, Unknown
  Bacterial polypeptide expressing nucleotide sequence isolated from the Sargasso Sea
accctggcgcagggcgagttccaggccgataccgccgttgccggtctgcaggccgcttacgctcgcgatgaaaatgatgagttcgtgaaggcgaccgtgatccgtgccgcaggccaggccgatgccgcgatggaagacggcgatgcgctgattttcatgaacttccgtgctgaccgcgcccgtgaaatcacccgtgccttcgtcaacgccgatttcgacggttttgcccgtaagaaagaggtcaaactcgacttcgtgatgctgaccgaatatgccgccgacatcaaagtcgcctgcgcatacccgccggcgtccctggccaataccttcggcgagtggatggcgaagaacgacaagactcagctgcgcatctccgaaaccgagaagtacgcgcacgtgaccttcttctttaacggcggcgttgaagagccgttcaaaggcgaagagcgtattctgatcaactcgccaaaagtcgcaacctacgacctgcagccagaaatgagctccgccgagctgaccgaaaaactggttgctgctatcaagggcggtcagtacgacaccatcatctgtaactatccgaacggcgatatggtaggtcataccggcgtcatggaggcggcaattaaagccgttgaaacgctggacaattgcatcgatcaggttgccaaagcggtagaatccgtcggcggccagctgctgattaccgccgatcacggtaacgctgaacagatgcgcgatccggctaccggccaggcccatacggcccacaccaacctgccggtaccgctgatctacgttggcaataaaaccgtaaaagtcgccgaaggtggcaagctttccgatatcgcgccaacca

SEQ ID NO: 291877 - DNA, 720 bp, Unknown
  Bacterial polypeptide expressing nucleotide sequence isolated from the Sargasso Sea
atggtgaaagtaaatggaacttggaaaatagatttactggctggaaagatgtttctcttacaaacaatggtaaaaatgaagcagcgttttctggacatcaaattttagaaaaaaatattaagataaatagcgtttatacttctttacttaaaagagcgatagaaacaacaaatattgttaccgaaattataaaatttcctaaaaaaaatgtacaatttgactggcgtttaaatgaaagacattatggagctctccaaggtttgaataaatcagaaactgctgctaagtatggagaagataaagtgaaaatttggagaagaagttatgatattccacctccctttttggacgacaatgataaaagacatccaaagtttaataaaaaatttaaagatattagagctgaattaccagttggagaaagccttaaacaggttattaataggctaaaaccttttttagataattatttagaatcaataaaaaaaaccaatggtaaccatctcattgttgctcacagtaactcacttagagcaattatcaaaattttggataatttgaatgaacgagaaattgtttcagtaaatattcctacaggcgttccattaatttattcgtttggaccaaattttaatgttcacagtaaagaatatttaataaacgaaaaggagttgcaaaaaaaacaagaaatgataaaaaaccaaggaaaagtaaattgag

SEQ ID NO: 291878 - DNA, 291 bp, Unknown
  Bacterial polypeptide expressing nucleotide sequence isolated from the Sargasso Sea
tatgagtaaattaatcctaacaagacatggtcaaagtgaatggaatgcggaaaatagatttactgggtgggtagatgttgatttatccgaaaaaggagtcttagaagctaaaaaatctggtcaattaattaaaagtctaaatattaatatagatgtctcctatacatcttttttaaaaagagctatcaaaactcttaccaccatacttaaagaaaatggtttggaacttaaatttaatacttcatgggaattaaatgaaagacattatggatctctaactggtttaaataa

SEQ ID NO: 291879 - DNA, 754 bp, Unknown
  Bacterial polypeptide expressing nucleotide sequence isolated from the Sargasso Sea
aatgaaaaaattagtattaatgcgccatggtgaaagtcagtggaatttagagaataggtttactggttggaccgatgttgaccttactgaaaaaggggaggccgaagcaaaaaattgtggtttattgtttagagaagctggttttcaatttgatatagtacatacatctttattaaagcgagcgaatcgcacgatggaaatttgtctttatgaaatgggattgagtggcatcagtattaaatataattggcggctcaatgaaagacactatggagcactccaaggtttaaataaagcagaaacagctgcggaatatggtgaagagcaggtacatatatggcgcagaagttatacagtcccacctccaaaactagattcagatgatgaaaggcatcctagatttgatgataaatattcttctatacaatcagatatccttcctgatagtgaatgcttaaaagatacggtagatcgtttcatgccttattggcttgattcaataaagcctgatattgaatcaggaaaaaatgtgttaatcgtggcacatgggaattcattaagagcacttgttaaatatttagacaaggtgtctgatgacgatattgttgaactaaatattcctacaggtgttcctttggtctatgaattggatgatgaaatgaatcctgttaaaagttattatttaggtgatcaagaagagatatcaaaaaggacagcagaagtagctgcacagggtaaaaatagatctatttga

SEQ ID NO: 291880 - DNA, 619 bp, Unknown
  Bacterial polypeptide expressing nucleotide sequence isolated from the Sargasso Sea
aatgaaacatcttattcttataaggcatggacaaagtgagtggaaccaacaaaaaagatttactggttgggtcgatatcggattaacagacaaaggtagagctgaggctaaaaaagctggtgaattaataaaagagaaaaaaattaaacttgattctttttatagctcctaccaaaaaagggctaatgatactcttaaaattgtaatgaaagaattaaatgaagatgaaaacttaattactaaaaaatggcaattaaatgaaagacattatggagagcttacaggtttaaataaagaagatatgaagaaaaaatatggagaagagaaaatccatcaatttagaagatcatgggatgttaaacctggagctttagataggaaaagcccataccatccgctcaatatagaaacttataaggatattccagtgtctgatattccagatactgagtctttaaaagatacccataaacgggtagtggattgttataatgaattaatcttaaaagatcttcaaaatggtaaaggtgtatgcatctcggcccatggaaattctttaagagctctatgcaagtttctttttaaaattaatgatagggaaatttcaaaaatggaaata

SEQ ID NO: 291881 - DNA, 920 bp, Unknown
  Bacterial polypeptide expressing nucleotide sequence isolated from the Sargasso Sea
aagtgccgaagccgcaatcagggcagcctatgatgccgacaccacggatgaattcgttctgccgaccgtgattggcgattatgccggcatgaaagacggcgacgggcttttgatgaccaatttccgggccgaccgcgcgcgtgaaattctggccgcgatctgcggaccggactttgacgggtttgaccgtggcaccccgatcagatttgctgtgcaggccggtatggttgaatattcatccgaccatgcaaaatatatggacgcgatctatccgccgcaggtgttgccaaatatctttggtgaagtcgtttccagggctggcatgaagcagttgcgtatcgcggaaaccgaaaaatatccgcatgtatccttcttttttaacggcggcgaagaacaggttttcgaaggcgaagaccgtattctggtgccatcacccaaggtcgcgacctatgatttgcagccggaaatgtctgccccggaagtgaccgaaaagctggtggcggcgatcagggctgaaacctatgacgcgatcattctgaactttgccaaccccgatatggtcggccatagcggcattttgtccgccgcgatgaaggccgccgaagcggtcgacacctgccttgggcaggttgttgaagcggttaaatcggtgggcggcgtgatgttcgttaccgccgatcacgggaactgtgagatgatggtggatccggaaaccggcgagccgcacaccgcgcatacgcttaatctggtgccgaccattctggtgaatggacccgaaggcgcgacactggaaaatggtcgtctggccgacgtggcaccgactttgttgcagcttctcgggctgccgcaaccggcggaaatgaccggcaaaccgttgatcaaggttttgaaagggaatgatgcgcttcttgcgaaatgat

SEQ ID NO: 291882 - DNA, 706 bp, Unknown
  Bacterial polypeptide expressing nucleotide sequence isolated from the Sargasso Sea
gacctccctctgcggccgctactgggccatggaccgcgataaccgctgggagcgcgttgagaaggcgtaccggttgctgaccgaagccagcccaatcagcagcgcttctccgcaggacgtcgtcaaagcggcccatgcaaacggcaaaagcgacgagttccttgagcccgttcgctttgcaccagagctcatcgaggccaacgatgctttggtgttgttcaacttccgtcctgaccgaatgcggcagctcacggctgcatttgtgagctctagcttccaaggctttgagcgccagttgatcactcctttgccggtggtcaccttcacccagtacgacaaaaccctgccagtggccgtggccttcccgcccgaatccctggacgatctccttggtgaggtggtggcacgggcaggactaagccagttccgcaccgcagaaaccgagaaatatccccacgtcacctacttcctcaatggcggcatggaaaagcccttccctggggaagatcggcatctggtgccctcccccaaagtggccacttacgaccaatccccacacatgtcagccgatgagttgaccgacggctgcgtgtcagccatcaaaaagggcatctactcactcgtggtgatcaactacgccaaccccgacatggttgggcataccggcgacatggacgcaacgatcgaagccattggttgtgttgat

SEQ ID NO: 291883 - DNA, 658 bp, Unknown
  Bacterial polypeptide expressing nucleotide sequence isolated from the Sargasso Sea
atgagtcatttaattttaattagacatggtcaaagtgagtggaatcttgaaaaaagatttactggttgggtagatgtagatcttgctgcaaatggaaaattagaagcatgcaaatcaggtgagcttctaaaagaaaaaaatattaaaatagaccattctttttcttcattacaaattagagcaattaataccttaaaacttgttcataatacgatgagaattaaagaaacttttacaaaagcatggcaactaaatgaaagacattatggtgctttaactggacttaataaagatgaaatgaaaaaaaaatttggagaaaaaaaggttcatcagttcagaaggtcatggaatataaaacctgaacccttgagtaaaaataacccttaccacccaataaacattgaaacatataaagatattcccaaagcaaatttgccagacacagagtctttagaagatacatataatagagttttaccgtattataaaaaaaatattcaaagtaagattttcgaaggaaaaaacatactcatagttgctcatggaaattcgattagagcaatgtgtaaatatctttttaaactagatgaaaaaaaaatatctttacttgaaattccgacaggaaatccattgataattaattttgactcaaaataat

SEQ ID NO: 291884 - DNA, 451 bp, Unknown
  Bacterial polypeptide expressing nucleotide sequence isolated from the Sargasso Sea
agagactgctgaaaaacatggtgatgaacaggtattaatatggaggagaagttatgatgttcgtcctccagagctggactatgatgacaaaagacatcccaggtttgataaactatactcaaaaatgccagctgaccttctaccaaattcagagtgtttgaaagatactgtggagcgttttatgccgtattggtttgatgttatcaagcctgatattgaacaaggggaaaaagtattgattgttgcacacgggaattccttaagagcccttgttaagtatttagatcaaatttcggatgaagatattctcaagcttaacatcccaactggagtcccactggtatatgaactggatgaagatttgaaaccaattaaaagttattttttgggagatcaagaagagatatcaaaaaaagctgatgctgtcgctgcccaaggcaggaaggattag

SEQ ID NO: 291885 - DNA, 355 bp, Unknown
  Bacterial polypeptide expressing nucleotide sequence isolated from the Sargasso Sea
atgaaaaaactagttttattacgccatggagaaagtcagtggaatttggaaaatagatttacaggatggactaatgtagatctaactcagaaaggtgaagaagaggcaaaaaaggctggggaattattaaatcaagaagcaattgaatttgacgtggttcatacatcattattgaaacgtgcaaatcggacaatggaaatttgcattgatgaaatgggtatcagcaaagtatctaaaaagtttgattggagattgaatgaaagacattatggtgctcttcaagggcttaataaagcagagaccgctgaaaaacacggcgatgaacaggtattaatatggagaagaaagttatgat

SEQ ID NO: 291886 - DNA, 358 bp, Unknown
  Bacterial polypeptide expressing nucleotide sequence isolated from the Sargasso Sea
gtcgatcgctgcatcggacgcttgctggatgccgtcggtcgccgtggcggcaccatgctgatcaccgctgaccacggcaacgccgaactgatgcagggccccgatggtcaggcctggacggcccacaccaccaaccctgtgccctgcatcctggtggagggtgaacagcgcaagctgccgggccatggcaacgacatcagcctgcgagaggacgggggcctggctgacattgcaccgaccctgctgcagatcctcaacctggagcaaccggcggcgatgacgggccgtagcctgatcgagccggtatcgaacgtcgatccgtcgcctctgtccgcccgcttacctcttcccgtctgat

SEQ ID NO: 291887 - DNA, 748 bp, Unknown
  Bacterial polypeptide expressing nucleotide sequence isolated from the Sargasso Sea
atgaaattagtattacttagacatggacaaagcgaatggaatttagaaaataaatttactggctggacggatgtagatttgacagaaaaaggagaggctgaagctaaaaatgctggaaggttaattaaaaatgaaaaaattaaaattgatttagtttttacttctgttttaaaaagagctgtcaatacgatgaatatatgtttatctaatctggatgataataatcctgaaatagttcaagattggagattaaatgaacgtcattatggttctttgcagggattaaacaaatcagaaaccgctgaaaaatatggagaggatcaagtattaatttggagaagaagctatgatattaagcctccagaacttgatcgagatgatgatcgacaccctagatttgataaaaaatatgcagaattaagtagtgagattttaccttctagtgagtgtttaaaagatacagttgaaaggtttttaccttattgggaaaaaacaattagtcctgaaattaattctggtaagtgtataatgattgtagcacacgggaattcactaagggcattagtaaaacatttggatagagtatctgataaagatattattggcataaatatccctactggcgtccctttaatttacgaattagaccgagacctaatccctatcaaaaattattacctgggcgatcaagaaaaaatattagaaaagataaaatctgttgagaaacaaggggaatcaaaaaaataat

SEQ ID NO: 291888 - DNA, 861 bp, Unknown
  Bacterial polypeptide expressing nucleotide sequence isolated from the Sargasso Sea
ggccgttactttgcgatggaccgcgataaacgctgggatcgtgtgcaggcggcttatgacctgttaactcagggcaaggcattgtttacagccactactgcagtggatgcactaaaagccgcttacagccgtgatgaaaatgacgaatttgttaaagcgaccgccattaaaaatgctgctggcgatgtaattaaaatgcaggatggcgacagcctgatttttatgaactttcgtgccgaccgtgctcgtcagttcagccgcgcttttattgatgcggacttcgcaggtttcgcccgcgagtatcagcctcaactggcaagctttgtaatgttgaccgaatacgctgccgatattaaagcgccttgtgcttatccaccagaaagcctggacaacgtattgggtgaatggctggcaaaacaccagaaaacccagttacgtatttccgaaactgaaaaatatgcccatgtcacctttttctttagcggtggccgtgaagatgtatttaacggtgaacaacgtattctggtgccatcgcctaatgtagccacttacgatttgcagccagaaatgaattccaccgaactgaccaacaaactggtgggagccattcacagcggcgagtttgatgtgatcatatgtaattatccaaatggtgatatggtcggtcataccggtattttatctgccgcaattaaggcagttgaagccgtcgatcactgcattggccgagtggttgaagcattacagcaagtgggcggtgaatgtttaattaccgccgaccatggcaatgcagagcaaatgatggatccggaatcgggtcaggctcacaccgcccataccagcgatccggtgccactaatt

SEQ ID NO: 291889 - DNA, 616 bp, Unknown
  Bacterial polypeptide expressing nucleotide sequence isolated from the Sargasso Sea
atggaaacaaattatcttgttctagtaaggcatggccaaagtgcttggaatcaaaaaaatttatttactggttggaaagacccagagttaacagagttaggtaaagaagaggcatttaaggctggccaacatataaaaaaacagaacattaaatttaatttacttttcacttctgcattaaaaagagcacaagatacagcttcgataattctcgaagtaattgaagaaagcaatatcaatatatttaaaaatgaggcactaaatgaacgtgattatggtgaccttacgggattaaataaagatatggctagacaagaatttggtgaagaacaagttcaaatttggcgcagatcttattcagatggcccgccaaatggtgaaagtcttgaagatacatacaacagagttatcccctactttaaaaatgagattatgcctgctttacaaaaaaataagaatgtaattatttctgctcacggtaattcattaagagctttagtaaaatttattgaagaaatctctaaagaagaaatagttaagttagaaattgctacaggggaaccgattttttatgaattcaatgaaaaaaaattgcaaagaaagctcaactggtagg

SEQ ID NO: 291890 - DNA, 937 bp, Unknown
  Bacterial polypeptide expressing nucleotide sequence isolated from the Sargasso Sea
tctgatggaggagttcatagtcatattgatcattatttaggtttaataaaatgggcatctgataatggcatcaaaaaagttgcaattcatataattactgatggcagagatactcccgcaaaaagtgcatctaaatatctaaatcaaatagagtcttgcataaaaaaatataatacaggcgaaatagcctctatatgcggaagatactggataatggatagaaatcttttatgggacagaaccgaaaaagcttatgacaatttgacgaataaagacattaaaataacgaatatatctccgcaagattatattcaaaaaagttacgataaaaacataactgatgaatttatagagcccattcgattatctgataactatctgaaagatggagatagtatgatttgctttaacttccgtcctgacagagctagacaaataataaaatcccttacagataaagaattctcagactttgaaagaaaaatttttccagatcttgaattagttactttcacacaatatgacgcaaacttcccagttaaagttgcatttcctcctgaatctctcaataattttatcggtcaaatagtttcagaaaacggactcaagcaatatagaacagctgaaacagaaaaatatcctcacgtaacatatttttttaatggaggagtagaaattcctttacctggagaagagagacatttagttccatctccaagagttgcaacttacgatatggaacccgaaatgtctgcggaagaattaactaatagttgtgctaaggcaattaaaagtggaaactatgcttttgttgtaattaattttgctaatcctgatatggtgggtcatacaggcaatatggatgcgactattaaagctatagaaacagtagataaatgtatcggtcaaatagttaatgctactggagaaatgggcg

SEQ ID NO: 291891 - DNA, 796 bp, Unknown
  Bacterial polypeptide expressing nucleotide sequence isolated from the Sargasso Sea
tgcaaaggtctaatcgaaaaaggagattatgtgatattttttaatttcagaactgacagaggaaggcaattaactaaagtgttaactcaatttgattttgaagagtttaaaatgaataaacttgatctaaatcttttgacaatgacaaattatgacaagaactttgttggtgttaaaagtgtctataattcagattatattttagatactttaggtgaaactttagaaaaaaataacaaaaaacaattacgaattgcagaaacagaaaaataccctcatgtaacatttttcttcaatggaggtaaggaacaaccatttaaaaatgaaaaaagaatcttgtgtccgtctccaaaagtggctacctacgatatgaaaccagaaatgagtgcatttgaaattagagataaaactattaaagaacttaattctaaaatttatgactttatttgcttgaattttgcaaatcctgacatggttggacacactggaaatattaaagcagctgtaaaagcgtgtgagactgttgatgaatgttgtaaagatattattaatacagctttacaaaataattactcaatagttgtcatatcagatcacggaaattgtgatgtaatgaagaatcaagacggaacacctaacacagctcatacaaaaaatcttgttcccataattgtaatcgatgacgatgtaaaatctgttgaaaatggaattttgggcgatattgctccaactattcttgacttgatgttaattgaaaaacctaaactaatgacccaaaaatccttaattaaatgag

SEQ ID NO: 291892 - DNA, 821 bp, Unknown
  Bacterial polypeptide expressing nucleotide sequence isolated from the Sargasso Sea
gatgttatgtatccttgatggatggggtgcgcgggacgatgccgtcaacaacgctattgcattggctgtcacgcctaattgggatcgctacgttcgcgaagcgcccatggctcatctgaagtcctgcgccctgcatgtgggccttcccgagggccagatggggaactccgaggtgggacacatgaatttgggcgccgggcgcattgtcatgcaggacctcccgcggattaacgcagccgtggccgatggtagcttagccgcgcatcccacactgtcctgccacatagatacgttgcgtgaaaccggtgggacatgccatctccttggtttgttgtcgcctggtggcgtgcattgccatcaagatcatatggccaccctggccgcggccgtatcttcgtcgggcgttcccgtatgcattcatgccttcctggatggtcgcgatacgccgccaaaggccggacacggttttatgtccagctttctttccgatattgccgcgcttaaggatgtccgtgtggcgaccgtatcgggccgttattacgccatggaccgggacaaccgatgggaccgcatcagccaagcctacaacgtcatggtcggcgccgatggcgcgaaagccgtcgatccgctgtctgccattgatgcgagttacgccgggaacctgggcgacgaattcatgctaccgacggtgattggtgattatgtcggtatggctgatggcgacggattactgatggcgaatttccgtgccgatcgagcccgagagattctagctgctctggcggatccggaattcgacggctttgcgcgcgatgaggtgc

SEQ ID NO: 291893 - DNA, 469 bp, Unknown
  Bacterial polypeptide expressing nucleotide sequence isolated from the Sargasso Sea
atgtcaaagattagcagcaaaaatataaacagattaaatgttcctcagagccctgtagttcttgcaatactcgatggttggggagatagagaagatatgtctgacaatgcaataaaaagcgcctctacacctattatggattcattgtggcatgcatatcctcatactctcataagtgctagcggttcagatgtcggtcttccagatggtcaaatgggtaattctgaggttggtcaccttaccattggttctggaagaattatccaacaagaacttgtaagaatttcaaatattgtaaaaaataatcaattaggcttagttaatgagttaaaaggattagctgatttattaaagaaaaaaaattctactttgcacataaccggattatgttctgatggaggagtacatagtcatattgatcatttattaggtttaataaaatgggcatctgagaatggcatcaaaaaag

SEQ ID NO: 291894 - DNA, 674 bp, Unknown
  Bacterial polypeptide expressing nucleotide sequence isolated from the Sargasso Sea
atcactaaataattttataggtcaggtagtatcagaaaacggacttaaacaatacagaaccgcggaaactgaaaaatatcctcacgtaacatactttttcaatggaggagttgaaattcctttacctggagaggagagacatttgattccatctcctagagtcgcaacttatgatatggaacccgaaatgtctgcggaggaattaactattagttgctctaaagcaattaaaagcggaaattatgcttttgttgtaatcaattttgccaatcctgatatggttggtcatacaggcaacatggatgcaacaattaaagcaatagaaaaagtagataaatgtgtaggtcaaatagttaatgctactggagaaatgggcggaagcattgttattacagccgatcatggcaacgcagaattaatgaaaggatctgaaggagagccatggacagcacacacaataaataaagttccattaatattgattgaaggtgaaaaaagaaaaataccaaatatgggaaatgaaataaatttgagagaaaacgcaggattagcagatattgctcctactttattgcaattgttgaaattacctataccaagagaaatgaccggcaaatcgcttattcaagaaattgaattaaagggttataataaagtagttcaacacgtttaaa

SEQ ID NO: 291895 - DNA, 679 bp, Unknown
  Bacterial polypeptide expressing nucleotide sequence isolated from the Sargasso Sea
ggacgcagaaacagatttacaggatgggtggatgttgatttgtcagaaaaagggattattgaagcagaaaattcaggagatttaataaagaaactgaatatcaaaattgatatttcttacacctcttttttaaaaagagcgattaaaactttaacaactatactaaaaaaaaataatcttgatcttaaatttaatactgcttggcaattgaatgagagacattacggatctttaactggactcaataaagatgaaacaaaaaagaaaattggtgaggaacaattcaaaagatatagaagatcgtgggatatatctccaccgcccatttccgaggatagtaaatacttaataaattttagtccactcaacggtagtattcctgctgggatgactccatttactgagtctttaaaaaatacttatgacagagtcgtaccttattataacaatgagattaaaaaaaatctctctaaagacaaaaatattttaatttcagcacacggaaattctttaagagcactatgtaaatttttatttaaaatttcagatgagaaaattaatgaattagaaatcccaactggaaacccgttagtaattgaatttgaaaataatttagaagttaagaaatatttttacttagataaaaaaagagcaaaaaatattatttttaatcagtaat

SEQ ID NO: 291896 - DNA, 679 bp, Unknown
  Bacterial polypeptide expressing nucleotide sequence isolated from the Sargasso Sea
catgagtcatttgattttagttagacatggacaaagtgaatggaatttagaaaatagatttactggttgggttgatgtagatttagcagcaaaaggaaaacttgaggcttgcaaagctggagaattaataaaagatttaaaattaaatatagattttttttatagttcgtatcaactaagagctatcaatactttaaatttaattctcaacacaataagaaaaaaagatgtaaatgtaattaaagcttggcaattaaatgagagacactacggctctcttacaggtctaaataaagatgaaatgaaaaagaaacttggtgaagacaaagttcacgaatttaggagatcttgggatattgctccggaacctatgaataaaaataacccttatcatccaataaatattgatgcctataaaaatattccaaaggataaaatacctgatactgagtcattaaaaaatacatatgaaagagtactcccatattttaagcaagaaatattaaaaaaattagaagacgataaaaatattctgatttcagctcatggtaattctattagagcaatatgtaaatttttgtttaaacttaatgaaaaagaaataccaaagctagagattccaacaggtaatccattattaattgaggttattaatggcaaaattaaaaaatgtttttat

SEQ ID NO: 291897 - DNA, 694 bp, Unknown
  Bacterial polypeptide expressing nucleotide sequence isolated from the Sargasso Sea
atgagtaaactaatcttaacaagacatggccaaagtacctggaatgctgaaaatagatttacgggctgggtagatgttgatctttcagagaaaggcaaagaagaagctaaaaagtcaggtgagttaataagagaattgaatatcaaaataaatattagttatacttcttaccttaaaagagcgattgaaacgctcacaattatcttaaaaactttgaatttaccaatgaagtttaatacttcttgggaattaaatgaaagacattatggttcattaacaggtttaaataaggaggaaacaagaaagaaaattggtgaagaacaatttaaaaagtatagaagatcttgggacgtagcacctcctctcttagctaaagatagtaattaccttgaaaatttcagccctttaaacagcggaatacccaaaaacaaaattcctttgacagaatccttaaagaatacttacgaaagagttattcctttttatgatatggaaataaataagaatttgaaaaatggaaaaaatattttgatatcagctcatggaaattcattgagagcattgtgtaaatatctctttaagatttcagatacaaagattaatgaactagaaattccaacaggaaatccactaataatcgaatttgataatcaattaaatattcaaaaatatttttacctaggatgcttctaag

SEQ ID NO: 291898 - DNA, 718 bp, Unknown
  Bacterial polypeptide expressing nucleotide sequence isolated from the Sargasso Sea
tatgagtcatttaattttagtaagacacggtcaaagtgaatggaatttacagaatagatttaccggatgggttgatgttgatttggcaccaaatggtaaactagaagcatgtaaagcaggcgaattaattaaaaagttagaattggatataaattattttttcacttcataccagaaaagagctatagaaactttaaacttaatattaaatacattaagaattaagaatgacaaagttgttaaggcgtgggaacttaatgaaagacattatggatcactaaccggcttaaataaaaacgaaatgaaaaaaatctatggggaaaaaaaaattcatgaatttaggaggtcttgggataatcaaccagaagctctaaataaaaatagcccatatcatccaataaatatagagacttataaggatattccaaaagacaaaattccagacactgaatctctcaaagatacgtatgaaagagtaattccattctttgaaaaaaatataaaaaataaaatgaataaaaatattttaatttctgcgcatggaaattcgataagagcactttgcaaatatttatttgaaatagataataataaaatatctaaacttgaaatacctactggaaatcctcttattttaaaattttctgaaaataaaaaattaataagtggaaattatttagacgaaaatagagccaaagatttactaatttttaattaa

SEQ ID NO: 291899 - DNA, 772 bp, Unknown
  Bacterial polypeptide expressing nucleotide sequence isolated from the Sargasso Sea
attctcagactttgaaagaaaaaattttccaaatctagattttgttacttttactcaatatgatccgaactttcccgttaaagttgcatttcctcctgaatctctcaataattttataggccaaatagtttcagaaaacggacttaaacaatacagaaccgcggaaactgaaaaatatcctcacgtaacatactttttcaatggaggagttgaaatacctttacctggggaagagagacatttgattccatctccaagagtcgcaacttatgatatggaacccgaaatgtctgcggaggaattaactattagttgctctaaagcaattaaaagcgggaattatgcttttattgtaatcaattttgctaaccctgatatggttggtcatacaggcaacatggatgcaacaattaaagctatagaaaaagtagataaatgtgtaggtcaaatagttaatgctactggagaaatgggcggaagcatggttattacagccgatcatggtaacgcagaggtaatgaaaggatctgaaggagaaccatggacagcacacacaataaataaagttccattaattttgattgaaggtgaaaaaagaaaaataccaaatatggggaatgaaattaatttaagagaaaacgcgggcttagcagatattgctcccactttgttgcaattattaaacctgccaataccaagagaaatgactggcaaatcgcttattcaagaaattgaattaaagggttataataaagtggttcaacacgtttaa

SEQ ID NO: 291900 - DNA, 494 bp, Unknown
  Bacterial polypeptide expressing nucleotide sequence isolated from the Sargasso Sea
tatgcataaattagttttacttcgacatggcgaaagccaatggaatttagaaaaccgttttaccggttggcacgatgtcaatttgacagagcagggtgaacgcgaaggccgtgaagctggtcgtttgcttaaagctgaaggctttgcgtttgatgtggcttacacatccgtactgacacgggcgatccggactctctggcttgccctgactgagatggagcaagtatggattcctgtccatcgggaatggcggctgaatgaaaggcactatggtgctcttcagggattgaataaagcggaaaccgcagaaaaacatggagatgaacaagtgcttgtttggcgaagaagttacgatattccaccaccaccaatgactaaacaggatgatggatacgcgggtaaggatcgtcgttatgacaatcttgatgaagaaaatcttccgttaacagaatgtttgaaagataccgtggcccgtttccttcccctgtgggaag

SEQ ID NO: 291901 - DNA, 471 bp, Unknown
  Bacterial polypeptide expressing nucleotide sequence isolated from the Sargasso Sea
ttctggtgccatcgccgaatgtggccacttacgatttgcagccagaaatgaattccaccgaactgaccaacaaactggtggacgccattcacagtggcgactttgatgtgatcatttgtaactatccaaatggcgatatggtcggccacactggtattttatctgccgctatcaaagcagtggaagctgtggatcactgtattggccgcgtagtcgaagccttacagcaagtgggcggcgaatgtttaattaccgccgatcatggtaacgctgaacaaatgatggatcccgaatcagggcaggctcacaccgcccataccagcgatcctgtgccactgatttatgttggccgccccgctacagtgacagctggcggtattttaagtgatatagcaccaactatgctgcacttgatgggcatgcctgtacctgctgaaatgacaggtaaaattctgatgaagacacattaat

SEQ ID NO: 291902 - DNA, 670 bp, Unknown
  Bacterial polypeptide expressing nucleotide sequence isolated from the Sargasso Sea
aatttatactacgtgactttaactaattacgacgaaacgtttacaggcatcaacgttgttttcaacaaagaaaatttaaccgatactttaggtgaaattttagaaaaacataacaaaactcaaatcagaatagccgaaactgaaaaatatcctcacgttacatttttcttttctggtggacgcgaaacaccttttgaaggcgaaaaacgtattttaaaaaattcgccaaaagtagcaacctacgatttaaaaccagaaatgagtgcttacgagcttaccgatgctctagtaccagaattagaaaacgaaactacagattttgtttgtttaaattttgcaaacggagatatggttggtcatactggcgttatggaagctgcaattaaagcttgtgaagctgtagataaatgtgtagaaaaagtagttactactgctttaaaccatggttatacaacactattaattgccgatcatggtaattgcgaaactatgataaatcctgatggtagcccaaatacagcacacacaacaaatcctgttcctgtcattttaattgataacgaattaaaacacattgaaaacggaattttaggagatatggcgcctaccattttaaaattaatgggtgtagaacaacctgaagcaatgacgcaaaaacctttagtgtaat

SEQ ID NO: 291903 - DNA, 826 bp, Unknown
  Bacterial polypeptide expressing nucleotide sequence isolated from the Sargasso Sea
aaacataaaaaaaacaaaacagttcatcttttaggtttgtgtagtgatggtggagttcactctcactcaaatcatattattgcaatgtccaaattattgcatgaaaataatattagaactgtaattcatatattttcagacggaagagattcttctcctaaacaattaggccagctaattaaaaaaattgaatcatctctacccgatgatattcagatcgttactcttattggaagatattacgcaatggatagagataatagatgggatagagtaaaaaagtcctttgatcttattgcttatgccaaacataaaagaaaagcagcaaatattttgatagcaattaaagaggcttatgaaaataacgaaactgatgaatttatttcacctacactaactgctgattatagaggaatacaagaaggtgatagtctacttatgattaattttagagctgaccgggtaagagaactgttaacagcattcttagaccctaattttaaaaaatttaaaaaggatgccaaaactcccaaattattaaactgtcttggaatgtcagagtattcaaaagaaatttcaaactatatgagcagtatttttataaaagaaaagatcgaagatacacttggtgaagttattgcaaaagcaaatttaaaacaacttaggttagcagaaacagaaaaatatcctcatgtaacatatttttttaatggtgggaatgagactgtcaataaaggtgaaacaaggattatgataccatcacccaaagtctctacttatgatttaaagccaagagatgtctgcaaaagaagtgaaaagaattaac

SEQ ID NO: 291904 - DNA, 878 bp, Unknown
  Bacterial polypeptide expressing nucleotide sequence isolated from the Sargasso Sea
tgatgtaggcttaccagatggtcaaatgggcaattcagaggtggggcaccttactattggttcgggaagaataatacaacaagaactcgtaaggatttcgaatattgtaaaaaataatcaattaggcttggtcaatgagttaaaagagatggctgcttcattaaagaaaaataattctactttacatatcacgggattatgttctgatggaggagttcatagtcatatcgatcatttattaggtttaataaaatgggcatctgataataaacttaaaaaagttgcaatccatattattactgatggtagagatactcctgcaaaaagtgcttcaaaatatttaaatcaaatagaatcatgtataaaaaaatataacgtaggcgaaatagcttccatatgcggaagatactggataatggatagaaatcttttatgggatagaacagaaaaagcatactctaatttgactgatccagatattcaagtaacaaatttttctcccaaggattacatagaaaaaagttatgccaaaaacataaccgatgaatttatagagcccatacgaatgtctgaaaactatcttaaagatggagatagtttgatttgctttaactttcgtccagacagagcaagacaaatagtcaaatccctttcagacaatgaattctcagactttgaaagaaaaaattatccaaatctagattttgttacttttactcaatatgatcccaactttcccgttaaagttgcattccctcctgaatcactcaataattttataggccaaatagtttcagaaaacggacttaaacaatatagaaccgcggaaactgaaaaatatcctcacgtaacatactttttcaatggaggagttgaaa

SEQ ID NO: 291905 - DNA, 934 bp, Unknown
  Bacterial polypeptide expressing nucleotide sequence isolated from the Sargasso Sea
gatcgccagatgggcaactccgaagtgggtcacgtcaacctgggcgcgggccgtatcgtgtatcaggaccttacccgtctggacgttgaaatcaaagaacgtactttcttcgctaacccggtgctgaccgatgcggtcgaccaggcaaaaaatgccgggaaagcggtacacatcatgggtctgctctctgctggcggcgttcacagccacgaagatcacatcatggcgatggtagaaatggccgctgaacgcggcgctgaaaaaatctatctgcacgctttccttgatggtcgtgataccccgccgcgcagcgctgaacattcactgcagaaatttgaagagaaatttgccgcactgggcaaaggccgcgtagcgtccatcatcggtcgttactacgctatggaccgcgacaaccgttgggatcgcgtagaacaggcttacgatctgatgacgctggcgaagggcgagttccagttcgctacggcggttgaaggtctgcaggctgcttatgcccgcgacgaaaacgacgaattcgtcaaagcgaccgtgatccgtgccgaaggtcaggcagatgctgctatggaagatggcgatacgctgattttcatgaacttccgtgctgaccgtgcgcgtgaaatcacccgtgcgtttgttaacgctgatttcgacggcttcgcccgtaagaaagtcgttaacctcaactttgtgatgctgaccgaatacgcggcagacatcaaaactgcggttgcttacccaccagcatctctggccaacacctttggtgagtggatggcgaagaacgaaaaaacgcagctgcgtatttccgaaactgaaaaatatgcgcacgtgaccttcttcttcaacggcggcgtagaagaaccgttcaaaggcgaagaccgcatcctgatcaactctccgaaaagttgcgacctac

SEQ ID NO: 291906 - DNA, 721 bp, Unknown
  Bacterial polypeptide expressing nucleotide sequence isolated from the Sargasso Sea
atgagcaaattaatacttactagacacggtcaaagtatctggaatgcagaaaatagatttactggatgggtggatgtagatctatcagaaaagggtatagaagaggcagaaaaatcaggagagttaataaaaaaactgaatatcaaaattgatattttttatacctcttttttaaaaagagcgattaaaactttaacaactatacttaaaaaaaataatcttgagctaaaatttaatactgcatggcagttaaacgagagacattacggatcattaactggacttaacaaagatgaaactaaaaaaaaaattggagaggaacagtttaaaaaatatagaagatcatgggatatacctccgccccctatgccagaagatagtaaatatttatcaaatttcagtccactaaatggaagtattcctgttggtatgactccatttgctgagtctttaaaaaatacttatgaaagggtaattcctttttatgaaaatgagattaaaaagaatctatctgaaggtaaaaatattttaatctcagcacatggaaattctttaagagcgctatgtaaatttttatttaaaatttcagatactaaaatcaatgaattagaaattccaactggcaacccattagtgattgaatttgaaaaaaatttaaaggttaaaaaatatttttatttagatgaagctagagctaaaaatataatttttaatcagtaat

SEQ ID NO: 291907 - DNA, 854 bp, Unknown
  Bacterial polypeptide expressing nucleotide sequence isolated from the Sargasso Sea
tatagaaaaaagttatgccaaaaacataaccgatgaatttatagagcccatacgtatgtctgaaaactatcttaaagatggggatagtttgatttgctttaactttcgtccagatagagcaaggcaaatagtaaaatccctttctatcaaagaattctcagactttgataggaaaaattttccaaatctagattttgtcacttttactcaatatgatccgaactttcccgttaaagttgcatttcctcctgaatcactcaataattttataggccaaatagtatcagaaaacggacttaaacaatatagaaccgcggaaactgaaaaatatcctcacgtaacatactttttcaatggaggagttgaaattcctttacctggagaagagagacatttaattccatctccaagagttgcaacttatgatatggaacccgaaatgtctgcggaggaattaactattagttgctctaaagcaattaaaagtgggaattatgcttttgttgtaatcaattttgccaatcctgatatggttggtcatacaggcaacatggatgcaacaattaaagctatagaaaaagtagataaatgtgtaggtcaaatagttaatgctactggagaaatgggcggaagcattgttattacagccgatcatggtaacgcagagttaatgaaaggatctgaaggagaaccatggacagcacacacaataaataaagttccattaattttgattgaaggtgaaaaaagaaaaataccaaatatgggaaatgaaattaatttaagagaaaacgcgggcttagcagatattgctccaactttattgcaattattaaatctcccaaacacctaga

SEQ ID NO: 291908 - DNA, 718 bp, Unknown
  Bacterial polypeptide expressing nucleotide sequence isolated from the Sargasso Sea
aatgagtcatttaattttagttagacatggtcaaagtgagtggaatttggaaaataggtttactgggtgggtagatgttgatttagcgccaaaaggtaaattagaagcttgtaaggctggagaattaattaaagaactcaatataaatataaatcatacttttacttcatttcaaaaaagagcaattgatactttgaaacttatattaaatactatgagaattaaggatgataatattattaaggcctgggaattaaatgaaagacattatggttctttaactggattaaataaagatgatatgaaaaaaaaattaggcgaagataaagttcaaatttttagaagatcttgggatataccgcctgaaccattaagtaaaaataatccttaccatccattaaatattgaaatttataaggatataccaaaagaacaaataccagatactgagtctttaaaaaatacttacgaaagagtaataccttattttaaaaaaaatattaaagataaaataaaagataatgtaatagtttctgctcatggaaactcaataagatcactttgtaaatttttatttgatattgatgacaaaagtatttcaaaattggaaattccaacaggaaatcctttagttttaaaatttgataataatgctaatgtacttgaagcaaaatatttagatcaagaaagagcaaaaaatttaataaaatttgtttaa

SEQ ID NO: 291909 - DNA, 811 bp, Unknown
  Bacterial polypeptide expressing nucleotide sequence isolated from the Sargasso Sea
agtgatggtagagatacttctccatatggatcacttgattatcttaaggttataaataaaggaattaatgatgttggaattggtgaaatagctacccttattgggaggtattatgcgatggatagagataaacgatgggataggacagagctagcttaccgtctttttgttaacggtgaaggtgaaaatgttaattcaattgaaaatgctattcgtcaatctcataatgatggaattacagatgaatttattaaacctttcgttattgatggagtgaatggtatgattagttctgacgatgctatactttgctttaattatcgtgctgatagaatgcgtcaaatttgttcagctcttggtggtaagacatttactgactttaatagaggaaacactccttttcatttaacttcgatgacttcataccatgaagattataattttccaattctatttcaggataaaaatattgatatgaagctaggtcaggtaattgaaaaattaggtttaagacaattaagagtagctgaaactgagaaatatgcgcatgtgacttactttcttaatggaggtgatgaagatccttatgatgcagaagaaagactcttgattccttctccaaaggtagctacatatgaccttcagccagagatgagtgcattcggaatccgagatgctgtattaaaagccatggatgaagaacaaagtgatgcaatagtagtaaatattgctaatacagatatggtcggtcatactggaaatcttaatgctactataagggcagctgaagttgcggatgaagtattagggg

SEQ ID NO: 291910 - DNA, 529 bp, Unknown
  Bacterial polypeptide expressing nucleotide sequence isolated from the Sargasso Sea
tatgtcaaagattagcagcaaaaatataaaaaggttaagtgttcctcagagccctgtagttttagcaatactagacgggtggggatatcgaaaagaaaaatcagataatgctattagaagtgccaatacaccaataatggactcattatggcatgcttatccacacacccttataagtgctagtggatctgatgtaggcctcccagatggtcagatgggcaattcagaggtggggcaccttaccattggttcgggaagaataatacaacaagaacttgtgaggatttcaaatattgtaaaaaataatcaattaggcttggtaaatgagttaaaagatatggcagattcattaaagaaaaataattctactttgcatatcacgggattatgttcggatggaggagttcatagccatattgatcatttattaggtctaataaaatgggcatctgaaaatgaaatcaaaaaagttgcaatccatattattactgatggtagagatactcctgcaaaaagtgcctctaaatat

SEQ ID NO: 291911 - DNA, 661 bp, Unknown
  Bacterial polypeptide expressing nucleotide sequence isolated from the Sargasso Sea
tattcgactgaactggatgcgtttatcacaccgctctatccgccagttgatcttgctgacacattaggcgcggttgttgcagcggcagggcgcagccaacttcggcttgcggaaaccgaaaaatacccgcatgtcacatttttctttaatggcggtaacgaagcccggtgcaaaggcgaagagcgcaccttggtgccatcgccaaacgttgcaacctatgaccaacttccgcaaatgagtgctaacggagtattggctaaagccgtggccagcctcaagtctaaggcacatgatttattagtaatcaattttgccaatcctgatatggtcggtcatacaggtgacctagcggcggctatcactgcggttgaaactgtcgactcgtgtattggtgagttagtcgcagcaatagaagcggcagacggacaaatgttacttactgccgatcatggcaattgtgagatgatgtgggacagcgatgccgagtcgccgcatacagcccatacgacaaatttggtgccgctaattctgatcaacggcaatgacgggacatcactcactgacggaagactagctgatctagccccaagcctgttggccattatgggcattgatcaaccgtctagcatgacaggtaaatcactgttgacgaggaaataaa

SEQ ID NO: 291912 - DNA, 514 bp, Unknown
  Bacterial polypeptide expressing nucleotide sequence isolated from the Sargasso Sea
catgaccagtcgcaaaaaacctttggtattgttaattcttgatggctggggctaccgggaagagaaggataataatgctattgcccaagccagtacgccggtaatggatagattatggcgcgactatccacacaccctgatctcaggctcaggccttgatgtgggcttgccagacggtcagatgggtaattccgaggtggggcatgtgaaccttgggtccggccgcattgtgtatcaggattttacccgcatcaccaaagcgatcgatgacggtgacttttttaccaacccggtgttagtaaccgcagtagacaaggcaaaacaacaacataaagctgtgcacattatgggtctgttgtcgccaggtggtgtgcacagccacgaagaccatatactggccatgatcaaacttgcagagcagcaaggtgccagtcccatatacctgcacgccttcctcgatggacgtgatacaccaccgagcagcgctaaaaattcactggaaaaaattcaggcg

SEQ ID NO: 291913 - DNA, 529 bp, Unknown
  Bacterial polypeptide expressing nucleotide sequence isolated from the Sargasso Sea
gcgggtggcccctacgatctgtcacccgccatgtcggcggatcagctcacggacagctgcatcgctgctattgaccagggcacttacagcctgatcgtgatcaactacgccaaccccgacatggttggccacaccggcgtgatggatgcggccaccgaagctattgccactgtcgatcgctgcatcggacggttgctggacgccgtcggtcgccatggcggcaccattctgatcaccgcggaccacggcaacgccgaactgatgcagggccccgatggtcaggcctggacggcccacacaaccaaccctgtgccctgcatcctggtggagggtgaacagcgcaagctgccgggtcattgcaacgacatcagcctgcgtgaggacgggggacttgccgacattgcaccgaccctgctgcagatcctcaaactggagcaaccggcggcgatgacgggccgtagcctgatcgagccggtatcgaatgtcgatccgtcgcctttgtccgcccgcttacctcttcccgtctgat

SEQ ID NO: 291914 - DNA, 772 bp, Unknown
  Bacterial polypeptide expressing nucleotide sequence isolated from the Sargasso Sea
gccctcgtcgacgatactttcgatgttttttcaaggcctaggactgtcgcctggtctgatgcggtcggcatggtggagtattctgatgcactaaaccggttcatgagaacaattttccccgcaaaaaaaataaacaatgtgatgggtggagtggttgctgcagccggcttaaaacagcttcgaatcgcagaaactgagaaatatgcccatgtgacgttcttctttaatggtggggaggaaagaaatttcgatggcgaagacagaattcttgtggagtcacccaaagtagaaacttacgatttacagccagaaatgtcggcggccgaagttaccgacaaactggttgccgctattgagagcgaaaaatatgacttcatcttagttaattacgcgaatacagatatggtcggtcacacaggtattctcgaagccgccatcactgcggtagaagcagtggaccattgcctgggcaggctggaaaccgcaataaaatcggttggcggcgggctccttgtcaccgctgaccatgggaacgccgaaataatgcttgatcccgatattggtggccctcatacagcccacacctgcaaccttgttccactcattctagtcggcgatgggctagctggtgttagccttgaagatggaaatctggcagatgtgtcacctacggtgttagcgttaatgggattagatctgcctgccgaaatgactggccgcccacttcttcgattcacggagtctacagatacccatgctgccactggttagt

SEQ ID NO: 291915 - DNA, 938 bp, Unknown
  Bacterial polypeptide expressing nucleotide sequence isolated from the Sargasso Sea
tatgtcagctaatagcgtatcacgaccagtggttctctgcgttcttgatggttggggttggcggttggaacaaaccgaaaatgcaatcgccctagcagagacgcccgttttcaaccgaatgataaaagaatgtcccaacgccctcttaaagacttcaggaattgatgtaggcttgcccgtcggccaaatggggaattctgaagttggacatatgaatctgggtgctgggcgcgtcgtcaatcaggacatccaaagaataaatcaagcactaaaggagggtaaacttcgatacaaccctattgttgagaagctaataagtcaccgcagcacctgccatttgatgggtctattatcaccgggcggggtccattctcatcaagatcaaatcctcgaattggcaaatatattgaatgaagctggagtaaaggtctctatccatgcttttctggatgggcgagacactcccccaaaaagtgcactacaatttcttacggacttttgcgaaaaaatctctcaatttgactcggtatctattgccacagtaacaggtcgattttatgcaatggatcgtgataatcgttggaaccgtgtcaagaaggcatatgacgcgatagttagtggtgaaggtgaaaaagcaaaaacaccaattgatgccataagaaaaggctataacgacaaccttagtgacgaatttattttacccacaataattgaccattatgatggaatgatggatggggataccttattgatggcaaatttccgttctgatcgagcgagagaaattttaactgcgctattagaaccagattttatacattttaaacgatcaaaaactgtctcaatcagttgtgcgaccggcctagttcagtattcagagactctagatcatctaatgtcatcaatatttttgccagaacaacttgataatttatttg

SEQ ID NO: 291916 - DNA, 715 bp, Unknown
  Bacterial polypeptide expressing nucleotide sequence isolated from the Sargasso Sea
atgaaaaataaacttatactccttaggcatggtgaaagtatatggaatctagaaaatagatttacagggtggacagatgtagatttaacagaaaatggaataaatgaagctaaaaatgctgggattttattatcaagtcataatattaaaattgatcttgtctatgtatcttttctcaaaagagctattaaaacgtacaaaatatgcttaaaacagctagaaatagataatatagacttattatcgcactggaggctaaatgagcgtcattatggcaatttgcaaggtttaaataaacagcaaactgctaaaaaatttggcgatgaccttgttcttaagtggagaagaagctatgatacgccgccccctccaatgagtcctgatgataggcgccaccccagacatgatattttgtataaagatatagatcctaaaaaactaccgaacgctgagtcattaagggatacacttgaaagggttaagccattattgataaatcaaattattccactgttcaaaaaaggtcaaaatatcatgatagttgcacatggtaattcattaagagcaattataaaaatattgaaagatatatccaataaagatataattaatttaaatatacccacaggatttccttatatttttgaatttgataataatttagatgttaagaaagaaaattttctaggaaatcaagagaaaattttaaaaaaaa

SEQ ID NO: 291917 - DNA, 664 bp, Unknown
  Bacterial polypeptide expressing nucleotide sequence isolated from the Sargasso Sea
atgccgcctgtagttttatgcatattggatggatggggtttgtccgaagataagattagcaatgctccagtgctagcagaaacgcccaattttgatcacttatggaaaacttgcccaaaaacgacacttttaacacatgggctagatgttggattaccaaaaggtcaaatgggcaactcggaagttgggcatatgaatattggtgccggcagaataatttcaatggatctaggtcaaataaatctagaaatagaaaataagaattttttaagaaatgaagctctacttaatcatatccaagatataaaaagaaataatggtcgcgcccacttaatgggtttattttcaaacggtggtgtacatggacacattaatcatttgattacatcaattcggctatttcagtctcatgacattccaataatcctacacctcatcactgacgggcgtgatgtcgcgccgcaatcagcaatagaatttgttaatgaaataaatccacttataaatgagaaagttcaggttggaacagtaattggtcgctactatgcaatggatcgtgacaatcgctgggagcgtgtggaactagcttacaatgcaatagtttttggaaatagtaaccaagaaacatccaatatgaaatggctattgcgagagcatacgagac

SEQ ID NO: 291918 - DNA, 487 bp, Unknown
  Bacterial polypeptide expressing nucleotide sequence isolated from the Sargasso Sea
aatgtctgcagaagaattaactattatttgctctaaagcaattaaaagtggaaaatatgcttttgtagtaatcaattttgctaatcctgatatggtaggtcacacaggcaatatgaatgcaacaattaaagctattgaaacagtggataaatgtgtaggtcaaatagttaacgctactggtgaaatgggtggaagcattcttataacagctgatcatggtaacgcagaagtaatgaaaggttctgcgggagagccatggactgcacatactacaaataaagttccattaatttttattgagggtgaaaaaagaaaaatacctaatatgggaaatgaaatttacttaagggataatgctggcttagcagacattgctccaactttattgcaactattaaatctcccaatcccaaaagaaatgactggaaaatctctaattaaagaaatcgagttaaaaggttataataaggttgtacaacacgtttaa

SEQ ID NO: 291919 - DNA, 621 bp, Unknown
  Bacterial polypeptide expressing nucleotide sequence isolated from the Sargasso Sea
atagaaccgcggaaacagaaaaatatcctcacgtaacatacttttttaatggaggagttgaaattcctttacctggagaagagagacatttaattccatctccaagagtcgcaacttatgacatggaacccgaaatgtctgcggaggaattaactaggagttgctctaaagcaattaaaagtggaaattatgcttttattgtaatcaattttgccaatcctgatatggttggtcatacaggcaacatggatgcaacaattaaagctatagaaaaagtagataaatgtgtaggtcaaatagttaatgctactggagaaatgggtggaagtattcttattacagccgatcatggtaacgcagaagtaatgaaaggacctgaaggagagccatggacagcacacacaataaataaagttccattaattttgattgaaggtgaaaaaagaaaaatcccaaatatgggaaatgaaattaatttaagagataatgccggattagcagatattgctcccactttattgcaattattaaatctcccaataccaagagaaatgacaggtaaatctcttattcaagaaattgaattaaaaggttataataaagtcgttcaacatgtttaaa

SEQ ID NO: 291920 - DNA, 817 bp, Unknown
  Bacterial polypeptide expressing nucleotide sequence isolated from the Sargasso Sea
catgactataccctatgttcttatcgtacttgatggctggggccatcgtgacgggggtcaggataatgcaattgccgtcgccaaaacgccaacatgggatcacgtctggcagaacaggcctcacagcctgatttccgcatctggattcgacgtgggcttgccggatggccagatgggcaactccgaggttggacatatgaaccttggcactggtcgtgtagttgatcaggatttcacacgcatcaacaagtccatagaggatggccgtttcaacaacaacgaaacgttgctcggactagtctctcaactccagcggtcaagaaagagtctccatatattcgggttattatcaccaggtggggtacatagccacgaattgcagattaaggccgctatcgatcttgctttcgaccatggcgtcagcaaagtatacctgcatgctttcctagatggtcgagatgtaccgccgagttctgccaaagcctcactcgttgcggccgaaaagtggatacgagatcgcggcactggtggcatcgccacaataatgggacggttctatgccatggaccgagatcagcgttgggatcgcacagaacaggcatttaacgcggtcaccgaagcacacgccgtttttaacggaactaatgcactatcagcgcttcaggctgcctacgatagaggggagacagatgaatttgtgcaaccgaccacaatcaacgtggacggtgcttcggttcgtatggatagtggtgacgcagttctcttcatgaactttcgcgctgatagagcacgacagttaaccagaagcttcgtgagc

SEQ ID NO: 291921 - DNA, 631 bp, Unknown
  Bacterial polypeptide expressing nucleotide sequence isolated from the Sargasso Sea
atgtctacctgctatccaaaaccaaaaattaaaaataccctaggagaatgggtatcaatggcaaagaaaaagcaatttcgattggccgaaactgaaaaatacccacatgtcacattttttttaaacgggggttatgagaagcctttaaccggggaggctcgaaatatgcctcactcgcctaaagtggcgacatatgatttaaaacccgaaatgtcctccaaagcagtaaccgaggccttggtggacgccattgaaagtaattatgacctaatagtaactaattatgcgaacccagatatggtaggtcatactggaaatttaagtgcggctattcaggcttgcgaagccgttgataaaggtattgggcgtttggtgggagcacttaaaaaagtagatggaactttatttttaacagccgatcatggtaactgtgaagttatgactgacccttttactggaaaccctcatacgtctcacactttaaatccagttcctgccatcttgtttaatggacctaaaaataaatctctatccagtggaggtcgcctttctgatattgcacctacaattttagaacttatggatttaaaaccaccccctgaaatgacaggaaattctttactagtatgat

SEQ ID NO: 291922 - DNA, 559 bp, Unknown
  Bacterial polypeptide expressing nucleotide sequence isolated from the Sargasso Sea
caatttcgattggcagaaactgaaaaatatccacatgtcacattttttttaaacgggggtgatgaaaaacctcgcgctggggagactcgaaatatgcctcactcgcctaaagtagctacatatgatttaaaacctgagatgtcctccgaagcggtaactgaggctttggttgacgccattgaaagtaattatgaccttatagttgccaattatgctaatccagacatggtagggcatacaggaaatttaaatgctgccattgaagcttgcgaggcagttgataaaggtcttgggcatttggtgggagcacttaaaaaagtagatggaactttgctcttaacagctgatcatggtaactgtgaggttatgactgacccgtctactggaaatcctcatacgtctcacactttaaatccagttcctgcaattttgtttaatggacctaaaaacaagtctttatctgatggaggtcgcctttccgatattgcacccacaatattagaacttatgaatttaagaccaccacctgaaatgacaggaaattctctattattatgat

SEQ ID NO: 291923 - DNA, 574 bp, Unknown
  Bacterial polypeptide expressing nucleotide sequence isolated from the Sargasso Sea
tctggtttgttgttaaaaggacaaaactttaggtttgatgtagtttttacttctgtcctaaaaagagccattaagacaatggaaatctgcctcagtgaaataggggccatcgatattcccaccattcatgactggcgtctcaacgagcagcattatggggctttagaaggattgagcaaaactaaaacggcagaaaaatatggggaggaacaagtctttatctggcgaagaagttaccaggtttctcctcttgctatggatctaaatgataaaagacatccacgatttgatcaacgttatcaagagctgggacagcatcagcttccttcaacagaaagcttaaaagacacattgcatcggttacttccactatggaatgaatccatagagccatccattaaatcaggaaaaaaggtgttgattgttgcacatggaaattctctccgcgcgctggttaaacatctcaacggaatttctgatgatgaaattaaagatttgaatattcctactggtgctccatatgtttttgaattagatagtcaattaaaatcacaaaaaaattattatttataat

SEQ ID NO: 291924 - DNA, 751 bp, Unknown
  Bacterial polypeptide expressing nucleotide sequence isolated from the Sargasso Sea
aattatccaaatctagattttgtcacttttactcaatatgatccgaactttcctgttaaagttgcatttcctcctgaatcacttaataattttttaggccaaatagtatcagaaaacggacttaaacaatatagaactgcggaaactgaaaaatatccacacgtaacatactttttcaatggaggagttgaaattcctttacctggagaagagagacatttgattccatctccaagagtggcaacttatgatatggaacccgaaatgtctgctgaggaattaactattagttgctctaaagcaattaaaagtgggaattatgcttttgttgtaattaattttgccaatcctgatatggttggtcacacaggcaacatgggtgcaacagtaaaagctatagaaaaagtagataaatgcttaggtcaaatagttaatgctactggagaaatgggtggaagcattcttattacagccgatcatggtaatgcagaggtaatgaaaggagctgaaggagaaccatggacagcacatacaacaaataaagttccactaattttgattgagggtgaaaaaagaaaaataccaaatatgggaaacgaaattaatttaagagataatgcaggtttagcagatattgctcccactttattgcaattattaaatctcccaataccaagagaaatgacaggcaaatctcttattcaagaaattgaattaaagggttataataaggttgttcaacacgtttaaa

SEQ ID NO: 291925 - DNA, 316 bp, Unknown
  Bacterial polypeptide expressing nucleotide sequence isolated from the Sargasso Sea
tatgtcaaagattagcagcaaaaatataaaaagattaagtgttcctcagagccctgtagttcttgcaatattagatggatggggatatcgaaaagaaaaatcacataatgctataaaaagtgccagtacaccaatcatggactcattgtggcatgcttacccccacaccctcataagtgctagtggatctgatgtaggcctcccagatggtcaaatgggcaattcagaggtaggacatcttaccattggttcgggaagaataatacaacaagaacttgtaaggatctcaaatgttgtaaaaaataaatcaattagg

SEQ ID NO: 291926 - DNA, 510 bp, Unknown
  Bacterial polypeptide expressing nucleotide sequence isolated from the Sargasso Sea
tatgtcaaaaactagcagcaaaaatataaaaagtttaagtgtacctgaaagtccagtagtacttgcgatattagatggatgggggcacagagaagaagaactagataatgctattaagactgcaaatactccagttatggatgccttgtggcatgcttatccacatacactcataagtgctagtggggctgatgttggtctaccaaatggtcaaatgggtaattctgaagtagggcatcttactattggatctggaagaattattcaacaagaactggtaagaatcacaaatattgttaataacaataaattaaatgaagttgaagaattaaaaaaaatagctttttccttaagaaagaacgattccactttacatctcacaggattatgttcagatggaggagttcatagtcatattgatcatttattaggcctaatcaaatgggcctcagaagctggaattgaaaaagtggcgatccatgtcattactgatggaagggatacaccagc

SEQ ID NO: 291927 - DNA, 610 bp, Unknown
  Bacterial polypeptide expressing nucleotide sequence isolated from the Sargasso Sea
tatgttcaaacttgtcctattacggcacggagaaagcgagtggaatctggaaaatcgtttttccggatgggccgatatcggactcacagagaaaggaatgtcagaagcgaaacgttctggcttgttgttaaaaggacaaaacttcaggtttgatgtagtttttacttctgttctaaaaaggaccattaagaccatggaaatctgcctcagtgaaatggggtccgtcgatattcccaccattcatgactggcgtctcaacgagcagcaatatggggctttagaaggattgagcaaaactaaaacggcagaaaaatatggggaggaacaggtctttatctggcgaagaagttaccaggtttctcctcctgacctggatctaaacgataaaagacatccccgatttgatcaacgttatagggagctggtacagcatcagcttccttcaacagaaagcttaaaagacacattgcatcggttacttccactatggaatgaatccatagaaccattcattaaatcaggaaaaaaggtgttgattgttgcacatggaaattctctccgcgcgctggttaaacatctcaacggaatttctgatgatgaaattaaagat

SEQ ID NO: 291928 - DNA, 670 bp, Unknown
  Bacterial polypeptide expressing nucleotide sequence isolated from the Sargasso Sea
atgtataaacttatacttcttcgccatggagagagccaatggaacttagagaataaatttactggttggactgatgttaatttatcaaaaaatggcttagctgaagcaaaaaatgctggaattctactaaaagataataattatttgtttgacctagcttacacatcatgtttaaagcgcgcaaatttaaccatggatatttgtttaaatgaaatgaactgctcaaatattgaggctatatatgactggagattaaatgagaggcactatggtgcattgcaaggtctaaataaatctgaaactgcaaaaaaatttggtgatgagcaagttttcatctggaggagaagctatgatgtgcctccgcctcctttacaattagatgacgataggcatccagcaaatgattctaaatataataatatcagtgatttactaccaaattcagaatcattaaaagatacatacaatagactatttccacttttaaccaaaaaaatacttgggaatgttaaatcagggcgaaaaatacttattgttgctcatggcaattcgctacgtgcaattattaaatatcttgataagatatctgatgatgaaattattaatttgaatattccaactgggcaaccgctagtatatgaattagatgctaatttatctcccaattaaa

SEQ ID NO: 291929 - DNA, 583 bp, Unknown
  Bacterial polypeptide expressing nucleotide sequence isolated from the Sargasso Sea
tatgtttaaacttgtcctattacgacacggagaaagcgagtggaatctggaaaatcgtttttccggatgggccgatatcggactcacagagaaaggaagatcagaagcgaaacgttctggctttttgttaaaagaacaatacttcaggtttgatgtagtttttacttctgtcctaaaaagggccattaagaccatggaaatctgcctcagtgaaatggggcccatcgaaattcccaccattcatgactggcgcctcaacgagaagcattatggggctttagaaggattgagaaaaactaaaacggaagaaaaatatggggaggaacaagtctttatctggcgaagaagttaccagatttctcctcctgctctggatctaaatgataaaagacatccacgatttgatcaacgttatcaagatttgggacaacatcagcttccttcaacagaaagcttaaaagacacattccaccggttacttccactatggaatgaatccatagaaccatccattaaatcaggaaaaaaggtgttgattgttgcacatggaaattctctccgcgcgctggttaaacatctcaac

SEQ ID NO: 291930 - DNA, 694 bp, Unknown
  Bacterial polypeptide expressing nucleotide sequence isolated from the Sargasso Sea
aaagtggcatttcctcctgaatcactcgataattttataggccaaatagtttccgaaaacggactaaagcaatacagaactgcggaaacagaaaaatatcctcacgtaacatacttttttaatggaggagttgaaattcctttacctggggaagagaggcatttaattccatctccaagagtcgcaacttatgacatggaacccgaaatgtctgcggaggaattaactagtagttgctctaaagctattaaaagtggaaattatgcttttatcgtaatcaactttgccaatcctgatatggttggtcatacaggcaacatgaatgcaacaattaaagctatagaaaaagtagataaatgtgtaggtcaaatagttaatgctactggagaaatgggtggcagtattcttattacagccgatcatggtaacgcagaagtaatgaaaggacctgaaggagagccatggacagcacacacaataaataaagttccattaattttgattgaaggtgaaaaaagaaaaatcccaaatatgggaaatgaaattaatttaagagataatgccggattagcagatattgctcccactttattgcaattattaaatctcccaataccaagagaaatgacaggtaaatctcttattcaagaaattgaattaaaaggttataataaagtcgttcaacatgtttaaa

SEQ ID NO: 291931 - DNA, 721 bp, Unknown
  Bacterial polypeptide expressing nucleotide sequence isolated from the Sargasso Sea
aatgagtcatttatttttagtaagacatggtcaaagtgagtggaatgcagagaatagatttactggttgggtagacgttgatttagccccacaaggcaaattggaagctgtaaaatctggtgagttaataaaacttactaaaattaatttagattttttttatacttcgttccagaaaagagcaatagaaactctaaaattaatattaaacactttaagaataaaagatgaaaaggttataagagcatggcaattaaatgagaggcattatggtgcgcttacaggtttaaataaagataaaatgaaaaagacctttggagaaaaaaaaattttagaatttagaagatcttgggatatctcaccagaacctcttaatagaaataatccttatcatccaattaatatcaatgtttacaatagtattcctcgtaatgaaattccagatactgagtcattaaaaaatacttatgaacgtgttattccatattttaaaaaaaatatcttaccctcactaaagcaaaaaaaaaatattttaatatctgcgcatggaaattctttaagaagtttgtgtaaatttctttttgaaattgacgataaaaatatctctaaattagaaattccaacaggtaaccctttaataattgaatttaataatgattttaaaataaaaaatgtagaatatttagataaaactaggatgaaggatttaatagttttttaa

SEQ ID NO: 291932 - DNA, 848 bp, Unknown
  Bacterial polypeptide expressing nucleotide sequence isolated from the Sargasso Sea
taaagcaccaaagcccgtcgttctctgtatcctggacggttggggtgacgggcccgatacatcgaccaatgcgattgcgcgggcggaaacgccgaactgggacgccatgtttgcatcttatccgagagcacgactggatgcatctgaacatcacgtcggtttgccagatggtcagatgggaaattcagaggtcggacacatgaatctcggcgcgggtcggatcgtgctgcaggacctgccacgcatcgacgccgccatagatgacggttctctcgcgaatcatgacggtctgatcgcgtttatcgataagctcaagtcaagtggcggtacggcgcatatcgcggggttaatgtcgccgggcggtgtccattcccatcaaaaccaaattgccgcgttggcgcgctacctcactgcgtccggcgtgcccatcgccgtacatgccttcctcgatggacgcgacacgccgccgacatccgcggcggagtatctcgaggcttttaatcgcgcctccgagggcgcgcctattgcgacgatctgcgggcgctattttgcgatggatcgcgacaatcgctgggaccgggtcgagcgtgcctacaggctcttggttgacgccgatggtgcgcgcgcggacgatccggtagaagcgatccgaggtgcatataaggctgatgttaccgacgagttcgtcgagccgaccgtcattggtgggtttgctggcatgcgcgacggggacgggttgttgatggcgaatttccgtgccgatcgcgtccgagaaattctgtcggtattgcttgtctcagactttgacgattttgatcggggggagggtgtcaagtttgcgggaactc

SEQ ID NO: 291933 - DNA, 755 bp, Unknown
  Bacterial polypeptide expressing nucleotide sequence isolated from the Sargasso Sea
catgacagacttcgaagcaccaaagcccgtcgttctctgtatcttggacggttggggtgacgggccggacacatcgactaatgcgattgcgcgggcggaaacgccgaactgggacgccatgctggcatccaatccgagcgcgcgcctgtacgcatctgaatatcacgttggtttgcccgatggtcagatggggaattcagaggtcggacacatgaatctcggcgcgggtcggatcgtgctgcaggacctgccacgcatcgacgcagccataaataacggttctcttgcgcatcatgacggtctgatctcgtttatcgataagctcaaatcgagcggcggtactgcgcatatcgcggggttgatgtcgtctgggggtgtccattcccatcaagaccaaattaccgcgttggcgcgctacctcactgcgtccggtgtgcccatcgccgtgcacgccttcctcgacgggcgcgacacgccgccgacatccgcagcggagtatctcgaggcttttattgccgcctcagagagcgcgcctattgcaacgatctgcgggcgctattttgcgatggatcgcgacaaacgctgggaccgggtcgagcgtgcctaccggctcctggttgatgccgatggcgcgcgcgcggacaatccggtagaagcgatccgagcggcttatgaggctgctattaccgacgagttcgtcgagccgaccgttatcggtgagtatgccggaatgcgcgacggtgacgggttgttga

SEQ ID NO: 291934 - DNA, 721 bp, Unknown
  Bacterial polypeptide expressing nucleotide sequence isolated from the Sargasso Sea
atgactaaactaattctcataagacatgggcaaagtatttggaatgctgaaaataggtttaccggttgggtagatgtagatctttcagataaaggagtcctggaagcagaaaaatcaggtcagattatagaagatttaaacattaaaatagatatttcttatacatcgtatttaaaaagggcgattaaaactctaacaactattcttaaaaaaaataacctagaacttaaattcaatactgcttggcaacttaatgaaaggcactatggatccttaacaggtttaaacaaagaagaaacaaagaataaaattggtgaagaacaattcaaaaaatacaggagatcctgggatatagctcctcctcccatggaggaaaaaagtgaataccaaaatttatttagtcctctgaatgctagtatacctgtgggaatgactccatttactgagtccttaaaaagtacgtatgacagggtggtgcctttttatgaaaatgaaattaagaaaaatcttttagaaaataagaatattttaatttcagctcatggaaactctctaagggctttatgtaaatatttatttaatatttcggatacaaaaataaacgaattggaaataccaacaggtaatccactattaattgaatttggtgaaaatttaaaaattgaaaaatattattatttagacaagtccagagctaaggatataatttttaatcaataat

SEQ ID NO: 291935 - DNA, 761 bp, Unknown
  Bacterial polypeptide expressing nucleotide sequence isolated from the Sargasso Sea
tttaaattttagaacggaccgtggaagagaattgactcaagcgctttctcaaaaagcatttcccaatcatgatatggaaccactatcattacgctatgttactctaacaaattacgatgagtctttcatcggcattgatgtgatttttgataaacataatttaagtgatacattaggagaagttttgtcaaaagcaggaaaatctcaagttcgtattgctgaaacagaaaagtatccccatgttacctttttctttaatggaggacgagaagcaccctttgagggcgaagatcgaattctttgtccctcccccaaagtagcaacctatgacctaaaacctgaaatgagcgcatatgagataagagatgctattactagtaaaattaagtctgatgttccagactttatatgtttaaattttgctaatcctgatatggtaggtcatacaggaaatttaaatgcagctatacgtgcctgcgaggtaatagacgaatgtaccgctactgtggtgaaaacagccttagcaaaaaactatgccattctaattattgccgaccatggaaattgtgaaactatggttaattcggatggtaccccaaacactgcgcacactactaatccagttcctgtaattttagttgattctgaaaagaaaaaaattaaagaagggatcctcggagatattgctccaactatcttagatttattggacattgatgttcctgataaaatgacccaaaaatccttaatccttaaataat

SEQ ID NO: 291936 - DNA, 709 bp, Unknown
  Bacterial polypeptide expressing nucleotide sequence isolated from the Sargasso Sea
atgaaaaataaacttattcttcttagacatggcgaaagcgtatggaatcttgaaaatagatttactggttggactgatgtagacttaactaaaaatggagaaaatgaagctaaaaaagctggttttttattatcagataataatattcattttgatttagtgtatgtatcttatcttaaaagggcaattaaaacgcttaaaatatgtttaaaacagctaaaagtgattgataatgaatcagtttaccactggaggttaaatgagcggcattatggaaatcttcaaggattaaataaatctgatacggcaaaaaaatatggcgatgaccaagttttattatggaggagaagctatgatgttcctccccctaaaatggacagcaatgataagcgtcacccgaaatatgataatctatataaaaatgttgaaaggcaaaaacttcctgattctgaatcacttgaagatactcttaatagagttaaacctttatggttgagtcaaattgttcctgaattaaaacatggtaaaaatattatgattgtagctcatggaaattctttaagggctattgtaaaaattttgaaaaaaatatctgccaaagatataattggcataaatattccgacgggaattccatatattttcgagtttaatgataattttagtgttaaaaaggattattttttaggtagccaagaagatatttgaa

SEQ ID NO: 291937 - DNA, 667 bp, Unknown
  Bacterial polypeptide expressing nucleotide sequence isolated from the Sargasso Sea
gctgaaaataaatttacaggctgggtagatgtcgacctttcatcaaaaggtgtggaagaagctgaaaaatccggggatttgattaacaagattggaattcaaattgatatttcttatacatcttacttaaaaagagcaattagaactttaacgactattcttaaaaaaaataatcttaaattagaatttaatactgcttggcaacttaatgagagacattacggatctctaaccggattaaataaagaagaaacaatgaaaaaaattggggaaaaactatttaaaaaatatagacgatcttgggatattgccccgccccctatgcaaaatgataatcaacaccaaaagaattttagccctttaaataatagtattccggttggtatgataccttatactgaatccttaaaagacacctataatagagtagttcctttttttgaaaatgaaattaggaaaaatcttttaaacaaaaaaaatattttaatttcagcacatggtaactcattgagagctttgtgcaaatatttgtttaaaatttctgatttaaagattaacgaattggagataccaactggtaatcctttattaattgattttgacgaaaaattagaaattaaaaaatatttttatttagataattctagatctaaaaatattatttaat

SEQ ID NO: 291938 - DNA, 483 bp, Unknown
  Bacterial polypeptide expressing nucleotide sequence isolated from the Sargasso Sea
aatgaataaattagtattacttagacatggacaaagcacatggaatctggaaaatagatttacgggttggacggatgtgagcttgacagaaaaagggaaaaaagaagcgaaagaggctggcagattactaaaaagtgaaaaatttacttttgacattgttcatacatctcttttaaaaagagcaaatcgaactatgcaaatttgtcttaaggagttgggtcaagaacaaatccctattcattacagctggagattaaatgaaagacattacggtgcattgcagggtttaaacaaagcagagactgcaaaaaaatacggggatgagcaggtccatatatggcgcaggagttattcgaccccaccaccagaattaagctatgatgatgaacgacacccaagatttgataatagatactctgatttagacccagaaaaattaccagttgctgagtgtcttaaagatactgtaggtcgatttttacc

SEQ ID NO: 291939 - DNA, 616 bp, Unknown
  Bacterial polypeptide expressing nucleotide sequence isolated from the Sargasso Sea
atgaatctaattttaataaggcatggtcaaagcgagtggaatgctctaaatcaatttactggatggaaggatcctgatcttacagccacaggaattcaagaggccaagaatgctgcaaagataataaataacttaaaaattaattttgacttggttttcacttctgcactaataagagctcagaatacagctgaaataattctcaaagaaataaatcagcctctatcaactataaaaaatatggctcttaatgaaagaaactatggagaccttgcaggtctcaataaggatgatgcaagaaaaagatggggtgatgaacaagttcatatttggagaagatcctatgatatccctcctccgggtggagaaagtcttaaagatactggtgaaagagtgctcccattttttatgaaagaaattcatccacatgtttgtaatggtaagaatgttttagttgcagctcatgggaactctcttaggtcattaataaagtttcttgataacatttcagatgaagacattgttaaattagaaatccctactggggctccaatacattatgtaattaatgaggatggttcagttgtctcaaaaaaagatttcttcaatgagtagc

SEQ ID NO: 291940 - DNA, 757 bp, Unknown
  Bacterial polypeptide expressing nucleotide sequence isolated from the Sargasso Sea
tatgccgcctgtagttttatgcatcttggatggatggggtttatccgaagataagattagcaatgctccagtgctagcaaaaacacccaattttgatcatttatggcaaacttgcccaaaaacaacacttttaacacatgggttagatgttggattgccagaaggccaaatgggtaactcagaagtgggtcacatgaatattggtgctggcagaataatctcaatggatttaggtcaaatagatctagagatagaaaataagaatttttttacaaatgaaattctactcaaccatatccaagaaattaaaaaaaataatggtcgcgcccacttaatgggtttattttcaaatggtggtgtacatggacacattaatcacttgtttgcgtcaattcggctatttcagtctcatgacgttcctgtaattctacatctgattactgacgggcgcgatgttgcaccgcactcagcaataaaatttgttaatgaaataaatcctatcatgaatgagaaagttcaggttggaacagtaattggtcgctactatgcaatggatcgcgacaatcgctgggaacgtatagaattggcttacaatgcgatagtttttgggaatagtgaccaagaaacatctaatatcgaaaaggcgattacgacctcgtatgaatctaatatttcagacgaatttattcgtccgactattattaaccaatactcaggaataagaaaacatgatggttttttctgcttaaactttcgg

SEQ ID NO: 291941 - DNA, 901 bp, Unknown
  Bacterial polypeptide expressing nucleotide sequence isolated from the Sargasso Sea
cacaggtggtggcatgtgtgccatcatggacccatccataccgcccatacaatcaggaggcatcatttccatatgacctggactcataccgcccatacaatgaggtggcatcatttccatatgacctggactcataccgcccgtacaatcatgtggcatcatttccatatgccctggtcccataccgcccatacaatcatgtggcatcatttccatgtggcctgggctcataccgcccatacaatcatgtggcatatttgccatatgccctggccccattccgcccatacaatcatgtggcatcatttccatgtgacctgggctcataccgcccatacaatgagttggcatcatttccatgtgacctgggctcataccgcccatacaatcatgtggcatcatttccatgtgacctgggctcataccgcccatacaatcatgtggcatcatttccatgtgacctggtcccataccgcccatgcaatcatgtggcatatttgccatgtgacctgggctcataccgcccatacaatcatgtggcatcatttccatgtgacctgggctcataccgcccatacaatgaggaggcatcatttccatgtgacctggtcccataccgcccatacaatcatgtggcatcatttccatatgacctggtcccataccgcccatacaatgaggaggcatcatttccatgtgacctgggctcataccgcccatacaatcatgtggcatcatgtgcatatgccctggtcccataccacccatacactcaggtggcatctctttcatcatgctggcatccataccctgcatcgcatggggaggcatcatttccatcataggagcgtccataccttgcattgcttctggcggcatctctttcatcatatcagcagac

SEQ ID NO: 291942 - DNA, 473 bp, Unknown
  Bacterial polypeptide expressing nucleotide sequence isolated from the Sargasso Sea
tatgaaacccgaaatgtctgctgaggaattaactattagttgctctaaagcaattaaaagcgggaattatgcttttgttgtaatcaattttgccaatcctgatatggttggtcatacagggaacatggatgcaacaattaaagctatagaaaaagtagataaatgtataggtcaaatagtgaatgctactggagaaatgggcggaagcattgttattacggccgatcatggtaacgcagaggtaatgaaaggatctgaaggagaaccatggacagcacacacaattaataaagttccattaattttgattgaaggtgaaaaaagaaaaataccaaatatgggaaacgaaattaatttaagagaaaacgcgggcctagcagatattgctcccactttattgcaattattaaatctaccagtaccaagagaaatgacaggcaaatcgcttattcaagaaattgagttgaagggtt

SEQ ID NO: 291943 - DNA, 1522 bp, Unknown
  Bacterial polypeptide expressing nucleotide sequence isolated from the Sargasso Sea
attgattaataaagccttactattaattctagatggatggggtattacagaagacaaatcttcttcagcccctgatattgcaaatactccaaattatgacaatttgctagatacatatacaaatgcacagcttataacacatgaagaaaatgttggtcttccttctggccaaatgggaaacagtgaggtaggtcatattaatataggagctggccgaattgtcaaacaagatttacttaaaataaatgactctattgaatcaggagaatttaataataataaaaactttgttactattataaatcatataaagaataccaaaagtagattacatcttattggattattgtctgatggtggggttcattctcatatttcccacttaaaagaaattctaaatacactatcaccaataaaagatcacatatatatacatgcatttactgatggaagagatgtagatccaaaatctggaataaattttattaatgaaattcaagagtacacaaaaacttcagggggctctatagcttctgttattggaagatattatgcaatggacagagatgagcgttgggatagaacaaagaaagcatacgacctattggtaaataataaaggattaaaaacacagaatttaattgaaacaattaatgatttttataataatgggataacagatgaatttatagaacctattgtgatcactgacaaggaaaataatccaatttcaaaagtaactgataatgatgttattgtcttttttaattatagatcagatagagggagacaacttacatctttaatttgtgagaaaaagaaaaatcaatttagtttaaaacctctagatataaaattttatactttaactaactatgacaatagtttcgataatgtaacccctatattctataatgaaaatctaaaaaacactattggcgaggtattgtcaaagaataataaatctcaattaagaattgctgaaactgaaaagtatcctcatgttactttttttctaaatggtggacgagaagatccgtttgacaaagaaaaaagaatcttatgcccttcccctaaagtagcaacatacgatttaaaaccagaaatgagtgcttttgaagtatctgaaaaagcaattagtgagattattaataattctcctgattttatatgcctaaactttgcaaatcctgatatggtaggtcatactggagatatggatgctgcaataaaagcatgcgaaactatagacaaacttttattaccattaattaatgcagcaaataaacttaactatgtttcaatgattattgctgaccatggaaattgtgaaaaaatgaaaaataaagatggctcacctaatacatctcacactactaatccagtaccagttattttagtagataaaagtaaaagaaatataaggaatggagttcttgctgatattgctccaacagttcttgaaattttagggattaaaaaacctattgaaatgacgggtaaatctttaatagtaaaatga

SEQ ID NO: 291944 - DNA, 1381 bp, Unknown
  Bacterial polypeptide expressing nucleotide sequence isolated from the Sargasso Sea
atgtcaaataaagttattcttcttattatggatggttggggtctgggaaaagaatctgatgaatctgcaatctataaggcaaatacacctttttatgataaagcaattaaagttttcccaaactcaaaactatctgcttctggaaaagatgtaggcttacctgagggacaaatgggaaattctgaggtaggtcacatgaatattggtgctggaagaatcgtagatcaggaccttgtaagattaaataaatctttatcaaacgatgggattaaaaataataaagattttatttcaagtgttcaatcagcgatcaaaaataattcaacctttcatctgatgggacttttttctgacggtggtgttcactcacactctgatcatctatattacatattagattatcttaagaaaactgaattatctaaaataagcttacatctttttactgacggtagagattgcagccctaaagaaagttataatcatttgtcacaactgatcgactatacgaaaggatctaaaatatcaatttccactgtctcaggaagatactattcaatggatagggataacagatgggaaagaataaaattagcttatgatgctatggtaaaaggcatgggagatttatctcatgatatattgacatctataaaaaaattatatgatgaaagtattactgatgaatttattaaaccaatagtttgtgtggatgataagggaaatccaaaatcaaggataatggataatgatattgttttttgcttcaattacaggtcagataggatgagacaaattacaagtgttttaactcagatagacatggttgattatggtatgagtaaaataaatttgaattatttaacccttactcaatacgatcaatcttttcataatgtatcagtactttttggtaaggaaaatattaaaaacactttaggtgaagtattatcaaaaaaaaataaaagacagcttagaattgctgaaacagaaaagtatcctcatgttactttcttcttttctgggggtagggagaaagaattcgatctggagaagaggatactttgtccatctcctaaggttgcaacctatgacttaaaaccagagatgagtgcaactgaggtttcaaataaatttattttcgaggttgagaataagtcttttgattttgcatgtttaaactttgctaatccagatatggtaggtcacactgggaattttgatgctgcagtcagagcttgtgaggttgttgataaagaagtatctagaatcgttgatgcagctaccaaaaacggatacacaatattacttactgctgatcacggaaatgctgaaaagatgattaatgataatgggtctccgcacacttatcatacaacaa

SEQ ID NO: 291945 - DNA, 604 bp, Unknown
  Bacterial polypeptide expressing nucleotide sequence isolated from the Sargasso Sea
tatgaattcaaattatttagtcctagttcgtcatggtcaaagtgaatggaacgcaaagaacctttttactggatggcgcgatccaggtttgacagcaaaaggcgttgacgaagcccacgctgcaggtaaagctttaaagaaaaaaaatttaaattttgatttgatgttcacttctgatttaatcagagctcaattaaccggcgaaataatactcaaagagatggaccaggtgaaaacagaaactataaaagataaaagcttaaatgaaagagcttacggtgatttgactggtatgaataaagatgaagctagagcaaagtttggtaatgatcaggttcatatttggagaagatcttatgacataagtccgccaggtggtgaaagtttacaagatactcataatagagttgtccccttttttaaggaacatatagagcctgaaatctcttcaaaaaatattcttatcgcagcgcatggcaactcactaagagcgcttgtgaaacatttagaagatatttctgaacaagagatagttcagcttgagatagccacaggagtgccaattatttataaattttcagatggaagttatgcaaagcaataa

SEQ ID NO: 291946 - DNA, 919 bp, Unknown
  Bacterial polypeptide expressing nucleotide sequence isolated from the Sargasso Sea
tatgactgaacataaaaaaccactggtattaatgattttagacggttggggatatcgtgaagacgagcaaagcaatgcaatactagcagcgaatacccccgtgttagataacttatgggcatctcgccctcgcacattaatttcagcatctggttttgatgtaggtcttcctgatggacaaatgggtaattctgaagttgggcatgttaatttaggtgcaggacgtgttgtataccaagactttactcgaattacaaaagcaataaatgacggtgaatttgactcaacccctgcacttgttgaaaacattgataaagcagttaatgccggcaaagccgttcatgttatggggttattgagcccgggtggcgttcatagtcatgaagatcacattgttgcaagcatagagctggctgcaaaacgcggtgctaaggaagtctattttcatgcatttttggatggtcgtgatacaccaccccgtagtgccaaagaatcgattgaacgtatagaagcgttgtttgcaaaacttgaatgtggtcggctagcaacactcgttggtcgttattatgcaatggatagagataaccgctggaatcgtgtagaaaaagcctatgacgtaatgacctctggcattggagagtttaactacagcgatggcgtaaccgcattaaatgcagcttatgagcgcgacgaaaacgatgagtttgttgctcctacaaccattacaccagcaggtagagaagcagcgcaaattaatgatggcgacaccgttatttttgcaaactttagggcagaccgagcacgagaaattacacgcgcctttgtagagcctgagtttgatggctttaccaagaaaaaatcccccgctatcagcgcatttgttatgatgacagaatatgcagccgatataagacgcacc

SEQ ID NO: 291947 - DNA, 616 bp, Unknown
  Bacterial polypeptide expressing nucleotide sequence isolated from the Sargasso Sea
atgaatctaattttaataaggcatggtcaaagcgagtggaatgccctaaatcaatttactggatggaaagatcctgatcttacagccaaaggtattgaagaggcacataatgcaggcaggataataaataacttaaaaattaattttgacttagttttcacatctgcattaataagagctcagaacacagctgaaataattctcaaagaaataaatcagcctttatcaaccataaaaaatcaggctcttaatgaaagaaactatggagaccttgcaggccttaataaagatgacgcaagaaaaagatggggtgatgaacaagttcatatttggagaagatcatatgatatacctcctcctggaggagaaagtcttaaagatacaggtgaaagagtgctcccattttttatgaaagaaatactcccatatgtttgtgaaggtaagaatgttttagttgcagcgcatggaaactctcttaggtcattaataaagtttcttgataacatttcggacgaagacattgttaagttagaaatcccaactggggcgccaatacattatgtaatcaatgaggatggttcagttaagtcgaaacaagacttcttcaatgaatagt

SEQ ID NO: 291948 - DNA, 721 bp, Unknown
  Bacterial polypeptide expressing nucleotide sequence isolated from the Sargasso Sea
atgaaacatcttattcttataaggcatggacaaagtgagtggaaccaacaaaaaagatttactggttgggtcgatatcggattaacagacaaaggtagagctgaggctaaaaaagctggtgaattaataaaagagaaaaaaattaaacttgattctttttatagctcctaccaaaaaagggctaatgatactcttaaaattgtaatgaaagaattaaatgaagatgaaaacttaattactaaaaaatggcaattaaatgaaagacattatggagagcttacaggtttaaataaagaagatatgaagaaaaaatacggagaagagaaaatccatcaatttagaagatcatgggatgtcaaacctggagctttagataggaaaagcccttaccatccgctcaatatagaaacttacaaggatattccagtgtctgatattccagatactgagtctttaaaagatacccataaaagggtagtggattgttacaatgaattaatcttaaaagatcttcaaaatggtaaaggtgtatgcatctcagcccatggaaattctttaagagctctatgcaagtatctttttaaaattaatgagagtgaaatttctaaaatggaaataccaactggaaatcctcttttaataatttttgaggacaaacttcaaatttcatctgtaacatatcttgatcaaggaagagccaaaaatttagttgctttttaga

SEQ ID NO: 291949 - DNA, 1447 bp, Unknown
  Bacterial polypeptide expressing nucleotide sequence isolated from the Sargasso Sea
tatgtcaaagattagcagcaaaaatataaaaagattaagtgttcctcagagccctgtagttctagcaatacttgatggatggggatatcggaaagaaaaagcaaacaatgctataaatagtgccaaaacgccaattatggattcattgtggcatgcttatccccacaccctgataagtgccagtggatctgatgtaggcctccctgatggtcaaatgggcaattcagaggtagggcaccttaccattggttcgggaagaataatacaacaagaacttgtaaggatctcaaatatcgtaaaaaataatcaattaggcttggtaaatgagttaaaggaaatggctgattcattaaagaaaaataattctactttgcatatcacgggtttatgttcggatggaggagttcacagtcatatcgaccatttattaggtttaataaaatgggcatctgataatgaaatcaaaaaagtttcaatccatattattaccgatggcagagatactcctgcaaaaagtgcctctaaatatctaaatcaaatagagtcatgtataaaaaagtttaatacaggagaaatagcttctatatgtggaagatactggataatggatagaaatctattatgggatagaacacaaaaagcatattctaatttaactgatccagatattccaatatcaaatatttctcctctagattatataaaaaaaagttatgccaaaaacataactgatgaatttatagaacccatacgaatgtctgaaaactatcttaaagatggtgatagtttgattttctttaactttcgtccagacagagcaagacaaatagtcaaatccctttcaaacaaaaaattctcagattttgaaagaaaaaattatccaaatctagattttgtcacttttactcaatatgatccgaactttcccgttaaagttgcatttcctcctgaatcacttaataattttatagggcaaatagtatcagaaaatggacttaaacaatatagaacagcggaaactgaaaaatatcctcacgtaacatactttttcaatggaggagttgaaattcctttacctggagaagagaggcatttgattccatctccaagggttgcaacttatgatatggaacccgaaatgtctgcggaggaattaactattagttgctctaaagcaattaaaagtgggaattatgcttttgttgtaattaattttgccaatcctgatatggttggtcatacaggcaacatggatgcaacagttaaagctatagaaaaagtagataaatgcgtagggcaaatagttaatgctactggagaaatgggtggaagcattcttattacagccgatcatggtaatgcagaggtaatgaaaggagctgaaggagaaccatggacagcacatacaacaaataaagttccactaattttgattgagggcgaaaaa

SEQ ID NO: 291950 - DNA, 1546 bp, Unknown
  Bacterial polypeptide expressing nucleotide sequence isolated from the Sargasso Sea
catgacgacaactaaacgtccaatcgcgttgttgatcctcgatggctggggttaccgtgaaaatacgcatatgaatgctatttaccacgctaacactccagtactcgaccgtctcaacgcccaatatgcccacggtttaatttcaggttcaggcttagatgtaggcttgcccgatgggcagatggggaactctgaagtaggccatatcaacttaggttctggccgaatcgtttaccaagagctgactcgtatcagcaaagccattgcagatcatgagtttgaacaaaacccagccctttgcgatgccgtagatgcggccatcaaagccggtggtgcggtgcacattatgggcctgctctctcccggtggcgtacacagccatgaagagcatatcgaagccatgtgccgcatggcagtagcacgcggcgccactaaagtatacttacatgctttcttagatgggcgcgataccccacctcgcagcgccaaaggcagcctaagccactttgatgatctgtttactacattgggccatggccgtatcgcctcgattattggtcgttactttgctatggaccgtgataaccgttgggaccgcgtgtctcaggcttacgatctgatcacccaaggcaaggcgaagttccaatacgataacgctgtgaccgcattagaagccgcttatgagcgtaacgaaaatgatgagtttgtgtcgtcttctgccattaccgatagcgaaggcaaggttgccagcttgaacgatggcgatgcgctgattttcatgaacttccgcgccgaccgtgctcgtcaaatcacccgtagctttatcaatgccgatttcgacggttttgaacgtgcagtgacgccaaaggttaactttgtaacgctgaccgaatacgcggctgatatcaaagcacctatcgcttatccttctgaaaacctagtaaataccttaggtgaagtgctgcaaaatcgtggccgtactcagttacgtatctccgaaactgaaaaatacgcccatgtgaccttcttcttcaacggcggtaaggaagagccattcaacggtgaagatcgtatcctgatcaactcacctaaagtggcaacctacgacttacaacctgagatgagctcaaccgagctgacggataagttagtcgctgcgattgaatccgctaaatacgatgtgattatctgtaactaccctaacggtgatatggtgggtcatactggcaacttcgatgcggcggttaaagcctgcgaagctgtcgatgcctgtataggccgcgtagttgacgcactggcaaaagtggacggcgaatgtattattaccgccgaccacggcaacgccgagcagatgacagacgagaccactggccaagcccatacggcgcacaccagtgaactcgtaccctttgtgtttgttggccgtgacgccaccatagatgaaggtggtaaactgagtgatgtcgccccaacgattctgcacctgatgggtgaaaccattcccgcagagatgacgggtaagcccttaatccacgttaaagagtag

SEQ ID NO: 291951 - DNA, 964 bp, Unknown
  Bacterial polypeptide expressing nucleotide sequence isolated from the Sargasso Sea
tatgcctaaaaaagtttgtcttttaatacttgatggctggggtattgctccaaaacctgatttttctgctattgaaatagctaaaactccttttatcgataatcttttaaaagagcatccaaacgccagactagatacacatggagaaaatgttggtttacctaaaggccaaatggggaatagtgaagttggtcacatgaacattggagctggaagaattgttcatcaagatttaatgaagatagataaagcaataaaagaaaaatcaatcataaaaaataaaatattaaataatgcaatagattattcaatccaaaataataaaaaaatacactttttagggcttttatctgatggaggaattcattcacatattgaacatctatttgcacttttagaactagccaaatcaaaaaaagcttctaatgtattcattcatggatttactgacggaagagatactgatcctaaatctggaataaaatttgttgaaatgcttgaaaataagattagatatagcaatatagagttagcatcaattataggcagatattattcaatggatagagataaaagatgggatagaacaaaaattgcatatgatctgctaatcaatggaaaaggaacaaaaacaaaagatttcaaaaattcaattaaaaaaaattatgataaaggaattactgatgaatttataaatcctttaattaaagtagatgaaaataactctccaattggaaaaataagtagtgaagatgtagtgattttctataattttagaaatgatcgtgttagacaacttaccgaagttctctcacaaagtaaaaatattgaacccaatatgaatccattaaatcttttatatataacaatgacaaaatatgatgaaaaattcaaaaacatcagcgttttgtttgataaagataatttagttgatactcttggggaagtaatatctaaagaaaca

SEQ ID NO: 291952 - DNA, 724 bp, Unknown
  Bacterial polypeptide expressing nucleotide sequence isolated from the Sargasso Sea
atggtgcaccttgtattaataagacatggacagagcgaatggaatagtcaaaataagttcactggatgggttgatatagatttatctgataaaggtaaaaaagaggcaaaaacttctggtgaattaattattaatgaaaatcttaaattcgattactatttttcctcatttcaaaaaagagctatcaatactttaaaattaatccaagaaactataggaattaaaaatctaaagtttgaagaggcttggcaactgaatgaaagacattatggagctttaactggcttaaataaagaggaaatgaaaaaaaaacttggagaaaaaaaaatacatgaatttagaagatcatggagtttaaagcctgaaaatttagataaaaataatgtttatcatccattgaatatagataaatacaaaaacattccaaaaaaaaatattcctgatactgagtctttagaggacacatataatcgagtaattccatattttgaaagtaaaatattaaaactattaaaattagaaaaaagtatattggttgctgcacatggaaattctataagagctttatgtaaatatttattcaaaataagtaatgaagatatttcaaatttagaaatacctactggcaatccactggttataaattttgataaaagtttaaatgtaatcaaagcaagatatcttgatgaggcaagagctaaaaaattattatttggtaattaat

SEQ ID NO: 291953 - DNA, 643 bp, Unknown
  Bacterial polypeptide expressing nucleotide sequence isolated from the Sargasso Sea
tatgagtcatttaattttagtaagacacggtcaaagtgaatggaatttgcagaataggtttactggatgggttgatgttgatttaacgccaaatggtaaactagaagcatgtaaggctggcgaattaattaaagaattaaaaatagatataagttattatttcacctcttaccagaaaagagctatagaaactttaaatttaatattaaatacattaagaatcaagaatgataaagttgtaaaggcgtgggaacttaacgaaagacattatggatcactaactggcttaaataaaaatgaaatgaaaaaagtttatggagaagaaaaaattcatgaatttaggaggtcttgggataatcagccagaagctctaaataaaaatagcccatatcatccaataaatattgaaatttacaaagatattccaaaaaataagattccagataccgagtctctcaaaaacacatatgaaagagtaataccattctttgaaaaaaatataaaaagtaaaatggataaaaatattttaattgctgcacacggtaattcaataagagcactttgcaaatatttatttaaaatagataataataaaatatctaaacttgaaatacccactggaaaccctcttattttaaaattt

SEQ ID NO: 291954 - DNA, 611 bp, Unknown
  Bacterial polypeptide expressing nucleotide sequence isolated from the Sargasso Sea
tatgagtaaactaatcttaacaagacatggccagagtatctggaatgctgaaaatagatttacaggctgggtagatgttgaactttcagagaaaggtaaagaagaagctaaaaaatctggagagctaattagtgaactgaatattaaaatagatattagttatacctcttatcttaaaagagcaattgaaacactaacaatcattttaaaaacattaagtttatccatgaagtttaatactgcttgggaattaaatgaaagacattatgggtcattaacgggtttaaataaagacgaaacaaaaaaaaaaattggtgaagaacaatttaaaaaatacagaagatcttgggacgtagcaccaccgctaatgtctaatgatagtaattactttaaaaatttcagtcctttaaacagtggaattcctgaaaataaaattccattaactgaatctttaaagaatacatatgatagagtggttcctttttatgattctgaaataaaaaaaaatttagaaaatggaaaaaatattttaatatcggctcacggaaattcgttaagagctttatgtaagtatttattcaggatttcagataaagaaataaatgaattgg

SEQ ID NO: 291955 - DNA, 817 bp, Unknown
  Bacterial polypeptide expressing nucleotide sequence isolated from the Sargasso Sea
tatgtcaaagattagcagcaaaaatataaacagattaaatgttcctcagagccctgtagttctcgcaattctagatggatggggatatcgagaagatatatctgacaatgctataaaaagtgcctctaccccagttatggattcattatggcatgcatatcctaatactcttataagtgctagtggttctgatgtaggtctcccagatggtcaaatgggtaattctgaggttggtcaccttaccattggttctggaagaataatccaacaagaacttgtaagaatttcaaatattgtaagaaagaataaattaggcttggttaatgaattaaaggagatcgctgattcattaaagaagaacaattctactttgcatatcactggattatgttctgatggaggagtacatagtcatattgatcatctattagggttaataaaatgggcatctgagaatagcatcaaaaaagttgcgattcatataattacagatgggagagatactcccgcaaaaagtgcaactaaatatctaaatcaaatagagtcttgcataaaaaaatataatacaggcgaaattgcctctatatgcggaagatactggataatggatagaaatcttttatgggatagaaccgaaaaagcttatgtcaatttgacagataaagacattaaaataacgaatatatctccgcaagattatattcaaaaaagttacgatcagaatataactgatgaatttatagagcccattcgattatctgataactatctaaaagatggagatagtatgatttgctttaactttcgtcctgacaga

SEQ ID NO: 291956 - DNA, 616 bp, Unknown
  Bacterial polypeptide expressing nucleotide sequence isolated from the Sargasso Sea
aatgaatctaattttaataagacatggtcaaagcgagtggaatgccttaaatcaatttactggatggaaggatcctgatcttacgaccaaaggtattgaagaggctcataatgcgggaaagataataaagaacttaaaaattaattttgacttagtcttcacctctgcactagtaagagctcagaatacagctgaaataatccttaaagaaataaatcagcctttatcaaccataaaaaatcaggctcttaatgaaagaaactatggagaccttgcaggtctgaacaaggatgacgcaagaaaaagatggggtaatgaacaagttcatatttggagaagatcatatgatattcctcctcctggaggagaaagtcttaaagatacaggtgaaagagtgctcccattttttattaaagaaatactcccacatgtttgtgatggtaaaaatattttagttgcagctcatgggaactctcttagatcgttaattaagtttcttgatgacatttcggacgaagatattgttaagttagaaatcccaactggggctccgatacattatgttattaacgaggatggttcagttaaatcaaaaaaagatttcttcaatgaatag

SEQ ID NO: 291957 - DNA, 625 bp, Unknown
  Bacterial polypeptide expressing nucleotide sequence isolated from the Sargasso Sea
atgaaaaatacaagtttaattttagttaggcacggtcaaagcgaatggaatgaaaaaaatctttttactggttgggaaaatccaggactgacaaaaaaaggaactgatgaagcaaagcatgctggcttattaataaacgatctcgatatcgaatttgatcacttatttacatcagttttagatagagccaaactcactggagaaatcattctagagaatatcaatcaaaaagatctagattctattgaaaacaaagctctcaatgaaagattctatggtgaccttcaaggtcttaataaagacgaatgtaggcaaaaatggggtgctgaacaggtacaaatttggagaagatcttatgatgttggtccgcctgggggagaatcactcaaagaaactggtgagagagttttaccatattatttaaatgagatttacccattaatacttcaaggcaaaaatattttggttgctgcacatggaaattctcttagatcattaataatgcatttggacaaattatcttctgatgaaattgttaaattagaaataccaactggggcccctattcaatatatctttgatgatcagggtaaagtattaattaaaaagaatttaattgaataat

SEQ ID NO: 291958 - DNA, 556 bp, Unknown
  Bacterial polypeptide expressing nucleotide sequence isolated from the Sargasso Sea
tatgaacgttatgaaacctacagtgttatgcataatggatggttggggaatagatgctgctggaaatttcaacgctatcacgcaagcaaacaccccaaattatgattatcttattgaaaactattgttctgcaaaattaagtgctcacggcgcagcagtagggttacctcaaaagcaaatgggtaactctgaagttggacatacgacgattggttctggtaggattagtctgatgaatttgccaaagattgatttagctgtctccgatggatctttcggtaagaatttagaacttcaggcattcattaaaaaattgaaaagtttgaatggcacagctcatttagcaggtcttgtctctgacggaggggtccattctcatcaaagtcatttagctgaagcggcaaactttattcataaatgtggtgtgcctgttaaacttcactgctttttagatggtcgagacgtaccgccccagagtgctcttaattttgtctcaggtttacaaagaaacctttcgaaaaggtgtggctattgcaactctaacaggacgttttta

SEQ ID NO: 291959 - DNA, 823 bp, Unknown
  Bacterial polypeptide expressing nucleotide sequence isolated from the Sargasso Sea
tctgacgcgatggcggcgctcctttagaggaccctcgcaacgcttcaccgcttcctcactaccgaccggcaatctcatgtacaaactcgttctcatccgccacggcgaatcgacgtggaacaaggaaaaccgcttcacgggctgggtcgacgtcgacctgaccgagcagggcaatcgtgaagcgcagcaagcgggcgtgctgctgaaggaatcgggctacacgttcgatatcgcctacacctcggtgctcaagcgcgcgatccgcaccttgtggcacgtgcaggatcagatggacctgatgtatctgccggtcgtgcattcgtggcgcctgaacgagcgccactacggtgcgctgtcgggcctgaacaaggcggaaaccgccgcgaaattcggcgacgaacaggtgctggtctggcgccgcagctacgatacgccgccgccggcgctggaaccgacagacgaacgcgcgccctacaacgacccgcgctacgccaaggtgccgcgcgaacaactgccgctcaccgagtgcctgaaagacaccgtcgcgcgcgttttgccgttgtggaacgagtcgattgcgccggccatcaagtcgggccgcaaagtcgtgatcgccgcgcacggcaactcgatccgcgccatggtgaagtacctcgacaacatttcggacgaagacatcgtcggcctgaacattccgaacggcgtgccgctcgtctatgaactcgacgaaaacctgaagccgatcaagcactactatctgggcgaccaggacgcgatcgccaaggcgcaagccgccgtggccaagcaaggcaaagcgggctaa

SEQ ID NO: 291960 - DNA, 712 bp, Unknown
  Bacterial polypeptide expressing nucleotide sequence isolated from the Sargasso Sea
atgaaacatcttattcttataagacatggacaaagtgagtggaaccaacaaaaaagatttactggttgggtcgatgtcggattaacagacaaaggtagagctgaggctaaaaaagctggtgaattaataaaagagaaaaaaattaaactagattctttttatagctcctaccaaaaaagagcaaatgatactcttaaaattgtaatgaaagaattaaatgaagatgaaaacttaattactaaaaaatggcaattaaatgaaagacattatggagagctcacaggtttaaataaagaagatatgaagaaaaaatatggagaagagaaaatccatcaattcagaagatcatgggatgttaaacctggggctttagataggaaaagcccttaccatccactcaatatagaagcttataaggatattccagtgtctgatattccagatactgagtctttaaaagatacccataaacgggtagtggattgttataatgaattaatcttaaaagatcttcaaaatggtaaaagtgtatgcatctcggcccatggaaattctttaagagctctatgcaagtttctttttaaaatcaatgagagggaaatttctaaaatggaaataccaactggaaaatctcttttaataatttttgaggacaaacttcaaatttcatctgtaacatatcttgatcaaggaagagccaaaaatttagttg

SEQ ID NO: 291961 - DNA, 757 bp, Unknown
  Bacterial polypeptide expressing nucleotide sequence isolated from the Sargasso Sea
aatggagatacctgtggcaggcaaactagtcttatgcagacatggtcaaagtaagtggaatttagaaaataaattcactggctgggaggatgttgatctaacccaattgggagaagaagaagcacaaaaagcaggcatggaattaaagtccactggaattgcttttgatattgcattcacatccctattgaaaagagcgaacaagacattatttataattctcgagaaaatggatttaacctggatccccatcactcatgcatgggagctgaatgagagacattacggtgctctgcagggaaaaaataaagctgaagttgcaaaagaatttggtgatgaacaggttcatatatggagaagaagttatgatattcctccgccatcaattgataatgaagacccatcacacccaaaatttgattctaagtatgatggaattgatgaattgccatctggagaaagcttgaaagacactctatcaagagtgaagccttactgggaaaatcaaatactgccagaattattgggaaataagaatgttttggttgtcgctcacggaaacagtttgagatcgatgattaaaatcatcgagaaaattgatgatgagtcgatagtggggcttaacttacctactggaattccaattgtttatgaattcaatgaaaatttagagcctgtctcaaaggatttcttggctgattctaaatcacttcaagcagctcaagatgctgtggctaatcaaggcaagtctaaatga

SEQ ID NO: 291962 - DNA, 961 bp, Unknown
  Bacterial polypeptide expressing nucleotide sequence isolated from the Sargasso Sea
aatgggcaaaaaaactgacatttccccggaagattatttaaataaaagttataaagctaatattacagatgaattcttagagcctataagaatatctaaaaactttttaaaagatgaagatggtttaatttgttttaacttccgtccagatagggccagacaaataataaaagccctttcggaaaaagattttgataactttaaaagaaaaagtatccctaatgtagatatattaactttcactcaatatgaagcaaatttaccagttaaaatagcattccctcctgagtctctcaacaactttattggccaaatagtttcagaaaatggacttaagcaatacagaacagcagagaccgaaaaatatccacatgttacttatttttttaatggaggagtagaagtaccctctccaggagagcagagacatttaattccttcgccaagagttgcaacttatgacatggccccggaaatgtctgccgaagaattaactattagttgctcaaatgctataaaaactggacagtattcttttgtagttataaattttgctaatcctgatatggttggacatacaggtaatatggccgcagctataaaggccatcgaaaccgtagatagatgtataggtaagatagtaaatgctacaggagaaatgggaggcagtattcttattactgcagatcatggcaacgctgaagtaatgaaaggtcctgatggagaaccctggacagctcacactattaataaagtccccttaatttttattgaaggtgagaaaagaaaaattccaaatatggggaatgagatttatttgagagaaaatgctggattagcagatattgctccaacattattgcaattattaaatcttcctattccaaaagagatgacaggaaaatcacttattaaagaaatcgaattaaaaggatttaataaagtcgttcaacatgtttaa

SEQ ID NO: 291963 - DNA, 1525 bp, Unknown
  Bacterial polypeptide expressing nucleotide sequence isolated from the Sargasso Sea
tttggaaagtaacaaaaaattaattcttttaattcttgatggctggggtatttcatccgacaaagacaagtcagctgtcgatcaggctaaaacccctttttatgatagtctaattaataattatcctaatgctcaacttttaacacatggtgaaagtgttggacttccaaaaggtcaaatgggtaatagtgaggttggacatatgaatatcggagcaggaagaattgtttttcaggagctagctaagattaataaagaaattgaaacaggtagttttagaaataataaaaaattaaacgagcttttggataatgctatttctaatcaaaaaaacattcatttaattggtctattatctgacggaggagttcactctcacgtttcacatttatatgaattaatagatttaattgaatccaaaaacagtaatagtacatttatacacgcatttactgatggtagagatgtggatccaaaatctggaataaatcatgttaaaaaactgattacttatttaaaacacaagaacactgagctagcatctatctgtgggagatactttgcaatggacagagataaaagatgggatagagtaaaaattgcttatgatttattggtaaaaggtattggttcaatatccaatgatccactaaaatccattaaaatttcatacgaacaaggggttactgacgagtttatcaaacccattgtgataagtgaaaataataaaacaccaaatgcgaaaattatggatggtgatttagtagtatttttcaattttagaacagatagagggcgtcaacttaccgaagtcttaacacaatataatttagatgaatttggtatgagaaaaatggatttaagttttttaacaatgactagctataatgatgattatgaaaatgtatctacaatttatgaaaatgaaaatttaaaagatactttaggagaagtcctagcaaataataataaaaagcaaatcagaattgctgaaactgaaaaatatccgcacgtaactttcttttttaatggtggcttagaggaaaaattcaatggtgaaaagagaattttatgtcaatcacccaaagttgcaacctatgatttaaagcctgaaatgagtgcaaatgaaattgcaaattccataatacatgaaataaaaaatgattacgcagactttatctgtttaaactttgcaaatccagatatggttggacatacagggaatttcaatgctgcggtccaggcatgcgaagccgttgataaatgtaccaaacaagttgttgaagaagctcttaaaaaaaattattctattataataatagcagatcatgggaatagtgatttaatggttaactatgatgggactcccaatactgctcacactacaaatccagtacctataataattttagataaagattttgataatgtaaagaatggaatacttgctgatgttgcaccaacaatattaaaaattatgggaattgaaaaaccatcaaaaatgacaggaaaatatctcgtatga

SEQ ID NO: 291964 - DNA, 607 bp, Unknown
  Bacterial polypeptide expressing nucleotide sequence isolated from the Sargasso Sea
tatgaattcaaaacttgttctggtcagacacggtcaaagtgaatggaatgcaaaaaatctatttacaggttggaaagatcctaaattaactgatctaggaattcaggaggcaataagagctggagagctattggaaactagaaatctaaatttcgatcttatgttcacttcagatctatttagagctcaagaaaccggtcgcttgattctagaacagataaaccaaaaagatatagaaataattcaagatcaatctcttaatgaaagaaattatggagacctagcaggactaaataaagatgaagcgagagagaagtggggagaagagcaagtccatatttggagacgatctttcgatgtccctccgccaggcggagagagtctaaaaaatactgccgagagagtgcttccctactttgaacgcgaaatcatgccaaaggttaagaaaagtttaaatatcttagttgcagctcatggaaattctttgagggctttggtgatgcatttagagaatattagttcagaggagattgtgaaattagaaatagctactggcgatcctttaatttatgaatattcgaatggagactttgttagggttgattaa

SEQ ID NO: 291965 - DNA, 385 bp, Unknown
  Bacterial polypeptide expressing nucleotide sequence isolated from the Sargasso Sea
aatgagtaaatcagtgaaaaccacactcttactaatcttggatggctggggtcacacgacgaaaactgaccataatgctattgctgctgcggagactcctacatgggatggcatttggaatgatcaaccagcaactctcatttcaacatcaggacactcagtaggccttcctgaagaccaaatgggtaattcagaggtgggtcatatgaatatgggagctggacgcgtcgtgtaccaaagtttaactcgcatagacaaagatatagcagaggaaaaatttgcggaaaacgcgattctaaaagaagctttagataaagccgtccttgaaaactcaacggtccacttactcggtcttctatcgcccgggggaaatccattgtcatga

SEQ ID NO: 291966 - DNA, 748 bp, Unknown
  Bacterial polypeptide expressing nucleotide sequence isolated from the Sargasso Sea
tatgaaactaatattgctaaggcatggtgaaagccaatggaatctagagaacagatttacaggatggactgatgtatctttgaccaaaaatggagaacatgaagcaaaaaaagctggtattttattaaataataataatattcaaattgatttagcttacatatcttatcttcaaagagctgttaaaacgtataaaatatgccaaaaacaacttaaaatgactaattccagggtaagctatgattggagattaaatgagcgtcattacggaagtcttcaaggtttaaataaatcagaaactgctaaaaaatatggcgatgaacaagttttgatatggagaagaagttatgatattgctcctccatcgctcgatcaagatgataatcgtcatcctaaatttgatattctatataaagatatcaattctgaagatctaccaagttctgaatctttaaaggagactcttaatagagttaagccactattggataacagtataattcctcaaattaagaatggtaaaaatattttgatagttgcacatggcaattcattgagagctatagtaaagatattgaaaaaaataacagacaaagatatagttaacttaaatatccctacaggagtgccttacatttttgatattaataaaaaccttgacgttttaaaggattattatttaggcaataagaataagatattaaaacaaataaataaactttctgcgcaaggggaatcaaaaaattaa

SEQ ID NO: 291967 - DNA, 601 bp, Unknown
  Bacterial polypeptide expressing nucleotide sequence isolated from the Sargasso Sea
ggttcttaagaatactcttggtgaggtaatttctaaaaataattttaatcaactaagaatttctgaaactgaaaaatatccacacgtgacattcttttttaatggtgggaacgaggaaaaattcaaaaatgaggaaagaattttatgtccatcaccaaaagtagctacctatgatcttaaacctgagatgagctctgatgaagtaactaaaaatgtaataagagaaatcaaaaaaggtaaatttgagtttatatgcttaaactttgctaatcctgatatggtaggacatacaggaaattttactgctgcagttaaagcttgcgaagcagtagacaatcatcttggaagtattataaatgaagcaaccaaagaagagtatacatcaattgttatatctgatcacggcaattgtgagagaatgattaatgatgatggctcagtaaacacttcacatactatcaatccagtccctataattttagttaattgtgaaaacaaagaaattaataatggagtgctcgcagatattgctccaactatacttgatattcttggcatagaaactcctatagagatggaaggggaatcattactaatatga

SEQ ID NO: 291968 - DNA, 610 bp, Unknown
  Bacterial polypeptide expressing nucleotide sequence isolated from the Sargasso Sea
atgaaaacctgctatttagtcttagttagacatggccaaagtgaatggaatgaaaaaaatttatttacaggctggaaagaccctaaacttactcagaaaggagttgatgaagctagaaaggctggagatgaattaagacaagctggttatagtttcgataagatgtttacatcagacctatttagagcccaagagacaggacgaataatcttagagcagatgggaactccttatattatcacaattaaagatcaatgcttaaatgaaaggaactatggagatttagcaggcttaaataaagatgaagctagaaagaaatggggaaatgatcaagtgcatgaatggagaagatcctttgatatacaacctcctggtggagaaagtctaaaggatactgcagagagagttcttccttactttaaagaaaacgtaatccctgagttagaaaaaggttcaaatatccttatagccgcgcatggcaattcactaagagcccttgttatggatcttgaaaaaatacattctgaagaaatagtcaaattggaaatagcaactggtattccattgatatataaatttgataaaaaaagaatagaaagattaagttaaa

SEQ ID NO: 291969 - DNA, 742 bp, Unknown
  Bacterial polypeptide expressing nucleotide sequence isolated from the Sargasso Sea
aatgaaactaattcttctccgtcatggtgaaagcaagtggaatttagaaaatagattcactggatggacggatatcacacttacttctttaggtatggaagaagcttcattttctggaaaacaattattaaaaaaaaacataaagattgttagcgtttatacctctttgcttaagagggctattgagactgccaacatagtctcagaaacaatcaaatttccaaaacaaaatattaaatttgattggcgtttaaatgaaaggcactatggatcattacaggggttaaataagtccgaaacagctgcaaaatttggggaacaacaagtccttttgtggagaagaagttatgatattccacctccatctttagatgaaaatgatgaaagacatccaagatttgataagaaatttcaggatattggagaaaatcttccaactggtgaaagtttaaaggatgtaattgatagactgaatccattcttaaaagattattttaattttattaaaaatcgtccggggaatcatctattagttgctcatagtaattctttaagagccatagttaaactacttgataacctatccgaagaggaaattatatcagtaaatattccaactggcgtgccgctagtttattcacttgataataatttaaatgttattaaaaaggaatacttaatagatgaagctaaattaaaagaaaaacaaaacatagttgcaaatcaaggtaaagcaaaatga

SEQ ID NO: 291970 - DNA, 757 bp, Unknown
  Bacterial polypeptide expressing nucleotide sequence isolated from the Sargasso Sea
aatggagatacctgtggcaggcaaactagtcttatgcagacatggtcaaagtaagtggaatttagaaaataaattcactggctgggaggatgttgatctaacccaattgggagaagaagaagcacaaaaagcaggcatggaattaaagtccactggaattgcttttgatattgcattcacatccctattgaaaagagcgaacaagacattatttataattctcgagaaaatggatttaacctggatccccatcactcatgcatgggagctgaatgagagacattacggtgctctgcagggaaaaaataaagctgaagttgcaaaagaatttggtgatgagcaggttcatatatggagaagaagttatgatattcctcccccatcaattgataatgaagatccatcacacccaagatttgattctaagtatgatggaattgatgaattgccatctggagaaagcttgaaagatactctatcaagagtgaagccttactgggaaaatcaaatactgccagaattactgggaaataagaatgttttggttgtcgctcacggaaacagtttgagatcgatgattaaaatcatcgagaaaattgatgatgagtcgatagtggggcttaacttacctactggcattccaattgtttatgaattcaatgaaaatttagagcctgtctcaaaggatttcttggctgattctaaatcacttcaagcagctcaagatgctgtggctaatcaaggcaagtctaaatga

SEQ ID NO: 291971 - DNA, 959 bp, Unknown
  Bacterial polypeptide expressing nucleotide sequence isolated from the Sargasso Sea
aatgttaattatccttgacggtgtaggtctaggtgagacaaaagagaatagcgggttgtctcttgcaaacaccccaaatcttgatgctttattaaatgattatccgatgtctaaaatagacgctagcggtaaaagtgttggcttgccgcctgggcaaatgggtaattccgaagttgggcacatggtaattggttgtggacaagtttttaaacaagatcttgtggtgataaatgaatcaataaaagataaaaccttctttagcaatgattgtttaactagtgcaattaaaaaagcaaaggattctaaaaataatcttcatcttttagggctcgcttctcctggaggcgttcactcacatatcgaacatttatatgcattaattgaactatgtaatcaatatggggtagagccaaagctgcatttatttactgatggaagagattgtgcccctgaagcatccttagaatatttcaatgaattaaataagaagcttatgaattttggtggggagatttatactatctctgggcgttattttgcaatggacagagatctcagatgggatagaacggaaaaatgttggaatgtaattgttaacaacaagggaaactacgcagaaaattttgaagaagccctaaaaaattcatatgcaaacgggataacagacgaatttttaatccctacatttttaaaaaatgccaagcctttaaaaaaaaatgattcattaattttttttaatttcagaaatgacagaaccaggcagatagcaagagctttaaatgttgagagatttgataactttaaaagaactaataataatacagcttatagtattgtaacaatgactgaatatgacccttttttatcatgtccagttgcattcaggctaaaaccacctcaagagactattggtagtatagtgagcaatttaggctttaaacaattccattgtgctgaga

SEQ ID NO: 291972 - DNA, 628 bp, Unknown
  Bacterial polypeptide expressing nucleotide sequence isolated from the Sargasso Sea
tatgaaaaatagaaattttttagttctagttcgtcatggacaaagtgaatggaacgctaaaaacttattcacgggatggaaagatccagggttaacaagtgatggaaaaaaagaagcaattaatgcaggctcgctaatcaaacaaagaaatattcaattttcaatgatgtttacctcagccctaaaaagagcacagattactggtcaaataattttggatagtataaatcaagctgatattaaagttgaaaagaatcaagctttaaatgaaagaaattatggagatctttctggccttaataaggacgatgccagaaaagaatggggagaagaacaagttcatatctggagaagatcatatgatgttccacctcctggaggtgaaagtttaaaagatacagcagaaagagttttgccatatttcaatagctcaattctgcctaaaattacccaaggtgggaatatcctagtgactgctcatgggaattcgctaagatctttagtcatgcaacttgataatttatcaaaggaacaagtggtagctttagaaattccaactggcgctccaataatttattcttttcaggaaaatgaaaaaccaatctttaaagaaaatctttttgaataa

SEQ ID NO: 291973 - DNA, 757 bp, Unknown
  Bacterial polypeptide expressing nucleotide sequence isolated from the Sargasso Sea
atggagatacctgtggcaggcaaactagtcttatgcagacatggtcaaagtaagtggaatttagaaaataaattcactggctgggaggatgttgatctaacccaattgggagaagaagaagcacaaaaagcaggcatggaattaaagtccactggaattgcttttgatattgcattcacatccctattgaaaagagcgaacaagacattatttataattctcgagaaaatggatttaacctggatccccatcactcatgcatgggagctgaatgagagacactatggtgctctgcagggaaaaaataaagctgaagttgcaaaagaatttggtgatgaacaggttcatatatggagaagaagttatgatattcctccgccatcaattgataatgaagacccatcacacccaaaatttgattctaaatatgatggaattgatgaattgccatctggagaaagcttgaaagacactctatcaagagtgaagacttactgggaaaatcaaatactgccagaactattgggaaataagaatgttttggttgtcgctcacggaaacagcttgagatcaatgattaaaatcatcgagaaaattgatgatgagtcgatagtggggcttaacttacctactggcattccaattgtttatgaattcaatgaaaatttagagcctatctcaaaagatttcttggctgattctaaatcacttcaagcagctcaagatgctgtggctaatcaaggcaagtctgaatgat

SEQ ID NO: 291974 - DNA, 745 bp, Unknown
  Bacterial polypeptide expressing nucleotide sequence isolated from the Sargasso Sea
atgaaaaaattagtattaatgcgccatggtgaaagtcagtggaatttagagaataggtttactggttggaccgatgttgaccttactgaaaaaggggcggccgaagcaaaaaattgtggtttattgcttagagaagctggttttcaatttgatatagtacatacatctttattaaagcgagcgaatcgcacgatggaaatttgtcttcatgaaatgggattgagtggcatcagtattaaatataattggcggctcaatgaaagacactatggagcactccaaggtttaaataaagcagaaacagctgcggaatatggtgaagagcaggtacatatatggcgcagaagttatacagtcccacctccaaaactagattcagatgatgaaaggcatcccagatttgatgataaatattcttctatacagtcggctattcttcccgatagtgaatgcttaaaagatacagtagagcgctttatgccttattggcttgattcaataaagcccgatattgaatcaggacaaaatgtgttgattgtggcacatgggaattcattaagagcacttgttaaatatttggataaggtatctgatgctgatattgttgaactaaatattcctacaggcgttccattgatctatgaattggatgatgaaatgaattctgttaaaagttattatttaggtgaccaagaagagatatcaaaaaggacagcagaagtagctgcacagggtaaaaaataga

SEQ ID NO: 291975 - DNA, 721 bp, Unknown
  Bacterial polypeptide expressing nucleotide sequence isolated from the Sargasso Sea
aatgtctaatactctgatattaatcagacacggtaaaagtgtttggaacgtaaaaaatatttttaccggatgggttgatgtagaattagacgatttaggaaaaaaagaggcattaaagtcagcattgttactcaaagaagctgaaatagttccttcatttgcatttacatcatttttaaaaagggcacaaaatacgcttcaaataattcttgaggaattaaatatatataatcttcacacagaaactgcctgggaattaaatgaaagacactatggagcactgcaaggattaaacaaagatgaagttaaaaaaaaatatggtgaagatcagtttttaaaatggaggagaggttacagcacaccaccacctgcactaccaattgatagtgaaatgaatcctaataaagacgatttatataaaggaataaataatttacccctaacggaatgtttagaagatacgtatgcgagagtaattccttactgggaaaattctataaaacctttagtactaaaaaataccactattatttcagcacatggaaacagcttaagagctctatgtaagtacttgtttgacgtatctgatgaagacataacaagcttagaaataccaactgcaaatccactagttatcagcctaaataatagttgcaaaattcactccgcaagttatcttgatgcctccagagcacaaaaattgccaataattggcgaataa

SEQ ID NO: 291976 - DNA, 628 bp, Unknown
  Bacterial polypeptide expressing nucleotide sequence isolated from the Sargasso Sea
tatgtctcactcaaaaaaaatttcaaccttagttcttgttaggcacggacaaagtcagtggaataaagaaaacttattcacaggttggaaagatccagatttgactgaaaaaggaattgaagaggctattaatgcaggtaaaaaaataaaacaaactaacattaattttgacttacatttcacttcgaaactaaaaagagctcaaaggacaggtaatctcatcatgcaagagcttggagaagatattcccacgtctgaaaataaagcccttaacgaaagagactatggagatttatctggattaaataaagacgatgcaagaaaaaagtggggagatgaacaggttcatatttggagaagatcttatgatactcctcctccaggaggagagagtctcaaaaatacagctgaaagagttttgccatactttgaaaatattatttatccagaattaagaaatcagaaaaatattttaatttcagctcatggtaattctcttagagctttaattatgtatctagagaaaatatctgaggataaaatagtaaagcttgagatcgctactggacagccaattgtctataagctggatgaggatcttcaagtaatttcaaaagagattttataa

SEQ ID NO: 291977 - DNA, 1546 bp, Unknown
  Bacterial polypeptide expressing nucleotide sequence isolated from the Sargasso Sea
catgacgacaactaaacgtccaatcgcgttgttgatcctcgatggctggggttaccgtgaaaatacgcatatgaatgcgatttaccacgccaacacaccagtactcgaccgtctcaacgcccaatatgcccacggtttaatttcaggttcaggcttagatgtaggcttgcccgatgggcagatggggaactctgaagtaggccatatcaacttaggttctggccgaattgtttaccaagagctgacccgcatcagcaaagccattgcagatcatgagtttgaacaaaacccagccctttgcgatgccgtcgatgcagcagtcaaagccggtggtgcagtgcacattatgggtctgctctctcccggtggcgtacacagccatgaagagcatatcgaagccatgtgccgaatggccgtagcgcgcggtgccactaaagtgtacttacatgccttcttagatggtcgcgataccccacctcgcagcgccaaaggcagcctaagccactttgatgatctgtttactacattgggccatggccgtatcgcctcgattattggtcgttactttgcaatggaccgcgataatcgttgggaccgcgtgtctcaggcttactcactgatcacccaaggcaaggcgaagttccaatacgataacgccgtgaccgcgttagaagccgcttacagtcgtgatgaaaacgatgagtttgtgtcgtcttctgccattaccgatagcgaaggcaaggttgccagcttgcacgatggcgatgcgctgattttcatgaacttccgcgccgaccgtgctcgtcaaatcacccgcagctttatcaatgccgatttcgacggttttgaacgtgcagtgacgccaaaggttaactttgtaacgctgaccgaatacgcagccgatatcaaagcacctatcgcttatccttctgaaaaccttgtgaataccttaggtgaagtgctgcaaaatcgtggccgtactcagttacgtatctccgaaactgaaaaatacgcccacgtgaccttcttcttcaacggcggtaaggaagagccatttaacggtgaagatcgtatcctgatcaactcacctaaagtggcaacttacgacttacaacctgagatgagctcaaccgagctgacggataagttagtcgcggcgattgaatccgccaaatacgatgtgattatctgtaactacccgaacggtgatatggtgggtcatactggcaacttcgatgcggcggttaaagcctgcgaagctgtcgatgcctgtatcggccgcgtagtcgatgcgctggcgaaagtgggtggcgaatgtattattaccgccgaccacggcaacgccgagcagatgaccgacgagaccactggccaagcccatacggcgcataccagtgaactcgtaccctttgtgtttgttggccgtgacgccaccatagatgaaggtggtaaactgagcgatgtcgccccaacgattctgcacctgatgggtgaaaccattcctgcagagatgacgggtaagcccttaatccacgtaaaagagtag

SEQ ID NO: 291978 - DNA, 274 bp, Unknown
  Bacterial polypeptide expressing nucleotide sequence isolated from the Sargasso Sea
tggagaagatcctatgatacgccaccacctggaggtgaaagtcttaaagatacttataatagagttattccttattttgagagtgaaatacttcctctaatgaaagataaaaacgtacttatctcagcgcatggaaattcattaagagcattagttaagtatttagacagtatttctgaaaaggacatcgtaaaactcgaaatagcaactggagaacctatattttataaattcactgatggaaagttcattaaagaattacatagggaataaa

SEQ ID NO: 291979 - DNA, 616 bp, Unknown
  Bacterial polypeptide expressing nucleotide sequence isolated from the Sargasso Sea
atgaattcaaattatttagtcctagttaggcatggtcagagtgagtggaatgaaaaaaatctatttacaggctggaaagatcctggcctaactcagaaaggtattgaagaagcaaaaaaagcaggtcatcagcttaataaattaggcctaaattttgacattatgcatacttccgcacttataagagctcaattaactggtcaaattattttagatgtgttgaaacaagacaatttagaaacaataaaaaaccaagctctaaatgagagagattatggagaactaacagggctaaataaggatgaggcaagagaaaactttggtgtagatcaagttcagatatggagaagatcctatgatacgccaccacctggaggtgaaagtcttaaagatacttacaatagagttattccttattttgagagtgaaatacttcctctaatgaaagataaaaacgtacttatctcagcgcatggaaattcattaagagcattagttaagtatttagacagtatttctgaagaggacatcgtaaaactcgaaatagcaactggagaacctatattttataaattcactgatggaaagttcattaaagaattacatagggaataaa

SEQ ID NO: 291980 - DNA, 631 bp, Unknown
  Bacterial polypeptide expressing nucleotide sequence isolated from the Sargasso Sea
tatgaatagcttaattcttcttagacatggacaaagtcaatggaatctagaaaatcgttttacaggatggaaagatgtaccattaactgaaaaagggattgaagaggcaaataaagcatgtttattaattaaagaaagtaaaatcaaaattgatattatttttagcagtatattacaaagagctaatagaactgctgaattagcacttaaagaaaaggattttgctcatttatggaaagataatcagttgattatgacaaaaagtcaaaatcttaatgaaagagattatggcgacttggtaggattaaataaagaagaaacttcacagaagtttgggaaagatcaagtacatatttggagaagatcttatgatgtttctcctcctggaggtgaaagtttaaaaaatgtggttgatagagtagggccatattttgaaaaatttatacagcctcatttatttagtgagaaaaatgtcattattgttgctcatggaaattctttacgagctactatgattaaaattggtctttataaacctgaagaaatttctaaaattgaattacctactggaagtccttttgttattaatttttcttcaggaaaattacaagatgcaaattatttaaattaa

SEQ ID NO: 291981 - DNA, 610 bp, Unknown
  Bacterial polypeptide expressing nucleotide sequence isolated from the Sargasso Sea
atgaaatcttgttatttagtattagtcagacatggccaaagcgaatggaatgaaaagaatttatttacaggctggaaagatcctcaacttacccagaaaggtattgaggaagctataaaggctggaaatgaattaaaaaaaatgggttatagattcgataagatgtttacttcagatctatttagagctcaagagacaggcaggattatcctagagcagatgggaactcctttgattcccacaatttcagatcaatgtttaaatgaaaggaattatggagatttggcaggcttaaataaagatgaagctagaaagaaatggggaaatgatcaagtacacgaatggagaagatcctttgatataccgcctcctggtggagaaagtttaaaggataccgcagaaagagtgcttccttactttgaaaataatattattcctgacttgcaaaaagggttaaatgttctaatagctgctcacggcaattcattaagagcccttgttatgaatcttgaaaaaatacattcggaagaaatagtgaaattggaaatagcaactggtattcctttgatatataaatttgataaagataggatagaaagggtgagttaaa

SEQ ID NO: 291982 - DNA, 628 bp, Unknown
  Bacterial polypeptide expressing nucleotide sequence isolated from the Sargasso Sea
gatgtcaaagtttagcagcaagaatataaataaaataaaagttcctgagagtccagttgttctcgcaattctggacggatggggacatcgtgaagaaaatttagataatgccataaaaaatgccaatactcctgtaatggattctttatggcatgcctatcctcatactcttattaatgcgagcggagctgatgtaggtttacctaatggtcaaatgggtaattctgaagtagggcatctcacaattggatcagggagaatcattcaacaagaacttgtaagaattacaaatattgtgaaaaataaccaattaactcaagtacatgagttaaaggaaatggctaattcaattaagaaaaaaaaaggtaccttacacataactggtctatgttcagatggaggggttcatagccacattgatcacttattaggattaataaaatgggcttctgaagaacatatagaaaaagtagctattcacgttattaccgatggtagagatactcctgcaaaaagtgctcataaatacataagacaaatagaagattgcataaaaaaattcaaagtaggagaaatagcatctatatgcggaagatattggataatggatagaaatttaataggggaa

SEQ ID NO: 291983 - DNA, 748 bp, Unknown
  Bacterial polypeptide expressing nucleotide sequence isolated from the Sargasso Sea
atgtataaattggtacttattcgtcatggagaaagtcagtggaacttggaaaaccgtttcacgggctggcacgacgttgacttgaccgacactggtgtagcacaagcaaagaccgcaggtcagcttcttaaagatgctggatttacatttgatcaggcttatacgtctgtacttcttcgcgcaattaaaacacttaatattgcacttgaagagatgggtcagcactaccttccagttgagcgtcactggcgtctgaacgagcgtcactacggtgcgttaacaggtctagacaaagcagagactgccgctaagcatggtgaagaacaggttaaaatctggcgtcgtagcttcgacatcccacctccggccgttgaagatgatagcgagcacttcccaggtcacgatccgcgttacaacaatgtagatgctgatatcttgccacgtggtgaaagtctaaaactaactatcgaacgtgtactaccatactggcacgacgttattcgtccagacatccaagcaggcaagcgcgtaattattgctgcgcacggcaacagtcttcgtgctcttgttaagtaccttgatggtatgtcagacgaagaagtgttgggtctaaacattcctacaggtgtaccgctagtatacgaactagatgaaaaccttaagccaatctctaaagaatatcttggcgatgctgacgctatcaaagcaatgatggatgcagtcgctaagcaaggcaaagcgaagtaat

SEQ ID NO: 291984 - DNA, 751 bp, Unknown
  Bacterial polypeptide expressing nucleotide sequence isolated from the Sargasso Sea
atgaagactttagttctgatacgccatggccagagcgcatggaacctcgaaaaccggtttacgggatgggtggatgtggacctgtcagacaggggtgtgcgcgaagcccgcgatgctggcaggaccctgctggagaaaggctaccgattcgacgtcgccatgacttcactgttaaagcgctcgattcgtactctgtggctgatcctcgacgagatggaccagatgtatctgccggtgcaaacggattggcggctgaatgaacggcactacggggcactgcagggtctcgataaaaaggaaaccgcactcaagcacggtgatgatcaggtgctgaagtggcgccggggatatgccattcgccccccggcgcttgatgcggcagatccacagcatccttctcaggatccgagatatgccggtatcgccgggctccccgataccgagtcattggccgacacgttggaaagggtgacgcaatggtggagtgagaggctggtcccggaactcaacaacgacaaaagggtgctggtcgctgcgcacggtaacagtctgcgcgcaatggtgaagtttcttcttggcatgagtgaggacgagatcatgcaatacaacattccgaccggtatcccactggttttccggctgagtgacgagctgcaggtggttgatcatgaatatctcgccgacgaggcggcactgaatgccgcggtgaacgaggtcaagcaccaggcctcctcggaaactgcgccctaaa

SEQ ID NO: 291985 - DNA, 772 bp, Unknown
  Bacterial polypeptide expressing nucleotide sequence isolated from the Sargasso Sea
tctcagacttttgaaagaaaaaattatccaaatctagaatttgttacttttactcaatatgatcccaactttcccgttaaagttgcattccctcctgaatcactcaataattttataggccaaatagtttcagaaaacggacttaaacaatacagaactgcggaaactgaaaaatatcctcacgtaacatactttttcaatggaggagttgaaatacccttacctggagaagagagacacttgattccatctccaagagtcgcaacctatgatatgaaacccgaaatgtctgctgaggaattaactattagttgctctaaagcaattaaaagcgggaattatgcttttgttgtaatcaattttgccaatcctgatatggttggtcatacaggcaacatggatgcaacaattaaagctatagaaaaagtagataaatgtataggtcaaatagttaatgctactggagaaatgggcggaagcattgttattacagctgatcatggtaacgcagaggtaatgaaaggatcggaaggagaaccatggacagcacacacaataaataaagttccattaattttgattgaaggtgaaaaaagaaaaataccaaatatgggaaacgaaattaatttaagagaaaacgcggggctagcagatattgctcccactttattgcaattattaaatcttccagtaccaagagaaatgacaggcaaatcgcttattcaagaaattgaattaaagggttataataaggtcgttcaacacgtttaga

SEQ ID NO: 291986 - DNA, 799 bp, Unknown
  Bacterial polypeptide expressing nucleotide sequence isolated from the Sargasso Sea
atgaacaaagttttattaatgattcttgatggatggggaaaaacaacaaactcgtcagtttcagcaatcacaaatgctaatactccctttatagatgaactatatgaaaaatattcatactccgaacttttaacacacggaaaacatgttggacttccagacaatcaaatgggaaatagcgaagtcggtcacatgaaccttggagctggaagaattgtatatcaagatttagctaaaattaacaatgctatcaaaagaaatcaattaaaagaagaaagagaacttatcaacacatataactatgctaagaaaaacaataaaaaaattcattttataggtcttttatctgatggtggggttcattcgcatatcgaccacctaattgaattattaaaaattgctaaagataaaggcttaaataaattgtacatacatggtttcaccgacggaagagatgttgatccaaaatcagctaataagtttataaattatattgagccggtattgaaagaaactggtgcaaaaatctctagcataattggtagatattatgctatggatagggaccaaagatgggaaaggactgaaaaagcttataatttattattaaaaaatcaaggaaatttaactaaaaatatatctaaagaaataatttctaattataaaaaaggtattactgatgaattcatgcctccaatagtgaatactgaaaataatttccctatttctaaaattgaaaaaaatgatgtaataatctttttcaacttcagaacagatagaggaagacaattgacagaat

SEQ ID NO: 291987 - DNA, 1063 bp, Unknown
  Bacterial polypeptide expressing nucleotide sequence isolated from the Sargasso Sea
aatactggagaaatagcttccatatgcggaagatactggataatggatagaaatcttttatgggatagaacagaaaaagcatattctaatttgactgatccgaatattcgaataacaaatatttctcctaaggattacatagaaaaaagttatagtaataacataactgatgaatttatagagcccatacgaatttctgaaaattatcttaaggatggggatagtttgatttgctttaactttcgtcccgacagagcaagacaaatagtcaaatccctttcacttaaggaattctcagactttaaaagaaaaaattatcttaatctagattttgtcacttttactcaatatgatccaagctttcccgttaaagttgcatttcctcctgagccactcaataattttattggccaaatagtgtcagaaaatggacttaaacaatacagaaccgcggaaactgaaaaatatcctcacgtaacatattttttcaatggaggcgttgaaattcctttacctggagaagagagacatttaattccatctcccagagtcgcaacttatgatatggaacccgaaatgtctgcggaggaattaactattagctgctctaaagccattaaaagtgggaattatgcatttatagtcattaattttgccaatcctgatatggttggccatacaggcaacatggatgcgacagttaaagctatagaaaaagtagataaatgtgtaggtcaaatagttaatgctactggagaaatgggaggaagcattcttattacagccgatcatggtaacgcagaggtgatgaaaggatctcaaggagagccatggacagcacatacaattaataaagtgccattaattttgatagaaggtgaaaaaagaaaaataccaaatatgggtaatgcaattaatttaagagataatgccggcttagctgatattgctccaactttattacagttattaaatctcccaataccaaaagaaatgacaggcaaatctcttattcaagaaattgaattaaaaggttataataaagtagttcaacacgtttaaa

SEQ ID NO: 291988 - DNA, 1000 bp, Unknown
  Bacterial polypeptide expressing nucleotide sequence isolated from the Sargasso Sea
attgattaataaaaccttactattaattctagatggatggggtattacagaagacaaatcttcttcagcacctgatattgctaatactccaaattatgacaatttgctagatacatatacaaatgctcagcttataacacatgaggaaaacgttggtctaccaactggccaaatggggaacagtgaggtaggtcatattaatataggagctggtcgaattgtcaaacaagatttacttaaaataaatgactctatagaatcaggagaatttaataataataaaaactttgttactattataaatcatattaagaaaactaaaagtaatttacatcttattggattattgtctgatggtggagttcattctcatatttctcacttaaaagaaattctaaatacactatcacaaataaaagatcacatatatatacatgcatttactgatggaagagatgtagatccaaaatctggaataaattttattaatgaaattcaagagtatacaaaaacttcagggggctctatagcttctgttattggaagatattattcaatggatagagatgggcgttgggatagaacgaagaaagcatacgacctattgataaataataacgggttaaaaacacagaatttaactgaaacaatttatgatttttatagtaatgggataacagatgaatttatagaacctattgtaatcactgacaaggaaaataatccaatttcaaaagttactgataatgatgttattgtcttttttaattatagatcagatagagggagacaacttacatctttaatctgtgaaaaaaacaataatcaatttggcttaaaacctctagatataaagttttatactttaaccaactatgacaatagttttgataatgtaacacctatattctataatgaaaatctaaaaaatactattggcgagatattatcaaaaaataataaatctcaattaagaattgctgaaactgaaaagtatcct

SEQ ID NO: 291989 - DNA, 616 bp, Unknown
  Bacterial polypeptide expressing nucleotide sequence isolated from the Sargasso Sea
atgaatctaattttaataaggcatggtcaaagcgagtggaatgctctgaatcaattcaccggatggaaggatcctgatcttacagccaaaggtattgaagaggctcacaatgctggaaagataataaatagccttgaaattaattttgacttggtttttacatctgcgctaataagagcacagaatacagctgaaataattcttaaagagataaatcagtctttaccaacaataaaagatcaggctcttaatgagagaaattatggagaccttgctggccttaacaaggatgatgcaagaaaaagatggggtgatgaacaagttcatatttggagaagatcttatgatgtctctcctcctggcggagaaagtcttaaagatacgagtgaaagagtgctcccattttttatgaaagaaattcatccacatgtttgtaaaggtaagaatgttttagttgcagctcatgggaactctcttaggtcactaataaagtttcttgataacatttcggatgaagacattgttaagttagaaatcccaactggggctccgatacattacgtaataaatgaagatggttcagttaagtcgaaaacagatttcttcaatgaatagt

SEQ ID NO: 291990 - DNA, 526 bp, Unknown
  Bacterial polypeptide expressing nucleotide sequence isolated from the Sargasso Sea
attgaacaagaaagtcttactattaattcttgatggatggggaattgcagatagcaaagatgcatctgcacctgacaaggcaaatactccaaattttaattcgttaattgagaattacccaaataattttttaataactcatggtgaaaaagttggtttgccaaaaggtcaaatgggtaacagtgaagttggtcatatgaatattggttcgggtaggatagttctgcaagatcttcttaaaattaataacagtattaaagaaggtgagtttagaaaacaaagtcattttaatgatataattaactatactaaaaaaaattcttcaaatgttcatttaatgggtcttgtttcagacggaggtgttcactctcatatagaccatttaaaagagattattttatcgttatccgagattaaagataaaatctacatacatgcatttactgatggtagagacgttgatccaaaatctggaattgattttataaaatctattgaaacttttagtaaaaaaaatgggaggtaa

SEQ ID NO: 291991 - DNA, 493 bp, Unknown
  Bacterial polypeptide expressing nucleotide sequence isolated from the Sargasso Sea
atgaaacatcttattcttataaggcatggacaaagtgagtggaaccaacaaaaaagatttactggttgggtcgatgtcggattaacagataaaggtagagctgaggctaaaaaagctggtgagttaataaaagagaaaaaaattaaacttgattctttttatagctcctaccaaaaaagagcaaatgatactcttaaaattgtaatgaaagaattaaatgaagatgaaaacttaattactaaaaaatggcaattaaatgaaagacattatggagagcttacaggtttaaataaagaagatatgaagaaaaaatatggagaagagaaaatccatcaatttagaagatcatgggatgtcaaacctggagctttagataagaaaagcccctaccatccactcaatatagaaacttataaggatattccagcgactgatattccagacactgaatctttaaaggatacccacaaacggggtagtggattgttataat

SEQ ID NO: 291992 - DNA, 748 bp, Unknown
  Bacterial polypeptide expressing nucleotide sequence isolated from the Sargasso Sea
atgataaaacttgttttattaagacatggtgagagccaatggaatttggaaaatcgtttcacaggttggacagatgtcgatttaactaaaaaaggcgagtcagaagcaaaaagtgctggtaaagttttaaaaaataatttttttgaatttgaccttatttatacatctgttttgaaaagagctattagaactatgaaaatttgtttaactgaaatgaaaattaaaaatgttccaattgaatatagctggagattaaatgaacgtcactatggagctcttcaggggttaaataaagctgaaacagcaaaaaaatatggggatgagcaagtactgctatggcgtcgaagttatgatactcctcctccacaattacagatatctgacactcgttggtcaggtaatgattctaactactcacatatggataaaaatgatattccattatctgaatgcctaaaagatacagtcaatagatttttgccgtactggagggaaaaaatagaaccatcattgcaggatggtaaaaaaattatgatagtagcgcatggtaactctttgcgtgccttagttaaacatcttgataatatttctgataaagatattgttagtttcaatataccaacaggaatacctctcatttatgaattaaataataaattaaaacctgtaaaaagttattatctaggaaatcaggaagaaattgaaaaggctatttcttccgtaaaaaatcaagcaaagactaaatagt

SEQ ID NO: 291993 - DNA, 664 bp, Unknown
  Bacterial polypeptide expressing nucleotide sequence isolated from the Sargasso Sea
atgtcaaaggttagcagcaagaatataaataaaatgaaagttcctgagacacctgttgtacttgcaattcttgatggatggggaaatcgagaagagacttcagacaatgccataaaaaaggccaatactcctgttatggactctttatggcatgcttatccgcatactcttgttagtgcaagcggagctgatgtaggattaccagacggtcaaatggggaattctgaagtaggtcatctcacaattggctcaggaagaattattcaacaagaacttgtaaggattacaaatattgtcaaaaataatcagttagatcaaataattgagttaaaagaaatagctaactccatcaaaagaaaaaaaggaactttgcatattactggtttatgttcagatggtggagttcatagccacattgatcatttgttagggttaataaaatgggcttctaaagttggaatagaaaatttagctatacatgttattacagacggtagagatactccagcaaaaagtgcttctaattatataaaacaaattgaaaattgcatagaaaaattcaaagtaggagaaatagcctctatatgtggcagatattggataatggatagaaatttattatggggaagaactgaaaaggcttttacaaatcttactgacccaa

SEQ ID NO: 291994 - DNA, 613 bp, Unknown
  Bacterial polypeptide expressing nucleotide sequence isolated from the Sargasso Sea
atgaattcaaattatcttgtactagttagacatggccaaagtgaatggaatgcgaaaaatttatttacgggttggaaagacccaggcttaacagaaaagggcactgcagaagcaattagagcaggcaaacatcttaaaagtttaggcctaagttttgatgtcctgtatacctctgcgttagtaagagctcaattaacaggaaaaataatgctagatgaactcggacaaagcgatttagaaactatcgaagataaggcacttaatgaaagagattatggcgagcttacaggcttaaataaggatgaagcaagagagaactttggtatagaacaagttcaagtatggagaagatcctatgatatagctccgccagggggtgaaagtcttaaagatacatacaatagggtcattccttattttgaaaataaaattcaacctctaatgaaagataaaaatgttcttatctcagctcatggtaattcgctaagagcattagttaagtatttagacgatatttctgaagcagatatcataaaactcgagataggaactggagagcctatagtctataaattcactgatggaaaattcattaaagaatcacataggtaat

SEQ ID NO: 291995 - DNA, 697 bp, Unknown
  Bacterial polypeptide expressing nucleotide sequence isolated from the Sargasso Sea
tatgactaccacgcctaaacctttggtcctgataattctcgatggcttcggacacagtgaaagccaccacgacaacgcggtgtactcggccaacaagccggtactggaccgcctgaccgccaccgtgcccaacggcctgatctcaggttccggcatggacgtgggcctgccggacggccagatgggcaactcggaagtcggccacatgaacctaggtgccggacgagtggtgtaccaggacttcactcgtgtcaccaaggcgatccgcgatggcgagttcttcgagaacccgaccatctgcgcggcggtcgataaagccgttgccgccggcaaggccgtgcacttcatgggcctgttgtcggacggcggcgtacacagccatcaggatcacttggtcgccatggccgaactggcgttcaagcgcggcgctgacaaaatctatctgcacgccttcctcgacggccgcgacacgccacctaaaagcgcgcaatcctccatcgaactgctggataccaccttcgccgccctgggcaagggccgtatcgccagcctggtgggccgttacttcgccatggaccgcgacaaccgctgggaccgtgtcgcccaggcctacaacctgatcgtcgacggccaggccgaattcaacgcggccaccgcccaggaaggtctggaagcggcctacgcccgcggtgaaagc

SEQ ID NO: 291996 - DNA, 1452 bp, Unknown
  Bacterial polypeptide expressing nucleotide sequence isolated from the Sargasso Sea
tatgaataaagaaattaaaaataagccagttgttctttgcattatggatggttggggattaagaaaaaataaaaataataatgctatagccttagcaaacacaccaaattatgacaattttataaaaaattttagttcctcaactcttgatgcctctggtaaagatgtaggtttgccatcaggacagataggtaattctgaagttgggcatataaatcttggttgtggaaggatcattttacaatctttacctaaaataaacttaggtttcaaaaataaagaaatagaaaataataaatcgttgaatagttttatcaaaaagcataataaaaatgcagttgtacatctaatgggtctttgtagtagtggaggtgttcactctcataagaatcacttgatagaaatgtctaaaattttaatcagaaataagataaaggtaaggttacatttattctcagatggtagagatacctctccaaaagaatttggtaaaataataaataattttgtaaaagctttgccagaagaaattaaaatatcttcactgattggtcgatatttttcaatggatagagaccaaagatgggaaagaatcaaaaaaagttttgatttaatagtacatgggaaatcggaatataaatataataatattcacgatgctattcgatcaggttatgaacgtggagaaacagatgaatttattaaatcttctctaattggaaattataatggtattcaaaaaggtgatagtcttttgatgctaaactttagatcagatagggtgagacaactactattatcattattaagccccagttttaataattttcatcgtggaaaagaatacaattcatttaaaaatgctataggtattatggaatattctgaacaattaaataaacttatggatactatatttattagcaatccggtaaaagatactctgggtgaattgatttctagagctaagctaaaacaattgagaattgcagaaactgaaaaataccctcatgtaactttttttttcaatggtgggattgaaaagaaatatcccaatgaagatagaattttaatcccgtctccaaaagtttctacttatgacatgaaaccagaaatgtcagcgaaattaatagaaaaaaaacttataaacgtaataaaaaaaaatttctatgacgtaataatcgtaaattttgcaaacccagatatggtaggacatactggaaaattagacgcagttgtaaaatctgttgagatagtagacgaagctattggtaatataaaaaaagcaattgataaaactgagggattaattttacttactgctgatcatggaaattgtgaattgatgtgggatagtaaaaaaaatgctccacatacagctcatactacaaataaagttcctctgatactgattaacagtaagaaaaatttattcataaagagtcttaaact

SEQ ID NO: 291997 - DNA, 1196 bp, Unknown
  Bacterial polypeptide expressing nucleotide sequence isolated from the Sargasso Sea
cctgctatcggctggcggggtacatgcccatcaggatcacattctggccgtggttaatggtctggcgaaagccggcagcactgttgttattcatggctttaccgatggccgtgatgtgttgccgcgagacgccggcataaacctacagaattttgttgcagacttgccggataatgccagcatcggcagcctcaccgggcgctatttcggcatggatcgtgatcaccgctgggatcgcacgcaaaaagcctatgacgtgattgcccgtggccgggctgagcatcatgctgattacgccatccaggcccttcagactggctatgtgcgcggtgaaagcgatgaatttttatcggccacaatcatcggcgactatgccggcatgcgcgatggtgatgggctggtaatgatgaattttcgggcagaccgggcgcggcaattgctggattgtctgtatcggccagaggtcacatcttgtgatacacggccaatcgcattatgcccgggtcttggcatgaccagctattcagccgcacttgatggctttgtcacaccgctctatccgccggtggaaattgccgacactctgggcgatgttgttgccgctgctggcctaagtcagttgcggcttgccgagaccgaaaaatacccgcatgtcacatttttcttcaatggcggcgatgaaaccatgcgcgacggcgaagagcgcgccatggtgccgtcaccaaatgtcgccacctatgatcaattgccggaaatgagtgccgccggggtgctggcaaaagccgtcgctagcctgcaggcgaaagcgcatgatctgttggtgatcaattttgcgaatccggatatggtcggtcataccggtgatctggatgcggctatcgcggcggtggaaatagttgatagttgtattggtgagctggttgcggcggtgcaggcggcagaaggacaaatgctgctgacagccgatcatggcaattgcgaggttatgtgggacaaaaatgccgactcgccgcataccgcacacaccactaacccggtaccgctgattctggtcaatggcccgcccggtgtgcagctcaccgacggccggctggctgatctggcacctagtttgctggcgatgcttggcattgaccaacccgccagcatgaccggccatgcggtttttgccgggttagcaacggcggcaaaataag

SEQ ID NO: 291998 - DNA, 354 bp, Unknown
  Bacterial polypeptide expressing nucleotide sequence isolated from the Sargasso Sea
aatgggcaattcagaggtagggcatcttacaattggttcgggaagaataatacaacaagaacttgtaaggatttcaaatattgtaaaaaataatcaattaggcttagtaaatgagttgaaagaaatagctgcttcattaaagaaaaataattctactttgcatatcacaggattatgttccgatggaggagttcatagtcatatcgatcatttattaggtttaataaaatgggcatctgataataaacttaaaaaagttgcaatacatattattactgatggaagagacactcctgcaaaaagtgcctctaaatatcttaaacaaatagaatcatgtattaaaaaatttaacgt

SEQ ID NO: 291999 - DNA, 1531 bp, Unknown
  Bacterial polypeptide expressing nucleotide sequence isolated from the Sargasso Sea
tatgtcaacagctaagaaacctttggttctggtcatcatggacggttggggctacagcaccaagcaagagcacaacgccgtcgctgccgccaagactcccaacctcgaccgtctcgcccgtgactacaccagcaccctgatctccggctccggcctggacgtgggtctgccggatggtcagatggggaactccgaagtgggccacgtcaacatcggcgccggtcgcatcgtctatcaggaactgacccgcatctccaaagacattcaggacggcgacttcttccagaacctcgagctggccaaggcggtcgatgctgccgtgaccaagggcaaggccgtacacatcatgggcctgatgtccccgggtggcgtgcacagccacgaagagcacatcatgggcatgatcgaaatggccgccaagcgtggcgccgagcagatctacttccacgccttcctggatggccgtgacgtgccgccgcgctccgcccagtcctccatcgagcagttcgatgccctgttcgcccgtctgggcaagggtcgcttcgcctccatgatcggccgttactacgccatggaccgcgacaaccgctgggatcgcgtgcagcaagcctatgacctgatgacccagggcaagggcgagttcaccgccgacagcgccagcgaagccctggccgccgcctacgctcgcgacgagaacgacgaattcgtcaaagccacccgcatcggtgccgccgcccccatgcaggatggcgatgcgctgatcttcatgaacttccgtgccgaccgtgcccgcgagatcacccgcgccttcgttgacagcgacttcaccggcttcgcccgcaccgccaccccggcgctgaacttcgtaatgctgaccgagtacgcggccgacatcaaaaccgcctgtgcctacccgccgaccgcgctggtcaacaccctgggtgaatggctggccaagcagggcaagacccagctgcgcatctccgaaaccgagaagtacgcccacgtcaccttcttcttcaacggtggcgaagaggcctgcttcactggcgaagatcgcgaaatcgtcgccagcccgaaagtggccacctacgacctgcagccggagatgagctccgaagagctgaccgacaagctggtcggcgccatcaagagcggcaagtacgacgtcatcatctgcaactacccgaacggcgacatggtcggccacaccggcgtgttcgacgccgcggtcaaggcctgtgaagcagtcgaccactgcatcggtcgcgtcactgacgccctggccgaagtgggtggcgagtgcctgatcaccgccgaccacggcaacgccgagaagatgatggacgaagagaccggtcaggcgcacaccgcccacaccaatctgccggttccgctcatctatttcggtcgcaaggccgaagtggctgaaggcggcaaattgtccgatctggcccccaccatgctgaccctgatgggtctgccggtaccgccggaaatgactggcaagcccctgatgattctgaaataa

SEQ ID NO: 292000 - DNA, 859 bp, Unknown
  Bacterial polypeptide expressing nucleotide sequence isolated from the Sargasso Sea
tatgactaaattaggccataagcgtaccattttgataattctggatggttggggtcatactgataatactgaatacaatgcaatctattctgctaacaaaccaatctgggataatatttgggaaaaataccctcatacccttataaatgcctctggtcttgatgtgggactaccagcatcacaaatgggtaactctgaagttggtcatatgaatattggagctggaagagtcgttgaccaagaatttactcgaatatcaagagccataaaagatggtactttcaatcaaaataatacattaaaaaacgcattcaaccatgcgaaaaaaaacaataaggctatccatttgcttgggctactttctccaggtggggtacacagtcatgaagatcatatttttgctctaattaaactagctaaaaaatgcggtgttaaaaaactttttctacatgcgtttcttgatggtcgagatacaacaccaaaatgtgcaatagaatcaattcataaagcacaattaaaaatgaaagagttggaattaggctcatttgcttctattgtgggtcgatattacgcgatggataggaataaaaattgggatagaacaaaatttgcttatgatgtaatcagtcaaggaaaagctaactatagatcaagtgatccatttatcgctatagatatggcctatgctagaaatgaaactgatgaatttatatcgccaactgcaataaccaaatctagcgaagctcctattattattgaggatgaagatattgttatttttgctaactaccgtgctgatcgtgcaaggcagttggcgcgtgccttcacaaaaccttcattcaaagcattccatagagaa

SEQ ID NO: 292001 - DNA, 613 bp, Unknown
  Bacterial polypeptide expressing nucleotide sequence isolated from the Sargasso Sea
atgaattcaaattatcttgtactagttagacatggccaaagtgaatggaatgcaaaaaatttatttacgggttggaaagacccaggcttaacagaaaacggcactgcagaagcaattagagcaggcaaacatcttaaaagcttaggcctaagttttgatgttctgtatacctctgcgttagtaagagctcaattaacaggaaaaataatgttagatgaactcagacagagcgatttagaaattattgaagataaggcacttaatgaaagagattatggcgagcttacaggcttaaataaggatgaagcaagagagaactttggtatagaacaagttcaagtatggagaagatcctatgatatagctccgccaggaggtgaaagtcttaaagatacatataatagggtcattccttattttgaaaataaaattcaacctctaatgaaagataaaaatgttcttatctcagctcatgggaattcgctaagagcattagttaagtatttagacgatatttctgaaacagatatcataaaactcgagataggaactggagagcctatagtctataaattcactgatggaaaattcattaaagaatcacataggtaat

SEQ ID NO: 292002 - DNA, 493 bp, Unknown
  Bacterial polypeptide expressing nucleotide sequence isolated from the Sargasso Sea
agacactatggagcactgcaggggcttaataaagcagaaacagctgctgaatatggagaggagcaggttcatatttggcgcaggagttattcaattccacctccccagttaaaacttgatgacaaaagacatcctcggtttgaccccttatattcaaatctttcattggatgatcttcctgttgctgaatgccttaaagatacggtaaaccggttcatgccatactggtttgattcaataaagcctgatgttgaatcggggaaaaatgttttgatcgtcgctcatgggaactctctaagagcgcttgtaaaatatttagaaaagatttctgataatgatatcattaatttgaatattcctacaggtgtacccttggtttatgaattagatcaagatatgaactctaagaaaagttattatttaggagatcaagatgagatctcaaaaaagactgcagcagtcgcagatcaaggaaagaataaagctacttaaa

SEQ ID NO: 292003 - DNA, 625 bp, Unknown
  Bacterial polypeptide expressing nucleotide sequence isolated from the Sargasso Sea
atgaaaaattcaagtttaattttagttcggcacggtcaaagcgaatggaatgaaaaaaatctttttactggttgggaaaatccaggactgacaaaaaaaggaactaatgaagcaaaacatgctggcgtattaataaatgacctcgatattcaatttgatcacctatttacttcagttttagatagagccaaactcaccggagcaatcattctagagaatatcaatcagaaagatctagattctattgaaaacaaagctctcaatgaaagattctatggtgaccttcaaggtcttaataaagatgaatgtaggcaaaaatggggtgctgaacaggtacaaatttggagaagatcttatgatgttggtccgcctgggggagagtcactaaaagaaactggagagagagttttaccatattatttaaatgagatttacccattaatacttcaaggcaaaaatattttggtttctgcacatggaaattctcttagagcattaataatgcatttggacaaattatcttctgatgaaattgttaaattggaaataccaactggggcccctattcaatatatctttgatgatcagggtaaagtattaattaaaaagaatttaattgaataat

SEQ ID NO: 292004 - DNA, 775 bp, Unknown
  Bacterial polypeptide expressing nucleotide sequence isolated from the Sargasso Sea
cttgcccacaaccaagaaaattgacaagacatacatgaaaaagaatttaatattagtaagacatggtcaaagtgaatggaatctcaaaaaccttttcacaggatggacagatgttgatctcacagaacagggtataaaagaagctgaaaaagcaggacaaataatttcatcactgaattttaaagttgatatagcttttacttctgaattaatacgcgcgataagaactttagatatcatcaaaaccaagctagaagatccggatttatcaatcaaaagagactggagattaaatgaacgaagttatggtgccttacaaggattgaataagtttgaaactgctcaaaagtatggcgatgatcaagttcatatatggaggagaagctatgatattcctcccccaccgcttgaaaaagacgatcaaagacatccatgcaatgatccaaaatatgagaatattgataatttacctgactcagaatccctagccacgacattaattcgtgtaaaaaaatgttggaatgaaattattcatccacaacttgaagaaaacaaaaatgtattaataacagctcatgggaacagtcttagggcgcttgtaaaaatgcttgataatgtttctgaggaagaaataacccaatttaatattccaacaggtgttccaatcctttatgagcttgatgagaaatgcaagtcacaatcaaggagattccttggtgataaagacgaaatagccagtgctattgatgaggttgctaatcaagctaaaaattaa

SEQ ID NO: 292005 - DNA, 631 bp, Unknown
  Bacterial polypeptide expressing nucleotide sequence isolated from the Sargasso Sea
atgaacaaacttgttttattgagacatggtcaaagtcaatggaatttagaaaatagatttactggttggaaagatgttccattaaccgaaaaaggtattaatgaagctaataatgcaggacagctgttaaaaaaacataaaataaaaattgataaagtatttagtagtgtattagagagagcaaataaaacagcagaaatagctataaaggcatcagagatagaaaatttacataaagatggaaaactcatatatgaaaaagatcaaaaactgaatgagagggattatggagatttagttggtttaaataaggctgaaactgcagataaatttggaaaagaacaagtacacatatggagaagatcttatgatacaccgcctccaaacggagaaagtcttaaggatgtagtagcccgagtttctccttactttactgaaacaattcaaccacatattttaaataaaaaaaatgttttaattgcagcacacggtaattccttaagagcaattatgattaaagttggtatgtacaaacctgaagaaatatcttctatagaacttccaactggtagtccattatgtttagattaccaaaatggaaaattaattaaacattattacttggattaat

SEQ ID NO: 292006 - DNA, 718 bp, Unknown
  Bacterial polypeptide expressing nucleotide sequence isolated from the Sargasso Sea
aatgagtcatttaattttagtaaggcatggacaaagcgagtggaatttacaaaaaaaattcactggttgggtggatgttgatctaactccccagggtaaattagaagcatgtaaatcaggtgaagttataaaaaatcaaaatataaaaatagattattttttttcatcatttcaactcagagctataaatacattaaagcttatacagaacactttaagaaataatgatcaatcaattaaggcatggcaactcaatgaaagacattatggagcactcacaggtttaaataaagatgaaatgaaaaaaaaatttggagaaaaaaaaatactcgaatttcgaagatcctggaatataaaacctgatccattgaacaaaaacagcccatatcacccaagtaacattggggtatataaaaatttgccaaaagaaaatattcctgacacagagtccttggaagatacttataatcgagtagttaattattttataaaaaatatagaaaaaaaattacatgataaaaataatattttaatttcagctcacggaaattctcttagagcattatgtaaatttttatttaaacttgatgaaattcagataacaaaacttgaaattccaactggcaatcctcttatgattacatttaatgaaaaaaataaaatttctaaatgtagatatttggatcaagaaagagctcaagatttattagttttttag

SEQ ID NO: 292007 - DNA, 748 bp, Unknown
  Bacterial polypeptide expressing nucleotide sequence isolated from the Sargasso Sea
atgaatctgatttttttaagacacggtcaaagcatttggaatctagaaaatagatttactggttgggttgatgttggactctctgatggtggggtagatgaagctttaaaagcaggtaatacattattaaataaagaatatgttcctgatatttgtttcacctcctatttaaaaagatcaaaagaaactgcaaatattttgttatctcaatatgcagataaggtaaaacaagatatagaaattgtgaatgactggacattaaatgaacgtcattacggatctctacaaggcttggataaatctgaaacagctaataaatatggtgaagaacaagtccaactgtggagaagaagttatgacactccacctcctttagcagccaaaaattctgattttgatccaaataatgataagttatacaaaaatatcagtcaagatcttccattaggggaatctttaaaagatgtagtatcaagagttaaaaaaacgatttctatgatattaaatctttcagaaacaaaaaatgttttagtagtcgcacatggaaatagtattagggcaatcctaaaaattattgaagatattagtgacaacgatattattggaataaatataccaactggaataccattagcttttaactatcaagatgataaactaactaaaattggatatcttggagaccaagaacaaattattaaattacaaaaagaagttgaacaacaatctagaataaaaaaaggttaaa

SEQ ID NO: 292008 - DNA, 381 bp, Unknown
  Bacterial polypeptide expressing nucleotide sequence isolated from the Sargasso Sea
taatctgtaattttgcaaatgctgatatggttggccacacaggcaactttaatgcgacgatattagcaattgaaactattgataaatgtttaggaaaaattattgaggcagcaaaaaaagctggaagtgaaatacttataacagctgaccacggtaacgcagaacaaataaaatcatacactactgaaaagattaaatctcagcctcatactgcacatacaagtaatcttgtgccattggtttatattggtagagaagcaagatttatcccagaaataggttctttgtcagatgtaacaccaaccttactcgatataatggatataccacagcctatggaaatgacaggaaaatcattaatagatatattaaaaaaataaa

SEQ ID NO: 292009 - DNA, 745 bp, Unknown
  Bacterial polypeptide expressing nucleotide sequence isolated from the Sargasso Sea
catgtacaagctcgttttgatccgccacggcgaatccacctggaaccttgaaaaccgcttcaccggctggaccgatgtggatctcacgcccaccggcgtctcccaggccatgtcggccggcaagctgctcaaggccgaaggctacgagttcgatctggcgttcaccagcgtgctcaagcgcgctatacacaccctctggtacacgctcgacgaaatggattgcacctggctgcccgtggtcaaggactggcgcctgaacgagcgccactatggcgccctgcagggcctgaacaaggccgacatggccaagcaatacggcgacgagcaggtgctggtctggcgccgcagctatgacacgccgccgcccgcactggaagccactgacccacgcagcgagcgcggcgaccgccgctacgccggtgtggctgccgagaacgtgcccttgaccgagtgcctcaaagacaccgtggcccgcgtgctgccgttctggaacgaggccatggcgcccgccatccgttcgggcaagcgggtggtggtggctgcgcatggcaactctatccgcgcgctggtgaagtacctggacaacatctccgagaccgacatcgtgggcctgaacattcccaacgggattccactggtatacgagctcgacgccgacctcaagcccatccgtcactactatttgggcgatgccgaagcggcggccaaggctgcagctgccgtggcatcgcagggcaaagcgtaa

SEQ ID NO: 292010 - DNA, 664 bp, Unknown
  Bacterial polypeptide expressing nucleotide sequence isolated from the Sargasso Sea
atttacaggctgggtagatgttgatctttcagagaaaggtaaagaggaagctaaaaagtcaggagagttaattagtgaattgaatattaaaatagatattagttatacctcttatcttaaaagagcaattgaaacgctcacaattatcttaaaaacattaaatttatccatgaagtttaatactgcttgggaattaaatgaaagacattacgggtcattaacgggtttaaacaaggaagaaacaagaaagaaaattggtgaagaacaatttaaaaaatatagaagatcatgggacgttgcaccccctctcatggctaaagatagtaattaccttgaaaactttagccctttaaatgatggaattcccaaaaataaaattccttttaccgagtctctaaagcatacttatgaacgagtagttcctttttataattttgaaataaaaaaaaatttagaaaataaaaaaaatattttgatatcggctcatggaaattcattaagagcattgtgtaaatatctatttaagatttcagatattaaaattactgagcttgaaattccaacagggaacccgttaataattgatttcgataatcaattaaaaattcaaaaatattattatttagataaatcaagatctaaagatataatttttaatcaatag

SEQ ID NO: 292011 - DNA, 989 bp, Unknown
  Bacterial polypeptide expressing nucleotide sequence isolated from the Sargasso Sea
aacaattgtaggcaggtacttttcaatggatagagataaccggtgggaaagaataaaaaaagcatatgatttaatctacaatggagttggaaaaaaaacaaataacatttgtgatgaaatcagagaatcatataaaaataatatcacagatgaatttatcaatcctatcattaaaactgatattaatggagaaaatatacatagatttaataatgatgatatagtcattttctttaattataggtcagacagggggaggcaacttacatcagctatgtgtgaaaaggatcttattgattttggaatgaaatcagtaaccaaaaacttttatacactgacaaattatgatgatacgtttaaagttgttaagcctatttttaaaaaaaatattttaaaaaatactttaggcgagatactgtctaaaaatcaaattcttcaattaagaattgctgaaaccgaaaaatatccacatgttacatatttttttaatggcggaatagaggaatcattcttgggtgaagaacgaattctgtgtccttctccaaaagttgcaacatacgatttaaaacctgaaatgagtgctaaggaagttacccaaaacgtaataactgaaattaaaaaaaataaatttggatttatatgtttaaactttgcaaaccctgatatggttggacatacaggtaacttaaaggcagcagttgaagcatgtgaatcagttgataaatcacttggaaaaatagttgatgtagcaaatttgaatgactatgtaactattataattgctgaccatggtaattgcgaaataatgataaatagtgatggcactgaaaatacttcgcatacagttaaccctgttccaataattattgtaaactcaaatagcaataagataaataatggaatattagctgatattgcacctacagttctagatataatgggtgttcaaaaaccagatgagatgactggaaaatctttaataaattgaa

SEQ ID NO: 292012 - DNA, 505 bp, Unknown
  Bacterial polypeptide expressing nucleotide sequence isolated from the Sargasso Sea
aaaatacttaaaggtggagttataggcactttaatgtcaaactatggattacaaaattattttaaagaagaaaaaattagatttataagagctaaggttggcgatagatatgtaaaagaaaaaatgcgaaaaaataaatttaatctaggaggagaacagtcaggacatattatacttggtaaatttgcaacaaccggtgatggacttttagtggcgctagaagttttgttttcaatgagaaaaggtaaaaaatctagcgacttatttaatatttttaaacctacgccacaagtattaaaaaatgttccggtaaaagataaatcaattattaattcatcaaaatgtaaaaaggctattaaaaaagcttcaaaattaattcaaaatcaaggaaggatgttagttagaaaatccggcactgaatccaaaataagaataatggtagaatcaaataataaattgttgttatttaaatgtttaaatatagttaaaaggtctattaaataaa

SEQ ID NO: 292013 - DNA, 463 bp, Unknown
  Bacterial polypeptide expressing nucleotide sequence isolated from the Sargasso Sea
atctgatcttttaaaattaattttttcgaacgaaaaaattaattttaaaagatcagatgtaggagatagatatgtaaaggaaatgatgaaaaaatatagttttaacttaggaggagaacaatcgggccacataattttaggaaaatttgcaacaacgggtgatggtttactggtatcattagaggtactttttgctatgagaaaaggaaaattagctagtgaaatgtttaaagtatataagtcagttccccaaaaactcttaagtataaaagtaaaagataaaaaagtgatcaaatcttcaaagtgtaaaaaagcaattaaattagcaaaaaaattaattaaaaataagggcaggttgttagtgagaccttcaggaacagaacctaaagtaagaataatgtgcgagtcatttaatacttcgttgattaataaatgcattaatgtgttaaaaaaaactttttaa

SEQ ID NO: 292014 - DNA, 1090 bp, Unknown
  Bacterial polypeptide expressing nucleotide sequence isolated from the Sargasso Sea
acgattaaacaaaaatgtgatttcggtattgtcatcagtgcatctcataattcttatgaatacaatggcattaagatcatcaatcatatgggtgaaaaaattgatcgagaaattgagagcattatcgaatcaaaactctcagatgcgcctataactaatactgcagaatctttaggaaaagcaaaaatatcaaatacctcaagaaatctctataaatctctacttatgtcaatatttgttgatattgatgatcacttaccactgaagggatttaagatcgttgtcgacgcttctaacggcgcagcatataaaatagccccacagatacttttagacttaggtgctgatgtcattccaattgcatgttcaccaaatggaaaaaatattaaccttgattgtggatcgacacatccagaaacactcagaaaaacggttgttgcaacagaagctaatttagggatagcattagatggtgatgctgataggatcctgatggtagatgaaaatggacgtattttaaatggggatcaaatcctttacattcttgcaaaaagtaatatttctaatccgtcctttaataataaagtcgttgggacaatcacaacaaactccggcctagagatgaaactcaaagaaatgaatatagatctgtatcgttcagacgttggcgataagaatgtctattcaatgatgaaaaaaactggagccattattggtggagaatcatcaggtcatatcatcaattctgaatattcaccaacgggtgatgcattgcttacagcgcttatagttattagagaatcaattaaaaatgactctaagatcagcgatcttgctgatgatcttgagctcttgccagcccttaatgacaatcttaatacagaaaacatgtcagagattaatgaaaatcaattaaaggaaatcgcagatagaattaactctgataataaagacggaagagtgatcataaggccatcaggaaccgaaccacttattcgaatatcaattgagaatagagatcaaaagaccgctaagaaaatcctagaaacaattagaaaaaatattaaagatagggataagaaattctata

SEQ ID NO: 292015 - DNA, 366 bp, Unknown
  Bacterial polypeptide expressing nucleotide sequence isolated from the Sargasso Sea
aatgacaaaaaaatacttcggcacagatggaataagaggaaaagttaatggaaataaaataaatggtgacatgttttttaagtttggtttagctgttggcacgtattttaataataaaaaaaaaaccaaacagatggcaataattgctaaagatactaggttatcaggatatgcactagagccagcattagtgtctggattaacatcagctggaatgcatgttttcacttttgggccattaccaacaaatggtcttgcaatgcttacaaaaaaaatgagagctaatatgggaatcatgattaccgcatctcacaatccatttgatgataatggtttaaaattatttggaccgaatggtttaaaatt

SEQ ID NO: 292016 - DNA, 517 bp, Unknown
  Bacterial polypeptide expressing nucleotide sequence isolated from the Sargasso Sea
atggaaaaataaaaaaatgttaaaagggggagttgttggaacattaatgtcaaattatgggttagaaaaatattttaaatcaaaaggaattaaatttttaagggcaaatgttggagatagatacgtgaaagaaaaaatgcaaaaatataattttaatttaggtggtgaacaatcgggacatattattttaggtaaatttgcaactacaggagatggtttgctagtagctttagaagcactttttgctttaagaaagggaaaaaaggcaagtgaattttttgaacaatttaaaaaaacacctcagctcttagaaaatatcgaagtaaaagataaaaatattattaacaaaccagagataaaaaaaattataaaaaatgcagataaattaattaaaggtaaaggaagaattttagtaagaaagtcaggaacagaatctaaaattagagtaatgggagaaagtgaaaacaaagctcttctatacaaatgcgtaaacatgattacaaaaaaaattaaataa

SEQ ID NO: 292017 - DNA, 711 bp, Unknown
  Bacterial polypeptide expressing nucleotide sequence isolated from the Sargasso Sea
atgaagtgaaaactttaggaattatatttgatggtgatggtgatagaattgcggcaattgatgaaaaaggaagatactctagtactcaagatttactcccatactttattagttatttgggcgaaattaaaaataattcttatccagttttaaagactgttagtggttcagatattattaaaaatatatcagagagtcaaaatagagatgtttttgaacttccagttggctttaaatatattgctgaaaaaatgattaaagaaaaaatatttattggaggagaggaatctgggggagtaggttttggtgactttatgcctgaaagagatgctctatatgcagcgatggttttattaaatggaattgctgaaaaatctcaatacttatatgaaaccttagatgaaattcaagaagattttgggccaagtttttataaaagaattgatattaaatttccaaatcagtcagaaaaaaataacgtaaaagaatttatcatagataatattcctgagaatattaataatcacaagttaaaaagtatctcaaagatagatggaataaagttgagaattgataaaaatttttggcttctttttaggttttcaggaacggaacctctcttaaggttatattgtgaagcaccaaaagaatcttatctaattgaagtattagagtggggtcaagaatttataaatttggcaggaaaataag

SEQ ID NO: 292018 - DNA, 565 bp, Unknown
  Bacterial polypeptide expressing nucleotide sequence isolated from the Sargasso Sea
atgagcaaaaaatattttggaactgacggaataagagggagagtaaaccaagaaaaaataaacggcgaaatgttttttaaatttggtttagcggctgggatatattttaaaaatcaaaaaaagagtaaacaaattgctataatcgctaaagatactagattatctggatatacacttgaagcagcattagtttcaggattagcttcggcaggaatgcatgtttttacctttggacctctgcctactaatggattagccatgcttacaaaaataatgagagcaaacatgggtataatgatcacggcatctcataatccttttcatgataacggtttaaaattatttggtcccgatggattaaaattatctgacaatattgaaaaaaaaattgaaaaattaattgactcaaaaatcgctgataaattatcaaatccaaaaatactcggtagagttaaaagactggaagacggatctgaaaaatatattgaaattttaaaaaaaaattttccaaaccaatttaacctcagaggcttgaagatcgctatagattgtgcaaatggggccg

SEQ ID NO: 292019 - DNA, 546 bp, Unknown
  Bacterial polypeptide expressing nucleotide sequence isolated from the Sargasso Sea
aatatttttctgaattgaataacctaaaaaacaatattgtcgttagtaccgttatgtctaattacggttttaaacaggctatgcaaaaatttgattttgatctaatcgaaactcctgttggagataaatatgttgcagaatcaatgaataaatacgatgcctcattaggaggtgagcaatcgggccatataataattgctgatttactacctgttggagatggtcttattactttaattatggttttaaaagccctcgaacactttggaatgacactttgtgattttaagaatgaaaatttatatgagtatccacagaaacttacaaacatagagttaacaaataaattaaacgatgaagaaatagaatacataaatcaaatagcacttgatatgtcgataaataaagatttagatggccgatatcttattcgaaattcaggtaccgagccattattaagagtattagttgaggctaaaagcgccgaagcaatgcaagatttttctgacgaactgttaacaatgattaataaatacttaaattagt

SEQ ID NO: 292020 - DNA, 631 bp, Unknown
  Bacterial polypeptide expressing nucleotide sequence isolated from the Sargasso Sea
atgatattttgggagctaggtgctgatgttattgttataggagacaaacctaacggaagaaatataaatcaagattgtgggtctactaaaacaaaagctttgagaaaaaaagtaaaagatgaaaatgccgatttagggattgcatttgatggagatggcgacagattagtaataatagatgaaaatggagatcaagttaatggagaccatttacttgctatgattgctttatcacttaagaaaaagaatttattaaaaagtaataaaattgtttcgacaataatggctaatctatctttagaaaactatcttgattcaatcgatctaaaattaatcagagctaatgttggagatagatatgtcattgaagaaatggtaaaaagtggttcaaattttggaggtgaaccttcaggccacttaataataaatgatttttcaactactggagatgctattatttcctcattgcaggttttatctttaatgattgaagaaaataaatctatttcgaatcttactaatctttttcctcttatttcacaaaaacattatgagcatatatctgatgataaaaatgatatttcaaactccgttctagaaaatctttctaaagaaatgaaagaaaaaatgg

SEQ ID NO: 292021 - DNA, 406 bp, Unknown
  Bacterial polypeptide expressing nucleotide sequence isolated from the Sargasso Sea
gtaataaatcaaatgaaaaaatctaaatctatgataggtggtgagcaatcaggacatataatactgtcagaacattctaatacaggagatggaattttagcagctttaaaaattactgaaattttgatatcaaataaaaataaagcaagtaaactttttgatttgtacaaagattttgctcaagaaaaaattaacttaagttataaaacaaagaataccaaactgttaaaaattcttagtaaattaaaaaatgataaattatataataataaaaaaatcagatcacttgtcaggctgtcaggtactgaaccattagtaagaatactagttgaagggcaagaaatttctgatgttaaaaagaagtctctagaaataaaaaaattagtaaggccttatcttggttaat

SEQ ID NO: 292022 - DNA, 451 bp, Unknown
  Bacterial polypeptide expressing nucleotide sequence isolated from the Sargasso Sea
aattatttgaaaagccaaaaaataaaatttattagagcaaaggtaggcgatagatatgtcaaagaaaaaatgcaaaataataattttaacttaggaggtgagcaatcgggacatataatacttggtaaatttgcaacaactggagatggtttgttagttgcattagaaatattattttcaatgagaaaaggtaaaagagcaagtgatatatttaatacttttaaagcaactcctcaaattttagaaaacgttaaagtaaaagataaatcaataattaattcacaaaagtgcaaaatagcaataagcaaatcagaaaaactgattaaaaatcacggaagaatgcttgtaagaaaatctgggacagaaccaaaaattagaatcatgggggaatcgagcaacatttcattgttaaaaaagtgtataaatattgttaaaaaatcaattaattaat

SEQ ID NO: 292023 - DNA, 655 bp, Unknown
  Bacterial polypeptide expressing nucleotide sequence isolated from the Sargasso Sea
atgtcaaaaaaatactttggaacagatggaataagaggaagagtaaatcaaggtaaaataaatggagatatgttttttaaatttggactagctgcgggtacttattttaaaaatttaaaaaaaaataaacaaacggcaattattgctaaagatactagactgtcaggttatactttagagcctgcattagtctcaggtctagcttctgctggcatgcatgtttttactctaggaccattgccaaccaacggtttggcaatgctaacaaaaaaaatgaaagcaaatttgggtataatgataacagcatctcacaacccttattacgataatggtttaaaactctttggtccagatggactcaaattatctgatattattgagacaaaaattgaaaagttgatcgactcaaaaattattaataatttgtcaaagcctgagacgttaggaagggtaaaaagattagaagacgctaatgaaagatatatcaaaattttaaaaagtaattttccaaataattttagattaaaaggtataaaaatcgcgatagattgcgcaaatggagcaggctataaatctggtccaaagctcttcaaatcactaggtgcaaaaatttttaaaactggcacttctccaaatgagattaaatataaataaa

SEQ ID NO: 292024 - DNA, 675 bp, Unknown
  Bacterial polypeptide expressing nucleotide sequence isolated from the Sargasso Sea
tacttcaacaaacagtaaaggcagtaggtgcagatgtcggtattgctcttgatggtgatggagacagggtggttatggttgacgaaaatggaaacttgctcgatggtgatcaacttttatttattttggcaatgtattgtaaagaaaataatatgcttaaaaatcctgtagttggcacagtattgagcaatttgggtctagaggaatcactaaaaagtcatggaattgaatttatgagatcaaaggtaggtgatcgcaatatattatcattgcttcgtgaaacaggtggcaatttggggggagaggcatcagggcacatgatatgcatggactatgttgaaactggagacggcctaattacagcaattcaggttcttgaaataatgaaaaataaaaacagcagcttgagtaatctcgcaagtggaatgaaaaagtatccacaagtaattgaaaatattgataataaaaacaactttaatgtatctgattcaaaagaaatagaaacacttgtggatgatataaagaaaaaattggaaggcaaaggaaggttaatcttgagaccttccggaactgaacctttaattaggataatgcttgaaggtgagagcagagacgacctcatctctcatatgagcgatcttaagcaaaatatcgagaaaattgtttcgtcttgat

SEQ ID NO: 292025 - DNA, 427 bp, Unknown
  Bacterial polypeptide expressing nucleotide sequence isolated from the Sargasso Sea
catgagtaactcagctcctcttaaagttttaaaatctaaagaagcgttacctttacgccgtgacaggaagtttggcactgatggaataagaggtccagtagatagcacaatgaatcctttatttgttacaaagctaggttgggctgcaggctgtgtccttctagaagaaggaataacaaaagtgctaattggcaaagatactaggatttcaggatatatgcttgaatctgctctccaggcaggttttatatcctcagggatggatgtaactttattgggacctttaccaacccctggtgtgtcttttttggctaactcaaataaacaagtaggagtagttataagtgcatctcataacctttttgaagacaatggaattaagttcttcaatttgaatggtcaaaaattttctgcagaattagaaaaa

SEQ ID NO: 292026 - DNA, 949 bp, Unknown
  Bacterial polypeptide expressing nucleotide sequence isolated from the Sargasso Sea
tttgggtactgatggtattaggggtattccaaacgatactttaagtaaagatcttatatccaaaatatccgcatctgttgagcaacatataaatcctaaaaatattggtgtcatttcagatacacgttcatcctcagatgaaattcttaattggatttccataggattttcaaacaaagtaaatatttataatcatggagttttaccttctggttcaatgccaataattttgaataaatttaattacgatcttggaattataatttctgcttcacataatcctgctgaatataacggcataaagttaattcaagaaaacggatcaaaattagatgatgatgttgaaatatcaattgaaaaaaatattgatagcttagagctaccaaatcaacatgctgaaattattaatttaagtgatggacatcttgaatatcttaattttcttgatgatgttacagatattgattttagtcattttcaaatactcatcgatgcagcaaacggatcagcatcaactgtcataaaagagttatttgataaaaaaaatgcaaattacagaattatcaacaatcaaccggatggcttaaatataaataaagactgtggagcaacagtccctgaaaatctacaaaaaaatattgaaaagggtgaaattggtgcatcttttgatggtgatgccgatagattgataatggtcgatgaaaatggagatattgtaaatggagatctgatattaacaattctttcaaaatatttatcagaagtaaatcagcttactaataacattgttgttagtacggtaatgtcaaattatggctttaaacaagccatagaaaaatttaattttgatcttattgaaactccagttggtgataaatatgttgcagaggcaatgaaaaaatatgacgctgctttagggggagaacagtctggtcacatcattatttct

SEQ ID NO: 292027 - DNA, 502 bp, Unknown
  Bacterial polypeptide expressing nucleotide sequence isolated from the Sargasso Sea
atggctaaaaagtattttggaactgacggaattagagggcaagtaaatagtgaaagcattaacggtgaaatgttttttaagtttggattagctgcgggaacatattttaagaatcaaagaaaaagtaagcaaaccgcaattattgcaaaggatacgagactatcaggttatacattagagccagctttagtctctggattagcttcagctggaatgcatgtttatacgcttggtccactcccaactaatgcgttagcaatgctaacaaaaaaaaaacgggctaatatgggaattatgatcaccgcatctcacaatccatattctgacaatggactcaagttgtttggacctgatggactaaaattatctgataaaatagaaaaaaaaattgaaaaactaatcgattcaaaaattattaaaaatttatctatacctaaagatcttggtcgagttaaaagactagaaaatgcaaatgatgaatatataaaaatactaaaaaata

SEQ ID NO: 292028 - DNA, 880 bp, Unknown
  Bacterial polypeptide expressing nucleotide sequence isolated from the Sargasso Sea
cctaaaaataaaaaaagaaaatattttggaacagatggaattagaggcagagcaaatacctatccaatgacaggagaaactgccttaaaagtgggtatggctgcaggtgaatattttacaagaggaaaacataaacataatgttgtaataggtaaagataccagactttccggatatttaatagaaccttctttaactgctggttttatttcaatgggtatgaacgtttttcttgtcgggccaatgccaacgcctgctatatctatgctaacaagatctatgaggtgtgatgtaggcgtaatgatttcagcctcccataactcatatgaagataatggtataaaattatttgatcctaatggtgaaaagttgagtgacaaaagtgaacttaaaatagaatccttaatggataaaaatcataaaactaatttagtagattcctcaaaactaggaagagcaaaaagaattgaagatgctgcgggaaggtatttagaatttgttaaatcaacttttccagatgagttatctcttaaaaaattaaaaattgtaatagactgtgccaacggagctgcctaccaagttgcgccaagagtattgtgggaactaggtgctgaagtcatatcaataggatgtaatcctgatggcacaaatattaactataaatgtgggtcaacctaccctatccatatggcaaatatggttaaaaaacacaaagctgatattggtattgcattagatggtgatgctgatcgttgtgtactttgtgatgaaaaaggtaattttattcacggtgataaaataattggtttaattgcaaaaagatatttagatcaaggtcttttagaagggaaatctattgttggaactaaaatgacaaata

SEQ ID NO: 292029 - DNA, 539 bp, Unknown
  Bacterial polypeptide expressing nucleotide sequence isolated from the Sargasso Sea
taagttcacaaaaactaaaaaaaatacagtagtaacaactgtaatgtcaaatttaggttttgaaatttatttgaaagaaaaattaggagtaaaattaattagagaaaatgttggagatataaatgttattactaatatgaaaaaaaattcttataatttgggtggagagcaatcaggtcatattatccttggccaatatatgaacaccggtgatgcaatactagctgctataaaagtaattgagtcactatctaaaagtaatacaaaagctagcaacttgtttaatctttttaaaaaattacctcaaaataaaataaacataaaattaaatactgagctctctaaattacaacaaaataaaattaaaaatatttcacttcaatatgtgaaaaaatataaaaatttgagatttttagttagaaaatcaggtactgaaccactagttaggatattagttgaaggcagagaaaaattgctagtaactaaaattacatctaagttaatgaaagaattgaaagagattattagtgttaagtgat

SEQ ID NO: 292030 - DNA, 472 bp, Unknown
  Bacterial polypeptide expressing nucleotide sequence isolated from the Sargasso Sea
catgtcgaattatggtctagagaaattttttagagaaaaaaaaattaatttttttagatcaaatgtcggagatagatatgtaaaagagcttatgcaaaacaaaaaatttaacttaggtggagagcagtctggccatattatattaggaaactttgcaacaacaggagacggattgcttgtagcacttgagatacttttttctttgagaaaaggtaataaagctagcgaattattctctatttttaggccaacacctcaagtgctagaaaatatttcagttaaggacaaatcaataattagttcaaaaaaatgtaaatctgcaattagaaaagcagaaaaaattatttttggaaagggaagactaatagtaagaaaatctggtacggagtctaaaataagaataatgtgtgagtcggaagacaaaattcttcttaataagtgtataaaaatagtttctaactcactaaaataa

SEQ ID NO: 292031 - DNA, 367 bp, Unknown
  Bacterial polypeptide expressing nucleotide sequence isolated from the Sargasso Sea
aatgggtaagaaatattttggaactgacggcataagaggaaaagttaatcaagataagattaatggagaaatgttttttaggtttggtttagccacaggaacttactttaaaaacacaaaaaaaaataaacaaacagcaataattgcaaaagatactaggctttcaggatatgctttagagcccgcattagtttctggtttaacatcagctggaatgaatgtttatactttaggacctctcccaacgaatggtcttgcgatgttaactaaacaaatgaaagctaatatgggcataatgatcacagcatcacataacccctattttgataatgggttaaaattgtttggtcccgatggcctaaagctt

SEQ ID NO: 292032 - DNA, 826 bp, Unknown
  Bacterial polypeptide expressing nucleotide sequence isolated from the Sargasso Sea
agtggaatcatgatatctgcaagtcataatccgccagaatataatggcataaaaatttttgattataatgggcaaaaaattactaaccatctagaaaataaaattcaaaaattaattgaagagtcaaatcaaaatatatcagttcctaaaaaagtaatccctcttaatacaagtaaagatctaatggatgtttatattaaaggccttatccaaacaatgggtggagaaaatctaagtgggttgaaaataattttagacacatgctatggatcagcgacaacctgcgcaaaaaaaatttttcaggcccttggtgctgaagtaatagttatcaataactctaataatggtttgaaaattaatatgaattgtggttctactaaccttgaaccactaaaaaaagcattaagagagaatcctgcagatatgggttttagctttgatggagatgccgatagagtaattggaatggattccaaaggtaatgtgttagacggagatcacatgctttttctttggggaagagagctaatggaacaaaaaatgctgacaaataatttattaatatcaacgcaaatggcaaacttaggttttgaaagtgcttggaagaaaattggaggaattttacatagaactaacgtaggagataaatatgtacatgacgcaattaaggaaaaaagagctgatttaggaggggagcagtcaggtcatatactttcaaaaattaataacttttccggagatgggatattgactgcacttcaaatttctaaacattgtaaagtgaaaaatattaatttaaatgactggcttaaaagtagtttcgaac

SEQ ID NO: 292033 - DNA, 263 bp, Unknown
  Bacterial polypeptide expressing nucleotide sequence isolated from the Sargasso Sea
tttggctaggctacttaagattcgaaagagaaagcactttggtacagatggtataagaggatctatctctaaagaaacaaatccagaatttatcctcaaattaggttgggctgctggaaaagtgtttaaagagcaaggaatcaaagcacttattattggaaaagatacgagaatttctggatacatgctggaaacagcacttcaatcaggaattatttctgctggagtggatgttaggttggtcggccctatgccaacgcctg

SEQ ID NO: 292034 - DNA, 754 bp, Unknown
  Bacterial polypeptide expressing nucleotide sequence isolated from the Sargasso Sea
tggaaatgctcttacggcaggttttatttcagctggctggaacgttaatttgttgggacccttgccaaccccggcagttagttttttaaccaaatcacttagagctgatttgggtataatgatttctgcgtcacataatccttttgaggataatggtattaagttttttgataaagacggctttaagttggatgataaattagaagttatgatttcagatgaggttaagcgtccatcctttttggtagaacctgagaatttaggaagagcaagccgaataaatgatgtgcttggtcggtatacagaatttgctaaaacaaccgtttctagcgacttaaggttagatggcttaaaagttttggtggattgtgcaaatggcgcggcatacaagttaattccgcaaacaatcagtgaattgggggcggaagttataccaatgagcgttaatccaaatggctacaacataaatttggaatgtggttcaaccttcccgctcagagctcaagaggcagttttagctgaaaaagctgatttgggtgtttgcttggatggcgatgctgatagagttttactaattgatgaaaacggaaaaatagccgatggtgatcaagtcatggcactaatagcaaagtcatggatgacggaggggtctttgaggaataataccgtggtatcaacagttatgtctaatttagctttcgagatatttctcaaggatataggggtagagcttatcagaactaatgtaggagat

SEQ ID NO: 292035 - DNA, 427 bp, Unknown
  Bacterial polypeptide expressing nucleotide sequence isolated from the Sargasso Sea
atgagaaataaatactttggcaccgatggaataagaggaactgtaaaccagggtataattacaggtgaaaaattttttaaatttggtctagcatcgggaaattattttaaaaatcaaaaaaaaactaaacaaattgcaattatagctaaagatacaaggttgtccggttatactttagagcccgcattagtctcgggattagtctctggcggtatgcatgtttttacacttggaccactacctacaaatggattagcgatgttgaccaaatcgatgagagctaacatgggtatcatgataacggcatctcacaacccttattatgataatggtctaaaactttttggcccagatggtatgaaattatctgataaaattgagaagaaaattgaaaaattaatagatcaaaaaaagacaaacaattaac

SEQ ID NO: 292036 - DNA, 500 bp, Unknown
  Bacterial polypeptide expressing nucleotide sequence isolated from the Sargasso Sea
aatgtcaaaaaaatattttggaacagatggaataagggggactgtaaacagtaaaaatattaatggtgacatgtttttcaaatttggtttggcctcaggaacatattttaaatctcaaagaaaaaaaaaacaaatagcaattattgcaaaagatactagattgtcaggttatactttagagcctgcattagtttcaggactaacatcagcgggtatgcacgtatataccttaggacctttacctactaatggattggctatgcttacaaagtccatgaaagcaaatatgggtattatgattacagcgtcacacaatccgcaccatgataatggattaaaattatttggtcctgatggaatgaaattatcagataaaattgaaaaaaaaattgaaaaattgatagataaaaaaatttacaaaaatctctcaaatccaaacatgcttggaagagttaaaaggttggaaagtggaactaaagattatatcaaaattttaaaaa

SEQ ID NO: 292037 - DNA, 787 bp, Unknown
  Bacterial polypeptide expressing nucleotide sequence isolated from the Sargasso Sea
atttttttcagaatcaggaaaaaagctagattcgtctttagagggattgatatcgcaaaagcttgatcgtgactaccctatgctcgtttcgaatgggattggaaaagttaccaggataaatgatgcatcggggcgttatgtagaattttgcaaaagttgtttccctacagaacttaaccttcgtggagtaaaaatagccttggattgcgcgaacggagccgcatatcaagttgctccgaaggttttttctgagctaggagcggacgttaagtcaattggagtttctccagacggttacaacataaatgccggcgttggatcaacacagccgagtgcattagtagctttagtcaaagagttcggagcagattttgggatcgctctcgatggcgacggcgatagactaattatggttgatcgaaccggcgaaatactcgatggcgatgaacttctctactttattgctttatctaagttaaaggcgggaactttgccgggtggtgtagtaggaactcaaatgagtaacctggggcttgaagaggcgttggctaatttaggtgtgcctttttacagagctcctgttggagatcgttatgtcttggaagagttaacaaaaagagaatggttacttggaggcgaggcttcgggccacatactctgcttagatcaaacttcaaccggggacgccatagtggccgcattgcaggttctgtcggcttgcagcaatttagagcagtctttagaggaattaagaaaagatattacaaagtatccgcagcacatagtt

SEQ ID NO: 292038 - DNA, 586 bp, Unknown
  Bacterial polypeptide expressing nucleotide sequence isolated from the Sargasso Sea
aggaaaagaagttgatggtgataagattataggattgctatgtaaaagttatgtaaaacctaagaaaatatctaatcaacatgatgttattataacagttatgtctaacatgggattagaaaattatcttacaaataaattaaaattaaatattaaacgaacagctgttggagatataaacgttataaatcaaatgaaaaaatccaaatctatgattggtggcgaacaatcaggacatataatcttatcagaacactctaatactggagatggaattttagcagctctaaaaattactgaaattttgatatcaaataaaaataaggcaagtaaactttttgatttgtataatgattttcctcaagataaaattaacttaaggtataaaaaaaagaattccaaactgttaaaaattcttggtaagttaaaaaatcataaactgtataataataaaaaaataagatctcttgttaggttatctggtactgaaccattagtaagaatactagttgaagggcaagaaattaccgaagttaaaaagaaatctttagaaataaaaagattagtaaggccctatcttggttaa

SEQ ID NO: 292039 - DNA, 430 bp, Unknown
  Bacterial polypeptide expressing nucleotide sequence isolated from the Sargasso Sea
aatgaaaaataaatattttggaacagatggaattagaggaacagtaaaccaggggaatattacgggtgaaaaatttttcaaatttggactagcttcgggcacttattttaaaaatttaaaaaaaaataagcaaatagcaatcatagctaaggatacccggctatcgggatatacattggagccagctttagtttcaggactggcatctggaggcatgaatgttttaacccttggacctttacccactaacggtctagcaatgttaacaaaaacaatgagagcaaatatggggatcatgattacagcctctcataatccatatcatgataatggtttaaaactgtttggtcctgatggtttaaaattatctaataaaattgaaaaaaaaattgaaaaattaatagactcgaaaactacaaaacagctctca

SEQ ID NO: 292040 - DNA, 768 bp, Unknown
  Bacterial polypeptide expressing nucleotide sequence isolated from the Sargasso Sea
ccggaacccctgcgccttacctcgcagaactgatcacggcggtccaggcctcaacaaccgccgggactcccgccgtagggctggtgttcgacggcgatggtgatcgcatcgccgccgtggctgaaaccggtcggttctgcagcacccagcttctgatgcccctgttgatcgatcacctagcccgtgcccggcagctgccgggcacggtggtcaagaccgtcagcggctcagatctgatgcggctggtggcggaagcccaggggcacgacgttcttgagctcgcggtgggcttcaaatacatcgccgcggagatgctggtgggggacgtgctgatcggcggcgaggaatctggtggtgtcggttttggcatgcacctgcccgagcgggacgcactattcgcggcgatgctggtgctggaagcccttgtggaaggcaaacaacccctgggagctcggctggatgctcttcagcagcagcacggaggcagcagccactacgaccgcctcgacctgcggttggctgacatggaggcacgccggaggctcgagaccctgttggcccagagcacaccttcgaccgtcgcaggcgtagaggtactggaggtaatcaccacagacgggatcaaattgaggatggggcccagtcactggctgatgctgcgcttttctggcaccgaacctctgctgcgcctctactgcgaaggtccggatgctgatcgggtggatgcagtgctggcctgggccaggcagttcgcagaggccgcatgaa

SEQ ID NO: 292041 - DNA, 445 bp, Unknown
  Bacterial polypeptide expressing nucleotide sequence isolated from the Sargasso Sea
ttttaaaaccattggaattaaatttttaagatcagatgtaggagatagatacgtaaaagaaaaaatgaaaataaataaatttaatttgggcggagaacaatcgggtcatataattcttggaaagtttgcaaccactggagatggattattggttgccttagaaatactattttcattaagaaaaagaaagaaagcaagtgaacttttcaataaatttaaacccactcctcaaatattagcaaatatagaggttaaagataaatcaattattaattcgccaaaatgtaaaaaagcaattaatgaagcaaataaaataattaaaaataaaggtagaatattagttagaaaatctggtaccgaacaaaaaataagaattatgagtgagtcagaagctccaagtttaaataaattgtgtgttaatataattaaaaaatctattcagtaa

SEQ ID NO: 292042 - DNA, 707 bp, Unknown
  Bacterial polypeptide expressing nucleotide sequence isolated from the Sargasso Sea
aatgacaaagaaatattttggtaccgatggtattagagggcctataaatagtaaaaatatcaatggagatatgttttttaaatttggtttagcaagtggaacctattttaaatctcaaaaaaaaataaaacaaacagctataattgcaaaagatacaagattatcaggttatacactagagccagcattagtttctggactagcatcagcaggaatgcatgtttatactttaggaccacttcccacaaatggtttagcaatgcttacaaaagcaatgaaagcaaatatgggaatcatgattactgcctctcataatcctcacaaagataatggtttaaaattatttggacctgatggaatgaaactttcagataaaattgaaaaaaaaattgaaagtcttatagatagaaaaattataaataatctttcaagaccagaaaaattaggaagagtaaaaaggttagaaactggaactaaagattacatcaaaattttaaaaaagaactttagtaaggagtttaatttaaggggattaagaattgtaattgattgtgcgaatggggctggttacaaagctggtccagaattgttaaaatctttaggtgccaaagtaatagcaataggagtaaatcccaatggattaaatattaataaaaattgtggttcaacatttcctgaaaaaattaagttggcagtaaaaaaaaata

SEQ ID NO: 292043 - DNA, 319 bp, Unknown
  Bacterial polypeptide expressing nucleotide sequence isolated from the Sargasso Sea
aatgacaaagaaatattttggaacagacggaataagaggagcaattaatagtaaaaatattaatggagatatgttctttaaatttggtttagcatctggcacatattttaaatctcagaagaaaaagagacaaatagcaataattgcaaaagacaccagattatctggatatactcttgaacctgcattggtttcaggattagcatctgccggcatgcacgtatacactttagggcctttaccgaccaatggtttagctatgttaactaaatctatgaaggccaatatgggtataatgattacagcttctcataatcca

SEQ ID NO: 292044 - DNA, 507 bp, Unknown
  Bacterial polypeptide expressing nucleotide sequence isolated from the Sargasso Sea
aatgacaaaaaaatattttggtactgatggtattagaggacctatcaatagcaaaaatataaatggagatatgttttttaaattcggattggcaagtggaacatattttaaatctcaaaaaaaaagaaaacaaatagcaataattgctaaagatactagattgtcaggttataccttagaaccagcattagtctcaggattagcctcagcaggtatgcatgtttatactttaggaccacttccaactaatggtttagcgatgctcacaaaatcaatgaaggcaaatatgggaattatgattactgcttctcataatcctcatgatgataatggtttaaaattatttggacctgatggaatgaaattgtcagataaaatagaaaaaaaaattgaaagtttaatagataaaaatataacaaagaatctgtctaaaccagaaaaattaggtagagttaaaagattagaaactggaacaaaagactatatcaaaatcttaaaaaaaaattt

SEQ ID NO: 292045 - DNA, 739 bp, Unknown
  Bacterial polypeptide expressing nucleotide sequence isolated from the Sargasso Sea
ggaataatccctgctggcataaacatcaatcaaaactgtggctctttatttccgctaaaagcatcagatttagtaaagaaaaaaaaatgtgatatcgggatttgtttagatggagatggtgatcgagtcgtaattattgatgaaaagggcaaggtattaaatggagaggagctaatttatattcttgctaaatattatttatctgaaaataaaatcaaaaaaggatcaatagttgtaacaaatgaaattgcaaattatgggcttgataattctctaaaaaaattaggtttaaaattaaaaagagtaaaagtaggtgataaaaatattcttaaacaaataatcgatcataaatacttttttggcggtgagccatctggacattttatatttagagatgacatactgataggtgatggtatgacgacagctatcagacttttaactctaattctaaaaaaaaacaaaaagttatcagagttaagaaaaggtatagatttatttgaggtgataaatataaatcaaaggatagatcgagaaaaattttatttatctcaagaaagtatttatcaaaaactaaataaattatgtaaaaactttaatatttattacaatattcgtccctctggcactgagccacttttaagagtgaacttgcaatatgagaaaagaaatataaaagtaagtattctaaaaaaattaaagacacaaataattaaagtaatctcggatgcttgttaac

SEQ ID NO: 292046 - DNA, 784 bp, Unknown
  Bacterial polypeptide expressing nucleotide sequence isolated from the Sargasso Sea
tctgttttttgcggtgcccaacggaatgagtctgcgcggtctgcgggtggtattggactgcgctaatggtgcgacctatcaggtagctccccaggtcttcacggaacttggtgcagaagtggtagtcatggcggctgaaccggacggcctcaacatcaatgaccaatgcggttccactcataccgaggccttgcagcagcgggtgctggccgaaaaagcagacgtaggaatcgcctttgacggtgatggtgaccgggttgctatggttgatgcgcacggcgcgttgctcaacggcgatgaattgctttatatcatcgctcgggatcgtcaacgccgcgaagtactgcatggcggtgtagtgggtaccgtaatgagcaaccttggatttgagcaggcgctggcgcggcttgccattccgtttagtcgagctaatgtcggcgatcgaaatattctcgctcaaatgcagcagcgtgattggcaattgggtggtgaaccgtcggggcacattttgaccctggatcttgcaaccactggtgatgccatcgttgcggctttgcaggtaatcgtgccgataatcgagcagggtgaatcgctgcagtcgctggcgcgggggatggataaattcccacagattttagagaacgttacagtggcagagcctggaaaactgtctaacgatgagcgcctgttgtctgaaattgcattacacgaaaccaaattagcggaccgaggccgcattctggtaagagcgtccggaaccgagccgttgttacgtattatggtc

SEQ ID NO: 292047 - DNA, 454 bp, Unknown
  Bacterial polypeptide expressing nucleotide sequence isolated from the Sargasso Sea
atgcctttaggaaaggataggaggtttggtacagatggtataaggggacctgttgatacaaccatgaaccctttgtttgtgactaaattaggttgggctgctggaactgttcttttagaagaaggtattagcagggttcttataggtaaggacacaaggatttcagggtatatgcttgaatcagcacttcaagctggttttatctcatcaggaatagatgttgtattgttgggcccattacccactcctggagtttcttttttagctagctcaaacaaacaagctggagttgttattagcgcatcacataatttatttgaagataacggcataaaattttttaataaagatggtcaaaaattttcttctgaattagaaagaagaattgaaacaaagttaagtcaagaaatagaaactgttaagtcaattaatttaggaaaagctacgagaatga

SEQ ID NO: 292048 - DNA, 640 bp, Unknown
  Bacterial polypeptide expressing nucleotide sequence isolated from the Sargasso Sea
tgatctgggaatatgtctggatggggatgcggatcgaattgtgttaattgatgagagaggcaaaacagcaaatggagatcaactaatggctgtaatcgctgctaactggaaaaaaaatggtaagctgaaaggtaacggcgttgtctctacaatcatgtctaatttggggtttgaaaagtatctgaacagcatagggttaaatttaaaaagaaccccagtaggtgaccgttatgtcatagcgggtatgcgagagggtaaatttaacttgggaggtgagcaatcaggtcatgttattctctcagacttcatgagcacaggggacggtttagttgctgggttacaatttctagctgctttactagagaacaaggttcctgctagcaaattgttgaacagttttaacccgtatccgcaagtaattaagaatattaaggtcatcaatttaaaggatttgttgaaacagaaggtgttaaagcgcactataatggaggttgaaaaaacgctggggagtgagggtaggttgcttattcgtgaatctggcactgaaccagttattcggataatggttgaacactacgaccgaaacttggtaacacaatcagtagatctgataatggaagcttttgacgaaacaaagtaa

SEQ ID NO: 292049 - DNA, 547 bp, Unknown
  Bacterial polypeptide expressing nucleotide sequence isolated from the Sargasso Sea
atgaataaatattttggcacagatggaattagagggactgtaaatcaaggaaacattacaggagaaaagttttttaaatttggcttggcttctggcacatattttaaaaaccaaaaaaaaacaaaacaaattgctataatagctaaagatacaagattatctggctatacgttggaacccgctttagtttcaggattagtttctggaggaatgcatgtatacactttaggcccgctcccaacaaatggtttagctatgctaacaaaaaaaatgagagctaatatgggtataatgattactgcctcacataatccgtactatgataatggattaaaactttttggcccagacggtatgaaattatcagataaaattgaaaaaaaaattgaaaaattaatagactcaaataataaaaagcagttaacagatccaaaattattaggaagagtaaaaagactggaagatggaaatgaaagatacattaaaatattaaaaaaaaattttcctaaaaattttaatttaaagggaacaaaaattgtcttagatt

SEQ ID NO: 292050 - DNA, 709 bp, Unknown
  Bacterial polypeptide expressing nucleotide sequence isolated from the Sargasso Sea
aatgattaaaaaatattttggcacagatgggataagaggaagagttaatggtctaaaaattaatggtgaaatgttctttaaatttggtttagctgcaggaatatattttaaaaatttaaagaaaaacaaacagacagcagttattgcaaaagatacgagattgtctggttacacattagaaccagctttagtatctggtttggcatctgctggaatgcacgtttatacactaggaccactaccaacaaatggtctagcaatgttaacaaaaaaaatgcgagcaaatatggggataatgattaccgcatcccataatccatattatgacaatggtttaaaattatttggaccagatggattgaaactatctgacaaaattgaaaagaaaattgaaaaattaattgattcaaaaattacaaaaaatttatcaaaaccaatcgcattaggcagagtaaaaagattagaagatgcaaatgaaaattatataaaaattttgaaacaaaattttccaccttcatttagtctgaaaggtataaaaattgctttagactgtgctaatggtgctggttataaagctggccctaatctatttaaatctttaggagctaaagtttttaaaagcggcacatctcctaatggattaaatattaattttaaaatctggatccacttatccaaaaaaaatttgtcaaataacaaaaaaaaataa

SEQ ID NO: 292051 - DNA, 865 bp, Unknown
  Bacterial polypeptide expressing nucleotide sequence isolated from the Sargasso Sea
tcaggcttcacatcttcaggaatggatgtttttcttactggtccaataccaacaccagctgttgcatatcttactcaagcattaagagctgatttaggtgtaatgataacagcttctcacaatacctacgaagataatggttttaagctatttggacctgatggacttaaacttactgatgaaaagcaattagaaataaatgagttaatgaataggtcagatataatgtctttgcaggataaaaatcaaataggtgctgcaagaagagttgatgacgcattatctagatatattgaatttgcaaaagcaacttttccaaatactatgcgattagatcatttaaaaattgtaatagactgcgcaaatggagctgcttataaagttgcgccaatgattttttgggaacttggtgcagatattattgttattggtgatcaacctaatggaagaaatattaaccaagattgtggatcaactaaaacgcaaagtctgaaagaagaagttaagagcaataacgctgatttagggattgcctttgatggtgatggagatcgtttagtaataatagatgaaaaaggtgatgaagttaatggagaccatttgcttgggatgatagctttatcactaaaaaataagaatttgctaaaaaataagaatattgtttcaactattatggctaccaaatctcttgaaaattatttgaaatcaattgatctcaagttaataagaacaaaagttggcgatagatatgtaattgaaaaaatgttggatatcggttctaactttggtggtgaaccatcaggtcatttaattattaatgatttttcctctaccggtgatgcaattgtatcttctttacaagttt

SEQ ID NO: 292052 - DNA, 496 bp, Unknown
  Bacterial polypeptide expressing nucleotide sequence isolated from the Sargasso Sea
atgtctaaaaagtattttggcacagatggaattagaggaagagtaaacaaagaaaagataaatggtgaaatgttttttaaatttggtttggccgcaggtatatattttaaaaatttaaaaaaaaacaaacaaacagcaattattgctaaagacacaagattatcgggatatacactagaaccagcccttgtttctggtttagcctcagcaggcatgcatgtttataccctaggaccattaccaacaaacggtcttgctatgttaacaaaaaaaatgaaagccaatatgggcatcatgataaccgcatcccataatccttattttgacaatggattaaaattattcggtcctgatggtttaaaactttctgacaaaattgaaaaaaaaattgaaaaattaatagactctaaaattacaaaaaatttatcaaaaccagaaatactaggaagagtaaaaaggttagaggacgcaaatgaaagatatacaaaaattctta

SEQ ID NO: 292053 - DNA, 592 bp, Unknown
  Bacterial polypeptide expressing nucleotide sequence isolated from the Sargasso Sea
atgcccaaaaaatattttggaacagatggaattagaggcagagtaaaccaaggaaacattaatggtgaaatgttttttaaatttggtttagctgctggcacatattttaaaaatctaaaaaaaagtaaacaaatcgcaattattgcaaaagatactagattatcaggttatactttagagccagctttagtttcaggtttagcttctgctggcatgcatgtttatacattaggacctttgccaaccaatggccttgctatgttgacaaagaaaatggaagcaaatatgggcattatgataacagcatcacacaatccttattatgataatggtttaaaattatttggtcctgatggactaaaattatcagataaaatagaaagaaaaattgaaaaattaatagactcaaaaattattaaaaatctttcaaagcctgaaacgctcggaagagtaaaaagattagaggatgcaaatgatagatatattaaaattttaaaaactaattttcctaacaactttagtttgagcggaattaagattgctattgattgtgcaaatggtgccggctataaatcaggaccaaaactcttaa

SEQ ID NO: 292054 - DNA, 692 bp, Unknown
  Bacterial polypeptide expressing nucleotide sequence isolated from the Sargasso Sea
tttgggaaaaaaatacttcggaacggacggaatacgaggaaaggttggccaaagtcctataactccagattggtgtgttcgtcttggctgggccattggtcgttattttcttgatagtagcaatgaagcgaagattcttatagggaaggatacgaggatatccggttatatgctcgagtctgccttgcaatcgggtcttatctcggctggagcgaatgttgaactattggggccgatgcctactcctggtattgcttacctcacccgggagtttgaagccgacggggcgattgttattagtgcctcgcataatcaatacgaagataacggtattaaaatcttcgatggaaaaggggaaaagctgcaagacaatgatgagcttgttattgaaagtcttcttgctcaaccgatcaaaaccgtttctgcggctgagctcggaaaagccaacagggttatggttgcgcaggagcaatattcggatttctgcgcgggtcatgttgcctcgcctcttgctattaaggagctcaagattgtagtcgattgtgctaatggagccacttatcaagtcgctccattagttttctcgaagcttggtctgaacccaatattcataggtagctcgcccaatggtttgaatattaacaaagattgtggctctactgatcttggattttgcaggaaacgatggcgca

SEQ ID NO: 292055 - DNA, 836 bp, Unknown
  Bacterial polypeptide expressing nucleotide sequence isolated from the Sargasso Sea
ccggttggaccattatcgtgattattgtgtgcagagcgttgcgggcggtctggatttatctggactaaaggtggtcgtggattgtgcgcatggggcgatgtttggcgttgcgccggcggtgttgcgggcattagcggccacggtgctgcctttgcattgtgcgccggatggtgaaaacattaatacactgtgtggctcgacgcagccggacgcattagcgcgtgcggtgctgcaggagcaagcggatgtaggaattgcgtttgatggcgatggtgaccgtatgatagcggttgatgcagaaggtaaggtgatcgacggcgatcgggtgttagcgatcgtgttagcaatgaagttagcttgcggagtggcatgccccggcgttgttggtacgttgatgtccaatttaggtaccgagcgttatgttcaatcactaggctcgtcatttgttcgagctgcggttggagaccgttatgtgttggcggaattacaacaacgtggttggcgtttgggtggggagtcttcaggccatctcattgatttggatttcagtaccacgggtgatggcattgtggcgatgctgcaactcatgcgtgcgctgcagcaggaacaacaaccgttagcgcaattagccagtgtggtgccggtgatgccacaagtgatgttaaacgtgccgatgtcagccccgcagcgatgtatggcggacgagcaggtgaagacattggtgcaggcggtagaaacggcgttgggtgagcggggtcgcgttttggtgcgtgcatcaagtaccgaatcgtgtgtgcgcgtgatgtgtgaaggtgaggatcgtgacgatattctga

SEQ ID NO: 292056 - DNA, 602 bp, Unknown
  Bacterial polypeptide expressing nucleotide sequence isolated from the Sargasso Sea
tggagatgctgacagaataattgtctgtgatgaaaaaggaaagattattgatggagataaaattcttgcaatgttaggtgagagatggaaaagaaaaaagattttaaaaggaggcgtcatcggtacattaatgtcaaattatggcttagaaaatttttttaaaaacaatcgaattaaatttttaagatcagatgtgggagatagatatgtaaaagaaaaaatgaaaaaaaataaatttaatttagggggggaacagtctggtcatataatccttggaaagtttgcgacaactggtgatgggttattagttgcactagaaatccttttctctttaagaaaaagaaaaaaagcaagtgagctttttaacaaatttaaacccacccctcaaatgttagagaatgttgaagttaaggataaatcaattattaatactccaaaatgcaaaaaagcaattaatgaagcaaataaaataattaaaaacagaggtagaattttagttagaaaatctggtactgaaccaaaaataagaattatgagtgagtcagaggattcaaatttaaataaattgtgtgtgaatataattaagaaatctattcagtaaa

SEQ ID NO: 292057 - DNA, 793 bp, Unknown
  Bacterial polypeptide expressing nucleotide sequence isolated from the Sargasso Sea
aatgtcaaaaaaatattttggtactgatggaattagaggaagggtaaatcaaggaaatattaatggcgaaatgtttttcaaatttggcttagctgctggaacatactttaaaaatcaaaaaaaaaataaacaaacagcaataattgcaaaagatacaagactatctggttatactttagagcctgctttagtttctggtcttgcatcagccggcatgcatgtttttacactaggacctttgccaacgaatggtcttgcaatgttaacaaaaaaaatgagggcaaacctaggtattatgataactgcatctcacaatgagtattacgataacggtttaaaattatttggtccagacggattaaagttatctgataaaatagaaaaaaaaattgaaaagttaattgactcaaaaattattaaaaatttgtcagaaccagaaattcttggaagagtaaaaaggttagaagatgcaaatgaaaggtatattaaaattttaaaaactaattttccaaataactttagtttaaaaagaataaaaatagctatagattgtgcaaatggagcaggctataaatctggaccaaaactttttagatcattaggtgcaaaagtttatgatattggaacattcccaaacggcctaaacattaataaaaaatgtggatcaacttttcctaaaaaaattaaaagtttagtaaaaaaacacaaagtaaatctaggcatatctttggatggggatgccgatagaattatgttatgcgatgaaaaaggcaaaatagtagatggagatcaa

SEQ ID NO: 292058 - DNA, 478 bp, Unknown
  Bacterial polypeptide expressing nucleotide sequence isolated from the Sargasso Sea
atgttaaaaaaatattttggcactgacggaataagaggcagagtaaataaagaaaaaataaatggagaaatgtttttcaaatttggcttagcagctggcacttattttaagaaccaaaaaaaaaataagcaaatagctataattgccaaagatacaagattatctggttatactttagagcctgcacttgtatcaggattagcctcagccggaatgcatatatttacatttggtccactacctacaaacgggttagcaatgttaacaaaaaaaatgcgagcaaatttgggtattatgattaccgcatcacataacccatatcatgataatggcctaaaattatttggtccagatggactaaagctatctgacttaattgaaaaaaaaattgaaaaattgattgataccaatatatctattaatttatctaatccaaaaattcttggaagagttcaaagacttgagaacggatcagaaa

SEQ ID NO: 292059 - DNA, 857 bp, Unknown
  Bacterial polypeptide expressing nucleotide sequence isolated from the Sargasso Sea
catgaaagagcttggctggaacactgtagttataggaaaagacacaagaatatctggatacatgttagagtctgcacttcaggcaggcttcatagctgctggcgttaatgtaaatttgcttggtccaattcctacacctggagtagcctatttaacaaaaacattaagaaataagtttggagttgtcataagtgcctcacataatgattttttagataatggaattaaaatttttaatgaagatggcgaaaagatttcaagagacattgaaaaaagaattgaaaaatatttatcttcaaacttatctcctgttgaaacatcgcaaattggaaaagcatatagatttgatgagtctggtccaagatacattgaattttgtaaatcaactgttccttcagaaatttccttttcttcactcagaattgtcgttgattgtgctaatggggcttgttacaaggtaagtccaggaatatttgaagaattaggagctgaagtaattacaattggtaatgagccagatggttacaacatcaatctaaactgtggttctacttatccagatgtaattaaagaagctgtaattgaacatagagcagattatggaatatctttagatggcgatggagatagagtgattcttgtagatgaaaagggtaatattcttgatggtgatgatcttctctatatattagcttttgccaatccaaatagaactgggccctggtcaggtgttgtcggaactcatatgagcaatctaggttttgaagaaggcataaacaaacttggttacaagtttgtaagggctgatgtaggtgacaaatacgttagcgaaatgttatcaaaaaagggttggttgc

SEQ ID NO: 292060 - DNA, 442 bp, Unknown
  Bacterial polypeptide expressing nucleotide sequence isolated from the Sargasso Sea
aatgtcaaaaaaatattttggtacagatgggattagaggaagagttaatgaagctaaaataaatggtgaaatgttttttaaatttggtttagcagcaggagtttactttaaaaatcaaaaaaaaataaaacaaacagcaataattgctaaagatacaagattatcaggatatgctttagagccagcattagtgtctggattaacttcggcaggaatgcatgtttatacccttggtcctttgcccactaatggcctagcaatgttaactaaaaaaatgaaggcaaatatgggtataatgattaccgcgtctcacaatccattttatgataatggtcttaaattatttggaccagatggtttaaaattgtctgacaaaatagaaaaaaaaatagaaagattaatagataatagtattattaaaaatctttctgaacctaaaatt

SEQ ID NO: 292061 - DNA, 775 bp, Unknown
  Bacterial polypeptide expressing nucleotide sequence isolated from the Sargasso Sea
aatacaggtaaagcaattagattagatgatgcttcgggcagatattcagaatttttgaaaagtactttggaaaaaaatttaaaaattaaaaaacttaaaataatattagattgtggaaatggtgctacttatgaaatagccccgaatattttttgggaattaggtcatgaaataattgctataaataataagccaaatggaaaaaatattaatcaaaattgtggtgctatcaatataaatcaattatcaaaaaaagtattggagttaaaagctgatattggttttgcatttgatggtgatggtgatagattaattattgttgatgaaaaaggtaaagaaattgatggtgataaaataatagcattatttgctaaacatttaattaaatcaaaaaaaagaaatcaatctgcttttccagtaattacaactataatgtcaaatttaggactagaaaaatatttatttaataaattaaaaataaaattaaaacgaacttcagttggagatattaatgtaattaatgagatgcgtaaatttaattcatttttaggtggagagcaatcaggacatataataatacctgaattttctaagacaggggatggtattttagcagctttaaaagttactgaaattatctctaaaattaataaatcaacaagtaaagtttttgatttgtacaaaagtttacctcaaattaaattgaatattccatacagaaagatatcaagtaatcatttgaaatatattaaaaatataaataagaaaaaattta

SEQ ID NO: 292062 - DNA, 641 bp, Unknown
  Bacterial polypeptide expressing nucleotide sequence isolated from the Sargasso Sea
attgtcagccttttctactttaagtaaggatagaaaatttggtactgacggtattcgtggaccagtaacctccacaatgaatcctctctttgttaccaagcttggatgggctgcaggatccattcttgcagaagagggaatgtccaaagttcttataggcaaagatacaagaatctcaggttatatgttcgaatcagccttacaggcaggtttcatctccgcagggatggatgtaacactgttaggccccctgcccactccaggggtatcttatcttgcaaactctaataatcaggtaggcctagtgattagtgcttcacataatctatttgaggataatggtattaagttttttaataaagatggtcagaaattttcagccgaattagaaaaaaggattgaaactaaacttactcaagaaatggttgcagtcgaatcaataaatctcggtaaagcctcaaggatgaatgacgctcaggggcgttatattgaattctgtaaatcgtccttcactgacttagatttaaatggattatcaattcttttagattgtgctaatggggcaacttattcagtcgcgccgaaagttttttcagagctaggagcaaaagttgaaacattcggctcatctcctgatggaa

SEQ ID NO: 292063 - DNA, 574 bp, Unknown
  Bacterial polypeptide expressing nucleotide sequence isolated from the Sargasso Sea
atgacaaaaaaatattttggtactgatggaataagaggggctattaatagtaaaaatatcaatggagatatgttttttaaatttggactagcatcaggaacatattttaaatcgcaaaaaaaaagaaaacaaacagcaataatagctaaagatactagattatcaggttataccttagagcctgctttggtttcagggcttacatctgctggaatgcacgtttatactttaggacctttgccaactaatggtttagctatgttgacaaaatctatgaaagcaaatatgggcattatgattacagcatctcataatcctcattatgataatggattgaaattatttggtcccgatgggatgaagctgtctgataagattgaaaaaaaaattgaaaaattgatagacaaaaaaatcattaaaagtctctcacatccagaaaaactaggaagggtaaaaagattagaaagtgggacaaaaagttatatcaaaattttgaagaaaaatttcactaaaaattttaatcttagaggtttaagaattgttattgattgtgcgaatggtgctggatataaag

SEQ ID NO: 292064 - DNA, 553 bp, Unknown
  Bacterial polypeptide expressing nucleotide sequence isolated from the Sargasso Sea
atggcaaaaaaatattttggaacagatggaataagaggagctattaatagcaaaaatattaatggagatatgttttttaagtttggactagctagtggtacatattttaaatcccaaaagaaaaaaaaacaaacagcaataatagcaaaagatacaagattgtcaggatatacactcgaacctgcgcttgtttctggtttggcatctgccggcatgcatgtttacactttgggccctttaccaaccaatggattggctatgctaacaaaagaaatgaaggccaatatgggtattatgattacagcttctcataatcctcattacgacaatggattaaaattatttggtcctgatggaatgaaattatcagataaaatagaaaaagaaatagaagctcttatagataaaaaaatatcaaatcacctctccagtcctgaaaagttaggaagagttaaaagattagaaacaggaactaaacaatatattagaatattaaaaaaaaatttcacaaaagagttcaatttaggaggattaagaattgttatagattgtg

SEQ ID NO: 292065 - DNA, 383 bp, Unknown
  Bacterial polypeptide expressing nucleotide sequence isolated from the Sargasso Sea
aatgtcaaaaaaatattttggtaccgatggaattagaggaaaagttaataaaggaaatattaacggagaaatgttttttaagttcggtttagctgcaggaacatactttaaaaatttaaaaaaaaataaacaagtagcaattatcgctaaagacacaagactatccggttatactcttgaaccagctctggtatctggtttagcttctgcaggaatgcacgtatataccctaggtcccttgccaactaatggtcttgcaatgttaacaaaaagaatgaaagcaaatatgggcattatgataacagcgtctcataatccatattttgacaatggtttgaagttgtttggacctgatggtttaaaattatctgataaaatcgaaa

SEQ ID NO: 292066 - DNA, 349 bp, Unknown
  Bacterial polypeptide expressing nucleotide sequence isolated from the Sargasso Sea
aatgaagaacaagtatttcggaacagacggtatcagaggaacagttaataggggaaacatcaccggagaaaaattttttaaatttggtttagcttctggaacctattttaaaaaccaaaaaaaaaataagcaaatcgcgattattgcaaaagatacaagattatctggatatactctggaaccagcattagtctctggtttggtatccggaggaatgcatgtttttactcttggaccattacctactaacggattagctatgcttacaaaaatgatgaaagctaatatgggtataatgataacggcatcgcataacccctatcatgataatggattaaaattattcggg

SEQ ID NO: 292067 - DNA, 454 bp, Unknown
  Bacterial polypeptide expressing nucleotide sequence isolated from the Sargasso Sea
atgacaaaaaaatattttggaacagatggtataagaggtgcagttaatagtaagtatataaatggtgacatgttttttagatttggacttgcaagtggaacttattttaaatctcaaaaaaaaagaaaacaaacagcaataattgccaaagacaccagattgtcaggctatactcttgaacctgctattgtttcaggtctagcttcagctggtatgcatgtttatactttaggaccattaccaactaatgggttagctatgctaacgaaagaaatgaaggctaatatgggtataatgatcaccgcctcacacaatccacattttgacaatggtttaaaattgtttggtcctgatggaatgaaattatcagatcaaatagaaaaaaaaattgaaggacttatagataaaaaaatctcaaaaaacctctcgcattctgaaaaattaggaagagtta

SEQ ID NO: 292068 - DNA, 541 bp, Unknown
  Bacterial polypeptide expressing nucleotide sequence isolated from the Sargasso Sea
aatgaagaaaaaatactttggaacagacgggataagaggaactgtaaatgttggaaatattaatggcgaaaagttttttaaatttggactagctgcaggaacatattttaaaaatttaaaaaaaaaaaaacaattagctattatagcaaaagatactagattatctggctatactcttgaaccagctttagtttcaggattagcttcagctggaatgcatatatttaccctaggaccacttcctacgaatggattagctatgctaacaaaagaaatgaaagctaacctaggaataatgattaccgcgtcccataacccttttcatgataatggactaaaattatttggcccagatggaatgaaattatcagacaaaattgaaaaaaaaatcgaaaatttaattgatacaaaaattacaaaccaactagcaaatccaaaattattgggaagagtaaaaaggcttgagaatggaaatgataaatatattaaaattttaaaaaataattttcctaataattttagcctcaaaggaattagaata

SEQ ID NO: 292069 - DNA, 601 bp, Unknown
  Bacterial polypeptide expressing nucleotide sequence isolated from the Sargasso Sea
aatgaaaaaaaagtattttggaactgatggtataagaggcacagtaaatttaggcaatattaatggtgaaaagttttttaaatttggcttagcagctggcacctattttaaaaacttaaagaaaaaaaagcaggtagcaattattgctaaagatacaagattatcaggatatactttagaaccagctctcgtatcaggattggcctcagcaggaatgcatatttttacattaggacctctacctacaaatggattagcaatgttgacaaaaaaaatgagagcaaatctgggaataatgataacagcatctcacaatccctttcatgataatgggctaaaattatttggaccagatggaatgaaactatcagataaaattgaaaaaaaaattgagagtttaattgaaaagaaaaccatttatcaattatcaaaaccagattttttaggaagagttaagcgactagaagatggaaacgataggtatattgaaattctgaagagcaatttccctagtaattttagtcttaaaggaatgaggatagttatagactgtgctaatggagcaggatataaatctgctcctaaattctctcagatttag

SEQ ID NO: 292070 - DNA, 549 bp, Unknown
  Bacterial polypeptide expressing nucleotide sequence isolated from the Sargasso Sea
gtgataaaataattgcaatgttggcagaaagatggaaaagaaaaaaaattttaaaaggaggtgttgttggaaccttaatgtctaattatggtttagaaaaattttttgctaaaaataaaataaaatttttaagatcgaatgttggtgacagatatgtaaaagatttgatgaagaaaaaaaaatttaacttaggtggtgagcaatctggccacataattctaggtaaatttgcaacaacaggagatggattactggttgctttagaaatattgttttcaatgagaaaagggaaaaaagcgagcgacctatttaagaatttcataccaacgccacaattacttgtaaatatagaagtgaaaaataaatcagtaattcatagtattaaatgcaaaaaagcaataaaaaatgcaaataatttagtcaaaggtaagggcagaatgttggttagaaaatctggcacagagccaaaaataagaataatgtgtgaaagtgaaaataaagctttgcttaacaaatgtgtaaatattgtaaaaaaatcaattaagtaac

SEQ ID NO: 292071 - DNA, 813 bp, Unknown
  Bacterial polypeptide expressing nucleotide sequence isolated from the Sargasso Sea
cagtatctttcttaactgcacatattctggtcaatttggagttgtcataagtgctagtcacaatcctttttatgataatggcattaaattttttaataaatttggtagaaaaatatctgaggaattggaagcagagattgaaaagagattgaatgatccaattcaaccagtagaagcatcagatctaggtaaagcttttcgaattgatagtgcagctggaagatatattgagtattgcaaaagcactttaaaaggagcacacaatttaaaagataaaaccattttagtcgatggtgcaaatggagctaattacaagataactcccatgcttttagaagagttaggggcaaaagtaataagaataaattgcaatccagatggattcaatattaatgaaaaaagtgcggttctcgatgaaaatctgtttaaagaatacgcaaaagaacatgaatttgatttttgtgttgcagtagatggtgatggagataggctggttctaagtgattctaaaggagaagtatgcacaggagacgaaatcatctacacattagcactaagaaataagaaacaagaaaaagacggttcaaattgtgtagtcggcactgatatgactaatcaaggtgtagtcgatgcactagatgatttgggaattaattttcatagagctgaagtaggagacaagttcatatctagagagctagtaaaacaagagttaaatcttggtggcgaatcgtcaagacatataatccaaagagaattttctgaaagtggcgatgcaaatattgctttaattcaaactttagcagctcttga

SEQ ID NO: 292072 - DNA, 703 bp, Unknown
  Bacterial polypeptide expressing nucleotide sequence isolated from the Sargasso Sea
tacaacatcaataaaaattgtggatccacagatcctgaaaatataaagaacactgttgcagctacaaattctgatatcggaattgctctggatggcgatgcagacagaatactgatcattgatgagaatggcaaaattgttaatggcgatgaaatcctatacatcttggcaaaagcaaatttagataatccaaagtttaattctaaggttgtcgggacaatattgtctaatattggtttagaaaattgtttgaatgaaattaatgttgaacttcatagatcagacgttggtgataagaatgtctttaagatgatggaatccattgactctaatataggcggtgaaacatcagggcatattatccataatgacttctcaccaactggagacggccttttaattgctctattggtccttaaggaatcgataaaattaaaactacctattagtacgttattaaaagatcttaaattagttcatcaaacaaatataaatctagaaattgaagatactagcattcaaaataatactctggagtcaatagcatcagaggctactgaaaaattagaagatgggagggtgattattagaaaatcaggtacagagccactaataagaatactaattgaatcagataataaagaaaaaagtatgaaagttatcgaattcataaaagaagaaatatcaaaagaaaatcaatgaa

SEQ ID NO: 292073 - DNA, 511 bp, Unknown
  Bacterial polypeptide expressing nucleotide sequence isolated from the Sargasso Sea
aataaaaagatgcttaaaggtggcgtagttggcactttaatgtctaattatgttttagagaaatttttaaaatataaaaagataaaatttattcgtgcaaatgtgggtgatagatatgtaaaagaaaaaatgcaaaaaaataattttaatttaggtggtgaacaatctgggcacattattttaggaaagtttgcaacaacaggtgatgggctattagttgctttagaggttttgtttgcaattagaaaaggaaggaaagctagtgaatttttcaataaatttaaaaaaactcctcaaattctcaaaaatatatttgttaaagataaaaatattattaatagtactgaagtcaaaaaatctatcaaaattgcaaataaattaatgaaaggacaaggaagaatattagtaagaaaatcaggcacagagtctaaaattagagttatgggggagagtgaaaataaaaaaattcttagtaagtgtatagatattatttcaaaaaagataaaataat

SEQ ID NO: 292074 - DNA, 453 bp, Unknown
  Bacterial polypeptide expressing nucleotide sequence isolated from the Sargasso Sea
agaaatttttcaaaaaattaaaaataaaatttttaagagcaaatgtaggtgatcgttatgtaaaagaaaaaatgaaaaaaaataagtataatttaggaggagagcaatctggccatataatattaggaaaatttgcaacaactggtgatggtcttttagttgctttagagattctattttcattaagaaagggaaaacaagcaagtaagtactttaatgtttttagacaaacacctcaaattttagaaaatattgatgtaaaagacaaaaacatcataaatactactaattgtaaaagttcaataaaaatagcaaataaaataattaacggaaaaggtagaatacttgtgaggaaatctggaacagaaccaaagataagaatcatggtagaatcaaataacaaaaaattaaacaaaaaatgtattaacataattaagaaaacaatcacataaa

SEQ ID NO: 292075 - DNA, 862 bp, Unknown
  Bacterial polypeptide expressing nucleotide sequence isolated from the Sargasso Sea
atgaaaaaaaaacttgctgaaccagagcatataggaagagctaaaaggcttgaagacgcaaatgctcgttatattgagtttgtaaaaaatatatttcctaaaagtaagtcgttagagggtttgaaagtagtgattgattgtgcgaatggtgcgtcatatatatctgccccaaccatattgtatgaattaggagctgaggtagtaaaaattggtgtgaaccctgatggattcaatattaataaagaatgtggatcaaccgatacttcaatgttagtgcacaccgtattaaaagaaaaagcagatattggttttgcattagatggtgatggtgatcgtttaatagtttgtgatgataacggtaaaattattgatggtgatcaaatactaggtctcttagcagtgtcaatgaaagcagaaaataatcttcgagaagatacagttgttgcaaccgctatgtcgaacctcggtcttgagaagaaattaattgaacactctataaaattgatacgtacttcagttggagatagatacattaaagaagaaatcctgaacaagaatttaagtttaggcggagagcaatcaggtcatattattatgagagatcatggcttatctggtgatgggatggttacagctttaaaaatattatccatattaaaagatagtaaaggaacatcaagccagatattaaatgtctttgaggctgttccccaaaaacttcttaattttaatatcagtgataagaaggtccttgaaaagaaagaaacgaaaactttaatagagagttataaacaagaattatcatctgatggaagaatttttgagagaatgtctggaacagaaccagttttgagggtaatga

SEQ ID NO: 292076 - DNA, 699 bp, Unknown
  Bacterial polypeptide expressing nucleotide sequence isolated from the Sargasso Sea
ttgtacagcaagaagcttgtgatcttggtttttgttttgatggcgacgcagacagacttatagctattgatgaaaaaggagagatcttagatggcgatgagatcatagctatttgtgctatttactattcacaggcaaaacgcctcaaagacaaccgggttgttacaactgtgatgagtaacctaggacttgaaaaagctcttgaaaaaaatggcataacccttgaaagaacagccgtcggtgaccgttacgtcgttgaaaaaataaaaaaagagggcctttcacttggaggcgagcagtcaggacaccttatctttcatgactcgtcaaccacaggagatggagtacttgcagctctttgcctacttgaagtggtacttcgaagtaaaaagccattaagtgtcttaagacactcgatgcaaaagctgccgcaggtacttgaaagttttaatgtcagccaaaaaattccacttgataaccttccttctttaaaaaagctcttaaaagacaaggaaaaagaacttttaggtcgtggtagaattctttttcgctactcaggaactgaaaataaagcaagacttatgcttgaaggtgaggataaaactcttataagaaaaatggcaaaagaaattaaaacccttgccataagcttactcacaaaaagttctaagagtagagaaacagaggcttctttataaa

SEQ ID NO: 292077 - DNA, 832 bp, Unknown
  Bacterial polypeptide expressing nucleotide sequence isolated from the Sargasso Sea
atgaataacaaaacagaaaaagtgtttggtactgacggaatcagaggaaaagtcggtgagtaccctatgacgattgattttgtaatgagattggcatcgtcaatttcaaaagtaatgacgcctaagggcggtaaagttgcaattggcaaagatactcgaatttctggttatatgtttgagtcagcattggaatctgcatttgtagctcacggattagaagtaattttactcggacctcttccttccccagctattgctcattatacgattaaacaaaaatgtgattttggtattgtcatcagtgcatctcataattcttatgaatacaatggcattaagatcatcaatcatttgggtgagaaaattgatcgagaaattgagagcgttatcgaatctaagctcttagatgcgccaataacaaatactgcagaatcattaggaaaagcaaaaatatcaaatacctcaagaaatctctataaatctctacttatgtcaatatttgatgattttgatgatcactttccactgaagggatttaagatcgttgtcgatgcttctaacggcgcagcatataaaattgccccacagatacttttagacttaggtgctgatgtcattccaattgcatgttcaccaaatggaaaaaatattaaccttgattgtggatcgacacatccagaaacactcagaaaaaccgttgttgcaacagaagctaatttaggaatagcattagatggtgatgctgataggatcctgatggtagatgaaaatggacgtatattagatggggatcaaattctttatattcttgcaaaaaataatatgtactaat

SEQ ID NO: 292078 - DNA, 528 bp, Unknown
  Bacterial polypeptide expressing nucleotide sequence isolated from the Sargasso Sea
tagctttagaatggaaaaagaaaaaaattttaagaggtggtgtaattggaacactgatgtctaattatggtttggaggattttttaaaaaaaaagaaaattaaatttataaggtcaaaggtaggcgatagatatgttaaagaaatgatgcaaaagtataaatttaatttaggaggcgaacaatctggccatataattttagggaaatttgctactaccggagatgggttattagtctctttagaaatagtaaaatttttagataaaaaaactagggcaagtattttttttaatgtttttaaaaaaacaccacaaattttaaaaaatataaattatagaaatgataaaatcctaaaggataaaaaagttttgaaatcaattaaattagcaaaaaaattaatagagggacagggaagaattctagtgaggaaatcaggaactgagccaaaaataagagttatgggtgaaagtgaaaataaaaaacttttaaatcattgcgttaaattgataataaaaaaattaaactaat

SEQ ID NO: 292079 - DNA, 876 bp, Unknown
  Bacterial polypeptide expressing nucleotide sequence isolated from the Sargasso Sea
tctggcgagccataatcctcctgaatataatggtattaaaatttttgataataatggtgaaaaaattaaaaagaaactagaaaatcaaatagaactgattttagagacagcaaacaaccttaaattatctacttataaaaaaacatcgataagggaaaataataacctttttaatatctatacagaaggacttattaatactatgggggatgaaaacttagatggaatgaaaatagttttagacacatgttacggatctgcaactacctgcgcaggaagtatttttaagaaacttggagcgaatgtcaaagtcattaataatgagcaagatggtttaaaaataaatttaaattgtggttctatatgtctggatccaataattaaagccataaaagagaacaatgctgatatgggatttagcttcgatggagatgccgatagagttattggggttgattcagaggggaatataatagatggagatcacatactctttctatggggaagagaacttttagaagaaaaattgcttacaaataacacaatcatctcaacaaaaatggccaatttaggttttgaaaatacttggaataaaattggggggattttgcatagaactgaagttggcgataaatttatatttgaagcaataaagaaaaaaaaggccttattaggaggggaacaatcaggtcatatactttcaaaaattaataacttttgtggggatggaatattaacagcaattcaaatctcaaaatactgcaagaaaaaaaatatcagtttaaggtcttggcttaatagtagcttctcaccatatcctcaaaaactaactaatatattattaaattttaaattcaaaaatattgataaatcata

SEQ ID NO: 292080 - DNA, 751 bp, Unknown
  Bacterial polypeptide expressing nucleotide sequence isolated from the Sargasso Sea
tttatatacgatcggtgatcagccatcaggcacaaacataaattataactgtggctctttatttccacttaaagcatcaagactagtaaagagaaaaaaatgtgatatcggtatatgcttagatggagatggtgacagagtaacaataattgatgaaaaaggtaaagtgctatgtggggaagaaattatttatattctggctaaatattatcttgctgaaaaaaaaataaaaaaaagttcaataattgttactaatgaagtagcaaaccacggacttgatatgtctttaaaaaagataggtttaaaaacaaagagagtcaaagtaggtgacaaaaatattttgagagagataatagataataaatacttttttggtggtgagccgtctggtcattttatttttaaagatgacttactaattggtgacggcatgacaacagctatcagattattaaccttaattctaaaggaaaacaaaaaattgtcagttcttaaaaaaggtatttatttacttaatgttgttaatataaatcaaattattgatcgggaaaaattttatttagttcaagaaagtatttatcaaaaactaaataaattatgcgaaaatttagatatatattacaatatacgtccttcaggtactgagccacttttaagagtgaacttgcaatatgacaaaagaaatataaaagtagttactctgaataaattaaaaaaacaaataattaaagtaataacggatgcttgttaa

SEQ ID NO: 292081 - DNA, 859 bp, Unknown
  Bacterial polypeptide expressing nucleotide sequence isolated from the Sargasso Sea
agagtatataaacattataagaaaaaattttccaaaagattttagcctaacaggtataaagatcgctatagattgcgcaaatggagcaggttataaatctgcacctaaattacttaaatctcttggtgcaaaagtttacagtgttggagtttcaccaaatggattaaacataaatgataaatgtgggtccacttttccaaataaaataaaaagactagtttctagaaaaagagtggacttaggaatatccttagatggtgatgctgacagaataattgtttgtgatgaaaaagctcaaattattgatggagaccaaattattgcaatgttagcaaaccgatggaaaagaaaaaaaattttaaaaggtggtgttgtaggcactttaatgtctaattttggattagaaaatttttttaaagaaaataatataaaatttttgagagcaaatgttggagataggtttgttaaagaaaaaatgcaaaataacagatttaatcttggtggagaacagtctggacatataatattaggtaaatttgcaactacgggcgatggattattagttgctctagaaattcttttttcaatgaggaaaggtaaaaaagcaagtgatttatttgataattttattcctactcctcaagctttggaaaatattacggttcgagataaaaatataatcaacgcacctagatgcaaaaaggcaataaataaatcgattaaactattaaaaaacaatggaagaatattagtaagaaaatctggcacagaaccaaagatcagaatcatggttgaaacaaacaaaaaagaacttctattgaaatgtattaatattataaaaaggtcgttaattaattga

SEQ ID NO: 292082 - DNA, 684 bp, Unknown
  Bacterial polypeptide expressing nucleotide sequence isolated from the Sargasso Sea
gatgccccttaagacaaataaagttcttatggatacttatattaaaagcctaatccagacaatgggtggagaaaatttaactgggttgagaataatattagatacatgccatggatcagcgacaacttgtgcaaaaacaatttttcagtctcttggtgctgatgtaagagttatcaataactctaaaaatggtttgaaaattaatgttaattgtggttctactaacctcgaaccattaaaaaaaacattaagagaaaatcctgcagatatgggctttagcttcgatggagatgccgatagagtaattggcatagattcaaaaggcaacgtgttagatggagatcatattctttttctttggggtagagaacttatggaacaaaaaattctcacaaataatttattaatatcaactcaaatggcaaacttaggttttgaaaaagcctggaataaaattggaggaattttatacagaactgatgtaggagataaatatgttcatgacgcaattaagaaaaaaagagctcttttaggaggtgaacagtcaggtcatatactttcaaaaattaataacttttctggagatgggatattgactgcacttcaaatttctaaatattgtaaaaagaaaaatattaaattaaatgattggcttaaaagtagtttcgaacccttttcacaaaa

SEQ ID NO: 292083 - DNA, 895 bp, Unknown
  Bacterial polypeptide expressing nucleotide sequence isolated from the Sargasso Sea
tgagtataatggtttaaaattttttaatgcagatgggtacaaaataagttcaatattagaaaaaaaaattgaaaatattgttttgaataaaaaaaaatatgcaaaaattattaatagtaattcaaacactggaaaggcaattagacttgaagatgcatcagggagatactctgaatttttaaaaagcacattagataagaaaattaaatcaaaaaaattaaaaatagttttagattgtggtaacggcgcaacctatgaaatagctccaaatattttttgggaattagggcatgaagttatttctataaacgacaagcccaatggaaaaaatattaattttaagtgtggtgcagtaaatacaaatacattatctaaaaaagtagttgatgaaagggcagatataggctttgcttttgacggagatggagatagattgattattgttgatgaaaaaggaaatgaaattgatggggacaaaattattgcattgtttgctaaacatttaataaaatttaataaaagcaaattaaaatatcctgtcgtttcaacagttatgtcaaatataggattagaaaattatattttaaataaatttaaagttaatttaaaacgttcttcagtaggggatattaatgtaattaaagaaatgcaaaaatataaatctcttctagggggagagcaatctggtcatataattttatctgattattcaaaaacaggtgatggtattttagcagctctaaaagtaacggaaatcatttctaaattaaataaatctactagtaaaattttcaatttatatgaaaattctcctcaaatcaaaattaacataccgtataaaaaaatatcaaaaaatactgttaattatataaaaaatattaacaaaaaaaaataa

SEQ ID NO: 292084 - DNA, 569 bp, Unknown
  Bacterial polypeptide expressing nucleotide sequence isolated from the Sargasso Sea
aaaaggaaatattattgatggagatcaaataattgcgacgttaggaacaagatggaagaaaaagaaaatactaaaaggtggtattgtgggaactttaatgtcgaattatggattacaaaaatattttaaagatcaagatattagatttatcagagccaatgttggcgataggtatgtaaaagaaaaaatgcaaaaaaataattttaatttgggtggtgaacaatcgggtcacataatacttggaaaatttgcaacaacgggagatggattattagttggattagagattttattctcaatgagaaaaggaaaaaaagctagtgaattattaaatacattcaaagctactcctcaaatattagtaaatgttaaggttaaagataaatccataattaattcaaaaaaatgtaaatccgcaataaagaaatcagagaagttaattaaaaatcaaggtaggatgcttattagaaaatctggaacagagcctaaaattagaattatgggagaatctaataatatttcattattaaaaagatgtataaatattgttaaaagatcaataaaataaa

SEQ ID NO: 292085 - DNA, 325 bp, Unknown
  Bacterial polypeptide expressing nucleotide sequence isolated from the Sargasso Sea
atgacaaaaaaatattttggtacagatggaataagaggcaaggtaaatggaagtaaaataaatggtgaaatgttttttaagtttggtttagctgttggcacatattttaataataaaaaaaaaactaaacagatagcaataattgcaaaagatactaggttatcaggatatgcactagaacctgcactggtatccggtttgacatcagctggaatgtacgttttcacttttggtccattaccaacaaatggtcttgcaatgcttacaaaaaaaatgagagctaatatgggaatcatgatcactgcatctcataatcctttttatg

SEQ ID NO: 292086 - DNA, 419 bp, Unknown
  Bacterial polypeptide expressing nucleotide sequence isolated from the Sargasso Sea
agctaatgttggagacagatatgtaaaagaaaaaatgcaaaaaaaaagatttaatttaggaggagagcaatcaggccatattatactaggaaaatttgcaacaactggagatggacttttagtagctttagaagttttgttttcaatgagaaaagggaaaaaggctagcgagttattaaatgtttttaagccgatgcctcaaattttagaaaatattatcgttagtgataaaaatataataaatggattaaagtgtaaaaaagcaataaaaaaagctaacaaacttatgggcctaaacggaagacttttggttagaaaatctggcactgaaccaaaaattagaattatgggagagtcacataataaaaaattgattataaaatgtgtaaaaataattaaacagtcaataaaaaattgaa

SEQ ID NO: 292087 - DNA, 513 bp, Unknown
  Bacterial polypeptide expressing nucleotide sequence isolated from the Sargasso Sea
gaagaaaagaaaaaatcttaaagggggagttgtaggtaccttaatgtctaattatggactagaaaaatttttagaaaaaaaaaagattaaatttataagagcaaatgtaggtgatagatatgtgaaagaagttatgcagaaaaaaaaatttaatttaggtggagaacagtcagggcacatcattttaggtaaatttgcgaccacaggtgatggactactagttgctttagaagttgttcaagctttaaataagaatataaaagctagtaaattttttaatgtttttaaaaaaacaccacaaattctagaaaatattgaaattaaaaatgaaaatatactatcgaaattatctgtaaagaattcaattaaaaaagcacaaaaattaatcgagggtaatggcagaattttagttagaaaatctggaactgagcaaaaaattcgaataatgggtgagagtaaaaataaaactcttcttaagaaatgtattaatactattgtcaaaacaattaatta

SEQ ID NO: 292088 - DNA, 592 bp, Unknown
  Bacterial polypeptide expressing nucleotide sequence isolated from the Sargasso Sea
atgacaaaaaaatactttggcacagatggaataagaggaagggtaaatggaaataaaataaatgggtacatgttttttaagtttggtttagctgctggtacatattttaataataaaaaaaaaactaaacagacagctataatcgcgaaagatactagattatcaggatatgcactagaaccagcattagtatctggtttgacttcagctggtatgcacgtttttacttttggaccgttaccaacaaatggtcttgcaatgcttacaaaaaaaatgagagccaatatgggaattatgatcaccgcatcgcataatcctttttatgacaatggtttgaaattatttggaccaaatggcttaaaattatctgataaaatagaaaaaaaaatagaaaaacttattgactccaaaatatcaaaaaaattatcaaatcctgaaatattaggtagggttaaaagattagagaatggttcaaataaatatcttgaaattttaaaaacaaattttcccaaacaatttaatttaagaggtttaagaattacaatagattgtgctaatggagctgcatataaagtaggccctcaattttagg

SEQ ID NO: 292089 - DNA, 466 bp, Unknown
  Bacterial polypeptide expressing nucleotide sequence isolated from the Sargasso Sea
taattatggtttagaaagttttctgcaaaaggaaaaaattaaattttttagatctaaagtaggagatagatatgttaaagaaaaaatgaaaaaattaaattttaatttaggtggagaacaatcaggacatattatcttggggaaatttgcaacaaccggagatggcctaatggttgcattagaagttttgttttctttgagaaaaggaaaaaaggctagcaatttgttaaacgtttttaaacctttacctcaagttttggataatgttgttgtgaaagataagggtatggttaataaacctaaatgcaaaaatgcaattaaaaacgcaaacaaacttatggggaataagggaagaatcttagttagaaaatctggaactgaaccaaaaattaggattatggccgagtcttatgataagagtttaattttaaaatgtataaaaataatcaagagatcaataaagtaa

SEQ ID NO: 292090 - DNA, 583 bp, Unknown
  Bacterial polypeptide expressing nucleotide sequence isolated from the Sargasso Sea
tatgtgtgatgaaaaaggaaagatcatcgatggagatcaaattatcgcaatgttagctagaagatggaaatctaaaaaaattttaagaggtggtgtaatcggaacattaatgtctaattatggtttagaacaatttttaaaaaaagagcatataaaatttttcagagcaaaagttggagatagatatgttaaagagaaaatgaagaaattaaattttaatttaggtggagaacaatctgggcatataattttaggaaaatttgccactacaggagatggattattagttgcattagaagtattattttctttaagaaaaggaattaaagcaagtaaattattaaatgtgtttaaacctgtgccgcaaatattagagaatgtaacagtaaaagataaaaacgttttaaatagcattaggtgcagaagagctataagattagccaataaagtaatggaaaagaatggaagaattttagtacgaaaatctggaacagaaccaaaaattagaattatggcagaatcctataatcaaaatttaatttctaagtgtataagaataattaaaaaatcaatatcaaattga

SEQ ID NO: 292091 - DNA, 517 bp, Unknown
  Bacterial polypeptide expressing nucleotide sequence isolated from the Sargasso Sea
tggaaaatcaaaaaaatgttaaaaggcggagtagttggaactttaatgtcaaattatggactagaaaaatattttaaatcaaaaggaataaaattcttaagggcagatgttggagatagatatgttaaagaaaaaatgcaaaaatataagtttaatttaggtggtgaacaatcaggtcatattattttaggtaagtttgcaactacaggagatggtttgttagtggcattagaagccctttttgccttgagaaaaggaaaaaaggcaagtgaattttttaaaaattttaagaaaacacctcagctcttagaaaatattttagtaaaagataagaatattatcaataaaccagagataaaaaaaactataaaaattgcagataaattaattaaaggcaaaggtaggattttagttagaaaatcaggaacagaatctaaaataagagtaatgggagaaagcgaaaatagagctcttctatatagatgtgtaaatataattactaaaaaaattaaataaa

SEQ ID NO: 292092 - DNA, 521 bp, Unknown
  Bacterial polypeptide expressing nucleotide sequence isolated from the Sargasso Sea
aagatggaaaaaaaaaaaaattttaaaaggtggtgttgtaggtaccttgatgtcaaactatggattacaaaaatatttttctaaaaataagataaagtttttaagaactaaagttggtgatagatatgtaaaagaagcaatgcagaaaaataaatttaatttaggaggagagcaatctggccatattatccttggcaaatttgcgactacaggcgatggtttattggtagcattagaaattctcttttctatgaggaaaggcaaaaaggcgagtgaaatatttgaaaattttacacccactcctcaattgttagaaaatgttgaagtaaaagataaatctataattaataatcccaagtgcaaaaatgcaattaaaaaagcaaatagtttaataaaaggaaaaggtagaatgttagtaagaaagtctggaacagagccagtagtgagaataatgtgtgaaactgggaataaaactatgctttcaaaatgtattaatatcgtaaaaaaatcaattatctaac

SEQ ID NO: 292093 - DNA, 691 bp, Unknown
  Bacterial polypeptide expressing nucleotide sequence isolated from the Sargasso Sea
atgaaaaataaatattttggtactgatggtataaggggaactgttaatcaaggaaatataacaggagaaaaattttttaaatttggtttagcatctggcacgtattttaaaaatcttaaaaagtctaaacaaatcgcaataatagccaaagacacaaggttatcaggatacactttagaaccggctttagtatctggattggtttcaggcggtatgcatgtttttactttaggacctttacctactaacggactcgcaatgctaaccaagtctatgaaagcaaatatgggtattatgattactgcttcacataatccattttatgataatggtctaaaattatttggacccgatggaatgaaactatcagacaagatagaaaaaaaaattgaaaagttaattgatacaaaaaatactaaacaacttactaatccaaagttactaggaagagtgaaaaggttagaggacggaaatgacaaatatattaaaatattgaaaaataatttccctaaaaactttaacttaaaaggaacaaaaatagtcttagattgcgccaatggagcttgctataaggctgctccaaagcttcttagagaactaggagcaaaagtattttctattggaattaaaccagacggtttaaatataaatgaaaattgcggttctacctatccatcaaaaattaaaactg

SEQ ID NO: 292094 - DNA, 723 bp, Unknown
  Bacterial polypeptide expressing nucleotide sequence isolated from the Sargasso Sea
attgtcagccctttccactttaagagaggacagaaagtttggaactgatggtattcgtggaccggtaacttccacaatgaatcctctcttcgttaccaaacttggatgggcagctggatcagtaatcaaagaagaaggcatttcaaaagtccttataggaaaggatacaagaatttctggttatatgtttgaatcggcattacaggctggcttcatatctgcaggaatggatgtgacacttttaggtcctttaccaactccaggtgtttcttatttggcacattctaataatcaagttggcttagtcatcagtgcttcgcacaatctatttgaagataatggtattaagtttttcaataaagatggtcaaaaattttcagctgaattagaaaaaagaatcgaaactaaacttacgcaagaaatggttgcggtccaatcaataaatctcggtaaagcctccaggatgacagatgctcaggggcgttatattgaattctgtaaatcatcttttactgacttagatctaaatggattatcaattcttatagattgcgctaatggagcaacttattcagttgcgccaaaagttttttcagagctaggagcaaaggtacaaacaataggttcgtccccagatggaatcaatatcaatcaaaattgtggctctaccagtcctgatttcttaaaggaagaaataatgaaaggctcttacgatataggaat

SEQ ID NO: 292095 - DNA, 461 bp, Unknown
  Bacterial polypeptide expressing nucleotide sequence isolated from the Sargasso Sea
actagaaaaattcttaagaaaagaaaaaattagatttgttaggtcaaaggtaggtgacagatatgtaaaagagaaaatgaaaaaattaaactttaatttaggcggagaacaatctggtcatattattttaggaaagtttgctactacaggagatggtttgcttgttgctctagaggtactattctctttaaggaaaaaaaaagttgctagtaaattacttaatatttttaaaccattaccgcaagttcttgaaaacgttaatgtaattaataaagaaaaaattattaaaagttccaatttcaaaaaagcagtcagtaatgctacaaaacttatgggtcataaaggaagaattttagtcagaaaatcaggcactgaacctaaaattaggattatggcggagtcaagtgataaaactttaattataaaatgtattaaattaataaggaattgtattaaataaa

SEQ ID NO: 292096 - DNA, 819 bp, Unknown
  Bacterial polypeptide expressing nucleotide sequence isolated from the Sargasso Sea
gatgaaagagcaaaaagaaaaagtatttggaactgatggaatcagaggaaaggtcggtgaatacccgatgacgattgattttgccatgagattggcatcttcaattgctaaggtaatgactcccaatggtggcaaagttgcaattggtaaggacactcgaatctccggttatatgtttgaatcagcattggaatctgcttttgttgcacatggtttggaggtgattttgttaggaccgcttccttcgccagcaattgcttattacaccatcaaaaaaaattgtgattttggaatcgtgataagtgcttcacataattcatatgaatacaatggtattaagatcatcaatcaccaaggtgaaaaaatagatcgtgagatcgagagcatcattgaatcaaaactttctgatacgcccataacaaatactgcagaaacactcgggaaagcaaaaatttcaaatacttctagaagtttgtataaatcgcttttgatgtcaatatttgcagacatcgatcatcacttaccgctaaaagggtttaagattgttgtggatgcttcgaatggtgctgcctataaaatagcacctcaggtcttacttgatttaggagccgatgtaataccaattgcttgttcgcccaatggaaagaacataaatctagattgtggatcaacgcacccagagacgctcagaaaaacagtagtagctactgattcaaatcttggaatagcactcgatggtgatgctgacagaattttgattgtagatgaagaagggagtattttagatggcgaccagatactctatatacttgctaatgc

SEQ ID NO: 292097 - DNA, 418 bp, Unknown
  Bacterial polypeptide expressing nucleotide sequence isolated from the Sargasso Sea
agagcaaatgtaggagacagatatgttaaagaaataatgaaaaaaaataattttaatttaggcggggagcaatctggacatatcatacttggtaaatttgctactacaggggatggactattagtcgccttagaagttttattctcaatgagaaaaggaaaaaaagctagtgagctatttcatacatttaaaatgacaccacaaatcttagaaaatgttaaagtaaaagataagtccatagttagtcaaaaaaaatgtagggatgctataaaaaaatctgaaaaattaataaaaaatcatggcagaatgcttatcagaaaatcaggaactgaacccaaaataagaataatgggagagtctaacaatattgcactattaaagagatgcataaatattgttaaaagatctataaactaat

SEQ ID NO: 292098 - DNA, 337 bp, Unknown
  Bacterial polypeptide expressing nucleotide sequence isolated from the Sargasso Sea
aatgactaagaaatattttggaactgatggaattagaggaacagttaataaaggtaatattaatggagaaatgttttttaaatttggacttgcggcaggaacatattttaaaaatttaaaaaaaaaaaaacaaactgcaattattgctaaagatacaagattatctggatatactctagaacctgcgttagtttctggtttggcatcagcaggtatgcatgtttatacccttggtccattgccaaccaatgggttggcaatgttaaccaaaaaaatgaaagcaaacatgggaattatgattacagcttctcacaacccctattacgacaatggttaa

SEQ ID NO: 292099 - DNA, 406 bp, Unknown
  Bacterial polypeptide expressing nucleotide sequence isolated from the Sargasso Sea
gttttaggaggtgaacagtcaggtcatattctttcaaaaattaataactattctggagatgggatattgactgcaattcaaatttctaaatattgtaaaaagcagcaaataactttaaaagattggcttaaaagtagtttcgatccctttcctcagaaactaaccaacataaaattagattttaatattaaaaaaataaatcaaacaactaaaagcttaattgatcaaactataaaaaattatcaggcaatttactcagataattgtagagtttttataaggcctagcggaacagaaccactaataagagtacttgtagaggccgagagtcaaaaaaaagttgaatctttatcaagtcaaataacaaaaaaactcagttttgaaataaaaaaaattacaacttaat

SEQ ID NO: 292100 - DNA, 499 bp, Unknown
  Bacterial polypeptide expressing nucleotide sequence isolated from the Sargasso Sea
ttaaaaggcggggttgttggaacattaatgtccaattatggccttgaaaaatatttcaaaaaaaaaggtattaaatttatacgtgctaatgttggtgacagatatgtaaaagaggtaatgcaaaaaaataagtttaatttaggtggagagcaatcaggacatattattctaggtaaatttgcaactacaggagatggcttacttgttgctttggagtctttatttgctcttagaaagggaaaaagggccagtgaattttttgaaaaatttaaaaaaactccacaattacttaaaaatattgaagtaaaaaataaaaatataatcaacaaacctgaaattaaaaaatctattagactagcttcaaaattaatcaaaggtaaaggaagaatacttgtaagaaaatcgggaacagaatcaaaaataagaattatgggagaaagtgaaaataaaagacttcttgtaaaatgtgttaatataattttgaaaaaaattagataat

SEQ ID NO: 292101 - DNA, 423 bp, Unknown
  Bacterial polypeptide expressing nucleotide sequence isolated from the Sargasso Sea
aatgactaaaaaatattttggtacagatggaataagaggaaaggtaaatggaaataaaataaatggtgacatgttttttaagtttggtttagctgtcggcacatattttaataataaaaaaaaaactaaacagatagcaataattgcaaaagataccaggttatcaggatacgcactagaaccagcattagtgtctggtttaacctcagctggaatgcatgttttcacttttggtccattaccaacaaatggtcttgcaatgcttacaaaaaaaatgagagctaatatgggaatcatgatcactgcatcccataatcctttttatgataatggtttaaaattatttggaccaaatggtttaaaattgtctgataaaatagaaaaaaaaatagaaaaacttattgattcaaaaatatcgaaaaa

SEQ ID NO: 292102 - DNA, 512 bp, Unknown
  Bacterial polypeptide expressing nucleotide sequence isolated from the Sargasso Sea
aaataaaaaaatgttaagaggaggtgtagtggaaacatggatgtctaattatgggctagaaaattatttaaaaaaggaaaatattaaatttatacgagctaatgtcggtgacaggtatgttaaagaaaaaatgcaaaaaaataaatttaatttaggtggtgagcagtcgggtcatattattttaggtaaatttgcaactacaggagacggtttactcgttgcactcgagtgtttatttgcattaagaaaaggaaaaagagctagtaaatttttttataaatatgaaaaaatacctcagattttaaaaaatattgaagttaaggacaaaaatataataaacagaccagatattaaaaagtcgattaaattagcaactaaatttattaaaggtcaaggaagaattttagtaagaaagtctgggacagagacaaaaataagaataatgggtgagagtgaaaatagaaaacttttaaagaaatgtataaatattattcaaaaaaaaataaaataat

SEQ ID NO: 292103 - DNA, 368 bp, Unknown
  Bacterial polypeptide expressing nucleotide sequence isolated from the Sargasso Sea
aatgttaaaaaaatattttggcactgacggaataagaggcagagtaaataaagaaaaaataaatggagaaatgtttttcaaatttggattagcagccggtacgtattttaagaaccaaaaaaaaaataagcaaatagctataattgctaaagatacaagattatctggttatactttagagcctgcacttgtatcagggttggcttcagccggaatgcatatatttacatttggaccactaccaacaaatggtttagcaatgttaacaaaaaaaatgcgagcaaatttaggcattatgattactgcatcacataacccatatcatgataatggcttaaaattatttggtccagatggattaaagctat

SEQ ID NO: 292104 - DNA, 793 bp, Unknown
  Bacterial polypeptide expressing nucleotide sequence isolated from the Sargasso Sea
gaagcatgtttaaagattggccatgccacaggtgttgtaatgaaagatcttggctggaatactgttgttattggtaaggacacaagaatctcaggatatatgcttgaatctgctcttcaagctggttttattgcatctggagtaaatgttaatcttttgggaccattaccaacacctggagtagcataccttacaaaaaccttaagaaataaatttggtgtagttataagcgcttcgcataatgattttttagataatgggattaaaatatttaatgaagatggcgagaaaatctccagagatattgaaaaaaagattgaaaaaaatatctctaaaaaacttattccagttgaaacttccaagataggaaaagcttatcgattcgatgaatcaggacctagatatatagaattttgtaaatctacagttccgcctaatatttcattctcttcgcttagaattgttattgattgtgccaatggcgcctgctataaggtgagccctcaaatttttaaagaacttggtgcagatgttattgaaattggaaccaatcctgatggatataatataaatatgggttgtggctccacaaatcctgaagttgtaaaagaggctgtgattaaacatagagcagactatggaatttctcttgatggggatggtgatagagttattattatagataaaaaaggaaatatattagatggagatgatcttttatatattcttgccttttcaaatcccaatagaacaggtgtttggtcaggagtggtaggaacacttatgagcaatc

SEQ ID NO: 292105 - DNA, 583 bp, Unknown
  Bacterial polypeptide expressing nucleotide sequence isolated from the Sargasso Sea
atgtcaaaaaaatactttggaacagacggcataagagggatggttaacggccaaaaaattaacggggaaatgttttttaaatttggtttagcagctggaacttattttaaaaatttaaaaaaaaataaacaaactgctgtaatagctaaagataccagactttcaggatatactttagagcctgctctggtgtcagggttagcttctgctggtatgcatgtttttactcttggaccactccccactaatggtttagccatgctaacaaaaaaaatgaaagcaaatttaggtataatgattactgcatctcataatcctttccatgataatggtctaaaattatttggcccagatggactcaagttgtctgataaaatagaaaaaaaaatagagaaacttattgactcaaaaatcgtaaaaaatttaacactcccaaaaaatttaggtagagtaaaaagattagaaaatgcaaccgataaatatacaaaaattttgagaagaaatttcccaaaaaattttagtcttaaaggtattaagatagcaatagattgtgcaaatggcgcaggttataaatctgcaccaa

SEQ ID NO: 292106 - DNA, 517 bp, Unknown
  Bacterial polypeptide expressing nucleotide sequence isolated from the Sargasso Sea
tggaaatctaaaaaaattttgaaaggcggtgttattggaacattaatgtctaattacggcttagaaaaatttctgaaatatgaaaaaataagattttctaggtctaaagttggagacaggtatgtcaaagaaaaaatgaaaaagctaaattacaatttggggggtgagcagtcaggtcatataattttaggaaaatttgcaacaactggagatggtttgttagtggctttagaggttttattttctcttagaaagggaaaaaaggctagccatcttttaaaagttttcaaaccattgccacaaattctagaaaatgtagttgttaatgataaaaatgttatcagtaattctaaatgtaaaaaagcaattaagattgctaataaaattatgggtcagcgaggaagaatattagtcagaaaatctggaactgaaccaaaaataagaatcatggccgaatcttatgatagaaatttaattctaaaatgtatcaaactaattaaggggtcaataaaataaa

SEQ ID NO: 292107 - DNA, 502 bp, Unknown
  Bacterial polypeptide expressing nucleotide sequence isolated from the Sargasso Sea
aatggcaaaaaaatattttggcaccgatggaattagaggaaaagtaaatcaaggaaatattaatggagaaatgtttttcaagtttgggttagctgcaggaacatactttaaaaatttaaaaaaacataaacaaacagcaatcattgctaaagacacaagattatctggttatactcttgaaccagccttagtttctggtttagcttcagcgggaatgcatgtatatacactgggacctttgccaacaaatggtctcgcaatgttgacaaaaagaatgaaggcaaatatgggtattatgataacagcatcacacaatccctattttgataatggattaaaattatttggacctgatggcttaaaactatctgataaaatcgaaaaaaaaattgaaaaattaatagattcaaaaattacaaaaaatttatctaaaccaaatattcttggtagagttaaaagactagagaatgctaacgacacatatattaaaattttaaaatcc

SEQ ID NO: 292108 - DNA, 500 bp, Unknown
  Bacterial polypeptide expressing nucleotide sequence isolated from the Sargasso Sea
catggcaaaaaagtattttggaacagacggtataaggggaaccgtaaaccaaggcaatattaatggattaaaattttttgaatttggtttagcggcagcaacttattttaaaaatcaaaaaaaaaataaacaaattgcaataatagctaaagacacaagactatcaggctatacacttgagccagctcttgtatcgggtctagcttcagggggtatgcatgtttttacattaggacctttaccaacaaatggtcttgcgatgttaacaaagtcaatgaaagcaaatatgggcattatggttaccgcttcacataacccatactatgacaatggtttaaaattatttggtccagatggtttaaaattgtcagataaaatagaaaaaaaaattgaaaaattgatagatgctaaaaatattaaacaacttactaatcctagtttattaggtagagtaaagagattagaagatggtaacgatagatatataaacatattaaaaa

SEQ ID NO: 292109 - DNA, 610 bp, Unknown
  Bacterial polypeptide expressing nucleotide sequence isolated from the Sargasso Sea
tttagatggagatgctgatagaataattgtttgtgatgaaaatgcaaaagttattgatggcgatcaaattattgcaatgttagctaaacgttggcaagacaaaaaaattttaaaaggtggagttgtaggtactttaatgtcaaattatggtttagaaagctttttcaaaaaaaataatattaaatttctaagagctaatgttggtgataggtttgttaaagaaaagatgcaaaaaaatagatttaaccttggtggcgaacaatctggtcacataatattaggaaaatttgcaacaacaggtgatgggttgttagttgcactcgaaattcttttttctatgagaaaagggagaaaagctagcaatttgtttaataattttaatccagttcctcagttactggagaacattacagtaaaagataaaaatataattaattcattaagttgcaaaaaagcaataaagaaatcaattaaattacttaaaaataaaggtagaattttggtcagaaaatctggaaccgaaccaaagattagaattatggttgaaactaatgataaagtattacttttgaaatgtattaatattattaaaaggtctttaaataattga

SEQ ID NO: 292110 - DNA, 825 bp, Unknown
  Bacterial polypeptide expressing nucleotide sequence isolated from the Sargasso Sea
gatgttaaggccacaaaagacgcaatcaatattttcaaaaaggttaattgtgactaaaaaaaataatattcttaaaaagtattttggaactgatggaataagaggtagagcaaattcatcatcaatgaatgcaaatttagcattgagaattggtatggcctctgcaaaactctttaccaggggagagcacaaacataatgtactaattggcaaagatacaaggttatctaactataccattgaaccagcattaacatcgggattcttaagtatggggatgaatgtttatcttacagggccactgcctacaccaggcgttgcatcacttgttacatcaatgcggtgtgatgtgggtgttatgatttcagcttctcataatgagtatttagataacggtataaaaatattttgtcctgatggaacgaaattatctgacgaacaggagattgaattagaaagattaattgataacaataatctcaaattagctaaatctgaaaatcttggaagagcaaaaagaattgacgatgctggaggcagatacatagaatatttaaaatcaagaatgcctagctcattaaggttagacggctttaaaatagtcattgactgtgcaaatggggccgcgtataaagtggggccaacaatcttgtgggaattaggggcagaagtaatccctattaacgtaaatcctgatggaacaaatgtcaataaaaatggaggttctacagatcctagtaatttaatatcaatggtaaaaaaaaataaagcagatattggtattgctttagatggtgatgctgatagatgtgttttggtagatga

SEQ ID NO: 292111 - DNA, 481 bp, Unknown
  Bacterial polypeptide expressing nucleotide sequence isolated from the Sargasso Sea
aggttttagagaattcttaaaaaaatcaaaaatcagacttcatcttacaaaagttggtgacagatatgttatagaaaaaatgaagcaagctaaattacatttgggtggagaacaatctggacatattattttctctgataatggatattgtggagacggaattcttacagcaatgtttattataaatatagttggtgagcttaaagtaaaactttctgaatttacagaaaatttatttttaaaaagccctcaaaaacttattaatattaaaacaaaaacaaatagtgaaaaaattataaaacatcaagaaatgcgtgaagttttgaaaaatattaaaaataaatataaaaacttggattatcttataagaaagtctggaacagaaaatttgttaagaattatggtgcaatcaaaaaaaaatactgaagttaataaagttttaaaaattttagtgaatctagttaagaatttagatggttaa

SEQ ID NO: 292112 - DNA, 390 bp, Unknown
  Bacterial polypeptide expressing nucleotide sequence isolated from the Sargasso Sea
aatgataaaaaaatattttggtacagatggaataagaggaactgttaacaaaggaaacattaatggagaaatgttttttaagtttggtttagcagcaggtaagttttttataaatcaaaaaaaaaataagcaaacggcaattattgctaaagatacaagattatctggttatagtttagaaccagcattagtctcaggactttcatcagcaggaatgcatgtttttacattagggcctttaccaacaaatggtttagcaatgctaaccaaaagcatgaaggcaaatatgggaataatgatcactgcttcacacaatccttattatgataatggattaaaattgtttggccctgatgggctaaaactttctgacaaaatagaaaaaaaaat

SEQ ID NO: 292113 - DNA, 625 bp, Unknown
  Bacterial polypeptide expressing nucleotide sequence isolated from the Sargasso Sea
tatgattaaaaaatattttggtacagatggaattaggggaaaagtaaatggatctaaaataaatggagaaatgttttttaaatttggcctagctgctggcacatattttaaaaatttaaaaaaaagtaaacaaatagcaattattgcaaaagacacaagattatcgggttatacgcttgaaccagctttagtatctggattagcttcagcaggaatgcatatttatactttaggaccactaccgacaaatggtctagcaatgcttacaaaaaaaatgagagcaaacatgggtataatgattactgcatctcataatcccttttatgacaatggattaaagctatttggaccagatggactaaaactttctgacaaaatcgaaaaaaaaattgaaaagttaattgactcaaagataacaaaaaatctctcaaaaccaattgagttaggcagagttaaaagattagaagatgctaatgaaaaatatataaaaatattaaaacaaaattttccatcttcttttagtctaaaaggaattaaaattgcattagattgtgcaaacggagctggttataaagctggtcctgaattatttaaatcactaggtgctaaattatatagtgctggc

SEQ ID NO: 292114 - DNA, 385 bp, Unknown
  Bacterial polypeptide expressing nucleotide sequence isolated from the Sargasso Sea
aatgacaaaaaaatattttggaactgatggaattagaggtccaataaatagcaaaaacattaatggagacatgttctttaagtttggcctagcatctggaactttttttaaatctcaaaaaaaaaacaaacaggttgctataattgctaaagacacaagattatcaggctatatgcttgagccagctttagtatccggattaacttctgctggtatgcatgtcttcaccttaggacctctgccaacaaatggtttggcaatgcttactaaagctatgaaggctaacatgggaatcatgataactgcatcacacaatccacattatgacaacgggttaaaattatttggtcctgatggaatgaaattatctgataaaatgaaaaga

SEQ ID NO: 292115 - DNA, 938 bp, Unknown
  Bacterial polypeptide expressing nucleotide sequence isolated from the Sargasso Sea
ggtgtagttgtaagtgcaagtcacaatccttatttcgataatggaattaagttttttaatagatttggtaggaaaatctctgaggatcttgagaagagaattgaatcaaaatttaatgacaaaattgacccagaaagcccggaaaaacttggaaaagcttttagaatcgatagtgcgtctggaagatatattgaatactgcaaaagcacactaagaggaaaatcagatttaaaagggaaaacaatactagtggatgcagctaatggggcaaattataaaattacaccgatgcttttggaagaacttggagcaaaggtgatacgagttaattgtgtgcctgatggtaaaaacataaatgaaaagtgtgctgttctagaccaaaatttatttcaggattatgcatcaaaatataattttgattactgtgctgcaattgatggagacggagataggctagtactatcagatcatgagggtaatattttttctggggatgaaattctatttttacttgctctcaaaaatataagagaaggagcaaaaggcagcaataaggttgttggaacagaaatgactaattcaggaattggagaggcactcaagaagtttgatatagagctattaagagcagatgttggagacaagcatatatccagaatgttggtagaagaagatctagtattgggagccgaatcgtctggacacataatacaaagacaatattcagaaagtggtgacgcaaacattgctctaattcaaaccatagcagaacttaacgaatccaaaaatacactacaaaaaataagatcccaaataaattatagaccttcggtgttaaagagtttccctgtaaaaaattttttggttctgaaaaatcaagattttcagaattgtctcaatggaattaaagcaaaaaatgatgacattagattatctgt

SEQ ID NO: 292116 - DNA, 343 bp, Unknown
  Bacterial polypeptide expressing nucleotide sequence isolated from the Sargasso Sea
atgtcaaaaaaatattttggtacagatggaattagaggaaaagtaaaccaaggaaacattaatggagagatgttttttaaatttggtttagcagcagggacttattttaaaaatttaaaaaaaactaaacaaatagcaataatagcaaaagatactagattatctggctatactctagagcccgctctagtatccggtttagcttctgcgggaatgcatgtttatacactgggtcctttaccaaccaatggtcttgctatgttaacaaaaaaaatgaaggcaaatatgggcattatgattacggcatctcataacccttattttgacaatggattaaaattat

SEQ ID NO: 292117 - DNA, 556 bp, Unknown
  Bacterial polypeptide expressing nucleotide sequence isolated from the Sargasso Sea
aaccaaaagattctcccaaataatttattaatatcaacacatatggcaaatttaggttttgaaaaggcctggaataaaattggtgggattttacatagaactgatgttggagataaattcgtttatgaagcaattaagaataaaaaaacaattttaggtggagaacaatcagggcacatactttcaaaaatcaataacttttctggagatgggatattgactgcacttcaaatttcaaaatattgtaaaaagaaaaatattaccttaaatgaatggcttaaaagtagttttgaccctttccctcagcaactaaccaacattgatttagattttaatattaataaaataaataagaaaactaaaagattaatttatcaaactatagaaaatttgcaagcaatctactccgacaattgtaggctttatataagacctagtggtacagaacctctaatgagagttcttgtagaggcaaaaaacgataaaaaggttcattcattatcgcgtgaaataaccaacaaactcagtttagaaataaaaaaaatattgcattaat

SEQ ID NO: 292118 - DNA, 563 bp, Unknown
  Bacterial polypeptide expressing nucleotide sequence isolated from the Sargasso Sea
aaatgtaattgatggtgatcagataatcgctgctttagcaacaagatggaaaagtaaaaaaatgttaagagggggagttgttggaactttaatgtctaactatggtttagaaaaattttttaaatctgaaaaaataaaatttattcgagcaaatgtaggtgatagatatgttaaggaaaaaatgaaaaaaaataatttcaatcttgggggcgaacaatctggtcatattattttaggaaaatttgcgacaacaggtgatggtttgcttgttgctttagaatctctttttgcaattagaaaagggaaaaaagctagtgtattttttaataaatttaagaaaataccacaaattttaaaaaatatcgaggttaaggatagagctataattaaaaaccctagagtaaaaaaatctattaagattgcagaaaaattaatgaatggacaaggcagaatcttggtaagaaaatcaggaacagaattaaagataagagtgatgggtgaaagtgaaaataaaaaactcttaaaaaagtgtataaatattatttctaaaaagattaaataaa

SEQ ID NO: 292119 - DNA, 819 bp, Unknown
  Bacterial polypeptide expressing nucleotide sequence isolated from the Sargasso Sea
ataatccatattatgataatggcttaaagttatttggtccagatggactaaagctatctgatttaattgaaaaaaaaattgaaaaattgatagatactaatatatctatcaatttatcaaatccaaaaatacttggaagagttcaaaggcttgagagcggttcagaaaaatatattgaaattttgaggagtaattttccaaatcagtttaatctacgaggtcttaaaattgctattgattgtgcgaatggtgcagcctataaagttggacctttgttatttgagtctcttggtgcccaagtttataaaactggaattaatccgaatggatttaacattaatgaaagatgtggctctacctatccaaataagattagaaattttacaaaaaaaaataaagcacatataggtatatctttagatggagatgccgacagaataattatatgtgatgaaaatggcaaaatagttgatggcgattccataatagcaatgttggctaaaagatggaaaaaaaaaaaaattttaaaaggtggtgtgattggaactttaatgtctaattttggattagaagagtactttaagaaaaataaaataaagtttttaagatctcaggttggtgatagacatgttaaggaattaatgaaaaaaaataaatttaatttaggtggcgaacagtctggtcacataattttaggcaagtttgcaacaacaggagatggtttattagtagctttagaagttttgttttcaatgagaaaaggaaaaaaagcgagtgaattattcaataattttaaaccaaacacctcaaattattaga

SEQ ID NO: 292120 - DNA, 589 bp, Unknown
  Bacterial polypeptide expressing nucleotide sequence isolated from the Sargasso Sea
agaataattatgtgcgatgaaaaaggtaaaattatagatggtgatcaaattattgctatgcttgcgcgtagatggaaatcaaaaaaaattttaaggggaggtgtaattggaaccctaatgtcaaactacggtttacaaagttttttgagcaatgagaaaattaaattctttagatcaaaagtgggagatagatatgtaaaagaaaaaatgaaaaaattaaattttaatttaggaggcgagcagtctggtcatataattcttggtaaatacgctactactggagatggtttaatggtcgcgttagaggttctattttcattaagaaaaggaaaaaaagctagtaaattacttaatgtttttaaacccttgccgcagatattagagaatataatcgtaaaagataaaaatataattaacaaatctaaatgtaaaaatgcaatcaaaaaagccaataaatttatgaataatcagggaaggttattaataagaaaatcgggcacagagcccaaaataaggattatgggagaatctcacaacaagaaattaattttaaaatgtataaaattaattaagagatcaataaaataaa

SEQ ID NO: 292121 - DNA, 644 bp, Unknown
  Bacterial polypeptide expressing nucleotide sequence isolated from the Sargasso Sea
aatggcaaaaaaatattttggaaccgatggtattaggggagctatcaatagtgaaaatattaatggagacatgttttttaaatttggcttagcaagtggaacatattttaaatctcaaaaaaaaagaaaacaaaccgcaataatagcaaaagatactagattatccggatacactttagaaccagcacttgtatctggattggcatcagcaggtatgcatgtatatactttaggacctttacccacaaatggtttagcgatgctcacaaaagctatgagggcaaatatgggaattatgattacagcttctcataatcctcacaatgataatggattaaaactatttggacccgatggtatgaaactatcagataaaatagaaaaaaaaattgaaagtttaatagataaaaaaatcatcaaaaatctctctaagccagaaaaattaggtagagtaaaaagattagagacaggtacaaatgattacatcaaaatattaaaaaaaaattttaccaaagaattcaatctaagaggacttagaattgtaattgattgtgcaaatggagcagggtacaaagctggaccagaattattaaaatctttgggagctaaggtgattgcaattggagttaatcctaatggattaa

SEQ ID NO: 292122 - DNA, 451 bp, Unknown
  Bacterial polypeptide expressing nucleotide sequence isolated from the Sargasso Sea
aatgataaaaaaatattttggaacagatggtataagaggaaaggtaaatggagataaaataaatggaaatatgttttttaagtttggtttagccgccggtacatattttaaaaatcaaaaaaaaactaaacaaattgcaataattgcaaaagatacaaggttatcaggatatacacttgagccagcattagtatctggtttaacatcagcaggaatgcacgtttttacttttggacctttgccaacaaatggcttagcaatgcttacaaaaaaaatgagagctaatatgggtatcatgatcacagcatctcataatccttacaatgacaatggtttaaagttatttggacctgatggactaaaattatctgataaaatagaaaaaaaaatagaaaaacttattgactccaaaatatcaaaaaagttatcaaatcctaaaatattaggcagg

SEQ ID NO: 292123 - DNA, 713 bp, Unknown
  Bacterial polypeptide expressing nucleotide sequence isolated from the Sargasso Sea
aatagcaaaggacacaagactttctggttatgctttagaacctgctttggtatcaggtttagcttcagctggaatgcatgtttttactttagggccattaccgactaatggtttagcaatgttgacaaaatcaatgaatgcaaatcttggaataatgattactgcatcacacaatcttttttatgataatggtttaaaactttttggtccaaatggattaaaattatctgataaaattcaaaaaaaaattgaaagtttaatagatagtaaagttgaagatcatttatcaaaaccacgatttttaggtagggtaaaaagattagaaacaggtaatgatgattatataaaaattttaaaaaaaaaaattcctaaaaattttaaacttaaaaagatgaaaatagttttagattgtgcaaatggggctggatataaatctgcacctaaaatgattaattctttaggtgctgaattgattattattggaaataaaccaaatgggtttaatattaataaaaattgtggttctacgtttccacgaaaattacaacaagctgttaaaaagcacagagcagaccttggtttttctttagatggtgatgcagatagaattataatgtgtgatgaaaaaggatcaattgttgacggagatcaaattattgcggcattagcaatgcaatggaaaaagaaaaaaattcttaaaggaggtgttgtag

SEQ ID NO: 292124 - DNA, 568 bp, Unknown
  Bacterial polypeptide expressing nucleotide sequence isolated from the Sargasso Sea
cgataaaataatagcattgtttgcaactcatcttgagaacataaacaaaaaaaaatctgattttccaatcataacaacagtaatgtcaaacattggattagaaaattatcttttaaataatttaaagataaaattaaaacgttcgtctgtaggagatataaatgtaataaatgaaatgaaaaaatataaatcaattttaggtggtgaacaatcaggccatataattttatctgaatattcaaaaacaggagatggtattttagccgcattaaaagtaatggaaataatttctaaattaaaaaaatcagttagttcaatttttaatctatataaagaccttcctcaaattaaaattaatatttcttataaaaaagtatccaaaaaatgccttaaatacataaaagatattaataagaaaaaaattaaaaataaaaatattagagttttaattaggttatcgggtacagaacctttaataagaattttagttgaaggacaagatttaaaatcagttaaagcacaagcaaaaatcatagaaaaacaaattcggattaatcttgataaataa

SEQ ID NO: 292125 - DNA, 502 bp, Unknown
  Bacterial polypeptide expressing nucleotide sequence isolated from the Sargasso Sea
atcctaagaggtggagtaatcggaaccttgatgtctaattatggtttagaaaaatttttaaaaaatgagaaaatacgattttctagatctaaagtaggcgacaggtatgttaaagaaaaaatgaaaaaattaaattttaatctgggtggtgagcagtctggacatattattttaggcaaatttgcaacaaccggagacggtttgcttgtagcattagaagttttattttctctgagaaaaggtaaaaaggctagcaaactattaaatgtttttgaacccttacctcaaattttagataatgttgttgttaaaaataaaaatataattagcaaatcaaaatgcaaaaatgcaataaaaaaagctaataagcttatgggtcacaagggaagaattttagttagaaaatccgggaccgaaccaaaaattaggattatggctgagtcatatgataaaagtttaattttaaaatgtataaaaataataaagagatcgataaagtaaa

SEQ ID NO: 292126 - DNA, 747 bp, Unknown
  Bacterial polypeptide expressing nucleotide sequence isolated from the Sargasso Sea
aatgacaaaaaaatattttggaactgatggaattagaggaaaggttaaccaaaataaaattaatggagagatgttttttaaatttggcctagctgctggcacatattttaaaaatcaaaaaaaattcaagcaaactgctataatagcaaaagatacgagattatctggttattcgctcgaacctgcacttgtttctggattggcatcagctggtatgcatgtttatactttagggcctttacctacaaatggcctagcaatgttaaccaaaaaaatgaaagcaaatttgggtataatgattaccgcatcacataatccatattatgataatgggcttaaactgtttggaccaaatggtttaaaattgtctgataaaattgaaaaaaaaatagaaaaattaattgatattaaaatcattaaaaatctctcagaaccaaaaatcttgggaagggtaaaaagattagaggatgcaaatgatagatatataaaaatattaaaaaaaaactttccaaataattttagtttaaaaggcatgaggatagtaatagattgtgcaaacggcgctggatataaatctggacctaaactttttagaggtttaggtgcaaaagtttttgaatatggtgcatcaccaaatggcttaaatataaataaaaattgtggttcgacatttccaaataaaattaaacgattagtgaaaaaacataacgcacatattggtatatctttggatggtgacgctgatag

SEQ ID NO: 292127 - DNA, 403 bp, Unknown
  Bacterial polypeptide expressing nucleotide sequence isolated from the Sargasso Sea
aatgtcaaaaaaatattttggtactgatggaattagaggaaaggttaatcaaggaaatatcaatggtgaaatgttttttaagtttggtttagcagctggaacttattttaaaaatctcagaaaatctaagcaagtggcaattattgcgaaagatacaagattatcaggatatacattagagcccgcacttgtctctggtcttgcatcggctggaatgcatgtatttttattgggacctttgccaacaaatggccttgcaatgttaacaaaaaagatgaaagcaaatatgggaattatgataaccgcatcacataatccctattatgacaacggtttaaaactttttggtccggatggattaaaactatctgataaaattgaaatgagaattgaaaaacttata

SEQ ID NO: 292128 - DNA, 640 bp, Unknown
  Bacterial polypeptide expressing nucleotide sequence isolated from the Sargasso Sea
gatttgtttagatggagatggtgatcgagtcgtaattattgatgaaaagggtaaggtattatgcggagaggagttaatttatattcttgctaaatattatttatctgaaaataaaatcaaaaaaggatcaatagttgtaacaaatgaaattgcaaattatgggcttgatatttctctaaaaaaattgggtttaaaattaaaaagagtaaaagtaggtgataaaaatattcttaaacaaataatcgatcataaatacttttttgggggtgaaccatctggacattttatatttaaagatgacatactgataggtgatggtatgacgacagctatcagacttttaactctaattctaaaaaaaaacaaaaagttatcagagttaagaaaaggtattgatttatttgaagtgataaatataaatcaaaggatagatcgagaaaaattttatttatctcaagaaagtatttatcaaaaactaaataaattatgtaaaaacttgaatatttattacaacattcgtccatctggcactgaaccacttttaagagtgaacttgcaatatgagaaaagaaatataaaagtaactattctgaataaattaaaaacacaaataattaaagtaatctcggatgcttgttaa

SEQ ID NO: 292129 - DNA, 745 bp, Unknown
  Bacterial polypeptide expressing nucleotide sequence isolated from the Sargasso Sea
atgaagaacaaatattttggaacagacggtataagaggaactgttaatcagggaaatattactggagaaaaattttttaagtttggtctagcatccggcacgtattttaaaaatcaaaaaaaatccaaacagaccgcaatcatagcaaaagatacaagattgtcaggatatactttagaaccagctctcgtatcagggttagtttctggcggaatgcatgtttttacacttggacctttaccaaccaatggacttgctatgctaacaaaatctatgaaggcaaatatgggcattatgattacggcatcgcacaatccttattatgataatggtctaaaattatttggaccagatggaatgaagttgtctgacaaaatagaaaaaaaaattgaaaaattaatagatgctaaaaacacgaaacagttaacaaatccaaagttattaggtagagttaagcgattagaagatggaaatgatagatatattaaaatattaaaaaataattttccaaataattttaatttaagaggtacgaaaatagttttagattgtgccaatggagcttgttataaagctgctccaaagttactaaaagaactcggtgcaaaagttatctcaatcggagtaaaacctaatggtttgaatattaatgaaaagtgtggatcaacctatccatccaagattagatcggctgttaaaaaactcaaagcacacgttgggatttcttttgatggagatgcagata

SEQ ID NO: 292130 - DNA, 469 bp, Unknown
  Bacterial polypeptide expressing nucleotide sequence isolated from the Sargasso Sea
atgataaaaaaatattttggaacagatggaataagaggaaaggtaaatggagataaaataaatggtgacatgttttttaaatttggattagctgttggtacatattttaaaaatcaaaaaaaatttaagcagattgcaataattgcaaaagacacaagattatctggatatacacttgagccagcattagtatctggtttaacatcggctggaatgcatgtatatacttttggaccattgccaacaaacggcttagcgatgcttacaaaaaaaatgagagctaatatggggattatgattaccgcatctcataatccttattatgacaatggtttaaaattatttggacctgatggacttaaattatctgataaaatagaaaaaaaaatagaaaaactaattgactccaaaatatcaagaaaattatcaaatcctgaaatgttaggtagggtcaaaagattagagaatg

SEQ ID NO: 292131 - DNA, 469 bp, Unknown
  Bacterial polypeptide expressing nucleotide sequence isolated from the Sargasso Sea
gtctaattatggactagaaaattttttaaaaagtaaaaaaattaaatttttaagatctaaggtaggggacagatatgtgaaagaaaaaatgaaaaaactaaatttcaaccttggaggggagcagtcagggcacataattcttggaaagtttgcaactacgggagatggattaatggttgcgttagaagttcttttttcgttaagaaaaggaaaaaaggctagtgaattgctcaatgtatttaaacctttgcctcaagtattagaaaatataaatgttaaagataaaaatgttattaataaacctaaatgtaaaaaagctataaaaaaagcaaataaattaatgaatggacatggaagattattaattagaagatcaggaacagaaccaaaaataagaattatgggcgagtcttataataaaaatttaattttacaatgcataaaaataattaaaaaatcgataaaatag

SEQ ID NO: 292132 - DNA, 533 bp, Unknown
  Bacterial polypeptide expressing nucleotide sequence isolated from the Sargasso Sea
tgctttagctacaaggtggaaagataaaaaaatgttaaaaggaggtgttgttgggacgcttatgtctaattatggtttagaaaaatattttaaaaaaaaaggtattaaatttgtacgtgctaacgtgggagatagatatgttaaagaaaaaatgcaaaaaaataaatttaatctaggaggtgaacagtctggacatataattttgggtaagttcgcaacaacaggtgatggtttacttgttgcattggagtctctgtttgccttaagaaaaggaagaaaggcaagcgaatttttcgaaaaatttaaaaaaacgcctcagttattaaaaaatattgatgtaaaagataaagatataattaataaaacagaaattaaaaattcaattaaattagcagaaaaaatgattaaaggtcgaggcaggatattggttagaaagtcagggacagagtcaaaaattagagtaatgggagaaagccaaaataaaaatcttcttttaaaatgtgtaaatataattgtaaataaaattaaataat

SEQ ID NO: 292133 - DNA, 556 bp, Unknown
  Bacterial polypeptide expressing nucleotide sequence isolated from the Sargasso Sea
tatgtctaaaaaatattttggtaccgatggaattagaggaaaggtaaatgcaggaaacataaatggagaaatgttttttaaatttggattagctgcaggtgcatattttaaaaatcaaaaaagatcaaaacaaacagcaataattgcaaaggatacgagattatctggatatactttagaacctgctcttgtttcagggttagcatctgcgggaatgcatgtttatacactaggtccattaccaacaaatggtttagcaatgttgacaaaaaaaatgaaagcaaatatgggaattatgataacagcgtcacataatccatatcatgacaatggtttaaaattatttggaccagatggacttaaactttctgacaaaattgagaaaaaaattgagaagcttatagactcaaaaataaaaaaaaatctgtctcaaaatgaaactttaggtagagtaaagagactcgaaaatgcaaacgaagaatatattaaaattttaaaaaaaaattttcctaaaaattttagaaatgaaggcataaggatagcaatagattgtgca

SEQ ID NO: 292134 - DNA, 862 bp, Unknown
  Bacterial polypeptide expressing nucleotide sequence isolated from the Sargasso Sea
gatgcaacgtccaccccaacctacactggaatacgaagcttattgccagagctttgttaaagaaccacgaaattttgcaaacttatccatagtccttgattgcgcaaatggagcggcatataaagttgctcagcgtgtttttgaaaagcttggtttatctcccatatatatgggagttgaccctgatggcacgaatatcaatgagggttgcggttcgacagacacaacagtgttgcaaaggagggtagtcgaagagaaagcggatttagggatcgcttttgacggagacggggatcgtttgatcatgattgatgaattcggcgagatagtggatggagatgagattgtttacgcgatcgcttgcagaaaaaaagagttaggcacgttaataggtggagttgttggaacacatatgacgaatctagggctcgagttagccctagctgagttaaatattccttttgtcagggcagatgttggcgatcgttacataatggaagctttaagagaaaaacagtggacactaggaggcgagacctccgggcacattattaacttagatgcttgtcacactggcgacgcgataatcagcgcactgctaattttagagattctgggatcgatgaagataacgcttagtgagcttgtcaagcccgtgaaaaagcttccccaagtgcttattaatgtgtcaacagaaaatccaaaactcgttatgagcagcagaaagctagccgaaagaattgataaatttcggagcgagttaggaaaagaaggtcgaattctcattaggccctctggtactgagccacttgttagagtaatggttgaggggcgagatcgagagcaatcgagcgctatcgct

SEQ ID NO: 292135 - DNA, 844 bp, Unknown
  Bacterial polypeptide expressing nucleotide sequence isolated from the Sargasso Sea
tgggaaagcttctagaatgaatgatgctcaaggacgctatattgagttctgtaaatcgtctttcacagatcttgatttaaaaggattgtctatccttttagattgcgccaatggggctacttattctgtggcaccaaaagttttttccgaattaggagctaatgttgacacaattggagcctcacctgatggaatcaacattaatcaaaattgcggctcaacaagccccgatacattaaaagaagctattgttaaaggttcttatgatataggaatagcctttgatggagatggagataggattctgatagtgaattctgatggtgaagtattagatggagatgatattctttacatcctttctaaagaaatatctgaaaattctggcgttgtgggaaccttaatgaccaataaagccttagagcttcattttcataatgagggtatagagtttataagagccgatgttggagataagtatgttttgcaaagattaattgaaaggtcatggtttttaggcggagagccttcaggtcacataatatgtctagattctgctcctactggagatgctatagttgctgcccttaaattattgaatgcaactaaagacaatggattttctgtagaaaaatccttagaaggttttcaaaagtttcctcagacattaattaatttaaaggttaataaccctaataaaataataattagcgataaattttgggaaaaagtcaccgaaattgaacttcagttaggcgaagatggtagggtccttatacgcccatctggcacagaaccactcattcggttaatggtcgagtcaaaagacactgcaattcagaaa

SEQ ID NO: 292136 - DNA, 526 bp, Unknown
  Bacterial polypeptide expressing nucleotide sequence isolated from the Sargasso Sea
agcaacaagatggaaaagaaaaaaaattcttaaaggcggagttatcgggacaacaatgtcaaattatggattacagaactattttaaaaagcaaaaaataaaattctatagagccaatgtgggagacagatatgttaaagaaaaaatgcaaaaatacaaatttaatttaggtggagaacaatcaggacatattattttaggaaaatttgctactactggagatggcttgttggttgctcttgaggttttattttcaatgagaaaaggaaataaagctagcaacttatttaatgtttttaaaccaacacctcaaatattagaaaatataactgttaaaaataaattagtaattaattccagaaaatccaagatagcgataaaaaaggcaaaaaaacttattaaaaaccagggcagaatgttagttagaaaatctggtacagaaccaaaaattagaattatgggagagtccgaaaataaaaaattacttttaaaatgtattcaaatagttaaaagatcaattagataa

SEQ ID NO: 292137 - DNA, 384 bp, Unknown
  Bacterial polypeptide expressing nucleotide sequence isolated from the Sargasso Sea
aatgaaaaataaatattttggtacagacggtatcaggggaacggtaaaccaaggaaatattactggggaaaaattttttaaatttggtttagcatcaggaacttattttaaaaatcaaaaaaaatcgaaacagatcgcaattattgcaaaagatactagattgtcaggatataccttggaaccggctttggtatcaggtttagtctctggaggtatgcatgtttttacattgggacctttgccgacaaatggtcttgcaatgctaactaaatctatgaaagctaatatgggtattatgattactgcatcacacaatccttattatgataatggtttaaaattatttgggccagatggaatgaagctatcagataaaattgaaaa

SEQ ID NO: 292138 - DNA, 682 bp, Unknown
  Bacterial polypeptide expressing nucleotide sequence isolated from the Sargasso Sea
aatgtcaaaaaaatattttggtaccgatggaattagaggaaaagttaatgaaggaaatattaatggagaaatgttttttaagttcggtttagctgcaggaacatactttaaaaatttaaaaaaaaataaacaagtagcaattattgctaaagatacaagactatctggttatactcttgaaccagctctagtatccggcttagcttctgcaggaatgcacgtatatactttaggtccattgccaaccaatggtctagcaatgttaacaaaaagaatgcaagcaaatatgggtattatgataacagcgtcccacaatccatattttgacaatggtttaaagttatttgggcctgatggtttaaaattatccgacaaaattgaaaaaaaaattgaaaaattaatagattcaaaaattataaacaatttatctaaaccaagtattcttggaagagttaaaagacttgaggatgccaatgatagatatatcgaaattttaaaatctaactttccaccaaattttaggcttaacaaaataaagatcgcaatagattgtgcaaatggtgctgggtataaatctggaccaaaacttttaaaatcttttggagcaaaagtttataataccggcacatctccccaatggtttaaatatcaatcaaaactgtggatctacattccaaaaaaa

SEQ ID NO: 292139 - DNA, 429 bp, Unknown
  Bacterial polypeptide expressing nucleotide sequence isolated from the Sargasso Sea
aataataatccggatggcttaaacattaataaaaattgtggtgcagttgatattaaatcactttcacataatgtcataaaagaaaaggctgatattggatttgcatttgatggtgatggagataggttaatagttgtagatgaagaaggaaaagaagttgatggcgataaaataatagcattgttatgtaaaaattatgttaaacctaagaaaaaatctaatcaacatgacgttattataacagttatgtctaatatgggattagaaaattatctcacgaataaattgaaattaaagattaagcgtaccactgttggagatataaacgttataaatcaaatgaaaaaatccaaatctttcataggtggtgaacaatcaggacatataatcttgtcagaacattctaatacaggtgatggaattttagca

SEQ ID NO: 292140 - DNA, 787 bp, Unknown
  Bacterial polypeptide expressing nucleotide sequence isolated from the Sargasso Sea
gcataccaggtggggccgcttgtattgcgggaactgggtgctgaagtaaccggcaccggcatcgaaccagacgggttcaatattaatcgggaatccggatcgacttatccgcagactctgtgccaactcgtgaaggagtgtggcgcagatgtgggaatcgcatttgatggtgatgccgacagggtagtgctgtctgacgcccaaggccgtcttgtcgatggggacggcatcctctttatcctgagtcaatatcgtcaccaacgcggcgattgtgaaggcgttgtcgggaccttgatgaccaacttgggcgttgaggtggcgtgcgaggcgcagggaatcaaatttgtgcgcgccagggtaggcgatcgttttgtcctcgaggaactccttagccggaattggacgctgggaggagagacttccgggcatattttgtctttggatcgaagcacgaccggagacgggctagtggccgcgcttgccgtgctagaggtaatgcaaaagaccggcaaatcactggctgaactcgtagagaacttacaagtttttccacaggaactcgtgaatgtctcgaccgaacatcctcggcctgccgaattgctggatcagccccttgtcactgaagcagtgaaatcctgcgagaagcagctggggtcgcaggggcgggtggttctgcgggcctcgggaactgagccgctcattcgggttatggtagagggagaggattcagccagggtaggcgaattggcaagagttcttgcggatcagattagggcagtgggctgag

SEQ ID NO: 292141 - DNA, 364 bp, Unknown
  Bacterial polypeptide expressing nucleotide sequence isolated from the Sargasso Sea
aatgaaaaataaatattttggtacagatggaattagaggaaaagtaaatcaaggaaatataactggagaaaaattttttaaatttggtcttgcgtcaggtacacattttaaaaaccaaaaaaaatcaaaacaggtcgcaataatagcaaaagatacaagattatcagggtacactttggaacctgctttggtatctggtcttgtttcgggtggaatgcatgtttttactttggggcctctacctacaaatggacttgcaatgttaactaaatctatgaaagctaatatgggtataatgattacagcctcgcataatccttactatgacaatggattaaaatttatttggcccagacggaaatga

SEQ ID NO: 292142 - DNA, 478 bp, Unknown
  Bacterial polypeptide expressing nucleotide sequence isolated from the Sargasso Sea
aatgaaaaaaaaatattttggcacagatgggataagaggcacagtaaatcttggaaatataaacggagaaaaattttttaaatttggtttagcagcaggtacttatttcaaaaatttaaagaaaaaaaaacaagttgcaataattgcaaaagatacaagattatcgggttacacacttgaaccagcactagtttcaggtttggcttctgctggaatgcatatttttactttaggacccttaccaacaaacggattagctatgcttaccaaaaaaatgaaagctaatcttgggataatgatcactgcttctcataatccttttcatgataatgggttaaaattatttgggcctgatggaatgaagttatccgataagatcgagaaaaaaatagaaaatttaattgatactaaaaccgtaagtcatctatctgagccaaaatcattaggaagagtaaaaagattagaggatgggcaatga

SEQ ID NO: 292143 - DNA, 499 bp, Unknown
  Bacterial polypeptide expressing nucleotide sequence isolated from the Sargasso Sea
aatgttaaaaaaatattttggcactgacggtataagaggcagagtaaataaagaaaaaataaatggagaaatgtttttcaaatttggtttagcagccggtacgtattttaagaaccaaaaaaaaaataagcaaatagctataattgctaaagatacaagattatctggttatactttagagcctgcacttgtatcagggttagcttcagcaggaatgcatatatttacatttggcccactacctacaaacgggttagcaatgttaacaaaaaaaatgcgagcaaatttgggcattatgattaccgcatcacataacccatatcatgataatggcttaaaattatttggtccagatggactaaagttatctgatttaattgaaaaaaaaattgaaaaattgattgatgctaatatatctatcaatctatcaaatccaaaaattcttggaagagttaaaaggctcgagaacggatcagaaaaatatattgagattcttaaa

SEQ ID NO: 292144 - DNA, 685 bp, Unknown
  Bacterial polypeptide expressing nucleotide sequence isolated from the Sargasso Sea
aatgagcaaaaagtattttggtactgatggcattaggggttctgttaatacagaaaatattaatggggaaatgttttttaaatttggtttggcagcgggtacttattttaaaaacttaaaaaaaagtaaacaaattgccataatagcaaaagatacaaggttgtcaggctacacattagaaccagcgttagtttcaggtttaacttcaactggaatgaatgtttatacattaggacccttgccaacaaatggattggctatgctaactaaatctatgagagcaaatttgggtattatgattactgcatcacataatccttattatgacaatggcttgaaactatttggacctgatggacttaaattatcagataaaatagaaaaaaaaattgaaaaactaatagactcaaaaatttcaaaaaatttatcaaaacctagatttttgggaagagtcaaaagactagaagatgcaaatgacaaatatataaaaattttaaaaaataattttccaaaaaaatttaatttaaaaggtattaagatagctatagattgtgcaaatggagcgggatataaatcagcaccaaagttactaaggtcattaggtgctaaagtttatgaaacaggaacttctccaaatggtttgaatattaattataaatgtggatctacatttccaaagaaaatt

SEQ ID NO: 292145 - DNA, 649 bp, Unknown
  Bacterial polypeptide expressing nucleotide sequence isolated from the Sargasso Sea
aagattagaagatggaaatgacaaatatattgaattattaaaaaaaaattttcctaagaattttcatttgaaaggtacaaaaatagttttggattgtgctaatggagctggatataaagctgctcctaaattactaaaagagcttggagcgcaagtgatatctataggcgtaaagcccaatggttttaatattaatgagaagtgtggttctatgtatccatctaaaataagatcagcggtaagaaaatttaaagcacatgttggaatatcattcgatggagatgctgacagaattattatgtgtgatgaaaaaggcaatatcatagatggagatcagattattgctatgcttgctaaaagatggaagtcaaaaagaattttaaaaggaggagtaataggaactttgatgtcaaattatggtttagaaaattttttaagagatgaaaaaataaaattttatagatctaaagtaggagacagatatgtaaaagaaaagatgaaaaaatttaattttaatctaggaggagagcaatctggtcatgtaattctaggaaaatttgcaactaccggcgatggattaatggttgctttagaggtgttattttctttgagaaaaagaaaaaaagcaagtaagttactaaatgttttt

SEQ ID NO: 292146 - DNA, 510 bp, Unknown
  Bacterial polypeptide expressing nucleotide sequence isolated from the Sargasso Sea
tagtaacaactgtaatgtcaaatttaggttttgaaatttatttgaaagaaaaattaggagtaaaattaattagagaaaatgttggagatattaatgttattactaatatgaaaaaaaattcttataatttgggtggagagcaatcaggacatattatacttggccaatatatgaacactggcgatgcaatacttgctgctataaaagtaattgagtcactatccaaaagtaatacaaaagctagcaacttgtttaacctttttaaaaaatttcctcaaaataaaaaaaacataaaattaaatactgaactctcaaaattacaacaaaataaaattaaaaatatttcaattaaatatgtgaaaaaatataaaaatttgagatttttagttagaaaatcaggtacagaaccattaattagaatattagttgaaggcagagaaaaatttatagtaaataaaattaccaataaattgatgaaacaattgaaagagattattaatgttaagtgat

SEQ ID NO: 292147 - DNA, 319 bp, Unknown
  Bacterial polypeptide expressing nucleotide sequence isolated from the Sargasso Sea
atgataaaaaaatattttggcacagatggaattagaggaaaggttaatcttgaaaaaattaatggagatatgttttttaaatttggtttagcagcaggaatatatttcaaaaatttaaaaaaaaacaaacaaagtgctataattgcaaaagatactaggctttcaggttattctttagaaccggcattggtatcaggattagcttctgccggaatgcacatttataccttaggtccgttgccaacaaatgggcttgcaatgttaacaaaaaaaatgaaagcaaatatggggatcatgattactgcatctcataatcctt

SEQ ID NO: 292148 - DNA, 745 bp, Unknown
  Bacterial polypeptide expressing nucleotide sequence isolated from the Sargasso Sea
aatggattgaaaattaatgtaaattgtgggtctactaacctcgaaccattaaaaaaagcattaagagagagttctgcagatatgggttttagctttgatggggatgccgatagagtaattggcatagattcacaaggcaatgtgttagatggagatcatattctttttctatggggaagagaacttatggaacaaagatctctaacaaataatttactaatatcaacgcaaatggcaaacttaggttttgaaaaggcctggaataaaataggcggtattttatatagaactaatgtaggagataaatatgtgcatgacgcaattaaggaaaaaaaagctgtattaggaggtgagcagtcaggtcatatactttcaaaaattaataattttgctggagatgggatattaactgcacttcagatttcaaaatattgcaaaaagaagaaaattaatttaaatgattggcttagaagtagtttcaaacccttttctcaaaaactaaccaatatcaatttagactttaatattaataaaattaatccagaaaccaaaatattaattgatcaaaccatagaaaattttcaggaaatatattctgataattgtagagtttatattagacctagcggcacagagccggtaatgagagttctagttgaggccaacaaccataagaaagttcattctttatcaagcgaaataacaaacaaactctttttagaaattaataaaataattaattaac

SEQ ID NO: 292149 - DNA, 549 bp, Unknown
  Bacterial polypeptide expressing nucleotide sequence isolated from the Sargasso Sea
gttgtcagttctctccactttaagtaaggataggaagttcggtactgatggcattcgtggaccagtaacttccacaatgaatcctctatttgttacaaaacttggatgggcagctggatctatacttttagaagagggtatttctaaagttcttataggcaaagatacaagaatctcaggttacatgttcgaatcggccttacaagcaggtttcatctctgcaggtatggatgtgacactattaggccctctacctactccaggcgtttcctatctagcaaactctaataatcaggtaggctgtgtcattagtgcttcacataatctatttgaagacaatggtattaagttttttaataaagatggtcagaaattttcagccgaattagaaaaaaggattgaaactaaacttacccaagaaatggttgcagtggaatcaataaatcttggtaaagcctcaaggatgaatgatgctcaggggcgttatatagaattttgtaaatcatccttcactgacttagatttaaatggattatcaatccttttaga

SEQ ID NO: 292150 - DNA, 322 bp, Unknown
  Bacterial polypeptide expressing nucleotide sequence isolated from the Sargasso Sea
atgaaaaataaatattttggaactgacggtattagaggaacagtaaatcaaggaaatataactggcgaaaaattttttaaatttggtcttgcttcgggtacttactttaaaaatcaaaaaaaaacaaaacaaatagctataattgcaaaagatactagattatcaggatatactttagaaccagcactagtttctggtttagtatctggtggaatgcatgtttacactctaggtcctttaccaacaaatggcttagctatgttgactaaatctatgagggctaatatgggaataatgattactgcatcacacaatccctacc

SEQ ID NO: 292151 - DNA, 521 bp, Unknown
  Bacterial polypeptide expressing nucleotide sequence isolated from the Sargasso Sea
tatgaagaataaatactttggtactgatggaataagaggaactgtaaatcaaggaaatattactggtgaaaaattttttaaatttggattagcatcaggtacttattttataaatcaaaaaaagtcaaaacagattgcaattatagcaaaagatacacgattatcaggatatactttagaaccagctttagtctcgggacttgtctcaggaggaatgcatgtatttactttaggaccattacctacaaatggtttagcaatgctaactaaatcaatgaaagctaatatgggaataatgattacagcttcccacaatccttattttgacaatggtcttaaactattcggtcctgatgggatgaagttgtctgacaaaattgaaaaaaggattgaaaaacttatagacgctaaaaatacaaaacagttaacaaatccaaaatttttaggaagagttaaaagattagaggatggaaatgaaaaatatataagaatactaaaaataattttccaagtaattttaa

SEQ ID NO: 292152 - DNA, 589 bp, Unknown
  Bacterial polypeptide expressing nucleotide sequence isolated from the Sargasso Sea
agggtaattatgtgtgacgaaaaagggaaaattatagacggcgaccagattattgcaatgttagctcgacgttggaaacttaaaaaaattttaaggggaggagtcatcggtacattaatgtctaattatggtttagaaaaatttttaaatagtgaaaaaattaaattttcaagatctaaagttggagatagatatgtcaaagaaaagatgaaaaagttaaattataatttaggtggcgaacagtctggacacattattttaggaaaatttgcaacaactggcgatggtttactggtagcattagaagtgttgttttcccttaggaaaggtaaaaaggcaagccaaattttaaaagtttttaaacctttacctcaaattttagagaatatagtcgttcacgataaaaatattattagtaagttaaaatgtaaaaatgcaataaagaaagcaaataagtttatgggtaaaaagggaaggattttagttagaaaatctggaacagaaccaaaaattaggataatggcagagtcatatgataaaagtttaattttaaaatgtataaatataatcaaaagatcgattaaataaa

SEQ ID NO: 292153 - DNA, 715 bp, Unknown
  Bacterial polypeptide expressing nucleotide sequence isolated from the Sargasso Sea
aatgagtaaaaaatattttggaactgatggaataagaggaaaagtaaaccaggaaaaaataaatggtgaaatgttttttaagtttggcttagcagcaggaacatattttaaaaatcaaaaaaagagtaaacaaattgcaattattgccaaagatactagattatcaggatatacattggagccggcattagtatcaggtttgacttccacaggaatgcatgtttttacctttggacctttgcctacaaacggattggcaatgcttacaaaaaaaatgaaagcaaatatgggaattatgatcaccgcatctcacaatccttattatgacaatggtttaaaattgtttggacccaatggtttaaaattatctgacaaaatagaaaaaaaaattgaaaaacttattgatacaaaaataaatgataatttatcaaatcctaaaatattaggtagagttaaaaggttagaagatggttcagaaaaatatattgaaatactaaaaacaaattttcctaatcaatttaatttaaggggtttgaaaatagctattgattgtgcaaatggtgctgcgtacaagatcggacctcaattattaagatcattaggtgcggtagtgtatgagataggaacttcaccaaatggatttaatattaatgaaaaatgtggatcaacttttcctaataaaattagacatctaacaaaaaaaaataaagcacat

SEQ ID NO: 292154 - DNA, 433 bp, Unknown
  Bacterial polypeptide expressing nucleotide sequence isolated from the Sargasso Sea
tcacgaagctattgtgaaaaaaagagcagttttaggaggtgagcagtcgggtcatatactttcaaaaattaataacttttctggagatggaatattgactgcacttcaaatttcaaaatactgtaaaaagaaaaatattactttaaatgattggcttaaaagtagtttcgacccttttcctcaaaaactaaccaacattaatttaggttttaatattaataggataaatccaaaaaccaaaatattaatagatcaaactataaaaaaatttcatgaaatttattcggacaactgtagagtttatataaggcctagcggaactgaacccctaatgcgtattcttgttgaggccaaaaatcataaaaaagttgattttttatcaagcgaaataacaaacaaactctatttagaaattaatgcactaataatttaa

SEQ ID NO: 292155 - DNA, 496 bp, Unknown
  Bacterial polypeptide expressing nucleotide sequence isolated from the Sargasso Sea
atgacaaaaaaatattttggtacagatggtattagaggacccattaatagcaaaaatattaatggagatatgttttttaaatttggattagcaagtgggacatattttaaatctcaaaaaaaaagaaagcaattagcaataattgctaaagataccagattgtcaggctatactcttgagcctgcgttagtctctggattagcatctgctggtatgcatgtttttactttaggtccacttccaactaatggtttagcgatgctaacaaaaactatgaaagcaaatatgggaattatgattactgcttctcacaatcctcataatgataatggtttaaaattatttggaccagatggaatgaaattgtcagataaaatagagagaaaaattgaaagtctaatagataaaaaaatttcaaaaaatctttctaaccctgaaaaattaggacgagtgaaaaggttagaaacgggaacgaaagactatataaaaatttaaa

SEQ ID NO: 292156 - DNA, 509 bp, Unknown
  Bacterial polypeptide expressing nucleotide sequence isolated from the Sargasso Sea
aatggcaaaaaaaaaatattttggaactgatggaataagaggcagagttaatcaaggtaatattaatggcaatatgttttttaggtttggcttagcagcaggaacttattttaaaaatcaaaaaaaatttaagcaaacagcaataattgcaaaagatacaaggttatctggttatactttagaacctgcgctggtatccggtttagcttctgcagggatgcatgtttttacactaggacctttgccatcaaacggccttgcgatgctaacaaaatcaatgaaagcaaatatgggaattatgattaccgcatctcataatccttattatgataatggactaaagttgtttgggccagatggattaaaactatcagatagaattgaaaaaaaaattgaaagcttaattgatacaaaaatagattctcaattatctaaaccaaaaaaacttggaagagtaaaaaggttggaaaatggtaatgaagaatatattaagattcttaaaaaaaact

SEQ ID NO: 292157 - DNA, 796 bp, Unknown
  Bacterial polypeptide expressing nucleotide sequence isolated from the Sargasso Sea
ttttcagtctcttggtgctgatgtaaaagttatcaataactctaaaaatggtttgaaaattaatttgaattgtggttctactaatctcgaaccattaaaaaaagcattaagagagagtcctgcagatatgggattcagcttcgatggagatgccgatagagtaattggaatcgattcagaaggcaatgtgctagatggagatcatattctttttctttggggtagagaacttatggaacaaaaaattctcaccaataatttactagtatcaacgcaaatggcaaacttaggttttgaaaagtcctggaagaaaattggaggaattttacatagaactgatgtaggagataaatatgttcatgacgcacttaagaaaaaaagagctgttttaggaggtgagcagtcaggtcatatactttcaaaaattaataacttttctggtgatggcatattgactgcacttcaaatttctaaatattgtaaaaagaaaaatattaatttaaatgattggcttaaaagtagtttcgaaccttttccgcaaaaactaacaaatattaaattggattttaatattaatagattaaatccaaaaaacaaaatcttaattgatgaatctataaaacattttcaggcaatatatacggataattgtagagtttatataaggcctagcggtacagaacctgtaatcagagttctagttgaggccaaaaatcacaagaaagttcattctttatcaagcgaaataacaaacaaactctttctagaaattgataaaataacaaatcaacgatga

SEQ ID NO: 292158 - DNA, 1150 bp, Unknown
  Bacterial polypeptide expressing nucleotide sequence isolated from the Sargasso Sea
atgcaatcaatctttggaactgatggaataagaggaagatttaatgaagagataacctattcactagcctacaaagtgggatacgctttaggttcgatcttagagaagaaaagtccaattataatagggagagatacaagaattagtggagatattcttcttcaggcaataactcaaggtataaacgatagtggtaaaaaatttataaatcttggaatctgccctaccccagctataccttttttaatcaaacaagaaaacctaagtagtgggatcatgatatctgcaagtcataatccgccagaatataatggcataaaaatttttgatcataatggtcaaaaaattaccaaatattttgaaaataaaattcaaaaattaattgaagagtcaagtcacaatatctcagttcctaaaaaagtgatcccccgaaatacaaataaagatctcatcgatgtttacatcaaaagcctaatccaaacaatgggaggagaaaatctaagcgggttaagaataatattagacacatgctatggatcagcggcaacctgcgcaaaaaatatttttcaatctcttggtgctgatgtaagagttatcaataactctaaaaatgggttaaaaattaatttgaattgcggttctactaacctcgaaccattaaaaaaagcattaagagagagtcctgcagatatgggttttagcttcgatggggatgctgatagagtaattggcatagattcaaaagggaatgttttagatggagatcacattctttttctttggggtagagaacttttggaacaaaaaattctcacaaataatttactaatatcaacgcaaatggcaaacttaggttttgaaaaggcctggaagaaaattggaggaattttatatagaactaatgtaggagataaacatgtgcatgatgcaattaaggaaaaaggagcagttttaggaggtgagcagtcaggtcatatactttcaaaaattaataacttttctggagatgggatattgactgcacttcaaatttctaaattttgtaaaaagaaaaatattaatttaaatgattggcttagaagtagtttcaaaccttatcctcaaaaactaaccaatatcaatctaaattttaagagtaataaattaaatt

SEQ ID NO: 292159 - DNA, 1312 bp, Unknown
  Bacterial polypeptide expressing nucleotide sequence isolated from the Sargasso Sea
tatgaagtttggaactgatggctttagaggtcgagcagacgaatctgttacacctgatttttgcctaaaactaggttttcatactggaacgattatcaaaaataaaggttatgattcagtaatcttaggaaaagacacaagagtttcaggctatatgcttgaatctgcattgcaagcaggttttatttcagctggagtagatgtcaaattagctggaccaattcctacaccagcagtatctttcttaacagcgacatactcaggtcaatttggtgttgttataagtgctagccacaatcctttttatgataatggcattaaattttttaataaatttggcagaaaaatatctgaagaactagaaaaagagattgagaaaaaattaaatgatccaatccaatcagttgaagcatcaaatttaggtaaggcttttcgaattgatagtgcagctggtagatatattgaatattgtaagagcacacttaaaggcgcccataatttaaaagataaaactattttagttgatgctgcaaatggagctaattacaagataacacctatgcttttagaagagttgggagcaaaagtgataagagttaactgtgatcctgatggtttcaatatcaatgagaaaagtgctgttctagatcagtctttatttaaagactatgcaaaaaaatatgaatttgacttctgtgttgcagtagatggcgatggcgatagattggtattgagcgattcaaaaggagatgtttgtacaggtgatgaaataatctatacattagccttaagaaataaaaaacaaaacaaaactggttcaggttgtgtggtaggaactgatatgactaatcaaggtgtagttgatgcattaagtgatttagaagttgattttcaacgagctcaagttggagataaatttatatcaagagagttggttgataaaaaactaaatttaggcggggaaacatctggacacataatccaaagagaattttctgaaagtggtgatgcaaatattgcactaattcagactttagcagcacttgaggaactgaatttatctctagctgatatcaaaacaaaaataaattataaacctcagatactggaaagttttgatgttaaagatatgcaaattattgaaacaaaagagtttagtgagcagataaaatcgcttgaaaaagatcactctaatgcaaggatatcagtgagaaaatcaggcacagagccaaaaatcagagtaatggtagaatctgattctaaagatgatattgctagtgtcatgaattctgttaaatcattaataatttaa

SEQ ID NO: 292160 - DNA, 1186 bp, Unknown
  Bacterial polypeptide expressing nucleotide sequence isolated from the Sargasso Sea
atgaatcttaaatttggcactgacggaataaggggacccgtcgagagcgtagtaactcccgaagcttgtctaaaaataggtcatgcaactggcttggtaatgaaagagctgggttggaataccgttgttattggcaaggatacaagaatatcaggatatatgcttgagtccgctcttcaagcaggatttattgctgctggagttaacgtccgcttgcttggaccgataccaactcctggcgtagcttatttaacaaaaactttaagaaataggtttggggtggttattagcgcatctcataatgattttcttgataatggaataaaaatcttcaacgaagatggagaaaaaatctcaagagatattgaaaaaagaatagagaagcatctatccaaggatttatcacctgtagaaacatctaagattggaaaagcttatagatttgatgaatctgggccaagatatattgagttctgtaaatctactgttcctcctaatatatctttttcatctttaagaatagttttagattgcgcaaatggcgcatgttacaaagtaagccctgagatttttgaagagttaggtgcagaagttattacaattggtaatgaaccagatggctataatattaatcaagattgtggatcaactcatcccgaagtcatacaagatgcagttattaagcatagagcagattatggcatttctcttgatggagatggtgacagggtcattcttgttgatgaaaaaggtaatttgttagatggagatgacattttatatattttagccttttcaaaccctaatagaactggagtatggtctggtgttgtaggaacacatatgagcaatcttggactagagaaaggtattgaaaaattaggttataaatttataagagcagatgtcggagataaatacgttagcgaaatgctagctaaaaaaggatggatgcttggaggtgagacatccggccatattatatgcaaagaccttgtcagtactggtgacggaactgtagcagctttaaaagtaatctcatctttactaattttagaaaaaagaccaagtgaggtattatcaaacttcaaaaagattccacaaattaataaggctattaaagttaataacaaagacattattaatgacaaagagttaaagtcttttttaaaagagattgaatcag

SEQ ID NO: 292161 - DNA, 905 bp, Unknown
  Bacterial polypeptide expressing nucleotide sequence isolated from the Sargasso Sea
tatgaaaaaaaaatattttggaacagatggaattcgagcaagctcaaacagcgataaattaaatggacctaccctaattaatctagggatggcacttggaaaatattttaccaaaggagatcacagacataaagttgttattggaaaagatactaggctttctggttacatgatcgaacaagctttatcatccggcttactctcaatgggcatggatgtttttttatttggtccgatccctactcctgcagtctcaatgttaacaagatcaatgcgagctgatcttggaattatgattacagcatctcataatcaatatcaggataatggtttaaagatatttgatagacttggtaacaagctctctgatgagacagaactagagatagaaaatctaatggaaagtaaacttgaagaaaccctagccaagcctgaaaacatagggagagctaaaagattagaagatgcaaatgggaggtacatagaatatttgaaaaacacatttccaaagacccaacgccttgatggaataaaaatagttgttgattgcgctaatggtgcttcatatatttcagctcctcttatcttatgggagttaggagcagaaataattcaaattggaactcagccaaatggaataaatatcaatgataattgtggctcaactaatacggatttattagcaaaaactgtaatagaggaaaaagctgacataggcattgcattggatggagacggagaccggttagcaatagtcgatgaaaaaggaaatgtcattaatggcgatcaaatccttgcattgttagcattacatatgagcaaaaaaaacttactccaaaaaaataaagttgttgggactttcatggccaatatagggttagaaatcctactcaatgagaataata

SEQ ID NO: 292162 - DNA, 554 bp, Unknown
  Bacterial polypeptide expressing nucleotide sequence isolated from the Sargasso Sea
tgatggagatcaaataattgccgctttagcctcaagatggaaaaaaaaaaaaatgttaaaaggtggtgtggttggaacattaatgtctaactatggtttagaaaaatattttaaaaaagaaaaaattaagtttatacgtgctaatgttggtgaccgatatgtgaaagaaaaaatgcagaaaaataaatttaatttaggaggtgaacaatcaggacatataattttgggtaaatttgcaactactggtgatggtttgcttgtagcattagaatcattatttgctttaaggaaaggtaaaaaagctagtgaattttttgacaaatttaaaaaaacacctcaattattaaaaaatgttgatgtaaaagataaaagtataattaacaaaactgaaattaagcagtcgataaaattagcagaaaaattgattaaaggtcaaggaagaattcttgtaagaaaatcaggaacagaatcaaaaataagagtaatggtagagtgtgaaaacaaaactcttctatcaaaatgtataaatatcatatcaagaaaaataaaataat

SEQ ID NO: 292163 - DNA, 382 bp, Unknown
  Bacterial polypeptide expressing nucleotide sequence isolated from the Sargasso Sea
aaatctattataggtggtgaacaatcaggacatataatattagcagaatatgctaatacaggcgacggaattttagcagccttaaaaattactgaaattttaatatcaaacaaaaataaggcaagtaaactttttgatttgtatgatgactttgctcaggaaaaaattaacttacggtataaaacaaagaatatcaaacttttaaaaattcttggtaaattaaaaaatgataaaatgtataataataaaagaataagatctcttgtcaggctatctggaactgaaccattagtaagaatactagttgaagggcaagaaattgctgaagttaaaaagaagtctctagaaataaaaaagttagtaagggcatatcttggttaat

SEQ ID NO: 292164 - DNA, 523 bp, Unknown
  Bacterial polypeptide expressing nucleotide sequence isolated from the Sargasso Sea
atgtcaaaaaaatatttcggtactgatggaattagaggtaaagtaaatcaaggaaatattaatggtcaaatgttttttaagtttggcttagctgcaggtacttactttaaaaacttaaaaaaaaataaacagacagcagtaattgcaaaagatactagattatctggttatactttagaaccagctctagtatctggtttagcatcagcaggaatgcatgtttatacactaggacctttaccaaccaatggtctggccatgttaacaaaaaaaatgaaagcaaatatgggtattatgataactgcatcgcacaacccttattttgataacggattaaaattgtttggacctgacggtttaaaattatctgacaaaattgaaaaaaaaattgaaaaactaattgattcaaaaattacaaaaaatttatctaaaccaaatatccttggcagagttaaaagattagaaaatgctaataatagatatattgaaattttaaaatctaattttccagaaaatttcaact

SEQ ID NO: 292165 - DNA, 523 bp, Unknown
  Bacterial polypeptide expressing nucleotide sequence isolated from the Sargasso Sea
atgccaaaaaaatattttggaacagatggaataagaggaagagtaaatgattcaaaaataaatggagatatgttttttaaatttggactggcagcagggacgtattttaaaaatttaaaaaaagttaaacaaacggctgtaattgcaaaagatacacgtctttcaggatatactttagaacccgcacttgtatctggactagcttctgcaggaatgcatgtatttacactaggaccacttccaacaaatggattagctatgttaacaaaaaaaatgagagctaacttaggcataatgataaccgcatcacacaatccttattatgataatggtttgaagttatttggccctgatggtttaaaattatccgataaaattgaaaaaaaaattgagaaattaattgatgctaaaattaataataatctatctttgcctgaaaacttgggtcgtgtaaaaagattagagaatgcgactgataggtatttaagtattttaaaaaataattttccaacaaagttttagt

SEQ ID NO: 292166 - DNA, 396 bp, Unknown
  Bacterial polypeptide expressing nucleotide sequence isolated from the Sargasso Sea
aatgtcaaaaaaatattttggtacagatggaattagaggcaaggttaacaaaggcaatattaacggagaaatgttttttaagtttggtttggccgcaggaacatattttaaaaatctaaaaaaaaataaacaaatagcaattatcgctaaagatacaagactatctggttatactcttgagcctgctctggtatctggtttagcttccgcaggaatgcacgtatatacattaggtcctttgccaaccaatggtcttgcaatgttaacaaaaaaaatgaaagcaaatatgggtattatgattactgcgtctcataatccatattttgacaacggtttgaagttgtttggaccagatgggtttaaaattatccgacaaaatcgaaaaaaaaatgaaaa

SEQ ID NO: 292167 - DNA, 597 bp, Unknown
  Bacterial polypeptide expressing nucleotide sequence isolated from the Sargasso Sea
gatgaaaaataaatattttggaacagatggtattagaggtactgtcaaccaaggaaatataactggagagaagttttttaaatttggtttagcttcaggaacatattttaaaaatcaaaaaaaaaccaaacaaattgctataattgctaaagatacaagactatctggatatacattagaaccagctttagtatctggtttagtctctggaggaatgcatgtatttactttgggtcctttaccaacaaatggtcttgcaatgctcacaaaatctatgaaggcaaatatgggtataatgataacagcatctcacaatccatattatgacaacggcttaaagttgtttggtccagatggaatgaaattatccgacaaaattgaaaaaaaaatagaaaaattaatagatgctaaaaatacgaaacaactgacgaatcccaaatttttaggcagagttaaaagactagaagatggaaatgacaggtatataaaaatattaaaaaacaattttccaaataattttcatttaagaggaactaaaattgttttggattgtgacaatggagcctgctataaggcagcaccaaagctattaaaaga

SEQ ID NO: 292168 - DNA, 1039 bp, Unknown
  Bacterial polypeptide expressing nucleotide sequence isolated from the Sargasso Sea
atgaatcttaaatttggcaccgatgggataaggggacctgtcgaaagcttaataacacccgaagcctgtttaaagataggccatgctactggttttgttatgaaagaactaggatggaatacagtagttattggaaaagatacaagaatttcaggctatatgcttgaatctgctttacaagctggttttattgctgctggagttaatgttcaacttgctggacctcttccaactccaggcattgcatatctaacgaaaacattaaggaataagtttggtgttgttataagcgcttctcacaatgactttttagacaatggtattaaaatattcaatgatgatggtgaaaagatttctagagacattgaaaaaagaattgaaaaatatattgcatcagacttaattccagttgaaacgtcaaaaataggaaaagcatataggtttgatgaatcaggcccaagatatattgagttttgtaagtcaacagttccgtcagatatatcattttcatctcttagaatagttttagattgtgcaaatggagcatgttataaagttagtccagaaatttttgaagaattaggagctgaagttatagctcttggtgacaatcctgatggatacaatattaatcaaggttgtggttctacccatccagaactaatcaaaaaagaggtcataaagcatagggctgactatggaatatctttagatggtgatggtgatagagttatattggttgatgaaaagggtagtattttagatggagatgacttgctatatatacttgctttttctaatccaaataggacaggcccatggtctggtgttgtaggaactctaatgagcaacctaggactagaagatggaataaaaaaacttggatataagtttaagagagcagatgttggcgataaatatgtgagtaaaatgttggcagataaaggatggatgttaggtggtgagacttcaggtcacataatatgcaaagatctagtaagcaccggtgatgggactattgcagccttaaaggttattt

SEQ ID NO: 292169 - DNA, 715 bp, Unknown
  Bacterial polypeptide expressing nucleotide sequence isolated from the Sargasso Sea
atgaaaaaaaagtattttggaactgatggcataagaggcacagtaaatttaggtaatattaatggtgaaaagttttttaaatttggcttagcagctggcacttattttaaaaacttaaagaaaaaaaagcaggtagcaattattgctaaagatacaagattgtcaggatatactttagaaccagctctcgtatcaggattggcctcagcaggaatgcatatctttacattagggcctctacctacaaatggattagcaatgttaacaaaaaaaatgaaagcaaatctaggaataatgataacagcatcgcacaatccttttcatgataatgggctaaaattatttggaccagatggaatgaaactatcagataaaattgaaaaaaaaattgagagtctaattgacaaaaaaaccattaatcaattatcaaaatcagattttttaggaagagttaaacgattagaagatggaaatgataggtatattgaaattcttaaaagcaatttccctagtaattttagtcttaaaggaatgaggatagttctagactgtgctaatggagcaggatataaatctgctcctagaatcctctcagatttaggtgctaaagtattttcaattgggattaagcctaacggtttaaatatcaatttaaagtgtggctcaacttatcctgagctcttaaagaagtatgtgaaaaaattcaaagctaaca

SEQ ID NO: 292170 - DNA, 733 bp, Unknown
  Bacterial polypeptide expressing nucleotide sequence isolated from the Sargasso Sea
atggcaaaaaagtattttggaacagatggaataagaggagcagttaacagtaaatatataaatggagatatgttctttaaatttggacttgctagtggaacatactttaaatctcaaaaaaaaagaaaacaaacagcaataattgcaaaagatacgagattgtctggatatacacttgaaccagcacttgtttcaggtttggcctcagctggtatgcatgtttatacgctaggacccttaccaacaaatgcgttggctatgttaacaaaagagatgaaggcaaatatgggtataatgattacagcttctcataatccacattttgacaacggtttaaaattgtttggtcctgatggaatgaaattatcagataaaatagaaaaaaaaattgagtatctcattgataagaaaatctcaaaaaatctctcacattctgaaaaattaggaagagttaaaagattagaaacaggtaccaaaaattatattaaaatattaaaaaaaaatttcacaaaagagttcaatttaagaggactaagaatagtaatcgactgtgcgaacggcgctggttataaggcaggtcctgaattattgaaatcattaggagctaaagtgatagcaataggtattaaaccaaatggtttaaatattaacaaaaaatgtggatcaacttttccaagaaatattaggtctgctgtaaaaaaatataaagctcatatcggaatatctttagacg

SEQ ID NO: 292171 - DNA, 1090 bp, Unknown
  Bacterial polypeptide expressing nucleotide sequence isolated from the Sargasso Sea
aatgtctaaaatatttggtaccgatggtatacggtgcttagttaatgaagagcctctttctgctgaaacttgtctaaaaatttcaaagacagtagcattccttctaaaaaagaaaaattctaaaaatagtagggttgtcatctgtaaagatacaagactatctggttatttatacgagcctcttgttacagctggatttatttctatgggcatggatgtaattttagttggtccacttccaacacctgctgtaccattgatgattaaaactttaagagctgatattggtgtaatgattacagcttctcataatacatatcaatataacggactaaaattttttgatagtactggtacaaagttaagttcattaatagagcaaaaagttgaaaaaatagttttggataataaaaaatattctaaagttacaaacaacacatttgtatcaggaaatgcaagaagattagaagatgcttcaggtaggtactcagaatttttaaagagcacattaaataaaacatcatccaagaaaaaattaaaaattattttagattgtgcaaatggagccacttacaatattgctccaaatttattctgggaactaggtcataatataattgccattaataatgagccagatggcttaaatattaataaaaattgtggtgcagttgatgttaaatcactctctcaaaatgtcataaaagaaaaggctgatattggatttgcttttgatggtgatggagacagattaatagttgtaaatgaaaaaggacaagaagttgatggtgataaaattatagcactgttatgcaaaaactatattaaaccaaagaaaaaatctaatcaacatgacgtgattataactgttatgtctaatatggggcttgaaaaatatctcataaataaattaaaattaaagattaaacgaacatctgttggagatataaatgttattaatcaaatgaaaaaatctaaatctataataggcggtgaacaatcaggacatataatattatcagaacattctaatacaggtgatggaattttagcagctttaaaaattactgaaatattaatatcaaataaa

SEQ ID NO: 292172 - DNA, 808 bp, Unknown
  Bacterial polypeptide expressing nucleotide sequence isolated from the Sargasso Sea
ttgaagaagtattttggtactgatggtattaggggtataccaaacgatactttaagtcaagatcttatatccaaaatatccgcatctgttgagcaacatataaaccctaaaaatattggtgtcatttcagatacacgttcatcctcagatgaaattctgaattggatttctataggattttcaagcaaagtaaatatttataatcatggagttttaccttctggttcaatgcctataattttgaaaaaatttaattacgatcttggaattataatttctgcttcacataatcctgctgaatataacggcataaagttaattcaagaaaacggatcaaaattagatgatgatgttgaaatatcaattgaaaaaaatattgatagcttagaactaccaaatcaacatgctgaaattattaatttaaatgatggacatcttgaatatcttaattttcttgatgatgttacagatattgattttagtcattttcaaatactcatcgatgcagcaaatggatcagcgtcaactgtcataaaagagttatttgataaaaaaaatgcaaattacagaattatcaacaatcaaccggatggcttaaatataaataaagactgtggagcaacagtccctgaaaatctacaaaaaaatattgaaaagggtgaaattggtgcatcttttgatggtgatgccgatagattgataatggtcgatgaaaatggagatattgtaaatggagatctgatttttaacattctttcaaaatatttatcagaagtaaatcagcttaccaataacatttgttgttagt

SEQ ID NO: 292173 - DNA, 493 bp, Unknown
  Bacterial polypeptide expressing nucleotide sequence isolated from the Sargasso Sea
gggcggagtcatcggaacgctaatgtctaattatggtttggaaaaatttttaaaaaatgaaaaaataagattttcaagatcaaaggttggagataggtatgttaaagaaaaaatgaaaaagttaaattataatttgggtggtgaacaatctggacatattatattaggaaaattcgcaacaaccggggatggattattggtagctttagaagttttgttttctcttcgaaagggtaaaaaagctagccagatattaaaggtttttaagccactaccacaaacattagagaatataatagtaaaagataaaaatattattagtaaatttaaatgtaaagttgcaataaagaaagcaaaaaagattatggatcaaaaaggaagaattttagttagaaaatctggaacagaaccaaaaattaggataatggccgagtcatatgataagagtttaattttaaaatgtataaaaataatcaaaaaatctattaaataa

SEQ ID NO: 292174 - DNA, 1312 bp, Unknown
  Bacterial polypeptide expressing nucleotide sequence isolated from the Sargasso Sea
aatgaaattcggcactgacggatttagaggtccggctgatagtgtaataacgcctgatttttgtctaaggcttggatttcacactggcgttgtaattaaagagaaaggttacgattctgtaataattggtaaagatacaagggtttctggctacatgctggaagctgctttacaagcaggcttcatatcagctggaatcgatgtgaaactagcaggcccaataccaacgccagcagtatcatttcttacagctacttatgctggacaatttggtgttgttatcagcgcaagccataatccgttttacgataatggtattaagttcttcaatagacatggcagaaaaatttcagcagaccttgagcaagagatcgaaaagcgactcgaaactccaaacgaacctgttaaagccaaacatctaggcaaagcttttaggatagatagtgcctctggaagatatgtagaatattgtaaaagtaccttgaaaggtaactatagcctccaaaacaaaacaatacttgttgacgctgctaatggagcaaattacaaaattactcctatgttattacgggagcttggtgctaagacaattaatatcaattgtgatcctgatggtttcaacatcaatgttgatagtgctgtgttaaagcaagaactattcgcagaatatgcaaaaaattatgagtttgattattgtgtagcagttgacggggacggtgacagactagttctatctgatgctaaaggcacaatttttactggtgatgacattttatataccttggcctctagaaataagatgattggtaaagagcagtcagattcagtcattggaacaacaatgtctaaccagggtgtggtggaagcacttggcaatctaggaataagttttttaagaacagatgttggagacaaatatatttctagagaattagtgaagcgtgatttaaatgttggtgcagagccatcaggccacattattcaaagagagttttcagagagtggcgatgcaaacattgcattaatacaaactttagctgcgcttcaggaactcgacaccactatcgaagaaataaagaagaacataaattataaacctctgagtttaagaaatttctccgttgctgataaaaaagttctcgaatcacaaatatttatcgaaagcatagaaaaactccaaaaaaattaccctgatgcaagaatttctgtgaggaaatctggcactgagccaattataagagctatggtagaggcagaaactgagaatgacaaagattctattctcaatgaaatagaaagcttaattttgtaa

SEQ ID NO: 292175 - DNA, 467 bp, Unknown
  Bacterial polypeptide expressing nucleotide sequence isolated from the Sargasso Sea
aatgttaaaaaaatattttggaaccgatggaataagaggaagggtaaatagtggaaatattaatggtgacatgttctttaaatttggattagcagctgggacttattttagaaatttaaataaaaaaaaacagacagctataattgcaaaagatacaagattatctggttacactttagagcctgcgcttgtatcaggcctagcttcggctggaatgcatgtatttactctaggaccactcccaacaaatggtcttgcaatgttaacaaaaaaaatgaaagctaatttgggaattatgattacagcatcacataatccttattatgataatggtttaaaactttttgggccagatggattaaaattatctgataaaattgaaaaaaggatagagaaattgatagattctaaattaagaaagaatttattaaatcctaaagttttaggtagagtaaaaagattagaaa

SEQ ID NO: 292176 - DNA, 706 bp, Unknown
  Bacterial polypeptide expressing nucleotide sequence isolated from the Sargasso Sea
taaagattgcggaagcaccaacataaattttttaaaagatgaagttttaagcaaaaatgcagattttggcattgctcttgatggcgatggagatagattaattattattgattcagacggtcgagaattagatggagacgatattttatatgtcatcgcaaaaaataaatttgagtcaaaaatacatcttggcgttaaaggagtagttggtactcttatgacaaacaaaggcttagagaaagcttttaacgatgagggaattgagttggttagatcagatgtaggggataagtatgttttacaaaaattaaacgaacttaattggactctcggaggagagcaatctggacatattctttgcctagataaatcaaatactggagatggaataatcgctgcaattcagtttctacaatctatcgtagttttaaataaaacaatacccgaattactttcagagtttaaaaaatatcctcaaattcttactaatgtaaaagttaaagatggaaataaagttttaaaaaataaaaaattacaaaaagctcaaaaaaaatcggaagagttattagaaactttcgatggcagagtactcataagaaaatctggtacagaacacaagattagaataatggttgaaagtaattctcaagatgcaacttcagagcaatcagtcttattaactgaacttgtagaatcaatttcatga

SEQ ID NO: 292177 - DNA, 1225 bp, Unknown
  Bacterial polypeptide expressing nucleotide sequence isolated from the Sargasso Sea
agtattattaaggaaaagggttacgattcaataatcttaggcaaagatacaagagtttcaggttatatgcttgaatcggctttacaagcaggtttcatctcatctggaatagatgtgaaattagctggtccaattcctactccagcagtatctttcttaactgcaacatattctggtcaatttggagttgtcataagtgctagtcacaatcctttttatgataatggcattaaattttttaataaatttggtagaaaaatatctgaggaattagaagcagagattgaaaagagattggatgacccaattcaaccagtagaagcatcagatctaggcaaagcttttcgaattgatagtgcagctggaagatatattgagtattgcaaaagcactttaaaaggagcacataatttaaaagataaaaccattttagttgatggtgcaaatggagctaattacaagataactcccatgcttttagaagagttaggggcaaaagtaataagaataaattgcaatccagatggattcaatattaatgaaaaaagtgcggttctcgatgaaaatctgtttaaagaatacgcaaaagaacatgaatttgatttttgtattgcagtagatggcgatggagataggttggttctaagtgattctaaaggagaagtatgtacaggagacgaaatcatctacacattagcactaagaaataagaaacaagaaaaagacggttcaaattgtgtagtcggcactgatatgactaatcaaggtatagtcgatgcactagatgatttgggaatcaattttcatagagctgaagtaggagacaagttcatatctagagagctagtaaaacaagagttaaatcttggtggcgaatcatcaggacatataatccaaagagaattttctgaaagtggtgatgcaaatattgctttaattcagactttagcagctcttgaagaattggatttatctttagctgacatcaaagcaaaaataaaatataaacctcaaacattaaaaagttttgctattaaagatatgaaagtgattgagacagatgaattcaataatcaaattgaatctcttaagaatgattatggaagtgcaagaatatcaataagaaaatcaggaacagaacctaaaataagagtaatggtagaatctgattctaaagaggatgttgccaatattgttaattgcgttgaaaaattaatagtttaaa

SEQ ID NO: 292178 - DNA, 823 bp, Unknown
  Bacterial polypeptide expressing nucleotide sequence isolated from the Sargasso Sea
tatgaaattcggaaccgatggctttagaggccgagcagataaagctgttacccctgatttttgtttaaaactaggttttcatactggcagtattattaaggaaaagggttacgattcaataatcttaggtaaagatacaagagtttcaggttatatgcttgaatcggctttacaagcaggttttatctcatctggaatagatgtgaaattagctggtccaattcctactccagcagtatctttcttaactgcaacatattctggtcaatttggagttgttataagtgctagtcacaatcctttttatgataatggcattaaattttttaataaatttggtagaaaaatatctgaagaattagaagcagagattgaaaagagattaaatgatccaattcaaccagtagaagcatcagatctaggcaaagcttttcgaattgatagtgcagctggaagatatattgagtattgcaaaagcactttaaaaggagcgcacaatttaaaagacaaaaccattttagtcgatggtgcaaatggagctaattacaagataactcccatgcttttagaagagttaggggcaaaagtaataagaataaattgcaatccagatggatttaatattaatgaaaaaagtgcggttctcgatgaaactctgtttaaagaatatgcaaaagaacatgaatttgatttttgtattgcagtagatggcgatggagataggctagttctaagtgattctaaaggagaagtatgcacaggagatgaaataatctacacattagcacaaagaaataagaaacaagaaaaagacggttcagat

SEQ ID NO: 292179 - DNA, 868 bp, Unknown
  Bacterial polypeptide expressing nucleotide sequence isolated from the Sargasso Sea
attgaagaaatatttcggtaccgatggaatccgaggtattccaaataaaaatcttaccaaagaaatagtatctaatgttgcttgttctgttgaagatattttaaaaccgacatctgttgcagtaattctagacacccgcgattcttctctagaaatattagattggatttgtgagggattttcagaaaatattgaagtaattaattatggaatattaccttcaggatctatgccagtattgctggataattttggacataatctaggtatcataatttcagcttctcataatccaagtgaatataacggcattaaattaattaatgaaaacggttctaagcttcaagatgaaattgaaattgaaattgaagcaaatattgaaaatatttctttaccaagtgcacatactagttataaggactctgcagagggatttaaagtttatttcgaatttcttaatcgggaccttgattttgaattatcaaactttgatttacttatagatagtgcaaatggttctgcttacaaaataatagaggagttattaaaagataataactctaaatttaaaatgattgcaaatgagcctaatggagaaaatataaatttagctagtggagctacgcatacagaaaacttaataaaaaatctaaaaaaaggcgagattggtgctgcatttgatggagatgcagataggctcataatggtcgatgaagatggtattacctgtaatggggatatcttgatattattaattgcaaaatatttatcctctaccaatcaactcaacaatgacattgttatttcaactgttatgtctaattttggatttaaaaatgcaatggaaaaaaataatttaaaaatatga

SEQ ID NO: 292180 - DNA, 595 bp, Unknown
  Bacterial polypeptide expressing nucleotide sequence isolated from the Sargasso Sea
gatgaaaaaggaaatgaaattgatggcgataaaatcattgcattgtttgctaaacatttaataaaatttaataaaagtaaatcaaaatacccgatcgttacaacagttatgtcaaatataggatttgaaaattatattttaaataaatttaaagttaatttaaaacgttcttcagtaggtgatattaatgtaattaaagagatgcaaaagtataattcccttttaggtggagaacaatctggtcatataattttatctgattattctaaaacgggggatggtattttagcagcactaaaagtaatggaaataataactaaattaaacaaacctgctagtttaatttttagtttatatgaaaattctcctcaaatcaaaattaatataccttataaaaaaatatcaaaaaatacagttaattatattaaaaatattaacaaaaaaaaattaaaaaataataatatgagattgttaattagattatctgggacagaacctctaataagaatacttgttgaaggaaatgatttaatcgaagttaataaaatcgcaaaaaatattgaaaaaaacattcgggcaaaacttggaaaataaa

SEQ ID NO: 292181 - DNA, 462 bp, Unknown
  Bacterial polypeptide expressing nucleotide sequence isolated from the Sargasso Sea
aaaataattttaaaaatattgaaacagctgttggtgataaatatgttgcagaagcaatgttagaaagcaatgcttccattggtggtgagcaatctggacatataataatttcagacaaacttccagtaggtgatggtcttcttacattaatatattctttaaaagctttatctttttttaaaaccactttatcgcaatttcgtaaggacaatattaaagagtatccacaaaggttaatcaatatagaactaaacaatatgccagatacaaagcaattagaagaattagacaatatagcaaagacattgtcacaggaagaaaatttagacggtagatacttaataagaaattctggcacagaaccacttcttagagtgcttgtcgaggctagcgaggaagaatctgttaagaatttcagtgaaaatttagttaacaaaattaaaaacttcttacaaacttaaa

SEQ ID NO: 292182 - DNA, 481 bp, Unknown
  Bacterial polypeptide expressing nucleotide sequence isolated from the Sargasso Sea
atgaaaaataaatatttcggtacagatggaataagagggactgtaaatcaaggaaacattacaggagaaaaattttttaaatttggtttagctagtggaaattattttaaaaatcaaaaaaaatctaaacaaattgcaattattgcaaaagatacaagactgtccggctataccttagaacctgcattggtatcgggattggtttctgggggaatgcatgtttttacattaggtcctttaccaactaacggcttagcgatgttaaccaaatcaatgaaggctaatatgggaattatgattactgcatctcataacccttattatgataatggtcttaaattatttggacctgacggcatgaagttatcagataaaattgaaaaaaggattgagaaacttatagatgcaaaaagtaacagtcaacttacaaaccccaaattattaggaagagtcaaaaggttagaggatggaaatgacaata

SEQ ID NO: 292183 - DNA, 622 bp, Unknown
  Bacterial polypeptide expressing nucleotide sequence isolated from the Sargasso Sea
aatgattaaaaaatattttggaacagatggaattagaggaaaagttaatggacctaaaataaatggagaaatgttttttaaatttggcttagcagcgggcatatactttaaaaatttaaaaaaaagtaaacaaacagcaattattgcgaaagacactagattatcaggatatacgcttgaaccagctttagtgtctggattggcatcagcaggaatgcatatttatactttgggacctctaccaacaaatggtttagcgatgttaacaaaaaaaatgagagctaatatgggtataatgattactgcgtctcataatccataccacgacaatggattaaagttatttggacctgatggacttaaattatctgatagaattgagaagaaaattgaaaagctaattgattcaaagattactaaaaatctatcaaaaccaatagaattgggaagagttaaaagattagaggatgctaatgaaaattatattaaaatattaaaacaaaatttcccatcctcatttagtttaaaaggtatcaaaattgctttagattgtgccaacggagctggctacaaagctggtccagctttatttaaatcattaggtgctaaagtatatgacatt

SEQ ID NO: 292184 - DNA, 999 bp, Unknown
  Bacterial polypeptide expressing nucleotide sequence isolated from the Sargasso Sea
tttgggaattatgataactgcatcacacaatccacattattataatggattaaaattatttggcccagatggaatgaaattgtctaacaaaattgaaaagaaaattgaacatttaatagaccaacatattgaaaaaaatttatctgaacctgaaaaactaggaagggtaaaaagactagaaacaggaactagagattatattaaaattttaaaaaaaaacttttctgaggagtttaatttaagaggacttaggattgttatagactgcgcaaatggagcaggttataaagctggtcctgaattattaaaatcattgggcgcgaaagtaatagctattggggtggagccgaatggcatgaatatcaataaaaattgtggatcagtctatcctcagaatattaaaagagcagtaaaaaaatataaagctcacattggtatatcattagatggtgacgctgatcgagtaataatgtgtgatgaaaaaagtaatataattgacggcgatcaaattattgctgctttggcctcaagatggaaaaataaaaaaatgttaaaaggaggggtagttggtaccttaatgtccaactatggattagagcaatactttaaaactcttaatattaattttattagagcgaatgttggtgacaggtacgtgaaagaaaaaatgcaaaaacataaatttaatttagggggtgaacagtcaggccatattattcttggaaaatttgcaaccactggagatggtttgttagttgcgttagaggctttatttgctttgagaaaaggaaaaaaagctagtgtatttttttcaaaatttaaaaaaattccacaaatattaaaaaatatagatgtaaaagatagaaatataataaataaatcagatataaaaaattctattaaaattgcagaaaaattaatcaaaggacatgggagaattttagttaggaaatcaggaacagagtcaaagataagagtgatgggtgaaagtgaaaattt

SEQ ID NO: 292185 - DNA, 784 bp, Unknown
  Bacterial polypeptide expressing nucleotide sequence isolated from the Sargasso Sea
aatgagaaacaaatattttggaacagacggtattagaggaactgtcaaccaagggaatataaccggggaaaaatttttcaaatttggtttggcatccggaacgtacttcaaaaatcaaaaaaaaaataaacaaattgctattattgcaaaagacaccaggttatcaggatatactttagaaccagcattagtatccggtttagtttcaggcggtatgcatgtttatacacttggccctctgccaactaatggactagctatgttaacaaaatccatgaaagcaaatatgggcataatgattacagcttcacataatccatattacgataatggtttgaaattatttggtccagatggaatgaagctctctgataaaattgaaaaaaagattgaaaaattaatagacgctaaaaataccaaacagcttacaaacccaaaattattgggtagagttaaaagactggaagatggaaatgacagatatattaaaatactaaaaaataattttccaaataattttcatcttagagggactaagatagttttagattgtgctaacggagcaagttataaagctgctccaaaactacttaaagagcttggtgcaaaagtgatttctattggtgtaaaaccagacggtttcaatattaatgaaaaatgtggatcaacttatccatctaaaattagactggctgttaaaaaatttaaagcgaatgttggcatctcttttgatggggatgcagacagaataattatgtgtgatgaaaaaggaaaaaaattgtag

SEQ ID NO: 292186 - DNA, 997 bp, Unknown
  Bacterial polypeptide expressing nucleotide sequence isolated from the Sargasso Sea
gcaggtacatattttaaaaatcaaaataaaattaagcaatcagcatttatagctaaagatactagattatctggatatacattagagccagctttagtctcaggtttagcatcggcgggagtacacgtttatacacttggtcctttacccacaaatggtcttgcaatgttaacaaaaaaaatgagagcaaatttaggaattatgattactgcctctcataatcctttttatgataacggtctaaagttattcgggccagatggtttaaaattatcagataaaattgagaaaaaaattgaaatattaatcgactctaaaattactaaaaatctgtctgatccaaaaatattaggaagagttgaaaggttagaaaatgctaatgaaagatatatagaaattcttaaaagaaactttccaagtaatttcagtttaaaaggaatgaaaattgctattgattgtgcaaatggagctggatataaatctggcccaaaacttctatccagtttaggtgcaaaagtttttcaatatggtacctctccaaacggttttaacataaataaaaaatgtggttcaacttttccaaataaaattaagtctttagttaaaaagtataaggcaaatataggtatctcgttagatggtgatgcagatagaataataatatcagatgagaaaggaaatattattgatggtgaccaaattatagcaatgttggcaactaggtggaaaaaaaaaaaaattctaagaggaggtgtaattggaacacttatgtcaaattatggcttagaaaaatattttgcaagtgagagaataaaatttataagagctgacgttggagataggtatgttaaagaaaaaatgaagcaaaaaaattttaatttaggtggcgagcaatcaggtcatattatacttggcaaatttgctacaactggtgacgggattattagttgccctggaagtcttgttcagtatgagaaaaggaaaaaaagcaagtgag

SEQ ID NO: 292187 - DNA, 940 bp, Unknown
  Bacterial polypeptide expressing nucleotide sequence isolated from the Sargasso Sea
ttattttgacaatggtttaaaattatttggaccagacggtatgaaattatccgataaaatagaaaaaaaaattgaaaaattaattgacgctaaaaacacaaaacaactcacaaacccaaatttactaggtagagttaaacgtttagaagatggaaatgataagtacattaaaatattgaagaataattttccaaataattttcacttaaaagggactaaaatagttttagactgtgcaaatggagcttgctataaagctgccccgaaattattaaaagaacttggagctaaagtagtttcaataggagtagaaccagatggttttaatatcaacgaaaaatgtggatcaacttatccatctaaaattagatcagctgtaaagaaatatagagctaacgtcggtatttcatttgatggagatgcagacagaataatcatgtgtgatgaaaaaggtaaaatcatagacggtgaccaaattattgccatgcttgccagaagatggaaatcaaaaaaaatattaaaaggaggtgtcgttggaactttgatgtcgaattatggtttggaaaattttttaaagaatgaaaacataagattttctagatcaaaggtaggagacagatatgtaaaagaaaaaatgaaaaaattaaattttaatcttggtggagaacaatcaggtcacataattttaggaaaatttgcaacaacgggagatggtttgttagtagcactagaagttttgttttctttaagaaaaggaaaaaaagctagcaaacttttaaatgtttttaaacctttacctcaaatattagataatgttgatgttaaaaacaaaaatataattagtaaaaaaaaatgcaaaaatgcaatcaaaaaagccaataaaattatgggccaaaaaggaagaatcttagtcagaaaatcggaaccgaaccaaaaatag

SEQ ID NO: 292188 - DNA, 862 bp, Unknown
  Bacterial polypeptide expressing nucleotide sequence isolated from the Sargasso Sea
aacagatgattatattaaaatcttaagaaaaaatgttcctaaaaatttcagattaaaaaatatgaaaattgttttagattgtgcaaatggtgctggatataaatctgcaccaaagatgatcaaatcccttggtgctaaactactagtaataggtgacaaaccaaatggttttaacatcaatgaaaattgtggctctacctttcccaataaacttcaaagatatgtaaaaaagcataaagcccatttaggtatttctctagatggggatgcggatagagtaattatgtgtgatgagaaagggcgtatagtagatggagaccaaattatagcagcactagcactgcaatggaaaaaaaagaaaattcttaaaggtggagttgtaggaacattaatgtctaattacggcatagaaaatttttttagaaaaaaaaatatcaaatttattagatcgaatgttggagacagatatgtcaaagaagttatgcaaagaaaaagatttaatttaggaggagaacaatctggtcatataattttaggcaaatttgcaactacaggagatggacttttagtagcattagaagttattcaagcattaaacaaaaatatcaaaacgagtgatttcttcaacgtattcgaaaaaacaccacagatactaaaaaatataaatattaaagatgataatatattaaaaaaatcatcaacaaaaaatgcaataaaaattgctaaaaaactaattaaaggtcaaggtagaatacttgttagaaaatctggaacagaaccaaaaattagaataatgggtgagagtatcaataaaattttacttaagaaatgtataaaaattgttacaagggtaatcaaataa

SEQ ID NO: 292189 - DNA, 790 bp, Unknown
  Bacterial polypeptide expressing nucleotide sequence isolated from the Sargasso Sea
atatattgaatttgcaaaagcaacttttccaaataccatgcgattagatcatttaaaaattgtaatagattgcgcaaatggcgctgcttataaagttgcaccaatgattttttgggaacttggtgcagatattattgttattggtaaccaacctaatggaagaaatattaaccaagattgtggatcaactaaaacgcaaagtctgaaagaagaagttaagagcaataacgctgatttaggaattgcctttgatggtgatggagatcgtttagtaataatagatgaaaatggtgatcaagttaatggagaccatttgcttgggatgatagctttatcactcaaaaaaaagaatttgctaaaaaatgagaatattgtttcaactattatggctaacaaatctcttgaaaattatctgaaatcaattgatctcaagttaataagaacaaaagttggcgatagatatgtaattgaaaaaatgttggatatcggctctaactttggtggtgaaccatcaggtcatttaattattaatgatttttcctctaccggtgatgcaattgtatcttctttacaagttttatccttaatgattgaagagaatcgaccaatttcgaatcttactaatctttttcctcttacctctcaaaaaaactatgaatttaaaacagaaaatataaataatatttcaaactcttttctagaagaattatctaataaaatgaacgaaaagattggtgatgaaggaagagttattataagaaaaagcggaacagagccattaataagggta

SEQ ID NO: 292190 - DNA, 670 bp, Unknown
  Bacterial polypeptide expressing nucleotide sequence isolated from the Sargasso Sea
ttctacatttccaaataaaataaaatatcatacaaaaaaaaataaatcccatatcggagtttctttagatggtgacgcagatagaatcataatttgtgatgaaaatggtaaaattattgatggagataaaataatagctacgctagcaacaagatggaaaagaaaaaaaattttaaaaggcggtgtcgtaggtaccttaatgtcaaattatggattacaaaaatatttttctaaaaataaaataaagtttataagatctaaagtcggtgatagatacgtaaaagaggcaatgcagaaaagtaaatttaatttaggtggagaacaatctggccacattattcttggtaagtttgcaactacaggcgatggtttattggtagcactggaaattcttttctctatgaggaaaggcaaaaaggcaagtgaaatatttgaaaattttacaccaactcctcagttgctagaaaatgttgaggtaaaagataaatcaataattaataatcttaagtgtataaatgcaattaaaaaagcaaatagtttaataaaaagaaaaggcagaatgttagtaagaaagtctggaacagaacctgtagtaaggataatgtgtgaaagtgaagataaaactatactttcaaaatgtgttaatattgtaaaaaaatcaattatctaa

SEQ ID NO: 292191 - DNA, 988 bp, Unknown
  Bacterial polypeptide expressing nucleotide sequence isolated from the Sargasso Sea
ttaaagtattttggccctgatggattaaaattatctgataaaattcaaaaaaaaatagagaatttaattgatagcaaggttggaaaacatttgtctaagccaacacttttgggaagagttaaaagattagaatctggaactgatgagtatattaaaattcttaaaaaaaaaattcctaataattttaaactaaaaaatatgaaaatagttttggattgtgctaacggggctggatataaatctgcacctaaaatgattaaatctcttggtgttaaattaataattattggaaataaaccaaatggttttaatattaacaaaaattgtggatcaacctttcctaaaaagcttcaaagacatgttaaaaaacacaaggcgcatttgggcatttcattagatggtgatgcggatagaattataatgtgcgatgagaaagcatcaataattgatggtgatcaaattatagctgcgttagcactccaatggaaaaagaaaaaaattcttaaaggaggtgttgttggaactttaatgtctaattatggattagaaaatttttttaaaagaaaaaaaattaaatttattcgagctaacgttggtgataggtatgttaaagaaattatgcaaaagaaaaaatttaatttaggaggagaacaatcaggtcatataattcttggaaaatttgcaacaacaggagatggtcttttagttgctcttgaagttattcaagctttgaataaaaagataaaagctagtaatttttttaatgtatttgaaaaaacacctcaaatattagaaaatatcaaaattaaaaataatgatatattgaaaaaaacatcagtaaaaaattcaataaaaattgcaaatagattaattaagggtcaaggtagaattttagtaagaaaatctggaactgagcaaaaaataagaataatgggggaaagtaaaaataaagtattattaaaaaaatgtataaaaacagttactagaa

SEQ ID NO: 292192 - DNA, 966 bp, Unknown
  Bacterial polypeptide expressing nucleotide sequence isolated from the Sargasso Sea
acttttgggacctctaccaactaatggtttagcaatgcttaccaaaaccatgaaagctaatatgggaattatgataactgcatcacacaatccacattatgataatggattaaaattatttggcccagatggaatgaaattgtctaacaaaattgaaaagaaaattgaacatttaatagaccaacgtattgaaaataatttatctgaacctgaaaaactaggaagggtaaaaagactagaaacaggaactaaagattatattaaaattttaaaaaaaaacttttctgaggagtttaatttaagaggactcaggattgttatagactgtgcaaatggagcgggttacaaagctggtcctgaattattaaaatcattgggtgcaaaagtaatagctattggggtggagccgaatggcataaatatcaataaaaattgtggatcagtctatccacagaatattaaaagagcagtaaaaaaatataaagctcacattggtatatcattagatggtgatgctgatcgagtaataatgtgtgatgaaaaaagtaatataattgacggtgatcaaattattgctgctttggcctcaagatggaaaaataaaaaaatgttaaaaggaggggtagttggtaccttaatgtccaattatggtttagagcaatactttaaaactcttaatattaattttattagagcaaatgttggtgataagtacgtgaaagaaaaaatgcaaaaacataaatttaatttagggggtgaacagtcaggccatattattcttggaaaatttgcaaccactggagatggtttattggttgccttagaggctttatttgcgttgagaaaaggaaaaaaagctagtgtatttttttcaaaatttaaaaaaattccacaaatattaaaaaatatagatgtaaaagataaaaatataattaataaatcagaaataaaaaattctattaaaat

SEQ ID NO: 292193 - DNA, 851 bp, Unknown
  Bacterial polypeptide expressing nucleotide sequence isolated from the Sargasso Sea
tataaaaattcttaaaagaaactttccaaaaaactttagtttaagaggaattaaaattgccatagactgtgcaaatggagctggttataagtcaggtcctaagctttttaaatccttgggtgcaaaagtatatgaaataggtacatcacctaacggtctaaatattaatgataagtgtggctcaacatttccaaataaaatcaaatcttttgtgaaaaaatacagggtaaatctaggtatatcccttgatggagatgcagatagaatcattttgtgtgatgaaaaaggaaatataatcgatggagatcaaattattgcaatgttagctactagatggaaacaaaaaaaaattctcaggggaggagttataggaactttaatgtctaattatggtttgcaaaaatatctaaataaaaaaaaaattaaatttatcagagccaatgttggagatagatatgtaaaagaaaagatgcaaaaaaataaatataatttagggggagagcaatctggacatattatacttggaaaatttgcgactacgggagacggtttgttggtagctttagaagttttattttcaatgagaaaaggcagaaaggctagtgaactatttaaaatttttaaaactacaccacaaattttagaaaatgtagtggttaatgataaatctattattaattctacaaaatgtagaagagccataaatcaagctaataaattaatcaaagataagggaagaatgcttgtaagaaagtctggaacagaaccaaaaataagaattatgtgtgaatctgacaacagaaccttactattaaaatgtataaatattgtaaaaaaatctattagataaa

SEQ ID NO: 292194 - DNA, 844 bp, Unknown
  Bacterial polypeptide expressing nucleotide sequence isolated from the Sargasso Sea
aaaactaattttcctaaaaattttaatctaaaaggacttaagatcgtcttggattgtgctaatggagccgcatacaaggctgcaccaaagttattacaagaattaggagctaaagtaatttccattggaattaatcctaatggtttgaatataaatgaaaattgtggatctacatttccttctaaaattaaaaaggcagttataaaattcaaagcacatgttggcatttcttttgatggagatgcagatagaataattatgtgtgatgaaaagggaaaaataattgatggtgaccaaattatagctatgcttgcacgtaggtggaagtctaaaaaaattttaaaaggcggagtagttggaacattaatgtcaaattatggattagaaaaatttttaaaaaatgaaaaaataaaattttttagatcaaaagttggtgatagatatgttaaagaaaagatgaaaaaattgaactttaatttaggcggtgagcagtctggacatatcattttaggaaaatttgcaactaccggtgatggtttacttgtggctttagaggtattgttttccttaagaaaaaaaagaaaagctagtaatttgctcaacgtttttaaacctatgccgcaaattctagagaacgttatagtaaaaagtaaaagtattgtagataaaagaaaatgtaaaaacgctataaaagttgctaataaaataatgggccataacggtagaattttattacgaaagtctggtacggagcctaaaataagaataatggcagaatcaaataataaaaatttaattgtaaaatgtattaaaatattaaaagagtctataagtgaaacctaga

SEQ ID NO: 292195 - DNA, 1042 bp, Unknown
  Bacterial polypeptide expressing nucleotide sequence isolated from the Sargasso Sea
cttggaaaatattttaccaaaggagatcacaggcataaggttgtcattggaaaagatactaggctttctggttacatgatcgaacaggctttaacatctggcttactttcaatgggcatggatgtttttttatttggcccgatcccaactcctgcagtctcaatgttaacaaagtcaatgcgagctgaccttggaattatgatcacagcatctcataatcaatatcaagataacggcttaaagatatttgatagacttggtaacaagctctctgatgagacagagctagagatagaaaatctaatggaaagtaaacttgaagagtctctagccaagcctgaaaacataggaagagctcaaaggttagaagatgcaaatggaaggtatatagaatatttgaaaaatacatttccaaagacgcaacgacttgatggtttaaaaatagttgttgattgcgctcatggtgcttcatatatatcagctcctcttatcttatgggagttaggagcagaggtaactcaaattggaactcagccaaatggaataaatatcaatgataaatgcggctcaacaaatactgatttattagcaaaaactgtaatagaggaaaaagctgatataggcattgcattagatggagatggagaccgcttagcaatagtcgatgagaaaggaaatgtcattaatggcgaccagatccttgcgttgctagcattacatatgagcaaaaaaaatttacttcaaaaaaataaagttgttgggacttcaatggccaatattgggttagaaaatctactcaatgagaataatattgaattagttagagcaaatgttggcgatagatatgtcaaagaaaaaatgattaatgaaaatctaaatttaggtggggagcaatcaggtcatattatcatgagggattatacatcctctggtgatggtattattgttgccctacaagttcttacaattatcatgcaaaataaaaaactggctagtgaaattttttatttatttactccgcatcctcaaaaccttattaatt

SEQ ID NO: 292196 - DNA, 874 bp, Unknown
  Bacterial polypeptide expressing nucleotide sequence isolated from the Sargasso Sea
gctatttcgttatgttgaaagagtaaagtcaagctttcctggtggtatgcgactagatggtatgaaggttgtgatagactgcgcaaatggagcaggctatcgggctgcgccggaagttttatgggagcttggcgcagatgtaattccaattggagttaatccgaacggaacgaacattaataaaaactgtgggtctacagagcctcagagtgccgcagaggctgttgtgagccacggtgcagatgttggcatttgtctagatggagatgctgataggataactttgattgactctgaagggaacatcgccgacggagatcaaattttgggtgtaatagcttctagatggtctgaagacggtttgctaactggaagcggaatagcgaccacagttatgtcaaatttggggttagaacgtttcctaaaccagcgtggtattttaatggaaagaacgcaagtaggcgatcgatatgtggttgagcacatgcgtaagtctggctttaatcttggtggtgaacagtcgggtcatatcattatgagcgacttttctactacaggtgatggtcttattgctgggttgcaattcttagcagaaataattcgatcagatagcaactccaaggatctagcacgtatattcgaaccggttccacagctattgaagaatgcttcatatcaaacaggctcagaccctctttcgaagcctaatgttgtaaaagcaataaaagcagcagagctcaatttagaaggtaatgggaggcttttaatccggaaatcaggaacagagcctcttataagggtgatggcagagtccgaggatgaagataagatggttaaagctgtggatagcgtagtagctgaaattaccgcttga

SEQ ID NO: 292197 - DNA, 906 bp, Unknown
  Bacterial polypeptide expressing nucleotide sequence isolated from the Sargasso Sea
cttattttaaaaatcaaaaaaaatcaaaacaaatagctataattgcaaaggatactagattatcagggtatactttagaaccggcactagtttctggtttagtatctggtggaatgcacgtttatactttaggtcctttacccacaaatggtttagctatgttgactaaatctatgaaggctaatatgggaataatgattactgcctcacacaatccctatcatgataatggactgaaattatttggtcctgatggcatgaaactatctgataaaattgaaaaaaaaattgaaaaactaatagatgcaaaaaatacaaaacaattaacaaacccaaaattattgggaagagtaaagcgtctcgaggatggaaatgataaatatacaaaaatactaaaaaataattttccaagcaattttcatctaaaaggtactaaaattattttagattgtgcaaatggagcttcttataaggcagctcctaaattattaaaagaacttggtgcaaaagtgatttcgataggagtaaaaccaaatggattaaatattaatgaaaaatgcggatcaacatacccctcaaaaataaagactgctgttaaaaaacatagagctaaaatcggaatagcattcgatggagatgccgacagagtaattatgtgcgatgaaaaaggaaaaataatagatggcgatcaaattattgcaatgttggctcgtagatggaaatctaaaaaaattttaaaaggtggcgtaattggaacattaatgtccaattatggtttagaaaaatttttacgtaacgaaaaaataagattttcaaggtctaaagttggagatagatacgttaaagaaaaaatgaaaaagcttaattataatttaggtggtgaacagtctgggcacattatttagg

SEQ ID NO: 292198 - DNA, 880 bp, Unknown
  Bacterial polypeptide expressing nucleotide sequence isolated from the Sargasso Sea
atgaaaaataaatattttggaacagatggtatcagaggaactgttaataaaggaaatattactggagaaaaattttttaaatttggcttagcatctgggacattttttaaaaatcaaaaaaaaactaaacaaattgctgtgattgcaaaagatacaagattgtcaggctatactttagagccagcactcgtttcaggtttggtatcaggcggtatgcacgtttttactctaggtcctttgcctactaacggattagctatgcttactaaatcaatgaaagcaaacatgggtattatgattactgcttctcataatccttattacgataatggtttaaaactatttgggcctgatggtatgaagttgtcagatagaatagaaaaaaaaattgaaaaattaattgatgctaaaaatacaaaacagctaactaatccaaaacaactcggaagagttaaaagactcgaagatggcaatgataaatacataaagatactcaaaaataattttccaaaaaactttcatcttaaagggacaaaaatagtattagattgtgctaatggcgcaggatataaatcagctccaaaactactaaaagaacttggtgctaaagtaattcctatcggagtaaaaccaaatggtttaaatattaatgataaatgtggatcgacttatccatctaaaataagatctgctgttaaaaaattcaaagcacacatcggtatctcatttgatggagatgcagatagaataattatgtgtgatgaaaatggaagaataatagacggagatcaaataattgcgatgttggcgagaagatggaaagctaagaaaattttaaaaggtggtgtagtaggcaccctaagtcaaattatggttagaa

SEQ ID NO: 292199 - DNA, 847 bp, Unknown
  Bacterial polypeptide expressing nucleotide sequence isolated from the Sargasso Sea
tgaaattttaaaaaaaaattttcctaaccaatttaatttaagaggtttgaagatcgctatagattgtgcaaatggtgctgcatacaaggttggaccaaagttattgagatcattaggagctgaagtttatgaaattggaacttctccaaatggatttaacattaatgaaaaatgtggatccacttttcctaataaaattaaaaatttaacaaaaaaaaatagagcacatattggaatttccttagatggagatgctgacagaattatcgtatgtgatgaaaaaggaaatatcatagatggtgataaaataattgcaatgttagcgcaaagatggaagaaaaaaaaaatattaaagggaggagttgttggaacattaatgtctaattatggtttagaaaaattttttaaaaaaaataaaataaaatttttaagatcaaacgttggcgatagatatgtgaaagatctaatgcaaaaaaataaatttaatctaggtggagaacaatctggtcatataatcctaggtaaatttgcaactacgggtgatggaatgttggttgccttagaaattttattttctatgaggaaaggtaaaaaagctagcgaattgtttaaaaattttattccaacacctcaactattagaaaacatagaggtaaaagataaatcaattattaaaagtgtcaaatgcaaaaaggcaataaaaatcgcaaataatttagttagaggaaaaggcagaatgttagtaagaaaatctggtacagaacctaaaataagaataatgtgcgaaagtgaaaacaaaattttgcttaaaaaatgtataaatattgttaaaaaatcaattaattaa

SEQ ID NO: 292200 - DNA, 772 bp, Unknown
  Bacterial polypeptide expressing nucleotide sequence isolated from the Sargasso Sea
tatgattacagcttctcacaatccatattatgataatggattaaaattatttggaccagatggattaaaattatcagataaaattgaaaaaaaaatagaaagtcttatcgataaaaaaatagattataaactttctgcaccgaaatatcttggaagagttaagagattagaaaatggaaatgaagaatatgttaaaattcttaaaaaaaactttccaaaaaattttagtttgaaaggttcaaaaattgtcattgattgtgcgaatggcgcaggatataaatctggaccatatctacttaaatcactaggggctaaagtaatttcattaggagtaaaacctaatggattaaatataaacaaaaaatgtggctctacattcccaaaaaaaattcaatcagcagttaaaaaacataaggcaaatattggcatttcattggatggtgacgctgatcgaataataatgtgtgatgaaaagggtaagattattgatggagatcaaatcattgctgcactagcaagaagatggaaaaataaaaaaatgctcaggggtggagtaattggaacatcaatgtctaactatggtctagagaaattttttaataaaaataaaattaaattttttagaacaaatgtaggtgacaggtatgttaaagaaaaaatgcaagagaagaaattcaatctaggaggtgagcagtccggtcatataattttaggaaaatttgctactactggggatggtttgctcgttgctcttgaattttattttctttaa

SEQ ID NO: 292201 - DNA, 867 bp, Unknown
  Bacterial polypeptide expressing nucleotide sequence isolated from the Sargasso Sea
atggtactgataaatatatagaaattttaaaaaaaaatttcccatcttcatttagccttaaaaagttaaggatagccattgactgtgccaatggagcagcatacaaagcaggacctaagctacttagatcactaggagccatagtatatgagacgggaacagttccaaatggtttaaatattaactataattgtggctcaacttacccgaataaaattaaaaatttaactaaaaaaaccaaagcagatattggaatctctttagatggtgatgcagatagaatcattatatgtgacgaaaaaagcaatgtcattgatggagataaaataattgccatgcttgcagagagatggaaaagaaaaaaaattcttaaaggaggtgttgttggaactttaatgtctaattatggattagaaaatttttttaaaattaacaaaataaaatttttacgttcaaatgtgggagatagatatgtaaaagaaatgatgaaaaaaaataaatttaatttaggcggtgaacagtctgggcacattatcttaggtaaatttgcaactacaggagacggattactcgttgccttagaagtacttttttcaatgagaaaaggaaaaaaagcaagtgaattatttaataattttaaaccaactccacaattattagaaaatataaatgttgaagataaatctataatagatacacccaaatgtagaaaggcaataagatttgcaaataaaattattaaaagtaatggcaggatgttagtcagaagttcaggaacagagtctaaaataagaattatgtgtgaaacagaaaataaagtattacttaataaatgtgtaaatattgtaaaaagatcgataatttaaa

SEQ ID NO: 292202 - DNA, 886 bp, Unknown
  Bacterial polypeptide expressing nucleotide sequence isolated from the Sargasso Sea
acagcaataattgcaaaggatacgagattatctggatatactttagaacctgctcttgtttcagggttggcatctgcgggaatgcatgtttatacactaggtccattaccaacaaatggtttagcaatgttgacaaaaaaaatgagagcaaatatgggaattatgataacagcatcacacaatccttatcatgacaatggtttaaaattatttggaccagatggacttaaactttctgacaaaattgagagaaaaattgagaagcttatagactcaaaaataaaaaaaaatctatctcaaaacgaaaccttaggtagagtaaagagactcgaaaatgcaaacgaagaatatattaaaattttaaaaaagaattttcctaaaaattttagtcttaaaggcataaggatagcaatagattgtgcaaatggtgcaggttataagtcaggtcctaaacttttgagatctttaggagcaaaagtgcacgaaattggaacatccccaaatggttttaatatcaataacaaatgtggctcaacatttccaaataatattaaaaattttgtaaaaaaaaacaaagtaaatttgggtatatcacttgatggagatgctgacagaataattgtatgtgatgaaactggtaaaattattgatggagatcaaatcatagctacacttgcaaaaagatggaaaaggaaaaaaattcttaaaggaggagttgttggaacattaatgtcaaattatggtttacagaatttttttacaaataataaaattaaattcatccgagcaaatgtaggagatagatatgttaaagaaaaaatgcaaaaatttaaatttaatcttggtggagagcaatctggtcacattattcttggaaaatttgcaa

SEQ ID NO: 292203 - DNA, 673 bp, Unknown
  Bacterial polypeptide expressing nucleotide sequence isolated from the Sargasso Sea
ggatcaacatatccctccaaaattaaattttgcggttaaaaaatttaaagcaaatgttggtatttcttttgacggtgacgcagatagaattattatgtgtgatgaaagtggaaaaattgttgatggagaccaaataattgcaatgttagcaaaaagatggaaatcaaaaggtatcttgaaaggtggtgttgtcggaacacagatgtctaattatggattagaaaaatttttaaaaaaagaaaagattagatttatcagatcaaaagtaggcgatagatatgttaaagaaaaaatgaaaaaactaaattataacttaggtggagaacagtctggacatataattttaggaaaatttgcaacaaccggtgatggtttgctagttgctatggaagtcttattctctttaagaaaaggcaaaaaagctagcaaattactaaatgtatttaaaccattaccacaggttttagaaaatgtgactgtaaaaaataaaaatattattagtacgactaaatgtaaaaatgctattaaaaaagcaaacaagattatgagacaaaaaggaagaattttagtaagaaaatcaggaactgaaccaaagataagaattatggcagaatcatatgataaaaatttgattttaaaatgtattaaaataatcaagagttcaataaaataa

SEQ ID NO: 292204 - DNA, 807 bp, Unknown
  Bacterial polypeptide expressing nucleotide sequence isolated from the Sargasso Sea
aatgagcaaaagatattttggaactgatggtattagaggaacagtaaataaaaagaaaattaatggagatatgtttttcaaatttggtctcgctgcgggtacgtattttagaaatttgaagaaaaaaaaacaaactgctataattgctaaagatactagattgtccggttatactttagagccagcaattgtatctggtttagcatcagctggaatgcacgtatacacactcggtccattgccaacaaatgggctagcaatgctaacaaaaaaaatgaatgcaaatttaggaataatgataacagcctcacataatcctttctatgataatgggcttaagctctttggtccagacggattaaaattatcagataaaattgagaaaaagattgaaaaactgatcgataccaaaatttcaaaacacttaacttcgccaagtgtattaggtagagtaaaaagattagaagatgcaaatgataattatatcaatatattaaaaaccaattttccaaaaaatttttctttaaaaggtattaaaattgctattgattgtgccaatggcgctggttacaaatcaggaccaaaaatatttaaatctttaggcgccacagtttacagtattggcaataatccaaatggtctaaatattaatttaaactgcggatcaacatttccaaataaaattaaatcctttatgaacaataaaaaagttaatcttggaatttctctggatggggatgcagatagaattataatttgtgatgaaaaaggaaaaatagttgatggagatcaaattattgcaatgat

SEQ ID NO: 292205 - DNA, 616 bp, Unknown
  Bacterial polypeptide expressing nucleotide sequence isolated from the Sargasso Sea
ttataaatgtggatctacacaccctaataaaatcaaataccatacaaaaaaaaataaatcacatattggtatttctttagatggagatgcagatagaataataatttgtgatgaaaaaggcaaaatcattgatggggataaaataatagctatgcttgctgagagatggaaaaagaaaaaaattttaaaaggcggtgttgtaggaactttgatgtcaaattacggattacagaaattttttgcaaaaaaaaagataaagtttttaagatctaaagttggcgatcgatatgtaaaagaggtaatgcaaaaaagtaaatttaacttaggaggtgagcaatctggtcacattatacttggtaaatttgcaactacaggtgatggtctattagttgcattagaaattttattttctatgagaaaaggaaaaaaggctagtgaaatatttaaaaactttatcccaacccctcaattgttagaaaatgttgaggtaaaagataaatcaataatacatagtttaagatgtaaaaatgcagtaaaaaaagcaaatagtttaatgaaaggaaaaggcaggatgcttgtaagaaagtctgggacagaacctgtgataagaataatg

SEQ ID NO: 292206 - DNA, 756 bp, Unknown
  Bacterial polypeptide expressing nucleotide sequence isolated from the Sargasso Sea
cggacgttcccgcgtggtttgcggctggacgggctaaaggtcgtagtcgactgtgccaatggtgcggcctataaggtggctccggaagtattatgggaactgggtgccgaggtcgtgcccgtaggtgttgatccggatggcttcaatattaaccgtggatgtggttccacggatacagactacatgcaggctcaggtgatggctcacggcgctgacatcggcttggcgctggacggtgacgccgatcgcttgatcgtgtgcgatgagagcggttctctgatcgacggcgatcagataatggcgttaattgctgctaattgggcggaggccggtcatttggcgggtggcggtgtggtcgccacggtgatgtccaatcttggatttgagaagtacctggacggcagaggtattcaacttctgcggactcaagtaggggaccgctatgtggtcgaggagatgcgcaagggtggatacaatcttggtggcgaacaatccgggcatattgtcctgggtgattatggaaccacgggcgacggacttgtcgcggcgttacaggtgttggccggattagtagctgacggtgggaaggccagcgatgtttgtcgccggttcgatccctatccgcagcagcttactagtgtcccggtttccgatggccgaccgcttgaggacccccgggtaaaaaaagctattcaagatggtgaggctcgtttagccgatgcaggccggcttttgatacgcccgtctggtaccgag

SEQ ID NO: 292207 - DNA, 749 bp, Unknown
  Bacterial polypeptide expressing nucleotide sequence isolated from the Sargasso Sea
taatgtaatagccataaataataatcctgatggtttgaatattaataaaaattgtggcgcagttgacgttaaatcactttcagaaaatgtcataagagaaaaggcagatattggatttgcatttgatggtgatggagataggttaatagttgtagatgaaaaaggacaagaagttgatggtgataagattataggattactatgtaaaagttatgtaaaacctaagaaaaaatctaataaacatgatgttattataacagtaatgtctaacatgggattagaaaattatcttacaaataaattaaaattaaatattaaacgaactcctgttggagatataaacgttataaatcaaatgaaaaaatccaaatccatgattggcggtgaacaatcaggacatataatattatcagaacatgctaatacaggtgatggaattttagcagctttaaaaattacggaaattttgatatcaaacaaaaataaggcaagtaaactttttgatttgtatgatgactttgctcaggaaaaaattaacttacgctataaaacaaagaatactaaacttttaaaaattcttgataagttaaaaaatgataaactatataataataaaaaaataagatctattattaggttatctggaactgaaccattagtaagaatactagttgagggacaagaaattaccgaggttaaaaagaaatctttagaaataaaaagattagtaaggccctatcttggttaat

SEQ ID NO: 292208 - DNA, 769 bp, Unknown
  Bacterial polypeptide expressing nucleotide sequence isolated from the Sargasso Sea
aatgacaaaaaaatattttggcactgatggtataagaggagctatcaatagtaaaaatattaatggagatatgttttttaaatttggtttggcgagtggaacatatttcaaatctcaaaaaaaaagaaaacaaactgcaataatagctaaggatacaagattatcaggttatactctagaacctgcactagtatcaggattagcatcatcaggtatgcatgtttatactttaggccccttaccaactaatggtttagcgatgcttacaaaggccatgaaagcaaatatgggaattatgattacagcttctcacaacccccatcatgataatgggttaaaactatttggcccagatggcatgaaattgtcagataaaattgaaaagaaaattgaaagccttatagataaaaaaataaaaaaaaatctctctaaaccagaaaaattaggaagagtaaaaagattagaaacaggaactaaagattatattaaaattttaaaaaagaattttactaaagaattcaatctaaggggacttagaattgtaattgattgtgcaaatggagctggttataaagcaggacctgaattattaagatctttaggagcaaaagtaatcgcaataggaattaatcctaatggtttgaatattaataaaaattgtggctctacattccctgaaaagattaggtctatggttaaaaaatataaagcagatattggtatttcattagatggtgatgctgacagaattattatgtgtgatgaaaaa

SEQ ID NO: 292209 - DNA, 874 bp, Unknown
  Bacterial polypeptide expressing nucleotide sequence isolated from the Sargasso Sea
caaagaaaaaaaaaacaaacagcgattattgcaaaagatactagattgtcaggatatactttagaaccagcattagtttcaggactaacatcagcaggaatgcatgtttttacacttggtccattgccaacaaacggccttgcaatgctaacaaaaaaaatgaaagcaaacatgggtataatgataactgcatcacataatccattctatgataatggtcttaaactctttggtcctgatggtctaaaattatcggacagatttgaaaaaaaaatagaaaagcttattgactctaaaattttgaaaaatctttcagaacctaaaaatttgggaagagtaaaaaggttagaagatgcaaacgaaagatatataaagattttaaaaagtaattttccgcgaggttttgatttaaagggaatgaaaattgctatagattgcgctaatggtgctgcatacaagtctggaccaattcttttaaaatctttgggtgcaaaagtttatgaatttggcacttctccaaatggttttaatattaatgaaaaatgtggttcgactttcccaaaaaaaataaaatatatggtaaaaaaaaataaagctcacctaggaatatctttagatggtgatgcagatagaataattatatcagatgaaaaaggcaatattattgatggagacaagataattgcaatgctcgcaacaagatggaagagaaaaaaaattttaaaaggaggggtaattggaactttaatgtcaaattatgggttgcaaaattatttgaaaaataaaaaaataaaatttattagggcaaaagttggagatagatatgtaaaagaaaaaatgcaattgaatagatttaatttaggtggtgaacagt

SEQ ID NO: 292210 - DNA, 891 bp, Unknown
  Bacterial polypeptide expressing nucleotide sequence isolated from the Sargasso Sea
aatgtcaaaaaaatattttggaactgatggaattagaggaaaagtaaatcaaggaaatattaatgggcaaatgttttttaagtttggtttggctgcaggcacttattttaaaaatattaaaaaaactaaacaaacagcaattattgctaaagatacaagattatcaggttatactttagagccagctttagtatcgggtttagcctctgcaggaatgcatgtttatacaatgggtcctttaccgactaatggactagccatgttaactaaaagaatgaaagcaaatatgggcattatgataacagcatctcacaacccatattttgacaatggattaaaattgtttggacctgatggtttaaagttatctgacaaaattgaaaaaaaaattgaaaaattaattgatactaaaataacaaataatttatctaaaccaaacattctaggaagagtaaaaagactagaaaatgctaatgataaatacattaaaattttaaaatctaactttccaaaaaattttagacttaaaggaattaaaattgctatagattgcgctaatggtgctggatataaatctggacctaagttgttaaaatctttaggggcaaaagtttataattttgccacatctccaaatggtttgaatattaataaaaattgtggatctacttttccaaaaaaaattaaatctattgttaaaaaacataaagttaatttaggaatagcattagatggtgatgcagatagagttattttatgtgatgagaaaggaaatatagttgatggtgaccagattatagcaatgctagcagataggtggaaaagaaaaaaaattcttagaggcggtgtaataggaactttaatgtctaattatggattacaaaattattt

SEQ ID NO: 292211 - DNA, 769 bp, Unknown
  Bacterial polypeptide expressing nucleotide sequence isolated from the Sargasso Sea
tttattttgggaattaggtcataacattatagccataaataataatcccgatggcttaaacattaataaaaattgtggtgcagttgatgttaaatcactttcacaaaatgtcataaaagaaaaggcagatattggatttgcatttgatggtgatggtgatagactaattgttgtagatgaaaaaggaaaagaagttgatggtgataagattatagggctgttatgtaaaagttatgtaaaacctaaaaaaaaatctaatcaacatgacgttgttattacggtcatgtctaacatgggattagaaaattatcttacaaataaattaaaattaaagattaaacgtacatctgttggagatataaatgttataaatcaaatgaaaaaatccaaatctatgataggtggtgaacaatcaggtcatataatattgtcagaacattcgaatactggcgatggaatattagcagctttgaaaattactgaaattttgatatcaaataaaaataaagccagtaaactttttgatttgtataatgattttgctcaagaaaaaattaacttaagttataaaacaaaaaataccaaattgttaaaaattcttggtaaattaaaaaatgataaattatttaataataaagaaataagatctcttgttagactgtctggcactgaaccattagtaagaatactagttgaggggcaagaaattactgaggttaaaaaaaagtctctagaaataaaaaaattagtaaggccataccttggttaa

SEQ ID NO: 292212 - DNA, 622 bp, Unknown
  Bacterial polypeptide expressing nucleotide sequence isolated from the Sargasso Sea
ggtatgaaaatagctattgattgcgcaaatggagctgcatacaaagttggacctcatttactaagatcattaggtgcagtggtttacgagataggaacttctccaaatggatttaatattaatgaaaaatgtggatcaacttttccaaataaaattagatatttaactaaaaaaaatagagcacatattggaatttctttagatggtgacgcagacagaattattttgtgtgatgaaaaaggcaatattatagatggtgataaaataattgcaatgttggcagaaagatggaaaagaaaaaaaatcttaaaagggggtgttgttggaaccctaatgtctaattatggtttagaaaaattttttagaaagaataaaataaaatttttaagatctaaagttggagacagatatgtaaaagaattaatgcaaaaaaataaatttaatctaggtggagaacaatctggtcatataattttaggcaaatttgcaactactggtgatggacttctagttgctttggaagtattgttttcattaagaaaagggaaaaaagctagtgaattatttaaaaattttaaacccactcctcaactattagaaaatatagaagtaaaaaataaat

SEQ ID NO: 292213 - DNA, 775 bp, Unknown
  Bacterial polypeptide expressing nucleotide sequence isolated from the Sargasso Sea
ggtgcagcatacaaagtaggcccgctattacttagatcattaggagccgttgtttatgagataggtactaaccctaatggatttaatataaatgataaatgtggatctacatttccaaataaaataaaatattacacaaaaaaaaataaatcacatattgggatttctttagacggtgatgcagatagaataattatttgtgatgaaaaaggtaaaattgtagatggagataagataattgcaatgttagcagagaggtggaaaagaaaaaaaattttaaaaggaggagtaattggaactttaatgtcaaattatggattgcaaaaatatttttcaagaaataacataaaatttgttagatctagagttggtgatagatatgtaaaagaagcgatgcagaagtataaatataatttaggaggagagcaatctggccatattatacttggtaaatttgcaactactggcgatggtcttttggtggctttggaaatattattttctatgaggaaaggtaaaaaagcgagtgaattatttgaaaattttatacctacaccccaattgttaaaaaatgtgaatgtaaaggataaatcaattattgatagtttgaagtgtaagaatgcaataaaaaaagcaaataatttactaaaaggaaaaggcagaatgctggtaagaaaatcaggaacagaaccagtaataagaataatgtgtgaaacagaagatcaaaacatacttttaaaatgtgttaatatagtaaaaaaatcaattatttaac

SEQ ID NO: 292214 - DNA, 885 bp, Unknown
  Bacterial polypeptide expressing nucleotide sequence isolated from the Sargasso Sea
ttaacttccgctgggatgcatgttcttacctttggtcctttgcctactaatggattagccatgcttacaaaaaaaatgagagctaatatgggtataatgattactgcatctcacaatcctcattatgacaatggtttaaaattatttggtccagatggtttaaagttgtctgataaaatcgaaaaaaaaattgaaaaacttattgactcaaaaataaatgataaattatcaaatccaaaaatattaggaagagttaaaagattagaagatggttcagaaaaatatattgaaattttaaaaaaaaactttccgaagcaatttaatctaagaggattgaaaatttcaatagattgtgcaaatggggctgcatataaaattggacctcaattattaagatcattaggagctacagtttatgaaattggaacttctccaaatggatttaatattaacgaaaaatgtggatcaacttttccaaataaaattagatatttaacaaaaaaaaataaagctcaaattgggatttctttagatggagatgctgatagaattattttatgtgatgaaaaaggtaatatcattgatggtgataaaataattgcaatgttagcagaaagatggaaaagaaaaaaaattttaaaaggcggtgttgtaggaactttaatgtctaattatggtttagaaaaattttttaaaaaaaataaaataaaatttttaagatcaaaagttggagatagatatgtaaaggaattgatgaaaaaaaataaatttaatttaggtggagaacaatctggtcatataattctaggcaagtttgcaactacaggagatggattattagttgccctagaaatcttgttttcgatgagaaagggtaaaaaggct

SEQ ID NO: 292215 - DNA, 835 bp, Unknown
  Bacterial polypeptide expressing nucleotide sequence isolated from the Sargasso Sea
aaaaaacttttctgaggattttaatttaagaggacttaggattgtaatagattgcgcaaatggagcaggatataaagctggtccagaattattaaaatcgcttggagcgaaagtatttgctattggggtaaagccaaatggtctgaatattaataaagattgtggttcagtatatcccaacaacattaaagtagcagtaaaaaaatataaagctcatattggtatctctttggatggtgatgcagaccgagtcataatgtgtgatgaaaaaagtaatataattgatggcgatcaaattgtagctgctttagccacaagatggaaaaataaaaaaatgttaaaagggggagtggttggcaccttaatgtctaactatggtttagagaaatattttaaaaataataatattaaatttattagggccaatgttggcgataggtatgtgaaagaaaaaatgcaaaagtataaatttaatttaggtggtgaacagtcaggacatattattcttggaaaatttgcaaccactggtgatgggctattagttgctttggaagctttatttgcattgagaaaaggtaaaaaagcgagtgtgtttttttcgaaatttaaaaaaatacctcaaatattaaaaaatatagaaataaaagataaaaaaataataaacaaatcaaatataaaaaaatctattaaaattgcaaaaaaattaatcaaaggacatggaagaatccttgttaggaagtcaggaacagagtcaaagattagagtgatgggtgaaagtgaaaacttagatcttttaacaaagtgtattaatataattgtaagagaaataaaataa

SEQ ID NO: 292216 - DNA, 884 bp, Unknown
  Bacterial polypeptide expressing nucleotide sequence isolated from the Sargasso Sea
tccagatggcatgaaattgtcagataaaatagaaaagaaaattgaaagtttaattgataaaaagattataaattatttatctaatccagaaaaactaggcagagtgaaaagattagaaactggaacaaaaaattatttaaaaattttaaaaaaaaattttattaaagaatttaatttaaggggattaagaattgtaattgattgtgcgaatggcgcaggctacaaagcaggaccagaattattaaaatctcttggagcaaaagtaatagcaataggtgtaaaccctaatggtcttaatataaataataattgtggctcaacataccctaacaagattaaatttgctgtaaaaaaacataaagcacacctaggcatctcacttgatggtgatgctgatagaattattatgtgtgatgaaactggaagtataattgatggggatcaaataattgcagcattagcagctaggtggaaagataaaaaaatgttgaaaggaggtgtggttggaactttaatgtctaattatggtttagaaaaattttttaaatctaagaaaataaaatttattagagcaaatgtaggcgatagatacgtaaaagaaaaaatgaaaaaaaataatttcaatttaggtggtgaacaatcagggcatatcattttgggaaaatttgcaacaaccggagatggtttacttgttgctttagaagtattgtttgcaattagaaaagagcgaaaagccagtaatttttttaataaatttaaaaaaacacctcaaattttgaaaagtattgaagttaaagacaagtctataataaaaaaatctgaagtaaaaaaatctattaaagctgcagaaaaattaatgaaaggacaaggtagaatactttaag

SEQ ID NO: 292217 - DNA, 660 bp, Unknown
  Bacterial polypeptide expressing nucleotide sequence isolated from the Sargasso Sea
cggacaaaataaaatatttagtaaaaaagcataaagcgcacttaggcatatcacttgatggagacggtgacagaataattgtttcagacgaaaatggaaatattattgatggagatcaaataatcgcaatgttggcaacaagatggaaaagaaaaaaaattttgaaaggtggagtaattggaactcttatgtcaaattatggattacaaaattatttgaaaagccaaaaaataaaatttattagagcaaaggtgggagatagatatgtcaaagaaaaaatgcaaaataataattttaacttaggaggtgagcaatcaggacatataatacttggtaaatttgcaacaactggagatggtttgttagttgcattagaaattttattttcaatgaggaaaggcaaaaaagcaagtgatatatttaatacttttaaagcaactcctcaaattttagaaaacgttaaagtaaaagataaatcgataattaattcacaaaagtgtaaaatagcaataagtaaatcagaaaaattgattaaaaatcatggaagaatgcttgtaagaaaatctgggacagaaccaaaaattagaatcatgggggagtcgaataatatttcattattaaaaaaatgtataaatattgtaaaaaaatcaattaattaat

SEQ ID NO: 292218 - DNA, 776 bp, Unknown
  Bacterial polypeptide expressing nucleotide sequence isolated from the Sargasso Sea
aatgaaaaataaatactttggtacggatggaataagagggactgtaaatcagggaaatataactggagaaaaattttttaagtttggattggcatcaggtacttattttaaaaatcaaaaaaaatccaaacagattgcaattatagcaaaagatacaagattatcgggttatactttagagccagctttagtgtccggacttgtatctggcggaatgcatgtttttactttaggcccattgcctacaaatggtcttgcaatgttaaccaaatcaatgaaagctaatatgggtattatgattacagcctcccacaacccttattatgataatggtttgaaactatttggtcccgatgggatgaagctttctgataaaattgaaaaaaaaattgaaaagctaatagatgctaaaaacacaaagcaattaacaaatccaaatttattaggacgggtaaaacgattagaagatggaaacgacagatacattaatatattaaaaaataattttccaagtaattttcatcttaaaggaacaaaaatagttttagattgtgcgaatggtgcctgctataaggctgcacctaaattacttaaagagcttggggcaaaagttatttcaatcggagtaaatccaaatggattaaacataaatgaaaaatgtggatcaacatacccttcaaaaataaaggctgctgttagaaagaataaagctaatgttggaatagcatttgatggagatgcagacagagtcattatgtgcgatgaaaaaggaaaaa

SEQ ID NO: 292219 - DNA, 788 bp, Unknown
  Bacterial polypeptide expressing nucleotide sequence isolated from the Sargasso Sea
gaaaattgaaaatttaattgactcaaaaacatttcatcatctatcacgtccaaagaccctaggaagagtaaaaaggttagaggatggaaatgatagatatttgaaaattataagaaaaaatttccctaaaaaatttagcctgaaaggaataagaattgtgctagactgtgccaatggcgctggttacaaagctgctccaagaatacttactgatttaggagcaaaagtttttccttttggaataaaacctaatggtctcaatattaactataaatgcggttcaacaaatcctgaagtgattaaaaagaatgtcaaaaaatataaagctgaccttggcatagccttagatggtgatgctgaccgagtaataatgtgtgatgaaaaatcacaaattattgatggagatcaaatcatcgcaatgattgccaaaaggtggaatagaaaaaaaattcttaaagggggagtcgtgggaactttaatgtcaaattttggtttagaaaaatttttctataatcagaaaataagttttttaagagcaaaagtgggagatagatatgtaaaagaacttatgaaaaaaaataaatttaatcttggtggagaacagtcaggacatattattttaggtaattttgcaactactggtgacgggttacttgtagctttagagtgtttatttgcactaagaaaaggaaaatcagctaacgaaatttttaaagtttacaaaccagtgccgcaaaaattattaaatataaaagtaaagaataaaaaaattttaaaaacctctaaat

SEQ ID NO: 292220 - DNA, 804 bp, Unknown
  Bacterial polypeptide expressing nucleotide sequence isolated from the Sargasso Sea
attgtttggtcctaatggaatgaaattatcagataaaatagaaaaaaaaattgagagtctcattgataagaaaatctcaaaaagtctctcgcattctgaaaaattaggaagagttaaaagattagaaacaggcaccaaaagttatattaaaatattaaaaaaaaatttcacaaaagagttcaatttaagaggactaagaatagtaatcgactgcgcaaacggtgctggttataaggctggtcctgaattattaaaatcattaggagccaaagtaatagcaataggtattaaaccaaatggtttaaatattaataaaaaatgtggatcaacttttccaaaaaatattaggtctgctgtaaaaaaatataaagctcatatcggaatatctttagacggagatgctgacagaattattatgtgtgatgagaaaagcaatataatagatggagatcaaattatagccgctttagcaacaagatggaaaaataaaaaaatgttaaaaggaggagttgttggaacattaatgtcaaattatggtttagaaaaatattttaaatcaataggaataaaatttttaagagcaaatgttggagatagatatgttaaagaaaaaatgcaaaaatataaatttaatttaggtggtgaacagtcaggacatattattttaggtaaatttgcaactacaggagatggtttgttagtagctttagaagctctttttgctttaagaaaaggaaaaaaagcaagtgaattttttgaacaatttaagaaaacacctcagctcttagaaaatatcgaagtaaa

SEQ ID NO: 292221 - DNA, 682 bp, Unknown
  Bacterial polypeptide expressing nucleotide sequence isolated from the Sargasso Sea
gtccacaaatccgcaaagagcagctgaagctgtagtttctcacggtgcggacgtgggaatttgtcttgatggtgatgccgacaggattattttacttgattccgatgggaatattgctgatggagatcaaattatgggtgttatagcctccagatggtctgaggatggcgtgctaactgggagtggaatagcaacaactgtaatgtcaaatttggggctggaacgttttctaagccaacgcggtatttcaatggaaagaacccaagttggtgatcgctatgtagttgagcgcatgcgtaaatttggatttaacctaggtggggagcaatcaggtcatataattttaagtgactttgccacaactggtgatggtctgattgctgggctgcaatttttggcagagataattcgatcagagcgcggctctaaggaactcgctcgggtgtttgagcctgtgccacagctattaaaaaatgcatcttatcaagcaggatctgaccctctcgctaagcccaatgtgataaaagctataaaggcagctgaattaaaactaaaaaacaacggaagactgttgatacgaaagtcaggtacagagcccttaattagagtgatggcagagtgtgaagatgaagaaaagatgaccagagcggttgatagtgtagttgctgaaattactgcctaa

SEQ ID NO: 292222 - DNA, 506 bp, Unknown
  Bacterial polypeptide expressing nucleotide sequence isolated from the Sargasso Sea
cgggggtggagttgttgctacagtgatgtcaaattttggttttgagaggtttttgagtaagataggtttagtgctaaaaagaacaccggttggtgatcgatacgtagttgaagaaatgagacggttaaattttaaccttggaggcgagcaatctggtcatattgttatgactgattatatgacgactggcgacggtctcgtagcggcgctacaatgtttggaaataattgtctcaagccaaatgcctgctagtgagtcactcgataaattcgagccttatccccaagttacacgtaatatcaaatatgaaggtgacgttgacttccttgaaaaaagctcaataaaaaaaatgattgttgattctgagaagaaactcggtaagaacggaagacttttgttacgaaaatctggaactgagcctttaataagaattatggccgagcatcacgacgaaaaactaattcatgaagttattgagactatcagcgaaaaagttaggaagtaag

SEQ ID NO: 292223 - DNA, 680 bp, Unknown
  Bacterial polypeptide expressing nucleotide sequence isolated from the Sargasso Sea
taaaacgcaaagtctgaaagaagaagttaagagcaataacgctgatttaggaattgcctttgatggtgatggagatcgtttagtaataatagatgaaaatggtgatcaagttaatggagaccatttgcttgggatgatagctttatcactcaaaaaaaagaatttgctaaaaaatgagaatattgtttcaactattatggctaacaaatctcttgaaaattatctgaaatcaattgatctcaagttaataagaacaaaagttggcgatagatatgtaattgaaaaaatgttggatatcggctctaactttggtggtgaaccatcaggtcatttaattattaatgatttttcctctaccggtgatgcaattgtatcttctttacaagttttatccttaatgattgaagagaatcgaccaatttcgaatcttactaatctttttcctcttacctctcaaaaaaactatgaatttaaaacagaaaatataaataatatttcaaactcttttctagaagaattatctaataaaatgaacgaaaagattggtgatgaaggaagagttattataagaaaaagcggaacagagccattaataagggtaatggtagaaaccgataccaaaaatattggtgaaacattaattgatgaaattaaattatcattaaatcattcgacttaaa

SEQ ID NO: 292224 - DNA, 652 bp, Unknown
  Bacterial polypeptide expressing nucleotide sequence isolated from the Sargasso Sea
aaattcatccgctgtaaaaaaatttaaggctcatgttggaatatcttttgatggggatgctgacagaataataatgtgtgatgaaaaaggaaaaataatagatggagatcaaattatcgctatgcttgcccgaagatggaaattaaaaaaaattttaaaaggaggagtgattggtactttaatgtctaactttggtttagaaatttttttaaaaaaagaaaaaataaaattttttagatcaaaagttggcgatagatatgtaaaagaaaaaatgaaaaaactaaactttaatttaggtggcgaacaatcagggcatataatattaggtaaatttgctaccactggcgatggattgcttgtagcattagaagtattattttctttaagaaaaggaaaaaaagctagcaaactattaaatgtttttaaaccattgcctcaaattttagaaaatgtcgtcgttaaggacaaaaacattattaataaacccaactgcaaaaaggctattaaaaaagcaattaaacttatgagttacaatggaagacttttagttagaaaatctggaactgaaccaaaaattaggattatgggcgagtcttatgatagaaatttaattttaaaatgtgtaaaaataattaaacgatcaataatataa

SEQ ID NO: 292225 - DNA, 926 bp, Unknown
  Bacterial polypeptide expressing nucleotide sequence isolated from the Sargasso Sea
gatggtctaaagttatcagacaaaattgaaaaagaaattgaaaagttaattgactcaaagattaataaaagtttagcaaaaccagaaatcttaggaagagtaaaaagattggaagatgcaaatgaaagatatataagtattttaaaaaaaaattttccaaaaaattttagtttaaaaggtataagcatagcaattgattgtgcgaatggtgctggttataaatcaggaccaaaactctttaaatcattaggtgcaaaagtatatgatattggtacccaacctaatggtttaaatataaataataaatgtggttctacttatccaaataaaataaaatctatagtaaaaaaatataaagttgatctaggaatatctttagatggtgatgcagacagaattattttaagtgatgaaaaaggtgttattgttgatggagatcaaattattgcaatgattgcaaaaagatggaaaagaaaaaaaatacttaaaggaggtgtagttggtacgctgatgtcaaattatggccttgaaaaattttttaaagagcaaaaaattaaatttataagagcgaatgttggagacagatatgtaaaagaaaaaatgaaaaaattaaaatttaatttgggaggtgaacagtctggtcatataattcttggaaattttgctacaacaggagatggtctattagttgccctggaagtattattttcaatgagaaaaggtaaaaaagctagcgagttatttaatatttttaaagttacacctcaagttctggaaaatattattgtaaaagataaatcaattattgataaaaataagtgtaaaaaagcaataaagtttgcttcaaaattaataaaagatcagggaagaatgctagttagaaagtcgggcactgaaccgaagataagaattatgggagagtcaaa

SEQ ID NO: 292226 - DNA, 556 bp, Unknown
  Bacterial polypeptide expressing nucleotide sequence isolated from the Sargasso Sea
gtagatggtgatcagataatcgccatgcttgctcggagatggaaatcaaaaagaattttaaaaggtggagtgatcggaactttgatgtctaattatggattggagaaatttttgaaaaatgaaaaaatacgattttctagatctaaagtaggagatagatacgttaaggaaaaaatgaaaaaatttaattacaatctaggcggtgaacagtctggtcatataattttaggaaaatttgcaacgacaggagatggtctacttgttgcattagaggttttattctccttaagaaaaggcaaaaaggccagtcaattattaaatgtttttaaacctttgccacaaattttggaaaatgtatctgtcaaagataaaaatataattggtaaatccaaatgtaaaaatgcaatcagaaaagcaaataaacttatgggccaaaaaggaagaatcttggttagaaaatctggaactgaaccaaagataaggattatggccgagtcatatgataagaacttaattttaaggtgtataaaaataataaagagatcgataaaataaa

SEQ ID NO: 292227 - DNA, 730 bp, Unknown
  Bacterial polypeptide expressing nucleotide sequence isolated from the Sargasso Sea
agaggatctatagataatgaagttaatccagagtcagtcctcaaacttggtcatgctgcagggagacatttcaaaaaaaggggaattaacactttagtaattggaaaagacacaaggatttcaggatacatgctggagtctgcccttcaggctggaattatttcatctggagtaaatgtcagattagtaggccctatgccaacgccggcaatttcatatctggtatctacattcaaaggacatgctggagtggtaataagtgcctcacataattcatttgaagataatggcattaaattttttgatgaaaatggagaaaagttatccattgagaatgaaagagaaatagaaaaatttgctgaagaagcttatgaatttgtgcatcctgaaaatcttggcaaggcggcaaggattagtgatgcaaaaggtaggtacattgaattttgtaagaatactttgagtgatgacatctcattttcaggattaacccttgttattgattctgctaatggcgctgcctatgaagttgctcccaaagtttttaaagagttaggagctgaagtttattctattgctgatagtccgaatggcttaaatataaataaagattgtggaagcaccaacatagattttttaaaagacgaagttttaaacaaaaatgcagattttggcattgctcttgatggtgatggagatagattgattatcatcgattcaaacggacaagaat

SEQ ID NO: 292228 - DNA, 885 bp, Unknown
  Bacterial polypeptide expressing nucleotide sequence isolated from the Sargasso Sea
cgatggcatccgcggtgaggtgggcaaatacccagtcacggctgattttatgctcaagctcggatgggcagcggggcgggtattcgcctcggccgagggtcacacccacgtattgattggcaaggacacccgggtgtcgggctacatgttcgagtccgcactggaggccggactggtcgcggcaggagcccgtgtcaccctgctggggcccatgcccacgcctgcggtggccatgctgactcgcagtcaaaaagcgtcggctgggattgtcatcagtgcctctcacaacgcctatacggataacggcattaaattttttgatgccgagggccgcaagctctcggacgatctcgaggtcgagattgagcgcatgctgtcagagcccatggacactgtaccttcagcacagttgggcaaggccgcgcgaatggtggatgcaccgggcaggtatgtggagttctgcaagaatacgtttcccgaggcgctgagcttaagaggactgaggttggtcctggactgcgcccatggcgccacttatcaggtcgcgcctcaggttttcaccgagttgggcgcaaccttggtggtaataggtgccgaaccagatggctacaacatcaaccgcgatgtcgggtcgacctctccggccgcattgcaagcgcgggttttgagcgagcaggcggatctcggtatcgcgtttgacggcgatggcgaccgcgtgcagtgcgtcgccgccgacggcacggttgtagatggtgatgagcttctctacgtcattgccaatgatcgtgtgcgacggggacggccacctgaaggtgtggtcggcacattgatgtccaatctgggtctggagcaggcgctggcggccaagggcatagaattggtgcg

SEQ ID NO: 292229 - DNA, 910 bp, Unknown
  Bacterial polypeptide expressing nucleotide sequence isolated from the Sargasso Sea
atgacacgtaagctttttggaactgatggagtcagaggaacagcgaaccgagagccgataacggctgagacagctttgaagctagcgatggccgctggcagctactttacgcctgtttcaggtaaacaaagaccattagcagtgattgggaaagatacacggttatcaggttatatgcttgagtcggctatggtcgctgggttcacggctgtgggtatggacgttgtattagttggcccaatggtaacgcccggcatagctatgctcacgaggtcattaagagcggatttaggtgtaatgttatccgcttcacacaacccttatcatgacaatgggataaaattctttgggccggatgggtttaaactttctgatgaaatagaattgagtttggagaatattataacgagtattgatgacagtgtcagagtatcaccaatgaacctaggccgagctagaagattagatgatgcagctgggcgatacattgagatggctaagggtaccttccccaagggtctaaggctagatggtttgaaactcgttgtggattgtgcaaatggcgcggcttataagttggccccaaaagtatttttcgaattaggggcagatatagtccctttaggtgtagagccagatgggtttaatattaatcgtgactgtggtgctatcgctccagcatccctaatagaatcggtgaaaatgcacaaggctgatgctggtatagcacttgatggtgacgcagataggctaatccttgttgatgaaactggctctgtcgttgatggagatcaaatccttgcggcacttgccgcagcttggttgaaaacaggtgaattaaagggtgatggtattgttacaaccagtgatgtcaaatcatggactcgaagtgttcctcaatccaagggat

SEQ ID NO: 292230 - DNA, 902 bp, Unknown
  Bacterial polypeptide expressing nucleotide sequence isolated from the Sargasso Sea
ttctgaaaaattaggaagagtaaaaagattagaaacaggcaccaaaaattatataaaaatattaaaaaaaaatttcacaaaagagtttaatttaagaggactaagaatagtaatcgactgtgcaaacggcgctggttataaggcaggtcctgaattattgaaatcattaggagctaaagtgatagcaataggtgtcaaaccaaatggtttaaatattaataaaaaatgtggatcaacttttccaagaaacattagatctgctgtaaaaaaatataaagcacatattggaatatctttagatggagatgctgacagaattattatgtgtgatgagaaaagcaatataatagatggagatcaaattatagctgctttagcaacaagatggaaaaataaaaaaatgttaaaagggggagttgttggaacattaatgtcgaattatggtttagaaaaatattttaaatcaataggaataaaatttttaagagcaaatgttggagatagatatgttaaagaaaaaatgcaaaaatataattttaacttaggtggtgaacaatcgggacatattattttaggtaaatttgcaactacaggagatggtttgttagtagctttagaagctctttttgctttaagaaaaggaaaaaaggcaagtgaattttttgaacaatttaagaaaacacctcagctcttagaaaatatcgaagtaaaagataaaaatattattaacaaaccagagataaaaaaaattataaaaaatgcagataaattaattaaaggtgaaggaagaattttagtaagaaaatctggaacagagtctaaaataagagttatgggagaaagtgaaaacaaagctcttctaaataaatgcgtgaacatgattacgaaaaaaattaaataaa

SEQ ID NO: 292231 - DNA, 721 bp, Unknown
  Bacterial polypeptide expressing nucleotide sequence isolated from the Sargasso Sea
ttagcaataggcattaaaccaaatggtttaaatattaataaaaaatgtggatcaacttttccaagaaatattaggtctgctgttaaaaaatataaagctcatatcggaatatctttagacggagatgctgacagaattattatgtgtgatgagaaaagcaatataatagatggagatcaaattatagccgctttagcaacaagatggaaaaataaaaaaatgttaaaagggggagttgttggaacattaatgtcaaattatggtttagaaaaatattttaaatcaataggaataaaatttttaagagcaaatgttggagatagatatgttaaagaaaaaatgcaaaaatataattttaatttaggtggtgaacaatcaggacatattattttaggtaaatttgcaactacgggagatggtttgttagttgctttagaagctctttttgctttaagaaaaggaaaaaaggcaagtgaattttttgatcaatttaagaaaacacctcagcttttagaaaatatcgaagtaaaagataaaaatattattaataaaccagagataaaaaaaattataaaaaatgcagataaattaatcaaaggtaatggaagaattttagtaagaaaatcaggaacagaatctaaaataagagtgatgggagaaagtgaaaataaagctcttttatacaaatgtataaatatgattacaaaaaaaattaaataaa

SEQ ID NO: 292232 - DNA, 827 bp, Unknown
  Bacterial polypeptide expressing nucleotide sequence isolated from the Sargasso Sea
aaattatctgacaaaattgaaaaaaaaattgagaaaataatagattcaaatatttcatctaaactgacaaaacctctaaatcttggaagggtaaaaagattagaggatgcaaatgaaaattacgtaaatattttaaaaagtaattttccaaataatttctcactgaaaggtttaaaaattgcaattgattgtgctaatggagctgcatacaaaagtgctccaaaattactaagatcattaggtgcgaaagtttttgaagttggaactaaaccaaatggaataaacattaattataaatgtggttcaacacacccagaaaaaattagatcattaacaaaaaaatttaaaactgatttaggaatttctctagatggagatgcggatagaataatcttgactgatgaaaaggcaaatattgtagatggagataaaattatagccgttttagcagagagatggaaaagaaaaaaaatactaagaggaggcgtaattggaactttaatgtcaaattatggtttagagaagttttttaaagaaaaaaaaattaaattttttagatcaaatgtcggagatagatatgtaaaagagttaatgcaaaagaaaaaatttaacttaggtggggagcagtctggccatattatactagggaactttgcaactactggagatggattgcttgtagcacttgagatacttttttctttgagaaaaggtaaaaaagctagtgaattattttctatttttaagccaacacctcaaatattagaaaatatttcggtcaaggataaagcagtaattagttctaaaaaatgtagactagcaattaa

SEQ ID NO: 292233 - DNA, 779 bp, Unknown
  Bacterial polypeptide expressing nucleotide sequence isolated from the Sargasso Sea
aattgactctaaagtatcaaaaaaattatcaaatcctaaaatattaggtagggttaaaagattagagaatggcccgaataaatatcttgaaatcttaaaaacaaattttcctaaacaatttaacttaaggggtttaagaattacaatagattgtgctaatggagccgcatataaagtaggacctcaactatttagatcattgggagctgcagttcacgaaattggaacttctccaaatggatttaatataaataaaaaatgtggttctacatttccaaataaaattaaatatcatacaaaaaaaaataaatcccatattggaatttcgttggatggcgatgcagacagaattatagtatgtgatgaaaagggcaatattattgatggagataaaataatagctatgttagctacaagatggaaaagaaaaaaaattttaaaaggtggtgttgtaggaactctaatgacaaactatggattacaaaaatatttttttaaaaacaagataaagtttataagatctcaagttggtgatagatacgtaaaagaagcaatgcagaaaagtaaatttaatttaggcggagagcaatctggccacattatccttggcaaatttgcaaccactggtgatggtttgttggtagcattagaaattcttttttctatgaggaagggaaaaaaggcgagtgaaatatttaaaaattttatacctactcctcaattgttggaaaatattcaagtaaaaaataaattaataattaatagccttaagtgtaaaa

SEQ ID NO: 292234 - DNA, 856 bp, Unknown
  Bacterial polypeptide expressing nucleotide sequence isolated from the Sargasso Sea
aatgactaaaaaatattttggtacagatggaataagaggaagagttaatactaaaaatattaatggtgaaatgttttttaagtttggacttgcagcaggaaaatattttacaaatttaaaaaaaaataagcaaactgcaataattgcaaaggatactagactgtcaggttatacacttgagccagctttagtctcaggccttgcttcagctggcatgcatgtttttactttaggcccaatacctacaaacggactagcaatgttaactaaatctatgaaagccaatatgggtattatgattacagcttcccataatcctcatttcgacaatggattgaagttatttggaccagatggtttaaaattgtctgacaaaattgagaaaaaaattgaaatattaattgacaaaaaaattgataaaaaattcacaaaaacaaacaatttaggaagggtcaaaagattagaaaatggcgttagtgagtatattaaaattttaaaaaaaaattttccttcaaaattcgatatcagaggcttaaagatagtcattgattgtgccaacggtgctggttacaaagctggacccgaattacttaagtcattaggtgccaaagtaatatcgattggcgttaatcccaatggacttaatataaataaaaattgtggctcaacttttccaaataaaattagattagcagtaaaaaaatacaaagctcatttgggaatttctttagatggtgatgctgatagaattataatgtgtgacgagaatggaaaaatagttgatggtgatcaaattttagcagcattagcaacgagatggaagtataagaatatgcttaaaagaggtgtagtaggg

SEQ ID NO: 292235 - DNA, 694 bp, Unknown
  Bacterial polypeptide expressing nucleotide sequence isolated from the Sargasso Sea
ttgaatataaatgacaaatgtggatctacatatcctagtaaaataaaatcattagttaaaaaatataaagtgaacttaggaatttctttagatggggatgcagatcgaataattttgtgtgatgaaaaaggtaagattatagatggagaccagattattgcaatgttagcaaatagatggaaaaaaaaaggaattcttaaaggaggagttgttggcactcttatgtcaaattatggtttacaaaattattttaatcataaaaaaataaaatttttaagatcaaatgttggagatagatatgttaaagaaaaaatgcaaaaaaataaatttaatttaggaggagaacaatctggacatattatacttgggaaatttgcaactactggagatggacttttagtggcgttagaagttcttttttcaatgagaaaaggtaaaagtgcaagtgagttatttaatatttttaaaccaactccacaaattttagagaatgttgtcgtcaaagataaatcattaattaattctttaaaatgcaaaaaagcaataagagttgcatctagtttaattaaaaatcaaggtagaatgttagtaagaaaatctggaactgaacctaaaataagaataatgggagagtcagctaataaagaattaatatcaaaatgtataaaaatagttaaaaggtcaattaaataaa

SEQ ID NO: 292236 - DNA, 793 bp, Unknown
  Bacterial polypeptide expressing nucleotide sequence isolated from the Sargasso Sea
taatgaaaaatatataaaaattctcaaaaaaaactttccaaaaaactttagtttaagaggaattaaaattgctatagactgtgcaaatggagctgcttacaagtctggccctaagctttttaagtccttaggagcaaaagtgtatgaaatagggacatcgcctaacggtttaaatattaacgataaatgtggatcaacatttccaaataaaatcaagtcttttgtaaaaaaatacagggtaaatctaggtatatcccttgatggagatgcagatagaatcatcttgtgtgatgaaaaaggaaatattattgacggggatcaaattattgcaatgttagctactagatggaaaagaaaaaaaattcttaggggaggagttataggaacgttaatgtccaattatggattgcaaaactatctaagtgagcaaaaaattaggtttatcagagctaatgttggagatagatatgtaaaagaaaagatgcaaaaaaataaatataatttaggaggagaacaatccggacatattatacttggaaaatttgcaactacgggagatggtttgttggtagctttagaagttttattttcaatgagaaagggaagaaaagcgagtgaattgtttaaaatttttaaaaatacaccacaaattttagaaaatgtagtggttaatgataaatctattattaattctacaaaatgtagaagagctataaatcaagctaataaattaattaaagataaagaaagaatgctagtaagaaaatctggaacagagccaaaaattagaatt

SEQ ID NO: 292237 - DNA, 901 bp, Unknown
  Bacterial polypeptide expressing nucleotide sequence isolated from the Sargasso Sea
ttacgtttggaagattcgtcaggaagatattccgaatatttaaaaagcacattagataaaaaaattaattttagaaaatttaaaatagttttagattgtgcaaatggagcaacatatcaagttgcaccaaacctattttgggaattaggacatgaggttatatcaataaattctaatccagatggaactaatatcaataaaaactgcggtgccgtagaagtcagcgggttaaagagaactgttttaaaaaaaagagctgatataggttttgcttttgatggggatggcgatagattaatagttgttgatgaaaaaggaaatgaagttaatggagataaaataatagctttattcgctaaaaattttataggactaaaaaataaactagaaaataataaagttataacaacaacaatgtctaatcttggttttgaaaaatatttgcaggaagagttaaacatatctttagtcagaactgatgtaggagatattaatgtgattaatgcaatgcaaaaaaataaatcgttattaggtggtgagcaatctggtcacataatattatctgaatattcaaatacaggagatggtatattagctgctttaaagataattgaaataatgagtaaaaaaaatgacaaaacaagcaaaatatttaatttatataatgagtttcctcaaaaaaaaattaatataaaatataaaaaagttaataaaaatattagaaaaaaaataatttctttatcattaaataagtcaaataatacattattttatagatcattaattaggttttctggcactgaaccattaattagaattttagtagaaggaacaaataaaaaagaagtatcgaaaattgcaaaaaagtttgaagataaggtgaggtcaatccttgtataat

SEQ ID NO: 292238 - DNA, 694 bp, Unknown
  Bacterial polypeptide expressing nucleotide sequence isolated from the Sargasso Sea
aactaatccaaaactccttggtagagttaaaagattagaagacggaaatgataaatatatcaaaatattaaaaaacaattttccctcaagttttaatttgaagggaaccaaaattgttttagattgtgcaaatggagcaagttataaagcagccccaaaactactaaaagaccttggagcaaaagtcatttctatcggtactaagcctgatggtttcaatattaatgaaaaatgtggatcgacttacccatctaaaattaaaacagccgttaaaaaattcaaagcacatgtaggaatttcgtttgatggagacgcagatagaataatcatgtgcgatgagaaaggcaaaacagttaatggagatcaaattatagcaatgttagctagaaggtggaaaacaaaaaaaattttaaaaggcggggtagtaggaactctaatgtcaaactatggtctagaaaaatttttaaaatttcaaaatataaaattttttagatctaaagttggcgatagatacgtaaaagagaaaatgaaaaaattaggttttaatttaggtggggagcagtctggacacataatattaggaaaatttgcaactacaggagatggtttacttgtcgcgctggaagtattattttcattgagaaagggaaaaaaggccagtgagctactaaatgtctttaagccactgcctcaa

SEQ ID NO: 292239 - DNA, 886 bp, Unknown
  Bacterial polypeptide expressing nucleotide sequence isolated from the Sargasso Sea
gttcctcttccaacaccaggagttgcaatgttaactaagtcaatgagagcagatttaggaataatgattacagcgtctcacaataaatttaccgacaatggattaaaaatatttgataggaatggaaataaattatctgatgaaattgaattggagatagagcgcttaatgggaatacgtcttgaagaacatttaatagaacctgaaaagattggaagggctaaaagactagatgatgctaacggaagatatattgaatttttaaaaaatacatttccatcaaaaaaacggcttgaaggtttgaaagttgttattgattgcgcaaatggcgcttcttatttatcagcccctatagttttctgggaattaggtgctgaagttattcagattggtgtcaagcctgatggtttaaatatcaataaagaatgtgggtcaacagatacaaaattgctatctaagaaagttaaagaaaataaagcagatattgggttagcacttgatggcgatggtgatcgcttaattatttgtgatgaaaatggagaagttattgatggcgatcagatcttgggactactggcgcttcaaatgaaggaaaatggaatgttacaaaatgatgaagtagttggaaccctaatgactaatgtaggtttagagagaaaattaggagataattcaattggtttaattcgtgctcctgttggagatagatatgtaaaagaggaaatgttaaaaaaggagcttaatcttgggggagagcaatctggacatataattctaaagaactttacttcatctggggatggaattgttgtggctttgcaagttttatctattttaagtgagaaaggcatcaaggctagcaagttgcttaatatcttcaaacctg

SEQ ID NO: 292240 - DNA, 685 bp, Unknown
  Bacterial polypeptide expressing nucleotide sequence isolated from the Sargasso Sea
aataaaaaatgtggatcgacttacccttcaaaacttaaatttgcagtaaaaaaatataaagccaatgtgggaatttcatttgatggagacgcagacagaattataatgtgtgatgaaaatggtaaaattatagacggtgatcaaataatagcgatgttagctagaagatggaaatccaaaaaaattttaaagggtggtgtaattggaactttaatgtctaactttggtttggaaaaatttttaaaaaatgaaaaaattagattttatagatcaaaagttggagatagatatgtaaaagagaaaatgaaaaaatataattttaatttaggtggggaacagtctggtcacattattttaggtaaatttgctacaacaggtgatgggctgttagtggctttagaggtccttttttctctaagaaaaggaataaaagctagcaaattgttaagtgtatttacgcctgttccgcaagttttagaaaatgttactgttaaagataagaatgtaataaatctttctaaaactaagaactcaataaaagttgcaactaaactattaggatccaaaggtagaatattggtaagaaagtcaggcactgagccaaaaattaggataatggtagagtcatatgataaacacttgattgtaaaatgtataaatataattaaaagatcaattaattaat

SEQ ID NO: 292241 - DNA, 448 bp, Unknown
  Bacterial polypeptide expressing nucleotide sequence isolated from the Sargasso Sea
aatgaaacgaaaatattttggcactgacggtatacgtggccgcgtaggcgctttccccataacgccggagttttgtctgcgtttaagtaatgcagtgggcagagttttcactgtggatggccgcaaacccaaggtcttgatcggcaaagatacgcgtatctccgggtatatgctggagtctgtactgcaatctgggcttatttcagcaggcgccgacgttagtttgttgggtccgatgcccaccccggcgatagcctacttaacaagaacattgcgcgcagatgcggcgattgtcataagcgcctcccacaatccgtattacgacaatggcatcaaattttttaatgcacagggcggcaagctcgacgacgaaaccgagttggcaatcgaagcggccatggacgtccctttgtactgcgaagggtcggagagtctggcaaagcatcgc

SEQ ID NO: 292242 - DNA, 756 bp, Unknown
  Bacterial polypeptide expressing nucleotide sequence isolated from the Sargasso Sea
atggcttggcctgttaacaaaagagatgagagctaatatgggaattacgattactgcatcacataatccttattatgataatggattgaaattgtttggtccagatggattaaaattgtcagataaaattgaaaaaagaattgaaaaacttattgactctaaaatagttaaaaatctttcaaaacctcaaaaattaggaagggtcaaaagattggaaaatgggaacgaaaaatatattaaaattttaaagaaaaactttccaaaaaaattctcactaaaaggtttaaaaattgccattgattgcgcaaatggagctggctataaatctggacccaaattatttaagtctttgggcgcaaaagtaatcactattggcacaaaaccagacgggctaaatataaatttaaattgtggatcaacttttccaaaaaaaatacagaaatttactaataaatatagagcagacataggaatatctttagatggtgatgcagatagaattattttatgtgatgaaaaaggaaaaattattgatggtgatcaaattatagccatgcttgccgaaagatggaaaaataaaaaaattcttaaaggaggtgtggtaggcactttaatgtcaaactacggacttcaaaaatattttaagagtaaaaaaataaaattttataggtcaaaagtaggtgatagacatgtgaaagataagatgcaaaaattaaaatttaatttaggtggagaacagtctggacatataatttc

SEQ ID NO: 292243 - DNA, 840 bp, Unknown
  Bacterial polypeptide expressing nucleotide sequence isolated from the Sargasso Sea
gatgcatcaaggaagatactcagaatttttaaagagtactttaattaaaacatcttcaaagagaaaattaaaaattgttttagattgtgcaaatggagctacatataacatagctccaaatttattttgggaattaggtcataatattacagccataaataataatcccgatggcttaaatattaataaaaattgtggtgcagttgatgttaaatcactttcacaaaatgtaataaaagaaaatgctgatattggatttgcatttgatggtgatggagatagactgatagttgtagatgaaaaaggaaatgaagttgatggtgataaaattatagggttgttatgtaaaagttatataaaacctaagaataaatctaatcaacatgatgtgattataaccgttatgtctaatatgggattagaaaaatatcttacaaataaattaaaattaaaaatcaaacgcacatctgttggagatataaatgttattaatcaaatgaaaaaatcaaaatctatgataggcggcgaacaatcaggtcatataattttgtcagaacattctaatacaggtgatggaattttagcagctttaaaaattactgaaattttgatatcaaataaaaataaggcaagtaaaatttttgatttgtataatgattttgctcagtcaaaaattaacttaacttataaaacaaagagtactaaattgttaaaaattcttgataagttaaaaaataataaactatataataataaaaaaataagatctcttgtaaggttatctggaaccgaaccattagttagaatactagttgaagggcaagaagttactgaggttaa

SEQ ID NO: 292244 - DNA, 763 bp, Unknown
  Bacterial polypeptide expressing nucleotide sequence isolated from the Sargasso Sea
aatgagtaaaaaatattttggaactgacggaataagaggaaaagtaaatcaagaaaagataaatggagaaatgttttttaagtttggattggcagccggaacatattttaaaaatcaaaaaaagagtaaacaaattgctattattgctaaagacactagattatccggatatacattagaaccagctttagtgtctggattggcctctactggagtacatgtttatacctttggacctttgccaactaatggattggccatgcttacaaaaaaaatgaaagctaatatgggtataatgatcactgcatctcataatccttactatgacaatggactgaaattatttggtccggatggcttaaaattatctgataaaatagaaaaaaaaatagaaaagcttattgattcaagaataaatgataaattatcaaagccaaaaatattaggaagagtaaaaagattagagaatggttcagaaaaatataccgaaattttaaaatcaaactttccaagtcaatttaatctaagaggtttaaaaatcgctatagattgtgcaaatggagcagcttataaagttgggccaaaattattaagatcattaggagcagtagtttatgaagtcgggactgcacctaatggacttaatataaatgaaaaatgtgggtctacttttccaaataaaattagatatttaacaaaaaaaactaaggcacatattggaatttctttagatggagatgcagatagaatcattatatgtgat

SEQ ID NO: 292245 - DNA, 840 bp, Unknown
  Bacterial polypeptide expressing nucleotide sequence isolated from the Sargasso Sea
gctcactaaagaaatgaaagctaatatgggtataatgattaccgcctctcacaatccccattatgataatggattaaaactatttggtcctgatggaatgaaattatcagataaaatagaaaagaaaattgaaagtcttattgacaaaaatatatcaaaaaatctctctaaacctgaaaaattaggtagagttaaaagattggaaacaggaactaaaaaatatattaaaatattaaaaaaaaattttactaaagaatttaatttaagaggattaagaatcgtaatagattgtgcaaacggagcagggtataaagtgggtcctgaattattaaaatccttaggagctaaagttatagcaataggtgtaaatcctaacggtttaaatattaataaaaattgcggctcaacatttccaagcaaaattagatcagcagtaaaaaaatataaagctcacataggtatctccttagatggagacgctgatagaattattatgtgtgatgagaaaagcaatgttattgatggagatcaaattattgcggcactagctacaagatggaaaaataaaaaaatgttaagaggtggggtagttggaaccttaatgtcaaattatggtttagaaaaattttttaaatctaaaggaattaaatttattagagcaaatgttggtgacagatatgtaaaagaaaaaatgcaaaaatataaatttaatttaggtggagaacaatcaggccatataattttgggtaaatttgcaacaaccggggatggattgcttgttgctttagaagctttatttgcattaaggaaaggaaaaaaagcaagcgaattttttgataa

SEQ ID NO: 292246 - DNA, 843 bp, Unknown
  Bacterial polypeptide expressing nucleotide sequence isolated from the Sargasso Sea
aaacttcatccaagaaaaaattaaaaattgttttagattgtgcgaatggagcaacatacaatatagctccaaatttattctgggagttaggtcataatataatcgccattaataataatccagacggattaaacattaataaaaattgtggtgcagttgacgttaaatcactctctcaacatgtgataaaagaaaaggctgatattggttttgcatttgatggtgatggagataggttaatagttgtagatgaagaaggaaaagaagttgatggtgataaaattatagctttattgtgtaagagttatgtaaaaccaaagaaaaaacctaatcaacatgatgttattataacggttatgtctaatatgggattagaaaaatatctcacaaataaattaaaattaaagattaaacgcacatctgttggagatataaatgttataaatcaaatgaagaaatctaaatctatgataggtggtgaacaatcaggacatataatattgtcagaacattctaatactggcgatggaattttagcagctttaaaaattactgaaattttgatatcaaataaaaataaggcgagtaaactttttgatttgtacaatgattttgcacaagaaaaaattaatttgatttataaaacaaagaataccaaactgttaaaaattcttggtaaattaaaaaatgataaactatataataatagaaatataagatctcttgttaggttatctggaactgaaccattagtaagaatactagttgaaggacaagaaatttccgaagttaaaaagaagtctttagaaataaaagaattagtaaggccttatcttggttaat

SEQ ID NO: 292247 - DNA, 857 bp, Unknown
  Bacterial polypeptide expressing nucleotide sequence isolated from the Sargasso Sea
gagggtgaaatcaagttttcctagtggtatgaggctcgatggcatgaaagtggtcatagactgcgcaaatggagcgggttatcgtgcagcgccagaagttttatgggaacttggggcagatgttattccgattggtgcaaacccaaatggtttaaacattaataaaaactgtggatccacaaacccacaaattgcggcagaagctgtagtttctcgtggcgcggacgtgggaatttgccttgatggagatgctgataggatcattttaatcgactctgatggaaatactgctgatggggatcaaattatgggtgtcatcgcctctaggtggtctgaggatggattgcttgctggagccggaatagcaacgaccgtaatgtcgaatttgggactagaacgttttctgaatcaacgtggtatttcgatggaaaggactcaggtcggtgatcgctatgttgttgagcatatgcgaaaatctggctttaatctcggtggggagcaatcaggtcatataattttgagtgatttttccacaactggtgatggccttattgcagggttgcagtttttggcagaaatcattcgatcagagcgcagctccaaagaactcgctcgcgtatttgagcctgttccgcagctattaaaaaatgcgtcctatcaggctggatctgaccccctcgctaagcccagtgtgataaaagctataaaggcagccgagtcaaagcttaaaaataatggtagattattgatccgtaaatcaggcacagagccgcttattagagttatggcagagtctgaagatgaagaagcaatgagtgtagcggttgacagtgtggttgctgaaattaccgcttgaa

SEQ ID NO: 292248 - DNA, 892 bp, Unknown
  Bacterial polypeptide expressing nucleotide sequence isolated from the Sargasso Sea
tgctttcaatggggtatggatgttttctttatttggcccgattccaactcccgcagtctcaatgttaacaaagtcaatgcgagctgatcttggaattatgattactgcatctcataatcagtatcaagataacggtttaaaaatattcgatagacttggcaacaagctctctgatgagacagaactagagatagaaaacctgatggaaagtaaacttgaagagtcactagctaagcctgaaaatatagggagagctcaaagattagaagacgcaaatggcaggtacatagaatatttaaaaaatacttttccaaagacccaacgccttgatggattaaaaattgttgttgattgtgccaatggtgcttcatatgtatcagctcctctaattttgtgggagttaggagcagaggtcattaaaattggaactcaaccaaacggaataaatatcaatgacaagtgcggctcaactaatacagatctattggcaaaaactgtattagaagaaaatgctgatataggaattgcattagatggagatggtgaccgcttagcaatagttgatgaaaaaggaaacgtcattaatggtgaccaaattcttgcgttgctagcattacatttgagcaaaaaaaacttactacaaaaaaataaagtcgttggaacatcaatggccaatatagggttagaaaacctactcaatgaaaataacattgaattagtcagagcaaatgttggtgataggtatgttaaagaaaaaatgatacatgaaggtctaaatttaggtggagagcaatcaggtcatattatcatgagggattatacgtcctctggtgatggtatcattgttgccctacaagtacttgcaattattacgcaaaaagaaaaacaagct

SEQ ID NO: 292249 - DNA, 796 bp, Unknown
  Bacterial polypeptide expressing nucleotide sequence isolated from the Sargasso Sea
ttagtttctggtttgacatcagctgggatgcacgttttcacttttgggccattaccaacaaatggtcttgcaatgcttacaaaaaaaatgagagctaatatgggaattatgataacggcatcgcataatcctttttatgataatggtttaaaattatttggaccagatggcctaaaattgtctgataaaatagaaaaaaaaatagaaaaacttattgattctaaaatatcaaaaaaattatcaaaccctgaaatattaggcagggttaaaagattagagaatggttcaaataaatatcttgaaattttaaaaacaaatttccctaaacaatttaatttaagaggtttaagaattacaatagattgtgctaatggagccgcatataaagtaggtcctaaattgtttagatcattgggtgccatagttcacgaaattggaacttctccaaatggatttaatataaataaaaaatgtggttctacatttccaaataaaattaaatatcacacaaaaaaaaataaatctcatatcggagtttctttagatggtgatgcagatagaattatcatttgtgatgaaaaggggaatattattgatggagacaaaataatagctatgctagcaacaagatggaaaagaaaaaaaattttaaaaggtggtgttgtaggtaccttaatgtcaaactatggattacaaaaatatttttctaaaaacaagataaagtttttaagatctaaagttggtgatagatacgtaaaagaagtaatgcagaaaagtaaatttaatttaggaggag

SEQ ID NO: 292250 - DNA, 434 bp, Unknown
  Bacterial polypeptide expressing nucleotide sequence isolated from the Sargasso Sea
aaaaattaaatttataagagcaaatgttggagatagatatgtaaaagagtccatgaaaaaaaataaatgtaacttgggaggagaacagtcaggtcatataatacttggaaattttgcaactactggtgatggtattcttgttgctttggaagttctttattctatgagaaagggaaaaaaagcaagcgaactattaaataattttaatcaaataccacaaaaacttgtaaacattaatgtaaaagataagttgattataaattctaaaagctgcaaaaaatctattaaacatgctaaaaaaattttaaaaaatagaggaagaatattggtaagaccatcaggtacagaaccaaaaattagaataatgtgcgaaacaaacgacaaaaaattaatgacgaaatgtattaatcttataaaacaatctataaattaaa

SEQ ID NO: 292251 - DNA, 811 bp, Unknown
  Bacterial polypeptide expressing nucleotide sequence isolated from the Sargasso Sea
ttaagaggaacaaaaatagttttagattgtgctaatggagcttgttataaagctgctcccaaactacttaaagagctaggagcaaaagttatccctattggtgtaaaaccagatggttttaatattaatgaaaagtgtggatcaacttgtccatctaaaattagattggctgttaaaaaatttaaagcacacgttggtatttcttttgatggagatgcggacagaataattatgtgtgatgaaaaaggtaaaattatagatggagatcagattatagctatgcttgctagaagatggaaatcaaaaaaaattttgaaaggtggagtaatcggaactcttatgtctaattatggtttagaaaaatttttaaagaatgaaaaaattaaattttttagatctaaagtaggagatagatacgtaaaggaaaaaatgagaaaactaaaatttaatttgggtggagaacaatccggacatataattttaggtaaatttgcaactactggcgatgggttactggtggcactagaagtattattctctctaagaaaaggaaaaaaggccagcaagttattaaacgtctttaaaccgctacctcagattttagagaacgttatcgttaaagataaaaatgtaattaataaaacaaaatgcaaaaaggcgattaaaaaagcaaataagctcatgggttataatggaagacttttaattagaaaatctggaactgaaccaaaaattaggattatgggtgaatcttatgatagaagtttagttttaaaatgtataaaaataatcaagagatcaataaaataaa

SEQ ID NO: 292252 - DNA, 854 bp, Unknown
  Bacterial polypeptide expressing nucleotide sequence isolated from the Sargasso Sea
caaaagcacggcgccaggcctagaccttaatggaatgaaaattgtggtggataccgccaacggtgcggcttaccacattgccccggatgtgttcgaagagctaggcgccactgtggtgccgctggctaatcagcctgacggcttcaatattaatcgcgattgtggctctactcatcccgaggcgttgcagcgcaaggttgtggaagaaaaagctgatctcggtgtggcgctggatggcgatgcggatcgattattgatggtcgatcatgctggtaacctagttgatggtgaccagctgttgtttgtggtggcccgcgatcgcaaagaaaacggcgcggaaatggatggggtcgtaggaacgctaatgtccaacttcgggttggagctggcgctgcaggctgaaggcattgaatttgtacgcgccaaggtcggtgatcgttatgtcatggagcagttggataagcgtggctggaacatcggtggcgaatcctccgggcatctggtgtgcctggattgcaccaccacgggggatggaaccgtctctgcattgcaggtgttggcggccttgtcccgtcgtaagcaaggcttggccgagtctgtcgcagacgtgtccatgctcccccagaagatgatcaatgtacgtggcccaaatcgtgatggatttatggaaaatggggatgtgcaggcggccatggcagatgtagaagataggctggccggtaatggccgtatcctgttgcgaccctccggcactgagcctttggtgcgggtgatgattgaaggcaaggatgtggatcgggtggaaagcctgtgccgtgagctggccgaagtggtggaaaaggcaatcaattaag

SEQ ID NO: 292253 - DNA, 880 bp, Unknown
  Bacterial polypeptide expressing nucleotide sequence isolated from the Sargasso Sea
aaaagacttgaggatggtaatgatagatatattaaaatattaaagagaaattttcctaaaaatttcaaattaactggaactaaaatagttttagattgtgctaatggagcaggatatatagccgctcctagattgctcaaagaacttggagcaaaagtaatctcaattggagcaaaacccaatggatttaacattaatgatagatgcggatcaacctatccttttaaaattcaatcagcggtaaaaaaatttaaagcgaatgttggcatttcttttgacggtgatgcagacagaataattatgtgcgatgaaaatggaaaaatcatagatggagaccaaataattgcaatgattgctcaaagatggaaatctaaaaaaattataagaggtggtgtaattggtacattaatgtctaactatggattagaaaattttttaaaaaataaaaaaattaagtttttccgatcaaaggtaggggacagatatgtaaaagaaaaaatgaaaaaattaaactttaatttaggaggtgaacaatcgggccatataatacttggaaagtttgcaactacaggagatggattaatggttgctttggaggttcttttttccctaagaaaaggaaaaaaagctagtgaattgcttaatgtttttaaacctttgccacaaatattagaaaatataaacgttagggataaaaatgttattaacaaatctgaatgtaaaaaagcaattaaaaagtcgaataagttgatgaatggatatggaagattattagtcagacgatcaggaacagaacccaaaataagaattatgggagagtcttatgataagaatttaattttaaaatgtataaaaataattaagaaatcgataaaatagt

SEQ ID NO: 292254 - DNA, 721 bp, Unknown
  Bacterial polypeptide expressing nucleotide sequence isolated from the Sargasso Sea
tatgaaataggtacttctcctaatggtttaaatattaatcaacaatgtggatcaacatttccaaatcaaattagaaatttaacaaaaaaaaataaagcagatattggaatatctttagatggagatgccgataggataattatatgtgatgaaaaatgtaatattataaatggtgataaaattatagcagctttggcagcaagatggaaaagaaaaaaaatattgaaaggcggagttattggaactttaatgtcaaattatggattagaaaaatttttaataaaaaataaaataaaatttttaagatcaaaggttggagatagatatgtaaaggaattaatgcaaaaaaataggtttaatttaggtggagagcaatctggtcatattattcttggcaaatttgcaactacaggagatgggctattggttgctttagaaattttattttcgatgagaaaaggtaaaaaatcaagcgagttatttaaaaattttcaatcaacacctcaatcattagaaaatatagaagtaaaagataaatcaataattaatagcattaagtgtagacaggctatcaaatttgcaaataatttaattaatggaaaaggaagaatgctggttaggaaatctggtactgagtccaagataagaataatgtgtgaaagtgaaaataaatttttactttctaaatgtataaatattgtaaaaaaatcaattaagtaat

SEQ ID NO: 292255 - DNA, 845 bp, Unknown
  Bacterial polypeptide expressing nucleotide sequence isolated from the Sargasso Sea
tttggagagtagtgtgcagaaaaaatattttggaacggatggtattcgtggacaggtaaatgaattcccaatgactgctgaaaatgcccttaaaataggtatggcggctgggcaattttttaaaaataacacaaaaaaggtacatcgtgttgtcgttggtaaggatacgaggctgtcaggttatatgtttgaaagtgcattaactgcgggcttgacttcgatggggatgaacgttttgcttcttggtccagttcctactccagcggtcggtatattaaccccatctatgcgtgcagatctgggcataatgatttcagcaagtcataattctcatgaagataatggaataaaattttttggtcctgatggttttaaattatcagatgaggcagagcaaaatatagaagaactgatcggcaaagaacttggaaatgtagagcttgttgatattggtcgggcaaaacgcattgaagatggattgtttcgatatgttgaacgggtaaaatcaagttttccaagtggtatgaggctcgatggtatgaaagttgtcatagactgtgcaaatggagcgggctatcgtgctgcgccagaagttttatgggagcttggagcggatgttattcctatcggtataaatccaaatggcttaaatattaataaaaactgtgggtccacaaatccgcagagagcagctgaagctgtagtctctcatggtgcggacgtaggaatttgtcttgacggtgacgctgataggatcattttaattgactctgatgggaatattgctgatggagatcaaattatgggtgtcatagcctccagatggtctaaagacggagtgctaa

SEQ ID NO: 292256 - DNA, 694 bp, Unknown
  Bacterial polypeptide expressing nucleotide sequence isolated from the Sargasso Sea
acacataaatgataagtgtggatcaacatttcctaataaaataaaatttttagttaaaaaaaataaagtaaatttaggcatatctttagatggagacgcagatagaattatattgtgcgatgaaaaaggaaaaataattgatggagatcaaataattgcaatgttggcaaatagatggaaaagaaaaaaaattctaaaaggaggagtagttggtactttaatgtctaattatggattagaaaattattttagagaacaaaagacaaaatttttaagagccgatgttggagataggtatgttaaagaaagtatgcaaaaaaataggtttaatctgggaggagagcaatcaggccacattatattgggaaaatttgcaacaacaggcgatggacttctagtagcattagaagttttattttcaatgagaaaaggaaaaaaagctagtgatttattaaatgtttttaaacctatgcctcaaattttagagaatatccttgtcagagataaaaatataataaataaattaaagtgtaagaaagcaattaaaaaagctaacgaattaatgggaagaaatggaaggcttttagttagaaaatctggtacagaaccaaagattaggattatgggagagtcacataataaaaatttgattataaaatgtataaaaataattaaacaatcaataaaatattga

SEQ ID NO: 292257 - DNA, 819 bp, Unknown
  Bacterial polypeptide expressing nucleotide sequence isolated from the Sargasso Sea
caaaaaaacttttccttaaaaggccttaaaatagcgatagactgtgctaacggcgcaggttacaagtcaggcccacaagtcctaaaatcgctgggcgctaaagtatataatattggcacttctccaaatggtttaaatattaatttaaattgtgggtcaacttttccaaataaaattaggtatttctcaaataaaaaaaaggttgatattggcatatcacttgatggagatgctgacagaattattatttgtgatgaaaaaggaaaaataattgatggagatcaaattattgcaatgattgctttaagatggaaaaaaaagcaaatattaaaaggtggtgtcgtaggcacactaatgtcaaattatggattggaaaaattattcaaagaaaaaaaaattaaatttattagagcaaaagttggagatagatatgtaaaggaagccatgaaaaataataaatgtaatcttggaggagaacaatctggtcatataattcttggaaattttgcaactaccggcgatggaatacttgttgcattggaagttctttattcaatgagaaagggaaataaagcaagtgaattatttaataattttaaacaaataccacaaaagttagttaacatacatgttaaggataaattgataattaattctcaaaaatgtaaaaaaactatccttgaagtgaaaaaacttttaaaaaataagggaaggattttagtaagaccttccggtacagaacccaaaataagaataatgtgtgagtcaagtgataaaaaattaatgataaaatgtattaatcttgtaaaaagatccata

SEQ ID NO: 292258 - DNA, 664 bp, Unknown
  Bacterial polypeptide expressing nucleotide sequence isolated from the Sargasso Sea
tttccaaataaaattaaatatcatacaaaaaaaaataaatctcatattggaatttctttagatggtgatgcagatagaattattatttgtgatgaaaagggcaatattattgatggagataaaataatagctatgctagcaataagatggaaaagaaaaaaaattctaaaaggtggtgttgtaggcactttaatgtcaaactatggcttacaaaaatatttttttaaaaataagataaagtttataagaactaaagttggtgatagatatgtaaaagaagcaatgcagaaaagtaaatttaatttaggaggagaacagtctggtcatatcatccttggcaaatttgcgactacaggtgatggtttattggtagcattagaaattctcttttctttgaggaaaggaaaaaaagcgagtgagatatttgaaaatttcgcacttactcctcaattgttagaaaatgttgaagtcaaagataaatcaataattaacagtcttaaatgcaaaaatgcaatcaaaaaagcaaatagtttaataaaaggaaaaggtagaatgttagtaagaaaatctggaacagaaccagtagtaagaataatgtgtgaaactgaagataaaaatatgctatcaaaatgtgtaaatattgtaaaaaaatcgattatttaaa

SEQ ID NO: 292259 - DNA, 822 bp, Unknown
  Bacterial polypeptide expressing nucleotide sequence isolated from the Sargasso Sea
cgaagaatatattaaaattttaaaaaaaaattttcctaaaaattttagtcttgaaggcataaggatagcaatagattgtgcaaatggtgctggttataagtcaggtcctaaacttttgagatctttaggagcaaaagtgtacgaaattggaacatccccaaatggttttaatatcaataacaaatgtggttcaacatttccaaataatattaaaaattttgtaaaaaaatacaaagtagatttaggcatatcacttgatggagatgctgacagaataattgtatgtgatgaaactggtaaaattattgatggagatcaaatcattgctacacttgcaaaaagatggaaaaggaaaaaaattctcaaagggggagttgttggaacattaatgtcaaattatggtttacaaaatttttttactaataataaaattagcttcgttcgagcaaatgtaggagatagatatgttaaagaaaaaatgcaaaaattcaaatttaatcttggtggagaacaatctggtcacattattcttggaaaatttgcaactacaggagatggccttttagttgcgttggaaattttattttctatgcgaaaaggtaaaaaagctagtgaattatttaatgtatttaaacctacgccacaagttctagagaatgtaacagtaaaagataaatcaattttaaaatcattgaaatgcaaaaaagcaatttctaaagcttcaaaattaatgaaaaaccaaggaaggatgctggtgagaaaatcaggaaccgaaccaaaaataagaattatgggcgagtcagataataaaaaattactaaa

SEQ ID NO: 292260 - DNA, 536 bp, Unknown
  Bacterial polypeptide expressing nucleotide sequence isolated from the Sargasso Sea
attggccgtaaagaagctaaaagcaaaccttggcatttcttttgatggcgatgctgatagaattattatgtgtgatgaaagaggaaaaattattgatggagaccaaattattgcaatgctagcaagaagatggaagtccaaaagaattcttaaaggaggggtggtagggacattaatgtctaattatggactagaaaaatttttaaaaaatcaaaaaataaaattctcaagatcaaaagtaggcgacaggtatgtcaaagaaaaaatgaaaagactaaattttaatttaggtggcgagcaatctggacacattattttgggtaaatttgcaaccactggtgatggtttgcttgttgcgcttgaggttttattttctttaagaaaaggaaaaaaagccagtgacttactggatgtttttaagccagtaccacaaattttggaaaatgttattgtaaaaaataagaatataataaataaatttaagtgcaaaaatgctgtcaaaaaagctaataaattaatgggccaaaaaggtagaa

SEQ ID NO: 292261 - DNA, 799 bp, Unknown
  Bacterial polypeptide expressing nucleotide sequence isolated from the Sargasso Sea
atgtctaggaagtattttggcactgatggtgtacgtggcaaagtgggcgagtttccaattacgcctgaatttgcgatgaagttaggctgggccgctggtcgtgtgttatcacagcgtggtaccaaaaaagtattaattggtaaagacacccgcatttcgggttatttattagaaaccgcattagaagctggtttagtggctgcgggcgtcgatgtacgtttattgggaccaatgccaacacctgcagtgtcctacctgactcgtactttccgtgctgaagctggtattgtcatcagcgcatcgcacaatccttattatgataacggtattaagtttttctcagctgacggtacgaagttacctgatgaagtagagctggctattgaagaagcgatggaacagcctatggtttgcgaatcgtcagagcgtttaggtaaagccatgcgtattgacgatgctgccggtcgctatattgagttctgtaaaagccatatgccaaaccatttatccttaaatggtttaaaagtggtactggattgtgctcatggtgccacttaccacatagccccgaatgtattccgcgaattaggggcagaggttcaggccataggcgttagtcctaatggtttaaatattaacgaccattgtggtgccactcatactgatctgttgcaacaaacagtggttgaaactggtgctgacttaggtatagcttacgatggcgacggtgaccgtgtgatgatggtggatcacacaggccgggtgattgatggggacgaaatcgtctatatcattgccc

SEQ ID NO: 292262 - DNA, 869 bp, Unknown
  Bacterial polypeptide expressing nucleotide sequence isolated from the Sargasso Sea
aatgcatatttttactttaggacctttgccaaccaatgggcttgcaatgttaacaagatcaatgaaagcaaatatgggcatcatgattactgcttcacataatccttattatgacaatggtttgaaattatttggtccagatggaatgaaactatctgatcaaatagaaaaaaaaattgaaaagctaatagatgctaaaaacaacaaacaacttacagaccccagattattgggaagagttaaaagattagaagatggtaacgataagtatattgagatattaaaaaaaaattttcctaacaattttaatttaagaggcacaaagatagttttagattgtgcaaatggtgctggctataaatcagctcctaagttacttagagagctaggagcaaaagttatatcaattggtgtgaaacccaatggttttaatattaatcaaaaatgtggatctacatatccatctaaaattcagacagtagtcaaaaaacacaaggcgcacgcgggaatttcttttgatggtgatgctgacagaataataatgtgtgatgaaaatgggaagattatagatggggatcagattatcgcgatgttggcaaaaaggtggaaaataaaaaaaattttaaaaggcggcgtggtagggacgttaatgtcaaattatggactagaaagttttttaaagaaggaaaaaattagattttacagatcaaaggtaggagataggtatgtaaaagaaaaaatgcaaaaattcaattttaatttaggtggagaacaatcaggtcatataattcttggtaaatttgcaactacaggtgatgggttaatggttgcgttagaagttttattttcttttaagaaaaggaaaaaaa

SEQ ID NO: 292263 - DNA, 562 bp, Unknown
  Bacterial polypeptide expressing nucleotide sequence isolated from the Sargasso Sea
aaaggttgtagatggtgaccaaattatagctatgcttgctcaaagatggaaatcaaaaagaattttgagaggtggagtaattggaactttgatgtctaatcatggtttagaaaattttttaaagaataaaaaaataagattttttagatctaaagttggagatagatatgttaaggaaaaaatgaaaaggttcaattttaatctaggaggagaacaatctggccacataattttgggcaaatttgctacaacaggagatggattgatggttgcattagaggttttattttctttgagaaaaggcaagaaagccagcaagttactaaatgtttttaaacctttgcctcaaattttggaaaatgtttttgtgaaagataagaacataatcaataaaaataaatgtaaaaatgcaattaaaaaagcaaacaagcttatgggttatgatggaagaattttagttagaaaatctggaactgaaccaaaaattaggattatggctgagtcacataataaaagattaattttaaaatgtataaaaatgattaaaagatcaataaaataa

SEQ ID NO: 292264 - DNA, 933 bp, Unknown
  Bacterial polypeptide expressing nucleotide sequence isolated from the Sargasso Sea
aatccatattatgataatggtttaaagctatttggacctgacggacttaaactatctgacaaaattgaaaaaaaaatagagaagttaattgactcaaaaattacaaaaaacctgtctaaacctatcgaactgggtagggttaaaagactagaagatgcaaatgataactatataaaaatattaaaacaaaatttcccatcctcatttagtttaaaaggtattaaaattgctttagattgtgccaacggagctggctacaaagctggtccagatttatttaaatcattaggtgccaaagtatttaaaaccggcacttctcctaacggattaaacattaatcttaaatctggatcaacttatccaagtaaaatttgtaaaatgacaaaaaaaaacaaggcccatataggaattgcattagatggagatgcagacagaataatagtctgtgacgaaaaaggtagaattattgatggagataaaattcttgccatgttgggagagagatggaaaagaaaaaaaattttaaaaggtggagtgattgggacactaatgtcgaattatggtttagaaaatttttttaaaaataacggaattaaatttttaagatcagacgtaggagatagatatgtaaaagaaaaaatgaaaaaaaataagtttaatttaggtggagaacaatcaggtcacataattcttgggaagtttgcaactacaggagatggattactggttgccttagaaattcttttttcattaagaaaaagaaagaaagctagtgaactttttaataaattcaaacccactccacaaatattggaaaatatagaagttaaagataaatcaataattaatactcccaaatgtaaaaaagcaattaatgaagcaaataaaataattaaaaataaaggtagaatattagttagaaaatctggtact

SEQ ID NO: 292265 - DNA, 733 bp, Unknown
  Bacterial polypeptide expressing nucleotide sequence isolated from the Sargasso Sea
aaaatgagtgcaaatatgggtataatgataactgcatctcacaatccttattatgataacggtttaaaattattcggacctaatggcttaaaattatcagataaaattgaaaagaagatagagaaattgatagattccaagattataaaaaatctttcagaaccaaataccttaggcagagttaaaaggttagaagatgcaaatgatagatatattaaaattctaaaaaataattttccgaaaaattttcatctaaaaagaatgagaatcgcaatagattgtgcaaatggagctggttataaatcgggaccacttttattaagatctttaggagcaaaggtttatcaatttggtacttctccaaatggttttaatattaatgacaaatgtggctcaacttttccaaaaaaaataaaatatttagtaaaaaaacataaagcacacataggcatttcactggatggagatgctgatagaattattgtttcagatgaaaatggaaatgttattgatggagatcaaataatcgcaatgctagcaacaagatggaaaagaaaaaaaattttgaaaggcggagtaattggaacacttatgtcaaattatggattgcaaaattatttgaaaagccaaaaaataaaatttattagagcaaaggtaggcgatagatatgtcaaagaaaaaatgcaaaattataattttaacttaggaggtgagcaatcaggacatattatac

SEQ ID NO: 292266 - DNA, 833 bp, Unknown
  Bacterial polypeptide expressing nucleotide sequence isolated from the Sargasso Sea
tgcaaaggatactagattatctggatatacgttagaacctgctttggtatctggattggcttcagcaggaatgcatgtctatactcttggacctctaccaaccaacggtctagcgatgttgacaaaaaagatgagagcaaacatgggcattatgataacagcctcccataatccattttatgataatggtcttaaattgttcggaccagacggtttgaaattgtctgacaaaattgaaaaaaaaattgaaaaattaattgactctaaaattgtaaaaaatctttcagatccaaaaacattgggtcgtgtaaaaagactagaagatgcaaatgatagatatattaaaatattaaaaagtaattttccaaaaaattttaatttaaaaggaatgaaaatcgcgatagattgtgcaaatggagctggctataagtctggaccaaaacttttaagaagtttaggagctaaggtttttgaatatggtacttcaccaaatggttttaatattaattataaatgtggatctacttttccaaacaaaataagatttttagtaaaaaaaaataagacacacataggtatatcgttagatggtgatgcggatagaataatagtgtctgatgaaaagggaaatataattgatggtgatcaaattattgcaatgttagcaacaaggtggaaaagaaaaaaaattttaaaaggtggtgtaataggaactttaatgtcaaattatggtctacaaaaatattttaaaagccaaaaaataaaatttattagagctgatgtgggagatagatatgttaagggaaaaaatgaaaaaaaaaaaaatttaattt

SEQ ID NO: 292267 - DNA, 817 bp, Unknown
  Bacterial polypeptide expressing nucleotide sequence isolated from the Sargasso Sea
gagagtttgatagaaaaaaaaataatatcaaatctttcaaaaccagagaaattaggaagagtaaaaagattagaaactgggactaagaattatattaaaattttaaaaaaaaactttaataaagaatttaatttaagagggcttagaatagtaattgattgtgcaaatggagctggttataaagctggtccagagctactaaaatctttaggagcaaaagtaatcgcaatcggcgtaaaacctaatggattaaatattaacaaaaattgtggctctacatttcctgaaaaaataaaattagcagttaaaaaatataaagctcacataggtatttcattggatggtgatgcagatagaataattatgtgtgatgaaaaaagcaatattattgacggagaccaaattattgctgctttagctactagatggaaaaataaaaaaatgttaaagggaggagtagttggaacgctcatgtctaattatggtcttgaaaaatatttaaaagagaaaggtattaaatttatacgtgctaatgttggtgatagatatgtaaaggaaaaaatgcaaaaaaataaatttaatctgggaggtgagcagtctggtcatataattttaggcaagtttgcaacaacaggagacggattacttgttgcattagagtctttatttgcattaagaaagggaaaaaaagctagtgaatttttcaaaaaatttaaaaaaatacctcaaatattgaaaaatattgatgtaagagataagaatataattaatagaacagaaattaaaagatcaatacaactggctacaaaactcatta

SEQ ID NO: 292268 - DNA, 607 bp, Unknown
  Bacterial polypeptide expressing nucleotide sequence isolated from the Sargasso Sea
ttagatggcgatgccgatagaattattatgtgtgatgaaaaaagtaatattatagatggagatcaaattatcgctgctttagctacgagatggaaaaagaaaaaaatgctgaaaggaggggttgttggaacattaatgtctaattatggtcttgaaaaatacttaaaaaaagaaggtattaaatttatacgtgctaatgttggcgatagatatgttaaagaaaaaatgcaaaaaaataaattcaatcttggcggtgaacagtctgggcatattatcttaggtaaatttgcaacgacaggggatggattacttgtagctttagaaactttatttgctctaagaaagggaaagaaggctagtgagttttttgaaaaatttaaaaaaactcctcaaatattgaaaaatattgaagttaaagataaaaatataatcaataaattagaaattaaaaattcaattaaactagcaacaaaattaattaatggtaatggaagaattttagtaagaaagtcaggtacagaatcaaaaataagaataatgggtgaaagtgagaataaaaatcttctatctaagtgtgtaaatattgtttcaaaaaagattaaataat

SEQ ID NO: 292269 - DNA, 782 bp, Unknown
  Bacterial polypeptide expressing nucleotide sequence isolated from the Sargasso Sea
ggtcggacagccccccatcacgccggattttgtgctgcgcctggcccatgcggtgggccgagtgttgcgccgtacggaagagcgcccgacggtgctcattggcaaggacacgcgcatctcgggctacatgcttgaaagcgcgctggagtctggcttcaactcggccggggtggatgtggtgctgctggggccgctgcctacgcctggcgtggcgtatctgacccgtgcccagcgcgccagtctgggtgtggtcatcagcgccagccacaacgcctatcccgacaacggcatcaagtttttcagtgcgcaaggcaccaagctgtcggacgcttgggagctggcggtagaggccgcgttggctgagccccctgtttgggtggactctgccagcctgggcaaggcgcgacgcctggatgacgctgctgggcgctacatcgagttctgcaaaagcacctttccccaggacctgacgctcaaggggctgaagatcgtggtggatgctgcccacggtgccgcgtaccaagtggcgcccaaggtcttccacgagctgggtgcagaagtgctgtcgattggctgcgcgcccgacggcctcaacatcaaccacgaagtgggcgcgacacatcccgacgccttggtccgcgccgtacgcgctaaccgtgccgactatggcatcgcgctggatggcgacgcagaccggctgcagatcgtggacgccacagggcggctgtacaacggcgacgagctgctgtatctgatggccgcagaccgcatgggccgtgacg

SEQ ID NO: 292270 - DNA, 725 bp, Unknown
  Bacterial polypeptide expressing nucleotide sequence isolated from the Sargasso Sea
agtgatttctattggagtaaaaccaaatggacttaatataaatgagaaatgtggatcaacatatccctcaaaaataaagactgcagtaaaaaagtataaagcaaaaatcggaatagcatttgatggagatgctgacagagtaattatgtgtgatgaaaaaggaaaaataattgatggtgatcaaattattgcaatgttggctcgtcgatggaaatctaaaaaaattttaaaaggtggtgtaattggaacattaatgtctaattacggtctagaaaaatttttaaaaaatgaaaaaataagattttcaagatccaaagttggagacagatacgtaaaagaaaaaatgaaaaagttaaattataatttgggtggtgaacagtctggccatattattttaggaaaatttgctacaactggggatggattacttgtagccttagaggttttgttttctcttcgaaagggcaaaaaggccagccaacttttaaaagtttttaaaccattaccacaaacattagtaaacatagtggtaaatgataaaaatgtaataaataaatcaacatgtaaaaaggcaataaagaaagcaaataagctcatgggtcagaaagggcgagttttagttagaaaatctggaacagaaccaaaaattaggattatggctgagtcatatgataaaagtttagttttaaaatgtataaagacaataaaaacttctattaaataaa

SEQ ID NO: 292271 - DNA, 921 bp, Unknown
  Bacterial polypeptide expressing nucleotide sequence isolated from the Sargasso Sea
tatgcatggtttatacactggggacccttaccaactaatgcgttagctatgttaacaaaagagatgaaggcaaatatgggtataatgattaccgcttctcataatccacattttgacaacggtttaaaattgtttggtcctgatggaatgaaattatcagataaaatagaaaaaaaaattgagagtctcattgataaaaaaatctcaaaaaatctctcgcattctgaaaaattaggaagagttaaaagattagaaacaggcactagaaattatattaaaatattaaaaaaaaatttcacaaaagagttcaatttaagaggactaagaatagtaatcgattgtgcaaatggcgctggttataaggcaggtcctgaattactgaaatcattaggagccaaagtgatagcgataggtgttaaaccaaatggtttaaatattaataaaaaatgtggatcaacttttccaagaaaaattagatatgctgtaaaaaaatataaagcacatatcggaatatctttagatggagatgctgacagaataataatgtgtgatgaaaaaagcaatataatagatggagatcaaattatagctgctttagcaacaagatggaaaaataaaaaaatgttaaaaggaggagttgttggaacattaatgtcaaattatggtttagaaaaatacttgaaatcaaaaggaattaaatttttaagagcaaatgttggagatagatatgttaaagaaaaaatgaaaaaatatagttttaatttaggtggtgaacaatcaggacatattatcttaggtaaatttgctactacaggagatggtttgttagtagctttagaagctctttttgctttaagaaaaggaaaaaaggcaagtgaattttttgaacaatttaagaaaacacctcaactcttaaaaaat

SEQ ID NO: 292272 - DNA, 831 bp, Unknown
  Bacterial polypeptide expressing nucleotide sequence isolated from the Sargasso Sea
gtatcaggattaacttcagctggtatgcatgtttacaccttgggacctctaccaacaaatggcttagcaatgcttactaaaaccatgaaagctaatatgggtattatgataactgcatcacacaatccacattatgataatggattaaaattatttggcccagatggattaaaattatctgacaaaattgaaaagaaaattgaatgtttaatagatcaaaatattgtaaaaaatttatctgaacctgaaaaattaggaagggtaaaaagattagaaacaggaacaagagattatattcaaattttaaaaaaaaacttttctgaggagtttaatttaagaggacttaggattgttatagactgcgcaaatggagcaggttacaaagctggtcctgaattattaaaatcattaggagcaaaagtaatagctattggggtggagccgaatggcatgaatatcaataaacattgtggatcagtctatccacagaatattaaaagagcagtaaaaaaatataaagctcacattggtatttcattagatggtgatgctgatcgagtaataatgtgtgatgaaaaaagtaatataattgatggcgatcaaattattgctgctttggcctcaagatggaaaaataaaaaaatgttaagaggaggtgtggttggcaccttaatgtcaaactatggtttagagaaatactttaaaactcttaatattaattttattagagcaaatgttggtgataggtacgtaaaagaaaaaatgcaaatgtatttcatcaagaaaaatataagtttgaatatactttcatacacaaagtttttgttggat

SEQ ID NO: 292273 - DNA, 913 bp, Unknown
  Bacterial polypeptide expressing nucleotide sequence isolated from the Sargasso Sea
tcaaaatctctctaagccagaaaaattaggtagagtaaaaagattagagacaggtacaaatgattatattaaaatattaaaaaaaaattttaccaaagaattcaatttaagaggacttagaattgtaattgattgtgcaaatggagcagggtacaaagctggaccagaattattaaaatctttgggagccaaggtgattgcaataggagttaatcctaatggattaaatattaacaaaaactgtggttctacatttcctggaaaaataaaatctgcagttaaaaagtataaggcccatataggtatttcactagatggtgatgcagataggataattatgtgtgacgaaaaaagtaatattatagatggagaccaaattattgctgcattagcaacaaggtggaaaaataaaaaaatgttaaaaggtggggttgttggaacattaatgtccaattatggtcttgaaaagtatttcaaaaaaaaaagaataaaatttatacgtgctaatgttggtgatagatatgtaaaagaggtaatgcaaaaaaataagtttaatttaggtggagaacaatcaggacatattattctaggtaaatttgctactacaggagatggcttacttgtagccctggagtctttatttgctcttagaaaaggaaaaagagccagtgaattttttgaaaaatttaagaaaactccacaattacttaaaaatattgaagtaaaaaataaaaatataattaacaaacctgaaattaaaaaatctattagactagcttcaaaattaataaaaggtagtggcagaattcttgtaagaaaatcgggaacagaatcaaaaataagaattatgggggaaagtgaaaatagaagacttcttgtaaaatgtgttaatattattgtggaaaaaaattag

SEQ ID NO: 292274 - DNA, 733 bp, Unknown
  Bacterial polypeptide expressing nucleotide sequence isolated from the Sargasso Sea
attaaaaaatttatctaatcctaaattattaggcagagtcaagagactagagtatggatctgaaaaatacattgaaatattaaaaacaaattttccaaagcaatttaatttaagaggattaaaaattgcaatagattgtgccaatggagctgcttacaaagtaggaccacagctacttagatcattaggagctgaggtctatgaaataggaacttcccctaatggctttaacattaataataaatgtggatcaacatttccaaataaaattaaatattatacaaaaaagaccaaatcacatattggaatttctttagacggtgacgctgatagaattattatatgtgatgaaaaaggcaaaattattgatggtgacaaaataatagcaacaattgcagaaaggtggaaaagaaaaaaaattttaaaaggtggtgttgttggtactttgatgtcaaattatgggctacaaaaatactttgcagaaaataagataaaatttataagatctaaagttggtgatagatatgtaaaagatttaatgcagaaaagtaagtttaatttgggaggagaacaatctggtcacataattttgggtaattttgctaccactggtgatggattattagttgcattagaaattttattttctatgaggaaaggtaaaaaagccagtgaaatttttagaaacttcacacctacaccacaaatactagaaaatataaaagtaaaagat

SEQ ID NO: 292275 - DNA, 652 bp, Unknown
  Bacterial polypeptide expressing nucleotide sequence isolated from the Sargasso Sea
taaatctttagttaaaaaatataatgtcgatttaggaatatcattagatggagatgcagatagaatcattttatgtgatgagaaaggaaccatagttgatggagatcagattatagcaatgcttgccaatagatggaaaagaaaaaaaattcttaaaggtggagtaattggaacactaatgtctaattatggattacaaaattattttaaagaaaaaaaaataaattttttaagagccaatgtaggagacagatacgttaaagaaaaaatgaaaaaaaaaagatataatttaggaggagaacagtcaggccatattatattaggaaaattcgcaacaactggggatggattattggtagccttagaagttttgttctcgatgagaaaaggaaaaaaagccagtgaattattaaatgtttttaaaccaatgcctcaaattctagaaaatgttattgtaaaagataaaaatataattaatgaaatagcctgtaaaaaggcaattaaaaaggccaataagataatggctaaaaatggaaggcttttggttagaaagtctggaacagaaccaaaaattagaattatgggtgaagcacataataaaaaattgattttgaaatgtataaaaataattaaacaatcaataaaatattga

SEQ ID NO: 292276 - DNA, 772 bp, Unknown
  Bacterial polypeptide expressing nucleotide sequence isolated from the Sargasso Sea
ttgagtgaggatagaagatttggcacagatggtataagagggcctgttgattcaactatgaatcctttgtttgtaactaaattaggatgggctgcaggaacagttttattagaagagggcatatccagggtactcattggaaaggatactagaatttcaggttatatgcttgaatcagctctacaggctggctttatttcttctggaatggatgtaattctcttgggtccattaccaactcccggtgtttcttatttagctaactcaaataaacaagcaggagttgttattagtgcatcacataatttatttgaagataatggtattaaattttttaataaagatgggcaaaaattttcatcagaattagaaaaaagaatagagactaaattaacccaagaaattaagcctgtaaaatctctcaaccttggtaaaaccacaaggatgaatgatgctcaaggcaggtatattgaattttgtaaatctaattttaaagatctagatttgaatggtttatcagtgctcttagattgtgctcatggagctacctattctgttgcacctaaagtctttgaggagcttggagccaaggtacatacaataggcacagaacctgacggaattaatatcaatcaaaattgtggcaccactaatcctgaatacatacgtgaagagacgctcaaaggagcatatgaccttggaatatcttttgatggagatggggataggattcttttagtttcaaaggccggacgagtattagatggagatg

SEQ ID NO: 292277 - DNA, 739 bp, Unknown
  Bacterial polypeptide expressing nucleotide sequence isolated from the Sargasso Sea
ttgggagcaaaagtttataatgttggcacatctccaaacggtttaaatattaatcagaattgtggatcaacttacccaaaaaagattaaatctttagttaaaaaacataatgttaatttaggaatatcattggatggtgacgcagatagaatcattttatgtgatgaaaaaggaaaaataattgatggtgatcagattatagcaatgcttgctagtagatggaaaagaaaaaaaatactaagaggtggagtaattggaactctaatgtccaattatggattgcaaaattattttaaggaaaaaaaaataaaatttataagggccaacgtaggagacagatatgttaaagaaagaatgcaaaaaaataaatttaatttaggaggagagcaatctggtcatattatattgggaaaatttgcaacaacaggagatgggttgttagtagcgttagaagttttgttctctatgagaaaaggaaaaaaagctagtgaattactaaatgttttcaaacctatgcctcaaattttggaaaatattattgtcagagataaaaatataataaatgaattaagttgcaaaaaagcaattaaaaaagctaataaaataatgggaccaaagggaaggctcttagttagaaaatctggaacagagccaaagattagaattatgggagagtcttataataaaaatttaattttaagatgtataaaaataattaaaaggtcaataaaatattgaa

SEQ ID NO: 292278 - DNA, 769 bp, Unknown
  Bacterial polypeptide expressing nucleotide sequence isolated from the Sargasso Sea
aagttataaagcgggccctcaattatttaaatcgctaggggccaaagtatttaaatctggtacttctccgaatggattgaacatcaatctgaaatctggctctacttatccaaaaaaaatttgtcaaatgacaagaaaaaataaggctcatattggtattgcattagatggtgatgctgacagaataattgtgtgtgatgaaaaaggtaaaattattgatggtgataaaattctagcaatgttaggtgagagatggaaaaggaaaaaaattttaaaaggaggtgtaattggcacgttaatgtcaaattatggtttagagaaattttttaaaaaaaataaaattaagtttttcagatcaaatgtaggagatcgatatgttaaggaaaaaatgaaaaaaaaaaactttaatttaggaggagagcaatcaggccatattattcttggaaggtttgcaacaactggagatggattgttggttgccttagagattcttttttctttaagaaaaagaaaaaaagctagtgaactttttaataaatttaatcccactcctcaaatattagaaaatgttgaggttaaagataaatcaattatttatagtccaaaatgtaaaaaggcaatttatgaggcaaataaaattatgaaaaataaaggtagaatattagttagaaagtctggtactgaaccaaaaataagaataatgagtgagtcagaggactcaagtttaaacaaattatgtgttaatataataaaaaaatctattcagtaa

SEQ ID NO: 292279 - DNA, 810 bp, Unknown
  Bacterial polypeptide expressing nucleotide sequence isolated from the Sargasso Sea
aatgttaaaaaaatactttggaactgacggtataagagggatggttaatgatgaaaaaataaatggtgaaatgtttttcaaatttggtttagcagctggaacctattttaaaaatttaaaaaaaagtaaacaaattgctgttatagcgaaagatactagactttcaggttatactttagaaccagctttggtatctggactagcttctgcaggaatgcatgtttttactttgggaccattacctactaatggtttagcaatgcttacaaaaaaaatgaaagcaaatttaggaattatgataaccgcttcacataatccgtattatgataatggtttaaaattatttggtccagatgggctaaaattatcagataaaatagaaaaaaaaattgagaaattaattgactctaaaattacgaaaaatttaacacaaccaaaaaatttaggtcgagtaaaaagattagaagaagcatcaaatgaatatataaaaattttaaaaaaaaattttccaaatgattttaatctaaagggaataagtattgcaattgattgtgcaaacggtgctggctacaaaactgcaccagtattatttaaatctttaggtgcaaaagtttatgatgttggtgtttccccaaatgggctaaatatcaatgacaaatgtggttcaacttttcctaaaaaaataaaggcacttgtttcaaaaaaaaaagttgatcttggtatatctttagatggtgatgcagacagaataataatttgcgatgaaaatgcaaaagttattgatggtgatcaaattattgcaatgttagc

SEQ ID NO: 292280 - DNA, 865 bp, Unknown
  Bacterial polypeptide expressing nucleotide sequence isolated from the Sargasso Sea
aaccctttttacgacaatgttttaaaattatttggacctgatggtatgaagctatctgacaaaatagaaaaaaaaatagaaaaattaatagacacaaaaattactaaacaactttcaaatcctaagtttttgggtagagtaaaaagattagaggatggaaatgacaagtatattaaaatacttaaaaacaattttccaaaaaactatcatttaaaaggtaccaaaatagttttagactgcgcaaatggagcttgctataaagctgctcctaaattattgagagaacttggagcaaaggtaatttctataggagttaagccaaacggattaaatataaatgaaaaatgtggatccacatttccatcgaaaatcaaatcagctgtaaaaaaatttaaagcaaatgtaggaatctcatttgatggtgatgctgatagaataattatgtgcgatgaaaaagggaaaattatagatggtgatcagattattgcaatgttagctagaagatggaaatcaaaaaaaatattaaaaggaggagtagtgggaactttaatgtccaattatggtttagagaggtttttgaaaaatcaaaaaataaagttttcaagatcgaaagtaggcgatagatatgtaaaagaaaaaatgaaaaaactaaattataatttaggcggagaacaatctggtcatataatattaggaaaatttgcaaccacaggagatggattgttagttgcgttagaagttttattttctcttagaaaaggaaagaaggccagcagtttactcaacgtttttaaaccattacctcaaattttggagaatgttgttgtaaaagataagagtgtgataagtagtctaaagtgtaaga

SEQ ID NO: 292281 - DNA, 949 bp, Unknown
  Bacterial polypeptide expressing nucleotide sequence isolated from the Sargasso Sea
aatgagagcaaatatgggcataatgataactgcatctcacaatccatattatgataatggtctaaaattatttggtccagatggtatgaaattgtctgacaaaatagaaaaaaaaattgaaaaattaatagatgctaaaaacacaagacaacttacagacccaaaattacttggcagagtaaaacgtttagaagatggaaatgatagatatattaaaatattaaaaaaaaactttccaagtaattttcacttaaaaggtacaaagatagttttagattgtgctaatggagcatcatataaagctgctccgatgttattaaagcatctaggtgcaaaggtttttccaataggtgtaaaacccaatggtttcaatattaatgagaagtgtggatctacttatccttataaaattaggtcagctgtaaaaaagtacaaagcaaatgtcgggatagctttcgatggagatgctgacagaattattatgtgcgatgaaaaaggtaaaatcattgatggcgatcagattattgcaatgttagctcgaagatggaaatcaaaaaaaattttaaaaggaggagttattggcacattaatgtcaaattatggattagaaaattttcttaaaaatatgaaaatcaagtttttaaggtcaaaagtaggagatagatatgtaaaagaaaaaatgaaaaaattaaactttaatttgggcggagaacaatctggccatattattttaggaaaatttgctacaactggagatggtttgcttgtagcattagaagttttattttctttgagaaaaggaaaaaaagctagcaatcttttaaatgtttttaaacctttacctcaaattctagagaatatagttgtaagagataaaaatataattaataaaattaaatgtaaaaaagcaataaaccaagcaaataaaattatgggaaaaaatggaaga

SEQ ID NO: 292282 - DNA, 840 bp, Unknown
  Bacterial polypeptide expressing nucleotide sequence isolated from the Sargasso Sea
ctctcataatccgttttatgataatggacttaaattatttggacctgacggaatgaaattatcagatagcattgaaaaaaaaattgaaaaaattatagattctaagacgtcaacacacttaacaaaaccaacggaactagggcgagtgaaaagactagaggacggaaatgaacaatatctaaaaattttaaagagcaattttcctaaaaacttttcattaaaaggtatgaaaattgttttagattgcgcgaacggagctggttataaagcaggtccaaaactctttaaatccctaggtgccaaagtttttgttatgggtgcaaaaccaaatggattaaatattaatttaaattgtgggtcaactcacccggcaaaaattcaatcagcggtaaaaaaatataaagctaatattggtatatcattagatggtgatggtgacagagtcattatgtgtgatgaacacgggaaaatgatagatggagatcaaataattgcgatgttaggacagcgatggaaaagaaaaaaaattttaaaaggcggcgtaataggaacattgatgtcaaactacggattaaataacttttttaaaacagaaaatattaagtttttaagatcaaatgttggggatcggtatgttaaggaaacgatgcacaaaaataaatttaatttaggtggagaacagtcaggtcatattatacttggtaaatttgctacaactggggacggattgttagttgctcttgaggtcttattctctttacgaaaaggtcataaggccagtaaagttttacgagtatttaaaccaatcccctcaaaacttgttaatattgttgtaaaaga

SEQ ID NO: 292283 - DNA, 889 bp, Unknown
  Bacterial polypeptide expressing nucleotide sequence isolated from the Sargasso Sea
ttattgggacccgatggaatgaaattgtctgaccagatagaaaagaaaattgaaaagttaatagatgcacaaaatacaaaacagcttacaaatcctaacttgttgggtagagttaaaagacttgaagatggtaatgatagatatattgagataattaaaaaaaattttccaaataatttcaacttaaagggaaccaaaattgttttagattgcgctaatggagcgggttacatagctgcccctaaattgcttaaagaacttggagctaaggttttttcaattggtgtaaaacctaatggtttcaatattaacgatcaatgtggatccacatgtccatcaaaaattaagttagctgtaagaaaatataaagctaatgttggtatttcatttgatggtgatgctgacagaattatcatgtgtgatgaaaatagcaaagttatagatggtgaccaaattatcgcaatgcttgcacgtagatggaagtcaaaaaaaattttaaaaggtggtgtaataggaactttaatgtcgaactatggactagaagtttttttacgaagtgaaaaaattagatttctcagatctaaggtaggagatagatatgtaaaagaaaaaatgaaaaaatcaaattttaatctaggaggtgaacaatctggtcatataattctcggtaaatttgcaactactggagatggtcttatggttgcattggaggttctgttttctttaagaaaaggaaaaaaagcaagccggttactcaatgtttttaaacctttaccacagatattagaaaacgtaattgtaaacgacaaaaatataatcaataaggataaatgtaaaaaagcgatcaaaaaagcttataagtttatgaatggccacggaaggctatgat

SEQ ID NO: 292284 - DNA, 895 bp, Unknown
  Bacterial polypeptide expressing nucleotide sequence isolated from the Sargasso Sea
aaagctatgagggcaaatatgggaattatgattacagcttctcataatcctcataatgataatggattaaaactatttggtcctgatggtatgaaactatcagataaaatagaaaaaaaaattgaaagtttaatagataaaaaaatcgtcaaaaatctctctaagccagaaaaattaggtagagtaaaaagattagagacaggtacaaatgattacatcaagatattaaaaaaaaattttactaaagaattcaatttaagaggacttagaattgtaattgattgtgcaaatggcgctgggtacaaagctggaccagaattattaaaatccttaggggctaaggtgattgccataggagttaatcctaatggattaaatattaacaaaaattgtggttctacatttcctgaaaaaataaaatctgcagttaaaaagtataaggctcatataggtatttcactagatggtgatgcagacagggtaattatgtgtgacgaaaaaagtaatattatagatggtgaccaaattattgctgcattagcaacaaggtggaaaaacaaaaaaatgttaaaaggtggggttgtaggaacattaatgtccaattatggtcttgaaaagtatttcaagaaaaagagaataaaatttatacgtgctaatgttggtgatagatatgtaaaagaggtaatgcaaaaaaataagtttaatttaggtggagaacaatcaggacatattattctaggtaaatttgcaactacaggagatggtttacttgtagccttggagtctttatttgctcttagaaaaggaaaaagagctagtgaattttttgaaaattttaaaaaaacaccacaattgctaaaaaatattgaagtaaaagataaaaatataatcaaca

SEQ ID NO: 292285 - DNA, 827 bp, Unknown
  Bacterial polypeptide expressing nucleotide sequence isolated from the Sargasso Sea
aatggcaaaaaaatattttggaacagatggaataagaggggcagttaatagcaaatatataaatggagatatgttctttaaatttggacttgctagtggaacatactttaaatctcaaaaaaaaagaaaacaaacagcaataattgcaaaagatacgagattgtctggatatacacttgaaccagctcttgtctctggtttggcttcagccggtatgcatgtttataccctaggacccttaccaactaatgcgttggctatgttaacaaaagagatgaaggcaaatatgggtataatgattaccgcttctcataatccacattttgacaatggtttaaaattgtttggtcctgatggaatgaaattatcagataaaatagaaaaaaaaattgagagtctcattgataagaaaatctcaaaaaatctctcacgttctgaaaaattaggaagagttaaaagattagaaacaggcaccaaaaattacattaaaatattaaaaaaaaatttcacaaaagagttcaatttaagaggactaagaatagtaatcgactgtgcaaacggcgctggttataaggcaggtcctgaattattgaaatcattaggagctaaagtgatagcaataggtattaaacccaatggtttaaatattaataaaaaatgtggatcaacttttccaagaaatattaggtctgctgtaaaaaaatataaagctcatatcggaatatctttagacggagatgctgacagaattattatgtgtgacgagaaaagcaatataatagatggagatcaaattatagctgctttagcaacaagatggaaaaata

SEQ ID NO: 292286 - DNA, 871 bp, Unknown
  Bacterial polypeptide expressing nucleotide sequence isolated from the Sargasso Sea
attagaggatgcaaatgagaattacatagaaattttaaaacaaaattttccaccctcattcagtttaaaaggtgtcaaaattgctttagactgcgctaacggtgctggttataaagcgggtccccaattatttaaatcatttggagctaaagtttttaaaactggaacttctccaaatggattgaatattaattttaaatgtgggtctacttatccaaataaaatttgtcaaatgacaaaaaaaagaaaggctcatattggtatcgcattagatggtgatgcagatagaataattgtctgcgatgaaaaaggtaaaattattgatggagataaaatccttgcaatgttaggcgagagatggaaaagaaaaaaaattttaaaaggaggagtgattggtacactaatgtcaaattatggtttagaggaattttttagaaaaaacaaaattaaattttttagatcagatgtaggagatcgatatgttaaagaaaaaatgaaaaaaaaaaaatttaacttaggtggagaacaatctggtcatataattcttggaaagtttgcgacgacaggagatggattattagttgccttagaaattcttttttctctgagaaaaagaaaaaaagcaagtgaactttttaataaatttaatcctactcctcagatattagaaaatgtgcaagtaaatgataaatcaattattgatagtccaaagtgtaaaaaagcaatcgctgaagtaaataaacttattaaaaataaaggcagaatattagtaaggaagtctggcactgaaccaaaaataagaattatgtgtgagtcggaagattcaaatttaaataaattgtgtgttaatataattaaaaaatctatctag

SEQ ID NO: 292287 - DNA, 676 bp, Unknown
  Bacterial polypeptide expressing nucleotide sequence isolated from the Sargasso Sea
aatgtgggtcaacttttccagaaatattaggtctgctgtaaaaaaatataaagctcatttaggaatatctttagacggagatgctgatagaattattatgtgtgatgagaaaagcaatataatagatggagatcaaattattgccgctttagcaacaagatggaaaaataaaaaaatgttaaaaggaggagttgttggaacattaatgtcaaattatggcttagaaaaatattttaaattaataggaatcaaatttttaagagcaaatgttggagacagatatgttaaagaaaaaatgcaaaaatataattttaatttaggtggtgaacaatcaggacatattattttaggtaaatttgcaactacaggagatggtttgttagtagctttagaagctctttttgctttaagaaaaggaaaaaaggcaagcgaattttttgaacaatttaagaaaacacctcagctcttagaaaatatcgaagtaaaagataaaaatattattaacaaaccagagataaaaaaaattataaaaaatgctgataaattaatcaaaggtaatggaagaattttagtaagaaaatcaggaacagaatctaaaataagagtaatgggagaaagtgaaaacaaagatctactatataaatgtgtgaacatgattaagaaaaaaattaaataa

SEQ ID NO: 292288 - DNA, 774 bp, Unknown
  Bacterial polypeptide expressing nucleotide sequence isolated from the Sargasso Sea
tttccaaattctatgaggttagatcatcttaaaatcgttttagattgcgcaaatggcgctgcttataaggttgcgccaatgatattttgggagctaggtgctgatgttattgttataggggacaaacctaacggaagaaatataaatcaagattgtgggtctactaaaacaaaagctttgcgaaaaaaagtaaaagatgaaaatgccgatttagggattgcatttgatggagatggcgacagattagcaataatagatgaaaatggagatcaagttaatggagaccatttgcttgccatgatagccttatcacttaagaaaaagaatttgttgaaaaataataaagttgtttcaacaataatggccaatctatcactagaaaactattttgattcaatcgaccttaaattaattagagctaatgttggagatagatatgtcattgaggaaatgttaaatagtggttcaaattttggtggtgagccctcaggccacttaataattaatgatttttcaaccactggagatgctattatttccgcattgcaggttttatctttaatgattgaagagaataaatcaatttcgaatcttacaaatctttttcctcttatttctcaaaaacattatgagcatatatctgatgataagaaagatatttcaaactctcatctagaaaatctttcaaaagaaatggaagaaaaaattggaaatgaaggaagagtcattattagaaagagcggaacagagccattaattagagtaatgattgaa

SEQ ID NO: 292289 - DNA, 782 bp, Unknown
  Bacterial polypeptide expressing nucleotide sequence isolated from the Sargasso Sea
aatagccccacatattttctgggaactaggtcatgaagttgtgtgtattaatgataaacctaacggaaaaaatattaattttaattgtggagctgtaaacataaatgaattatcaaaaaaagtaataaaggaaagagctgatataggttttgcttttgatggcgatggagatagattgataatagtaaatgaaaaaggcgaagaaattgatggtgataaaataattgcattatttgctaaacatcttataaatttagataactcaaaaactcagtttcccattattactacagtaatgtcaaactttggattagaaaattatcttttaagagatttaaaaattaaattaaaacgttcatcggtaggagatataaatgtcataaatgaaatgcaaaaacacaactcgattttaggaggcgaacaatctggccatataattttatctgagtattcaaaaacaggagatggaattttggcagcattaaaagtaatggaaataatatcaaaattaaaaaaaccagttagttcaatttttaatttatataataattttcctcaaattaaaattaatataccttacacaaaaatatcaaaaaactgtcttcaatatattaaaaacctcaacaacaaaaaaattaaagataaaaatattagattattgataaggttatctggcacagaacctttaataagaatattagttgagggaaaagacttagaattagttcaagcaaaagcaaaaagaatagaaaaagatataaggattaatcttggcaaataaa

SEQ ID NO: 292290 - DNA, 757 bp, Unknown
  Bacterial polypeptide expressing nucleotide sequence isolated from the Sargasso Sea
aatgtcaaaaaaatattttggtacagatggaattagaggagaagtaaatcaaggaaacataaatggagaaatgttttttaaatttggtttagcagcaggtacttattttaaaaatttaaaaaaaaccaaacaaacagcaattatagcaaaagatacaagattgtctggttatactttagagcctgctctggtttctggtttagcttctgctgggatgaatgtttatacattaggtcctttaccaaccaacggtcttgccatgttgactaaaagaatgaaagcaaatatggggataatgatcacagcatctcataatccttattttgacaatggattaaaattatttggtccagatggtttaaaattatctgacaaaattgaaaaaaaaatagaaaaattaatagatgcaaaaataacaaaaaatttatctaaaccaaatgttcttggtagagtaaaaagactggaagatgctaacgataaatatattcaaattttaaaatctaattttccaagtaattttaagttaaaaggaataaaaattgctatagattgtgctaatggtgctggatataaatcaggaccaaaacttttaaagtctttaggagcaaaaatttataattttggtatatctccaaatggtttaaatattaatcataattgtggatctacttttccaaaaaatattagatatttagttaaaaaacacagagttgatttaggaatagcattagatggtgatgctgacagaaattattct

SEQ ID NO: 292291 - DNA, 799 bp, Unknown
  Bacterial polypeptide expressing nucleotide sequence isolated from the Sargasso Sea
aaaattgttttagattgtgcgaatggagcaggttataaatcagcacctaaattattgaaagagcttggtgcaacagtcttttctatcggaataaaacctaatggattgaacataaatgaaaagtgtggatcaactcacccttcaaaaatccagtcggctgtaaaaaaattaaaggcacatgttggaatttcttttgatggagacgcagatagaataataatgtgcgatgaaaatggaaaaattatagatggagaccagattattgcaatgcttgcgagaagatggaagtcaaaaaaaatcttaaaaggtggagtaataggaactttgatgtctaattatggtttagaaaaattcttaaataaagaaaaaataagatttttaagatcaaaagttggtgatagatacgtgaaagaaaaaatgaaaaaattaaattttaatttaggaggcgaacagtctggccatataatacttgggaaatttgctacaacgggcgatggtttactcgtagccttagaagttttattttctttaagaaaagtaaaaaaagcgagcaagttattgaatgtttttaaacctgttccgcaaaaactagaaaatttaaaagttataaataaaaatgtaattgaaagttcaaaatgtaaaaatgctataagaaaagcaagtattttaatgggtataaagggtagagtgttggtgagaaaatcaggaacagaacaaaaaattaggattatggcagagtcacatgataaaagattaatatctcaatgcataaaattaattaaaaaatcaataaactaaa

SEQ ID NO: 292292 - DNA, 815 bp, Unknown
  Bacterial polypeptide expressing nucleotide sequence isolated from the Sargasso Sea
aatgagtaaaaaatactttggaactgacggtataataggaaaagtaaaccaagaaaatataaatggcgaaatgttttttaaatttggtttagcagcaggcacatattttaaaaatcaaaaaaaaagtaaacaaatcgctattattgctaaagatacaagattatctggatacacattagaaccagcattagtctctggactggcttctgcaggagtccatgtttttacctttggacctctccctacgaacggattagctatgctaacaaaaaaaatgagagcaaacatgggaataatgattaccgcatcacacaatccttattatgataatggattaaagttatttggtccagatggtctaaaattgtcagataaaatagaaaaaaaaatagaaaaaataatagactcaaagattactgataaattatcaaatccaaaaatacttggaagggttaaaagacttgaagatggatcggaaaaatatattgaaattttaaaaaaaaattttcctaatcaatttaatttaagaggtttgaagatcgctatagattgtgcaaatggggctgcatacaaggttggaccaaagttattgagatcattaggagctgaagtttatgaaattggaacttctccaaatggatttaacattaatgaaaaatgtggatccacttttcctaataaaattaaaaatttaacaaaaaaaaatagagcacatattggaatttccttagatggagatgctgacagaattattgtatgtgatgagaaaggaaatatcatagatggtgataaaataatcgcaatgttagcgcaaa

SEQ ID NO: 292293 - DNA, 946 bp, Unknown
  Bacterial polypeptide expressing nucleotide sequence isolated from the Sargasso Sea
gcttaccgacgaaaagcaaacagaaataaatgagttaatgaatagatcagatataatgagtctgcaggataaaaaccaaataggcgctgcaagaagagttgatgatgcattgtcgcgttatattgaatttgcaaaagcaacttttccaaattctatgcggttagatcatcttaaaatcgttttagattgcgcaaatggcgctgcttataaggttgcaccaatgatattttgggagctaggtgctgatgttattgttataggagacaaacctaacggaagaaatataaatcaagattgtgggtctactaaaacaaaagctttgagaaaaaaagtaaaagatgaaaatgccgatttagggattgcatttgatggagatggcgacagattagtggtaatagatgaaaatggagatcaagttaatggagaccatttacttgctatgattgctttatcacttaagaaaaagaattcactaaaaagcaataaaattgtttcgacaataatggctaatctatctttagaaaactatcttgattcaatcgacctaaaattaatcagagctaatgttggagatagatatgtcattgaggaaatgttaaaaagtggttcaaattttggaggtgaaccctcaggccatttaataataaatgatttttcaactactggagatgctattatttcctcattacaggttttatctttaataattgaagaaaataaacctatttcaaatcttgcaaatctttttcctattatttctcaaaaacattatgagcatatatctgatgacaaaaaagatatttcaaactctcatctggaaaatctttcaaaagaaatgaaagaaaaaattggaaatgaaggaagagttatcattagaaagagtggaacagagccattaattagggtaatgattgaaactaataatcaaaatcttagcaacgaaata

SEQ ID NO: 292294 - DNA, 730 bp, Unknown
  Bacterial polypeptide expressing nucleotide sequence isolated from the Sargasso Sea
gctaaggttatcgcaataggagttaatcctaatggattaaatattaacaaaaactgtggttctacatttcccggaaaaataaagtctgcagttaaaaagtataaggcacatataggtatttcactagatggcgatgcagataggataattatgtgtgacgaaaaaagtaatattatagatggtgaccaaattattgctgcgttagcaacaaggtggaaaaataaaaaaatgttaaagggtggggttgttggaacattaatgtctaattatggccttgaaaagtatttcaaaaaaaaaagaataaaatttatacgtgctaatgttggtgatagatacgtaaaagaggcaatgcaaaaaaataagtttaatttaggcggtgaacaatcaggacatattattctaggtaaatttgcaactacaggagatggtttacttgtagccctagagtctttatttgctcttagaaaaggaaaaagggccagtgaattttttgaaaaatttaagaaaacaccacaattacttaaaaatattgaagtaaaaaatagaaatgtaattaataaacctgaaattaagaaatctattatgctagcttcaaaattaataaaaggcagtggcagaattcttgtaagaaaatcgggaactgagtcaaaaataagaattatgggagaaagtgaaaataaaagaattcttattaaatgtgttaatattattttgaaaaaaattaaataat

SEQ ID NO: 292295 - DNA, 845 bp, Unknown
  Bacterial polypeptide expressing nucleotide sequence isolated from the Sargasso Sea
aatgagaaataaatattttggaactgacggaataagaggcactgtaaacaaaggtaatattactggacaaaaattttttaaatttggacttgcttcaggaacatattttaaaaatcaaaaaaaaataaaacaaattgcaattatagctaaagatactagattatcaggttatactctagaacctgctcttgtttcaggtttggtttctggtggtatgcatgtttttactcttggaccattacctactaacggtcttgcgatgttaactaaatctatgaaagcaaatatgggtataatgattacggcatctcataatccatactatgacaatggtttaaaactatttggaccagatggactaaaactatcagataaaattgaaaaaaaaatagagaaattaatagatgctaaaaatactaaacaattaactcaccctaaatctttaggaagagttaaaagattagaagatggtaatgacagatatataaatatacttaaaaaaaattttcctaaaaactttaatttaaaaggtttgaaaatagttttagattgtgctcatggtgcttgctacaaagcagctcctaagctgcttaaggatcttggagcaaaggttatagctattggtgtaaaacccaatggtttaaatattaataataaatgtggctcgacccaacccaaaaaaatgaaattagcagttaaaaaatataaagctcatcttggaatttcatttgatggagatgcagacagaataataatgtcagatgaaaatggaaaaattgtaaatggtgatcaaattatagcaatgatagctaaaagatggaaattgaaaaagattttaaaaggag

SEQ ID NO: 292296 - DNA, 649 bp, Unknown
  Bacterial polypeptide expressing nucleotide sequence isolated from the Sargasso Sea
aaaggctgatattggttttgcatttgatggcgatggagataggttaattgttgttgatgaaaaaggcaatgaagtagatggcgataaaattataggattgttatgtaaaaattatgttaaacctaagaaaaaatctagtcaacacgatgtaataataactgtgatgtcaaatatgggattagaaaaatatcttagagataaattaaaattaaaaattaaacgtgtatctgttggagatataaacgttattaatcaaatgaaaaaatccaaatctatgataggtggtgaacaatcaggacatattatattatcagatcactctaatacaggtgatggaattttagcagctttaaaaattactgaaattttgatctcaaataaaaacaaggccagtaaactatttgatttgtataatgattttgcacaggaaaaaatcaatttacattataaaaaaaagactaataaattgttaaatattcttagtaagttaaaaaataataaatcatataataataaaaaaattagatctcttgttagaatatctgggacagaaccattagtaagaattttagttgaaggacaagaaaagattgaggtaaaaaagaaatcttatgaaataaaaaaactattaaggccctaccttggttaa

SEQ ID NO: 292297 - DNA, 805 bp, Unknown
  Bacterial polypeptide expressing nucleotide sequence isolated from the Sargasso Sea
ttagaaactgggacaaaagattatttaaaaattttaaaaaaaaattttacaaaggagtttaatcttagaggtttaacaattgttattgattgcgcaaatggtgcgggatacaaagctggcccagaattattaaagtcactaggtgcaaaagtaattacaattggtgtaaaaccaaatgggcttaatataaataaaaaatgtggttcaacttatcctagcaagattaagtttgctgtaaaaaaaaacaaagcacatttaggcatttctttagatggagatgcagatagaattattatgtgtgatgaaaaaggagatattattgatggcgatcaaataattgcagctttggcaaaaagatggaaatcaaaaaaaatgttgaaaggtggtgtagttggaactttgatgtcaaactatggattggaaaaattttttaaagctgaaaaaataagatttattagggcaaatgtaggtgatagatatgtgaaagaaaaaatgcaaaaaaataaatttaatttaggtggcgagcagtctggccatattattctaggaaagtttgcaactacaggagacggattacttgtcgcattagaggcattatttgcaattagaaaagggaaaaaagccagtactttctttaataaatttaaaaagactccacaaattttaaaaaatatagaagtaaaaaatagagatataataaattatccagacataaaaaaatccataaaaattgcagaaaaattaattgagggtcagggacgaatattggttagaaagtcaggcacagagtctaaaattagagtga

SEQ ID NO: 292298 - DNA, 428 bp, Unknown
  Bacterial polypeptide expressing nucleotide sequence isolated from the Sargasso Sea
aatgaagtattttggtacagatggaattcgtggtcgtgtaggcgagtcaccaatgacggccgagttcgcacttcgtttagctaacgcttccgcgcaaattttggcgccagacggcggtacagttctcattggaaaagatacaagaatatctggatatatgtttgaatccgctctagaagcaggatttgtatctgccggcatggatgttaaacttttgggacctatacccacacctgcaattgcctatcttgtcaaaaaatataatgctgagcttggcattgtaattagcgcttcccacaattcttttgtcgataatggaatcaaattttttaattcaaaaggtacaaagttggatgataaaacagagttgcaaatcgaaaatatcctcaacggcactacattcacaaaagattctattgatttaggca

SEQ ID NO: 292299 - DNA, 874 bp, Unknown
  Bacterial polypeptide expressing nucleotide sequence isolated from the Sargasso Sea
atcgaggaaatattacagggtgaaaaattttttaagtttggattagcggcaggaacatattttaaaaaccaaaaaaaaaataaacaaatagcaataattgcaaaagatacgagattgtcgggatatactttagaaccagctttggtatcaggtctagtatcaggaggtatgcatgtttttacattagggcccttaccaactaatggactagcaatgttaacgaaatcaatgaaggcaaatatgggtataatgatcaccgcatcccacaatccttactatgacaatggccttaaattatttggacctgatggtatgaagctatcagataagatagaaaaaaaaattgaaaaactaatagatgctaaaagtacaaaacaactcactaatcctaaactattaggtagagttaagagacttgaagatggaaatgataaatatattaaaatattaaaaaaaaattttccaaaaaattttaatttaaaaggaacaaagatagtattagattgcgcaaatggtgcgagttatatagcagcaccaaaaatgctgaaaagtcttggagctagaattatttcaattggcgtaaatcctaatggtattaatattaatgataagtgtggatccacatatccatcaaaaattcaatcagccgtgaaaaaatacaaagcccacgtaggtatttcatttgatggcgatgctgacagaattattatgtgtgatgaaaaaggtaaaatagtagatggagatcaaattattgccatgctagctcgtagatggaagttaaaaaaaattttgaaaggaggagtggtaggaactttaatgtctaactatggattagaaagttttttaaataaagaaaaaattagattttatagat

SEQ ID NO: 292300 - DNA, 763 bp, Unknown
  Bacterial polypeptide expressing nucleotide sequence isolated from the Sargasso Sea
aagctgctcccaaaattgctaaaaagtcttggtgcaaaagttatatctataggtgtaaagcctaacggattaaacattaatgaaagatgtggatcaacccatccgtcaaaaattcaatctgcagttagaaaacatagagcccaagtcggtattgctttcgatggagatgccgaccgaattatcatgtgtgacgaaaaaagcagaatcattaatggtgatcaaatcatagcaatgcttgcaagaagatggaaaataaaaaaaattttaaggggcggggtaattggaacactaatgtcaaattatggattagaaaactttttaaaaaaacataaaattaaattttttagatctaaagtaggtgataggtatgttaaagaaaaaatgaaaaaattaggttttaatctaggtggagagcaatcaggccatataattttaggaaagtttgcaaccaccggagacggtctaatggttgcattagaagttttattctcattaagaaaaggaaaaaaagcaagcgaactgcttaatgtgtttgtgcctttgccgcaaatattggagaatattacagtaaaagataaaagcattataaataaatctaaatgtaaaaaagcgattaaaaaagcaaatggacttatgaaaaattatggaagattgctgataagaaaatcaggtactgaaccaaaaataagaattatgggagaatcacataataaaaaattaattttaaaatgtataaaaataattaagagatcaataaaataaa

SEQ ID NO: 292301 - DNA, 868 bp, Unknown
  Bacterial polypeptide expressing nucleotide sequence isolated from the Sargasso Sea
agatggtatgaaattatcagataaaatagaaaaaaaaattgagagcttaattgataaaaagattattaaaaatctctcaaagcctgaaaaattaggtagagtaaaaagattagagacaggaacaaatgattacataaagatattaaaaaaaaattttactaaagaatttaatttaagaggactcagaattgtaattgattgtgcaaatggggcaggatataaagctggaccagaattattaaaatctttgggagctaaggtaatagcgataggtgttaatccaaatggattaaatattaacaaaaattgtggctctacatttcctgaaaagataaaatcagcagttaaaaaacacaaggctcatataggcatttcattagatggtgatgcagataggataattatgtgtgatgaaaaaagtaatattgtagacggggatcaaataattgctgctctagcaacaaggtggaaaaataaaaaaatgttaaaaggtggggttgttggaacattaatgtctaattatggtcttgaaaaatatttcaaaaaaaatggtattaaattcttacgggcaaatgttggtgatagatatgttaaagagctaatgcaaaaaaataagtttaatttgggtggagaacaatcaggacacattattttgggtaaatttgcaactacaggagatggtttgttggttgccttggaatctttatatgctattagaaaaggacaaaaagctagtgaattttttgaaaaatttaaaaaaatacctcaattactaaaaaatattgatgtaaaagacaaaagtattatcaataaaccagagattaaaaaatctataaagttagcctcaaaattaatcaaagataaagga

SEQ ID NO: 292302 - DNA, 844 bp, Unknown
  Bacterial polypeptide expressing nucleotide sequence isolated from the Sargasso Sea
aatggcaaaaaaatattttggaactgatggaataagaggtgctattaacagcaaatatataaatggagacatgttctttaaatttggtctcgctagtggaacatattttaaatctcaaaagaaaagaaagcaaatagcaataattgcaaaagatacaagactttcaggctatactcttgagccagcacttgtttcaggtttagcttcagctggtatgcacgtttatactttaggacccttaccaactaatggattggctatgttaacaagagaaatgaaggctaatatgggcataatgattacagcctctcacaatccacattacgataatggactaaaattgtttggtccagatggaatgaaattatcagacaaaatagagaaaaaaattgaaagtcttatagataaaaaaatttcaaaaagtctttctaaacctgaaaaactaggaagagttaaaaggttagaaacaggcacaaaaaaatatattaaaatattaaaaaaaaattttacaaaggagtttaatttaagaggactaaaaatagtaatcgactgtgcaaacggcgctggttataaggcaggtcctgaattattgaaatcattaggagccaaagttatagcaataggtgttaaaccaaatggtttaaatattaataaaaaatgtggttcaacttttccaagaaaaattagatctgctgtaaaaaaatataaagcacatataggaatttctttagatggagatgctgatagaattattatgtgtgatgagaagagcaatataatagatggagatcaaattattgccgctttagcgcacagatggaaaaataaaaaaatgttaaaaggg

SEQ ID NO: 292303 - DNA, 616 bp, Unknown
  Bacterial polypeptide expressing nucleotide sequence isolated from the Sargasso Sea
cggtatttcattcgatggagatgccgatagaatcattatgtgcgatgaaaaaggtaaaataattgatggcgatcaaataatagctatgttagcaaaaaggtggaaagaaaaaaagatcttaaaaggcggtgttgttggcactttaatgtctaattatggtctagaaaaatttctaaaaaatcataaaattaaatttctaagatcaaaagttggcgacagatatgtaaaagaaaaaatgaaaaaatttaattacaacttaggcggagaacaatctggacatattatactcggaaaatttgctactacaggcgacggactacttgtagcattagaagtcttattttcgctaagaaaaaaaaagaaagcaagtgaacttttaaatgtatttaaacctttgccacaaattttagaaaatgtgactgtaaaagataaaggtattatagataaaaaaaaatgtaaaattgctttaaaaaaagcgaataaaattatgaaaaaaaaaggcagaatattagtcagaaagtcaggtacagaacctaaaataagaatcatggcagagtctgatagcaaatctataattttaaaatgtattaaattaataaaacaatcgataaagtaa

SEQ ID NO: 292304 - DNA, 715 bp, Unknown
  Bacterial polypeptide expressing nucleotide sequence isolated from the Sargasso Sea
tgaaattttaggaagagttaaaagactagaagatggaaatgataaatacatgaatattctcaaaaaaaattttccagatacatttagtctaaaaggtatgaaaatcgcaatagattgtgcaaatggagcaggatataaatctggacctaaattatttagatcgcttggggcaaaagtatatgaatctgggatttcaccaaatggattaaatattaataataaatgtggttcgacttttccaaaaaaaataaaatttttgacgaaaaaacacaaagctgatctaggcatatcccttgatggagatgcagatagagttattttatgtgatgaaaagggaaatataattgatggtgatcagattattgcaatgttagcaaaaagatggaaaagaaaaaaaattcttaagggtggagttataggtacgttaatgtcaaattatggtctagaaaaattttttaaacaggaaaatattagattcatacgtgcaaatgttggagacagatatgttaaggaaatgatgcaaaaatataagttcaatcttggaggggaacagtcaggacatatcatacttggaaaatttgctacaaccggagacggtttgttagtcgcgttagaggtattattttcaatgagaaaaggcaaaaaagccagcgaattatttaaaaagtttaaaattacaccacaaattttagaaaatatagtagtcaaaagataa

SEQ ID NO: 292305 - DNA, 940 bp, Unknown
  Bacterial polypeptide expressing nucleotide sequence isolated from the Sargasso Sea
aaaatatttggaacagatggaatagagggaaaagttaaccaaaataaaattaatggagaaatgttttttaaatttggcctagctgctggtacatattttaaaaatcaaaaaaaatttaagcaaactgctataatagcaaaagataccagattatctggatattctcttgagcccgcactcgtctccggattggcatcagctggtatgcatgtttataccttagggcctttacctacaaatggcctagcaatgttaaccaaaaaaatgaaggcaaatttgggtataatgattaccgcatcacataatccatattacgataatgggcttaaactgtttggaccagatggtttaaaattgtctgataaaattgaaaaaaaaatagaaaaattaattgatattaaaattgttaaaaatctttcagaaccaaaaatcttgggaagggtaaaaagattagaggatgcaaatgatagatatataaaaatattaaaaaaaaactttccaagtaattttattttaaaaggcataaaaatagtaattgattgcgcaaacggtgccgcatataaatctggaccaaaactttttagaagtttaggagcaaaagtctttgaatatggagcatcaccaaatggcttaaacataaatcaaaattgtggctcaacatttccaaataaaattaaacgattagtgaaaaaacataacgcacatatcggtatatctttggatggcgacgctgatagaattataatatctgatgaaaaagggaacattattgatggtgaccaaattattgctatgttagcaacaagatggaaaagaaaaaaaatcttaaaaggaggcgttattggaacattgatgtcaaattatggtttgcaaaattattttaaaagtaaaaaaattaagtttattagagctgatgtcggagatagatatgtaaaagaaa

SEQ ID NO: 292306 - DNA, 696 bp, Unknown
  Bacterial polypeptide expressing nucleotide sequence isolated from the Sargasso Sea
ttttaaatataaataaaaaatgtggctcaacatttcctcaaaaaatcaaaaatttagttcaaaagcataaagttaatttaggtatatcattagatggagatgcagacagaataattttgtgtgatgaaaaaggaaatatagttgatggtgatcaaattattgcaatgttaggaagtagatggaaaagaaaaaaaattcttaaaggaggagtaattggtaccttaatgtcaaattatgggttagaaaaatattttaaaaatagcaaaattaaatttataagatctaaagtaggtgacaggtatgtaaaagaacaaatgcaaaaaaataactttaatcttggaggagaacagtcaggtcatataattcttggaaaatttgcaacgactggagatggtcttttagtagctttagaagttttgttctcaatgagaaaaggaaaaaaagctagtgaattatttaataattttaaacctactccacaaattctagcaaatgtaatagttaagaataaatcaattataaactcaaaaaaatgtaaaaacgctattaaacttgcatcaaatttaataaaaaataaaggaaggatgctagtacgtaaatctggaacagaacctataataagaattatgggtgaatcggaaaataaagttttgttatcaaaatgtataaatatagttaaaaggtcaattaaataat

SEQ ID NO: 292307 - DNA, 946 bp, Unknown
  Bacterial polypeptide expressing nucleotide sequence isolated from the Sargasso Sea
ggtttgacttctgcaggaatgcacgtttttacttttggacctttgcctacaaatggattggcaatgcttacaaaagaaatgagagcaaatatgggtataatgattaccgcatctcataacccctattacgataatggattgaaattatttggtccagatggtttgaaattacctgataaaatagaaaaaaaaattgagaaaattattgactcaagaatatctaataaattatcaaatccaaaattactgggaagagttaaaagattggaagatggatcaaaaaaatatattgaaattttaaaaacaaactttcctagcagattcaagttaaaaggtttaaaaatagctatagattgtgcaaatggagctgcatataaaattggacctcaattgctacgatcattaggagctgtagtttatgaaataggaacttctccaaatggatttaatattaatgataaatgtggatcaacttacccaaataaaattaaatatttaacaaaaaaaaataaggcacatattggtatttctttagatggtgatgccgatagaattattttgtgtgatgaaaaaggtaaaattattgatggcgataaaataattgcaatgttagcagaaagatggaaaagaaaaaaaatcttaaaaggtggtgtagttggcactttaatgtctaattatggtttagaaaaatttttttcaaaaaataaaataaaatttttaagatctaatgttggagatagatatgttaaagaattaatgcaaaaaaaaaaatttaatctaggtggagagcaatctggtcatataattttaggaaagtttgcaactaccggagatggattattggtagccttagaggtcttattttctatgaggaagggaaaaaaagctagtgagttatttaaaaatttcgtaccaacccctcaattactattaaatgtagaagtaa

SEQ ID NO: 292308 - DNA, 718 bp, Unknown
  Bacterial polypeptide expressing nucleotide sequence isolated from the Sargasso Sea
aaaacagttaacaaatccaaaattattgggaagagtaaagcgtcttgaagatggaaatgataaatacataaaaatactaaaaaataattttccaagcaattttcatctaagaggcactaaaattattttagattgtgcaaatggagcttcttataaagctgcccctaaattattaaaagaacttggtgcaaaagtgatttctataggagtaaaaccaaatggattaaatattaatgaaaaatgtggatcaacatatccctcaaaaataaagacggctgttagaaaacataaagctaaaattggaatagcatttgatggagatgctgacagagtaatcatgtgtgatgaaaaaggaaaaataatagatggtgatcaaattattgcaatgttggctagaagatggaaatctaaaaaaattttaaaaggtggagtaattggaacattaatgtccaattatggtttagaaaaatttttacgtaatgaaaaaataagattttcgaggtctaaagttggagatagatacgtcaaagaaaaaatgaaaaagctcaattataatttaggtggtgaacagtctgggcacattattttaggaaaattcgcaacaactggtgatggattattagtagccttagaggttttattttctctcaggaagggtaaaaaagctagccaattattaaaagtttttaaaccattgccacaaactctagaaaacgta

SEQ ID NO: 292309 - DNA, 859 bp, Unknown
  Bacterial polypeptide expressing nucleotide sequence isolated from the Sargasso Sea
aattgatgcaaaaaatacaactcaactaacaaatcctaaattattaggtagagtaaaaagattagaaaatggaaacgataaatatattgaaattttaagaaaaaattttcctaaaaattttcatttgagaggtacaaaaatagttttggattgtgctaatggagctggatataaggctgcccctaaattactaaaggaattaggagcaaaagttatatctattggtgtaaaacctaacggttttaatattaatgacaaatgtggttccatgtatccgtcaaaaatcagatcagccgtaagaagatttaaagcacatgttggaatatcatttgatggagacgcagacaggattatcatgtgcgatgaaaaaggcaagattgtagatggagatcaaattatagctatgcttgctcgaagatggaaatcaaagaagattttaaaaggaggagtaattggaacattaatgtcaaattatggattagaaactttcttaaaaaatgaaaaaataaaattttttagatcaaaagttggagatagatatgtaaaagaaaaaatgaagaaatctaattttaatctaggcggagaacagtctggacatataattctgggaaaatttgcaactactggtgacggattgatggtagctttagaagttttattctctctaagaaaaaaaaaacaggcaagcgaattattaaatgtttttaaacctcttcctcaaatcttggagaatattgttgttaaagacaagaatgtaattagtagggctaaatgcaaaaatgcaattaaaaaagcgaataaactaatgggaaacaaaggaagggtcttagttagaaaatctggaactgagccaaaaatt

SEQ ID NO: 292310 - DNA, 841 bp, Unknown
  Bacterial polypeptide expressing nucleotide sequence isolated from the Sargasso Sea
tcttggaagggtaaaaagattagaggatgcaaatgaaaattacataaatattttaaaaagtaattttccaaataatttctcgctgaaaggtctaaaaatcgggattgattgtgctaatggagctgcatacaaaagtgctccaaaattactaagatctttgggtgctaaagtttttgaagttggaaccaaaccaaatggaataaatattaactttaaatgtggctcaacatatccagaaaaaattaaatcattaacgaaaaaatttaaaacagatttaggaatttctctagatggagatgcagacagaataattttgactgacgaaaaggcaaatatagtagatggagataaaattatagctgtattagcacagagatggaaaagaaaaaaaatactaagggggggtgtaattggaactttaatgtcaaattatggtctagaaaatttttttaaagaaaaaaaaattcaatttttcagatcaaacgttggagatagatatgtaaaagagctaatgcaaaacaaaaaatttaacctaggtggagagcagtctggccatattattttaggaaactttgcaactacaggagatggattgcttgtagcactagagatacttttttctttgagaaaaggtaaaaaagctagcgaattattctctatttttaggccaacgcctcaactactagaaaatatttcagttaaggataaatcaataattagctcaaaaaaatgtaaatttgcaattaaaaaagcagaaaaaattatttttggaaaaggaagactactaataagaaaatctggcacggagtctaaaataagaataatgtggaatcggaagaca

SEQ ID NO: 292311 - DNA, 831 bp, Unknown
  Bacterial polypeptide expressing nucleotide sequence isolated from the Sargasso Sea
gtttcaggtggaatgcatgtttttacattgggtccattaccaacaaatggattagcgatgctaacaaaatccatgaaagcaaatatgggaattatgataactgcctctcacaatccttattatgataatggattaaaattgttcggtccagatgggatgaaattatctgatcaaattgaaaaaaagattgaaaaattaatagattctaaaaatacaaaacaattaacaaaccccagattattaggaagagtaaaaagattagaagatggaaatgaaagatatattaaaatattgaaaaaaaactttcctagcaactttcatttaaaaggaactaaaattgttttggattgtgcaaatggagctagctataaagctgctccaaaattattgaaagaacttggagcaaaagttatttctatcggcgtgaaaccagatggttttaacattaatgaaaaatgtggatcaacatatcccttaaaaattaaatcagcagttaaaaaatatagggcaaatgttggaatttcttttgatggagatgctgacagaattattatgtgtgatgaaaaaggaaaaataatagatggcgatcaaattattgctatgcttgctcgcagatggaaatctaaaaaaattttaaaaggtggcgttgttggaacacaaatgtccaactggggtttagaaaattttttaaaaaatcaaaaaataaattttgtaaggtctaaagtaggtgacagatatgttaaggagaaaatgaaaaaaataaacttcaacttaggcggagaacaatctgggcacataattttgggaaaattcgcgacaactggtgatggg

SEQ ID NO: 292312 - DNA, 781 bp, Unknown
  Bacterial polypeptide expressing nucleotide sequence isolated from the Sargasso Sea
aatgacaaaaaaatattttggaactgatggaatacgtggcagagttaatcaaggaaatattaacggtaatatgttttttaagtttggtttagcagttggaacatattttaaaaatcaaaaaaaatctaaacaaacagcaataatagcaaaagatacaagactatcaggttatactttagagcctgcattggtatccggtttagcttctgcaggaatgcatgttttcactttaggacctttgccaacaaatggtcttgcaatgctgacaaaatcaatgaaagcaaatatgggaattatgattaccgcctctcataatccttattatgataatggattgaagttatttgggccagacggattaaaactatcagataaaattgaaaaaaaaattgaaagcctaattgacaaaaaaatagagacccagttatctaaaccaaaaatacttggaagagtaaaaagattggaaaatggtaatgaggaatatattaaaattattaaaaaaaactttcctaaaaattttaacttaaaaggtactaaaattgtgattgattgcgctaatggcgctggatataaatctggacctcatctacttaaatcattaggtgccaaagtaatttcaattggggtaaatccaaatggactgaacatcaatgaaaaatgtggatcaacatttccaaaaaaaattcaactgtcagtaaaaaaatacaaagcgcatcttggcatttctttagatggtgatgcagatcgaataataatgtgcgacgagaatggtaaattatag

SEQ ID NO: 292313 - DNA, 675 bp, Unknown
  Bacterial polypeptide expressing nucleotide sequence isolated from the Sargasso Sea
gtggttctacatttcctgaaaagataaaatctgtagttagaaagtataaggctcatataggcatttcattagatggtgatgcagatagggtaattatgtgtgacgaaaatagcaatattatagatggagatcaaataattgctgcattagcaacaaggtggaaaaataaaaagatgttaaaaggtggggttgtaggaacattaatgtcaaattatggtcttgaaaaatatttcaaaaaaacgggtataaaatttatacgtgctaacgttggtgacagatatgttaaagaggtaatgcataaaaataattttaatttaggtggagaacagtcagggcatattattttaggtaaatttgcaactacaggagatggcttacttgttgccctcgagtctttatttgctctcagaaaaggtaaaagagctagcgaattttttgacaaatttaaaaaaacaccacaattgcttagaaatgttgaagtaaaagataaaaatgttattaataaaccagaaattaaaagatctataaaattagcgtcaaaattaatcaaaggctacggaagaattcttgtaagaaaatcaggcacggagtcaaaaatcagaataatgggagaaagtgaaaataagaaccttcttcttgaatgtgttaatatgattttgaaaaaaattagataat

SEQ ID NO: 292314 - DNA, 478 bp, Unknown
  Bacterial polypeptide expressing nucleotide sequence isolated from the Sargasso Sea
cttaggctttgagaggtatttagagggcataggagtgtctctgaaaagaacaggtgtaggtgacagatacgtagtcgaagagatgaagtcgagtggttgcaattttggaggagaacaatctggtcatattattatgagtgactattctacaaccggtgatggtcttatatcagcactccaagttttatcaattttctcacttgcaaatggtaaatttagcgaaattgggcgaagctttattccagtgccacagaagttagttaatattgaatataaagaagacaacccgttaggatcagctagtctaaaatcagcaataagtgatgctgaaaaaacattatatggcattggaagagttttagtccgtaaatctggaactgagcctattttaagagtaatggttgaagctgacagtcaatcattggttgattcaattttagataatattgtatctgcagtggatgaaaaaaaacgatag

SEQ ID NO: 292315 - DNA, 776 bp, Unknown
  Bacterial polypeptide expressing nucleotide sequence isolated from the Sargasso Sea
tatgataacagcatcacataatcctttctatgataatggactaaagttatttggaccagatggattaaaattgtcagataatatagaaaaaaaaatagaaaaattaattgatacaaaaatttcaaagaatttaattaaaccaaatattttgggtagagtaaaaagactagaaaatgcaaatgaaaattatatcaatattttaaaaaaaaatttcccaaaagatttttcgttaaaaggacttaaaattgcaattgattgtgcaaatggggctggttataaatctggacctaatattctaaaatctctaggtgccaaagtttattccgttggagcctctccaaatggcttaaatataaatctaaattgtggttcaacttttccaaataaaattagatcatattcaattagaaaaaaagtagatctgggaatttctttagatggagatgcagatagaattataatatgtgatgaaaaaggaaggataattgatggagatcaaattattgctatgattgctttacggtggaaaaaaaaaggaatcttaaaaggtggagttgtaggtacactaatgtcgaattatggtctagaaaaattatttagaaaaaaaaagataaaatttattagaacaaatgttggagaccgttatgtcaaagaatcaatgaaaaaaaataagtgtaatttgggtggcgaacaatcaggacatattattttaggtaattttgcaacaacaggagatggtttgcttgttgcgttggaaattctttattctatgagaa

SEQ ID NO: 292316 - DNA, 1417 bp, Unknown
  Bacterial polypeptide expressing nucleotide sequence isolated from the Sargasso Sea
attgccttcggcaccgatggctggcgaggagtccttgggggtggacatcaccatcgaaaggcttttgccagtggctgcggcagcggccgcggagttggcccattcggctcctgctgatctggatagccgcacggttgtcatcggctatgaccgtcgcttcttggcccctgaattggctgctgcgattgctgccgctgtgcgaggggttggtttggaaccgttattggcgcaagagccattgccaactccggcgtgcagttgggtggtggtggagcgacgtgccttgggggcgttggtgatcacggccagccataacccaccggagtggctgggcctcaagatcaaaggtcacttcggtggctcggtggaaggtgatttcaccaagcgcgtcgagaggcgcttgcaggccggcggtatcacggtgcctgagcctggcgaaaccgaatgctttgacggctgggcggagtatctccacggccttcgcggcgccatggacaccaatgcccttcgccatgggctccagaccatggggctgaaggtgatcgttgatcccatgcatggctcggccgcgggtggtctgcctgccctactgggggatgcggtttctgaaatccgctcccaacgagatcccctctttggggggcatccccctgagccgttggccccatacctaggagatttgattgcgcaggtgaaagccagcacagctgctggtcagccggccgtgggcattgtttttgatggcgatggggatcgcattgcagccatcgatgagcaggggcgttactgcagtacgcagctgctgatgccgctcctgatcgaccatttggcccgggcgcggaatctccccggcaaggtgatcaagaccgtcagtggttcggacttgatgctccgcgttgctgaagaccttggccgtgaagttgtcgaaaagcctgttggctttaagtacatcgctagtgaaatgctgagtggccaggttctggtgggtggcgaagaatcggggggtgttggctttggcatgcacttacctgagcgggatgcagcctttgccgcgttgatgctgcttgaggccttggtggagggcgggcaaccgttgggggctcgcttagaggcattgcaaacccgttgcggcggtggaagccattacgaccgtctggatttgcgcttagccgggatggagagtcgcaagcgcctggagcaacagttggcggattcaccccccgccagtgttgctggagtccctgtgcaggaggtgatccgcaccgacggcgtcaagcttcgcctgggccccagccactggctgatgttgcgcttctctggcacggaaccgctgctgaggatctactgcgaagcgcccaatgctgaacgcgttgttgaagtactggcgtgggcccgcgacctggcagaagcggcatga

SEQ ID NO: 292317 - DNA, 1456 bp, Unknown
  Bacterial polypeptide expressing nucleotide sequence isolated from the Sargasso Sea
ttgacagctgataaattagataagataaaatttggaactgatggttggagaggaattattggttttgactttaacctgtccaatctttcaagagttgttgtcgctgcatgtcaggagttgcattatcaatactataaagaagttaattcaaagaaaattattattggatatgatcgtagatttatggcttgtgaattcgccaagcaaatagtgccttttgtaagaggatgtggtttcgaaccgatcttatctgatagctttgttacaacaccctcttgtagtttctatgccaaagaagtcggttgtcttggagcgttagtaattacagcaagtcataatccatataattggctaggtctgaaaataaagagctttaatggatgttctgttgacgaatcttttacaagtgaagttgaaaaaagattaatgcttggaaattcaattgaaaaaatagatggtgttaatcaattggtagatattaagaaatttcatttagatagaattaaatccctttttgatattgactatatttccaagagattaaaaaaaatgaaattgagaatttttgtagattctatgcatggttcagctgcaaattgtatggctgagatttttgcttctaatgatttagaagttatttcagaaatcaggaaagatgctgatcctttttttggaggaaaacctcctgaacctcttttgaattatgcagatgatctaaaacaaatactaatgaaaaattcaacaaatgaagtgaaaactttaggaattatatttgatggtgatggtgatagaattgcggcaattgatgaaaaaggaagatactctagtactcaagatttactcccatactttattagctatttgggcgaaattaaaaataattcttatccagttttaaagactgttagtggttcagatattattaaaaatatatcagagagtcaaaatagagatgtttttgaacttccagttggctttaaatatattgctgaaaaaatgattaaagaaaaaatatttattggaggagaggaatctgggggagttggttttggtgactttatgcctgaaagagatgctctatatgcagcgatggttttattaaatggaattgctgaaaaatctcaatatttatatgaaaccttagatgaaattcaagaagattttgggccaagtttttataaaagaattgatattaaatttccaaatcagtcagaaaaaaataacgtaaaagaatttatcatagataatattcctgagaatattaataatcacaagttaaaaagtatctcaaagatcgatggaataaagttgagaattgataaaaatttttggcttctttttaggttttcaggaacggaacctcttttaaggttatattgtgaagcaccaaaagaatcttatctaattgaggtattagagtggggtcaagaatttataaatttggcaggaaaataag

SEQ ID NO: 292318 - DNA, 955 bp, Unknown
  Bacterial polypeptide expressing nucleotide sequence isolated from the Sargasso Sea
aatggataaaattattggtccagatggtatgaagttatcagataaaatcgaaaagaaaattgaaagtttaattgataaaaagattataaaatatttatctaaaccagaaaaactaggaagagtaaaaagattagagactggaacaaaagattatttaaaaattttaaaaaaaaattttattaaaaaatttaatttgagaggattaagaattgtaatagattgtgcgaatggtgcaggctacaaagccggaccagaattattaaaatctcttggagcaaaagtaatagcaataggtgtaaaccctaatggtcttaatataaataataattgtggttcaacataccctaacaagattaagtttgctgtaaaaaaacataaagcacacctaggtatttcacttgatggtgatgctgatagaattatcatgtgtgatgaaaccggaagtataattgatggtgatcaaataattgcagcattagcaactagatggaaatataaaaaaatgttgaaaggaggtgtggttggaactttaatgtctaattatggtctagaagaatttcttaaatctaagaaaataaaatttattagggcaaatgtaggagatagatatgtaaaagaaaaaatgaaaaaaaataaattcaacttaggcggtgaacaatcaggacatatcattttaggaaaatttgcaacaactggtgatggtttacttgttgctttagaagtattgtttgcaattagaaaagagcgaaaagccagtaatttttttaataaatttaaaaaaacacctcaaattttaaaaagtattgaagttaaagacaagtctataataaaaaaaactgaagtaaaaaaatctattagagctgcagaaatattaatgaaaggacaaggcagaatacttgatgagaaaatcaggaaccgagtcaaaaataagaattatgggagagagcgaaaataa

SEQ ID NO: 292319 - DNA, 733 bp, Unknown
  Bacterial polypeptide expressing nucleotide sequence isolated from the Sargasso Sea
aggggcaaaagttatagcaattggagtaaatccaaatggtcttaatattaataataattgtggatcaacatatcccaataaaattaagttggcagttaaaaaatataaagcacatataggtatatcccttgatggagatgccgatagaataataatgtgcgatgaactaggaaatataattgatggcgaccaaataattgcagcattagcagaaagatggaaaaataaaaagatgttaaagggaggtgttgttggaaccttgatgtctaactatggattagagaatttttttaaatctaaaaaaataaattttattcgagcaaatgttggtgacagatatgtaaaagaaaaaatgcaaaaaaaaaactttaatttagggggtgaacaatctggacatattattttaggtaaatttgctacaacaggagatggtttgcttgttgctttggaatcactttttgcaattagaaaaggaaggaaagccagtactttttttaacaaatttaaaaaagtacctcaaattttaaaaaatattgaagtaaaaaataaagatataattaaaaattctgaagtaaaaaaatcgattagaattgctgaaaaattaatgaaaggacaaggcagaatattagtaagaaagtcaggcaccgagtcaaaaataagagttatgggagaaagtcaaaataaacgacttttaaataaatgcattaatactattttaaaaaaaattaaataa

SEQ ID NO: 292320 - DNA, 976 bp, Unknown
  Bacterial polypeptide expressing nucleotide sequence isolated from the Sargasso Sea
atgaaattatcagataaaatagaaaaaaaaattgaaaaattgatagatgctaaaaatactaaacaacttacaaatcctaaattgctaggaagagtaaaaagattagaggatggaaatgaaagatatatcgaaataataaaaaaaaattttccaaaaaattttcacttaagaggaactaaaatagttttagattgtgctaacggtgccggatatatagcagctcctaaactattgaaaaatcttggtgctaaaattataccaataggaacaaaaccaaatggttttaatattaatgcgaagtgtggatcgacttatcctttaaaaatgcaaatagcagtgaaaaagtataaagcaaatgctggtatatcttttgatggagatgcagatcgaataattatgtgtgatgaaaattcaaaattaattgatggagatcaaataataggaatgcttgccgaaagatggaaggaaaaaaaaattttaaagggtggtgtagtaggaactttaatgtctaattacggattagaaaaatttttaaaaaataaaaaaataaaattttatagatctaatgtcggtgatcgatatgttaaggaaaaaatgaaaaaactaaattttaatttgggaggagaacaatctggtcatatcattcttggtaaatttgcaactactggtgacggattaatggttgcgcttgaaatacttttctctttaagaaaaggaaaaaaggcaagtaatttactaaatgtgtttaaaccatttcctcaaatattagaaaatataatagttaaagataaaaagattattaatacttccaaatgcaaaaaagctattaaaagagctaatgatttaatgaacggatatggaagactcttagtaaggaattcgggcacagagccaaaaattagaattatgggtgagtcgattaataaaagtttaattctaaaatgtataaaaatagttaagaaatcgataaaataaa

SEQ ID NO: 292321 - DNA, 751 bp, Unknown
  Bacterial polypeptide expressing nucleotide sequence isolated from the Sargasso Sea
tcaattatttagatcattgggtgccacagttcattcaattggaatctcgccaaatggatttaatataaataaaaaatgtggttctacatttccaaataaaataaaatatcatacaaaaaaaaataaatcccatattggagtttctttagatggcgatgcagataggattattatttgtgatgaaaagggtaatattattgatggagataaaataatagctatgttagcaacaagatggaaaagaaaaaaaattttaaaaggtggtgttgtaggtaccttaatgtcaaactacggattgcaaaaatatttttctaaaaataagataaagtttttaagatctaaagttggtgatagatatgtaaaagaagtaatgcagaaaagtaagtttaatttaggaggagagcaatctggacatattatccttggtaaatttgcgactacaggcgatggtttattggttgcattagaaattctattttctatgagaaaaggcaaaaaggcgagtgaaatatttgaaaactttacccccactcctcaattgttggaaaatgttgaggtaaaagataaatcaataattaataatctcaagtgcaaaaatgcaattaaaaaagcaaacagtttggtaaaaggtaaaggcagaatgttagtaagaaaatctggaacagaaccagtagtgagaataatgtgtgaaactgaagataaaactatactttcaaaatgtgttaacatcgtaaaaaaatcaattatctaa

SEQ ID NO: 292322 - DNA, 952 bp, Unknown
  Bacterial polypeptide expressing nucleotide sequence isolated from the Sargasso Sea
aaaaaaaattgaaggtcttatagatagaaatatctcaaaaaatctttcgcattctgaaaaattaggaagagttaaaagattagaaacaggcaccaaaaaatatattaaaatattaaaaaaaaattttacaaatgagttcaatttaagaggactaagaatagtaatagattgtgcaaatggcgctggttataaagcaggacctgaactattgaaatcattaggagctaaagtcatagcaataggtgttaaaccaaatggtttaaatataaataaaaaatgtggatcaacttttccaagaaaaatcagatctgcagtaaaaaaatataaagcacatatcggaatatctttagatggagatgctgacagaattataatgtgtgatgaaaaaagcaatataatagatggagatcaaattatagctgctttagcaacaagatggaaaaataaaaaaatgttaaaaggtggagttgttggaacattaatgtcaaattatgggttagaaaaatattttaaatcaaaaaaaataaaatttttaagggcaaatgttggtgatagatacgttaaagaaaaaatgcaaaaatataattttaatttaggtggtgagcaatcaggacatattattttaggtaaatttgcaaccactggagatggtttactagtagctttagaagctctttttgctataagaaaaggaaaaaaggcaagtgaattttttaaacaatttaataaaacacctcagcttttagaaaatatcgaagttaaagataaaaatataattaataaaccagagataaaaaaaattataaaaaatgcagagaaattaatcaaaagtaatggaagaattttagtaagaaaatcaggaacagaatctaaaataagagtaatgggagaaagtgaaaataaagctcttttatataaatgtgtgaacatgattaccaaaaaaattaaataa

SEQ ID NO: 292323 - DNA, 1033 bp, Unknown
  Bacterial polypeptide expressing nucleotide sequence isolated from the Sargasso Sea
aatggtggttaaactatttggtactgacggaataaggggaaaagctaatgttaatcccatgaccgccgaagtagcccttaaagttggtatggcggcaggagcagtatttacgagtggagcgcggcgtcacacggtggttataggcaaggatacccgcttgtctggttatatgcttgaaccagctctggctgccggctttataggtatgggcatggatgttatattcgttggccctatgccaacgcctgccgtagcaatgctggtccgaagtcttagagcagatcttggagtgatgatctcggcttcgcataactcctttgaagataatgggataaaactgtttgggccgagcggatataaactctctgattcagccgaagcagaaattgagtctctagttgaacaacaaaatacaaataaattggctacccccaataaactcggacgtgctcgacgattagaagatgcggaggggcgttacattgagtttgctaaaaacacttttccgaaaggtttaaggctggatggtctaaaaatagtagtggattgtgccaatggcgctgcatacaaagtagttcccgccgcactttgggagttaggtagcgatgtagttgctttggggatttctcctaatggattaaatattaataaggcctgtggtagcactaatacggagttaatgcgtgagacagttgtaaatgagggagccaatcttggcatcgcacttgatggagatgcagatcgagtaatccttgctgatgaggagggtaatattattgatggcgaccaaattttagctttaatagcaaaatcttggaagagtgataataggcttaaaggggaggggatagtgacgaccgtaatggccaaccttggattagagaggttccttaccgatctggggttaaatgtggtgcggacaagagttggcgaccgttatgttgtagaaaaaatgttatgcgatggttttaatgttggcggtgagcagtcaggccatattattcttaatgattacaataccaccggtgatgga

SEQ ID NO: 292324 - DNA, 769 bp, Unknown
  Bacterial polypeptide expressing nucleotide sequence isolated from the Sargasso Sea
tgttataaggctgccccaaaattaataagagaattaggagcaaaagttatttctatcggcgtaaaccctgatggttttaatataaatgagaaatgtggatcaacttacccatcaaaacttagaaaaacagtaaaaaaacacagagcaaatgtaggtatttctttcgatggtgatgctgacagaattattatgtgtgacgaaaaaggaaaaattattgatggagatcaaattattgcaatgttagccagaagatggaaaatgaaaaaaattcttaaaggaggcgttattggcactttaatgtctaactatggtttagaaaattttttgaagagagaaaaaattaaattttttagatcaaaagttggtgatagatatgtgaaggaaaaaatgaaaaaattcaattttaacttagggggagaacaatctggacatattattttaggaaaatttgctacaacaggtgatggtttattagtagcattagaagttttattttctttaagaaagggcaaaaaagccagtgaattactaaatgtctttaaacctttacctcaaattttagaaaatatttcagtaaaagataaaagcataataaataaattaaaatgcaaaagagcaataatgaaggctaacgcactaatgggatcggaaggtagaattttagtaagaaaatctggaaccgaaccaaaaattaggataatggcagagtcatataataaaaaattaatttcaaaatgtgttaatatgatcaaaaaatcaataaattaaa

SEQ ID NO: 292325 - DNA, 955 bp, Unknown
  Bacterial polypeptide expressing nucleotide sequence isolated from the Sargasso Sea
aaaaaaaattgaaaaattaatagattcaaatattacaaaaaacttatctaaaccaaatgttcttggtagagttaaaagattagagaatgctaatgaaagatatattaaaattttaaaatctaattttccaagtaatttcagcttaaaaggaattaaaattgctatagattgtgctaatggtgctggatacaaatctggtccaaaacttttaaaatctttgggagcgaaagtttacaatgttggtacacttcctaatggtttgaatattaatcaaaattgtggatctacttttccaagaaaaattaaatttttatctaaaaagtataaagtagatctaggaatatcattagatggagatgctgatagggttattttatgtgatgaaaaaggtaccatagttgatggtgaccagatcatagcgatgctggccaaaagatggaaaagaaaaaaaattcttagaggtggcgttgttggaactttaatgtctaattttggattacaaaattattttagagaacaaaaaataaaatttttaagagcaaatgttggagataggtatgttaaagaaaaaatgcaaaaaaataattttaatctaggaggagaacaatcaggccatattatattaggaaaatttgcaacaactggtgatggattgctagtagctttagaagttttattttcaatgagaaaaggaaaaaaagctagcgacttattaaatatttttaagcccatgccacaaattttagaaaatatttttgttatagataaaaatataataaataaattaaagtgtaaaaaagcaataaaaaaagctaataaactcatgggacaaaacggtagacttttgattagaaaatctggcacagagtcaaaaattagagttatgggagagtcacataataaaaatttgattataaaatgtataaagataattaaaaggtcaataaaatattga

SEQ ID NO: 292326 - DNA, 700 bp, Unknown
  Bacterial polypeptide expressing nucleotide sequence isolated from the Sargasso Sea
aaatggtttaaatattaataaaaaatgtggatcaacttttccaagaaacattagatctgctgtaaaaaaatataaagcgcatatcggaatatctttagatggagatgctgacagaattataatgtgtgatgagaaaagcaatataatagatggagatcaaattatagctgctttagcaacaagatggaaaaataaaaaaatgttaaaagggggagttgttggaacattaatgtcgaattatggtttagaaaaatattttaaatctataggaataaaatttttgagggcaaatgttggagatagatatgttaaagaaaaaatgcaaaaatataattttaatttaggtggtgaacaatcggggcatattattttaggtaaatttgcaactacaggagatggtttgttagtagctttagaagctctttttgctttaagaaaaggaaaaaaggcaagtgaattttttgaacaatttaagaaaacacctcaacttttagaaaatatcgaggtaaaagataaaaatattattaataaaccagagataaaaaaaattataaaaaatgcagataaattaattaaaggtaaaggaagaattttagtaagaaaatcaggtacagagtctaaaataagagtaatgggagaaagtgaaaacaaagctcttctatataaatgtgtgaacatgattacgaaaaaaattaaataa

SEQ ID NO: 292327 - DNA, 1195 bp, Unknown
  Bacterial polypeptide expressing nucleotide sequence isolated from the Sargasso Sea
tataattgcaaaggatactagattgtcagggtataccttagaaccagcactagtttctggtttagtatctggtggaatgcatgtttacactttaggtcctttacccacaaatggtttagctatgttgactaaatctatgaaggctaatatgggaataatgattaccgcatcacacaatccttaccacgataatggactgaaattatttggtcctgatgggatgaaactatctgataaaattgaaaaaaaaattgaaaaacttatagatgcaaaaaatacaaaacagttaacaaacccaaaattattgggaagagtaaaacgtctcgaggatggaaatgataaatatacaaaaatactaaaaagtaactttccaaacaattttcatctaaaaggtactaaaattgttttagattgtgcaaatggagcttcttataaagctgctcctaaattattaaaagaacttggtgcgaaagtgatttctatgggagtaaaaccaaatggattaaatattaatgaaaaatgtggatcaacatatccctcaaaaataaagacagctgttaaaaaacataaagctacaatcggaatagcatttgatggagatgctgacagagtaattatgtgtgatgaaaaaggaaaaataatagatggtgatcaaattatagcaatgttggctcgtagatggaaatctaaaaaaattttaaaaggcggtgtgattggaacattaatgtcaaattatggtttggaaaaatttttacttaatgaaaaaataagattttcgaggtccaaagttggagatagatatgttaaagaaaaaatgaaaaagctcaattataatttaggtggtgaacagtctggccatattattttaggaaaatttgcaacaactggggatggattattagtagccctagaggttttattttctcttcggaagggtaaaaaagctagccgattattaaaagtttttaaaccattaccgcaaatattagaaaacatagatgttaatgataaaaatgtaattaataaatcaaaatgtaaaaaggcaataaagatagcaaataagcttatgggtcaaaatggtagaattttagtcagaaaatctggaacagaaccaaaaattaggataatggcagagtcgtatgataaaagtttaattctaaaatgtataaaagtaatcaaaagctcaattaaataa

SEQ ID NO: 292328 - DNA, 820 bp, Unknown
  Bacterial polypeptide expressing nucleotide sequence isolated from the Sargasso Sea
atgacaaaaaaatattttggcacagatggaataagaggaaaggtaaatggaaataaaataaatggtgacatgttttttaagtttggtttggctgttggaacatatttcaataataaaaaaaaaaccaaacagatggcagtaattgctaaagacaccaggttatcaggatatacgctagaaccagcattagtatctggtttaacatcagctggaatgcacgttttcacttttgggccactaccaacaaacggtcttgcaatgctaacaaaaaaaatgaaagctaatatgggaattatgattactgcatcgcataatcctttttatgataatggtttaaaattatttggaccaaatggtttaaaattgtctgacaaaatagaaaaaaaaatagaaaagctaattgattctaaaatatcaaaaaaattatcaaatcctcaaatattaggaagagttaaaagattagaggatggctcaaataaatatattgaaatattaaaaacaaattttcccaaacaatttaatctaagaggtttaagaattacaatagattgtgcaaacggtgctgcatataaagtaggacctcaattatttagatcactgggtgccatagttcatgaaattggaacttctccaaatggttttaatattaataaaaaatgtggttctacatttcctaataaaattaaatatcatacaaaaaaaaataaatctcatattggagtttctttagatggtgatgcagatagaattattatttgtgatgagagaggtaacattattgatggagataaaataatagcaatgcttgcaacaagatgga

SEQ ID NO: 292329 - DNA, 613 bp, Unknown
  Bacterial polypeptide expressing nucleotide sequence isolated from the Sargasso Sea
atgaaacaaagaaagtattttggcacagatggcgtgcgtggtttagtggggacagcacctataaaccctgagtttgcaatgaagctaggttgggccgcaggacgtgtattatcaaaaggtggaaccaaaaaagttattattggtaaagacacgcgtatttcaggttacatgcttgagacggcacttgaagcgggtttaatagctgccggtattgatgttgttctgcttggcccaatgcctacgccagccgttgcttatttagcacaaacatttagggctgaggccggtattgtaataagcgcttcacataatccctattacgacaacggcattaaattttttaatggtcaaggcttaaaacttgatgatgctgtagagcttgaaatagaggccatgcttgatgagcaaatgacctgtgtggcctcagataagttaggtaaagcaacacgcttagcaagcgcagatggacgttatattgagttttgtaagagtcaatttccacaagggttgtctttagagggattaaaagtggttgtagattgcgctaacggcgcaacatatcatatagccccatcagtcatgagagagctcggcgccgacgtaattacgcatg

SEQ ID NO: 292330 - DNA, 775 bp, Unknown
  Bacterial polypeptide expressing nucleotide sequence isolated from the Sargasso Sea
tggagctgcatacaggttggacctcgattattaagatctctaggagccacagtttatgaaattggcacttctccaaacggatttaacattaataaaaaatgtggatcaacttttccgaataaaattaaaaatttaacaaaaaaaaatagagcacatattggaatttctttagatggagatgcagatagaattattgtatgtgatgagaaaggaaacatcatagatggtgacaaaataattgcaatgttagcgcaaagatggaagagaaaaaaaatattaaaaggaggagtagttgggacattaatgtctaattatagtttagaaaaattttttaaaaaaaataaaataaagtttttgagatcagacgtcggagatagatatgtaaaagaattaatgcaaaaaaataagtttaatttaggtggagagcaatctggacatataatcctaggtaaatttgcaactactggagatggaatgttagttgccttagaaattttattttcaatgagaaaaggcaaaaagtctagtgaattgtttgacaattttattccaactcctcaattattagaaaatatagaagtaaaggataaatcaattattaaaagtaccaaatgtaaaaaggcaataaagattgcaaaaaatttagttagagacaaaggtagaatgttagtaagaaaatctggcacagaacccaaaataagaataatgtgtgaaagcgaaaataaaattttgcttaagaaatgtataaatattgtaaaaaaatcaatcaattaaa

SEQ ID NO: 292331 - DNA, 754 bp, Unknown
  Bacterial polypeptide expressing nucleotide sequence isolated from the Sargasso Sea
aatgaaaaataaatattttgggactgatggtatcagagggactgtcaataaaggaaatattactggagaaaaattttttaagtttggtttagcatctggaacatattttaaaaatcaaaaaagaactaaacaaattgctgtaattgcaaaagacacaagattgtcaggctatactttagagccagcactcgtttcaggtttggtgtcaggcggcatgcatgtttttacgttaggtcctttgcctactaatggtttagctatgcttactaaatcaatgaaagcaaatatgggtattatgattactgcttcccataatccttattatgataatggtttaaaactatttgggcctgatggtatgaagttgtcagatagaatagaaaaaaaaattgaaaaactaattgatgctaaaaatacaaaacaacttactaatccaaaacaactcggaagagttaagagactcgaagatggcaacgatagatatataaaaatactcaaaaaaaattttccgaaagactttcatcttaatggaacaaaaatagtattagattgcgctaatggagcaggatataaatcagctccaaaattattagaggaacttggcgctaaagtaatttctattggagtaaaaccaaatggtttaaatattaatgataaatgtggatcgacttacccctctaaaataagatctgctgttaaaaaattcaaagcgcatatcggtatctcatttgacggtgatgcagatagagtaatt

SEQ ID NO: 292332 - DNA, 1306 bp, Unknown
  Bacterial polypeptide expressing nucleotide sequence isolated from the Sargasso Sea
attgaagaagtattttggtactgatggtattaggggtataccaaacgatactttaagtaaagatcttatatccaaaatatccgcatctgttgaacaacatataaatcctaaaaatattggtgttatttcagatacacgttcatcctcagatgaaattctgaattggatttccataggattttcaagcaaagtaaatatttataatcatggagttttaccttctggttcaatgcctataattttgaaaaaatttaattacgatcttggaattataatttctgcttcacataatcctgctgaatataacggcataaagttaattcaagaaaacggatcaaaattagatgatgatgttgaaatatcaattgaaaaaaatattgatagcttagaactaccaaatcaacatgctgaaataattaatttaagtgatggacatcttgaatatctgaattttcttgatgaggttacagatattgattttagtcattttcaaatactcatcgatgcagcaaacggatcagcttcaactgtcataaaagagttgtttgataaaaaaaatgcaaattacagaataattaacaatcaaccggatggcctaaatattaataaagactgtggagcaacagtccctgaaaatctacaaaaaaatattgaaaagggtgaaattggtgcatcttttgatggtgatgccgatagattgataatggttgatgaaaatggagatattgtaaatggagatctgatattaacaattctttcaaaatatttatcagaagtaaatcagcttaccaataacattgttgttagtacggtaatgtcaaattatggctttaaacaagccatagaaaaatttaattttgatcttattgaaactccagttggtgataaatatgttgcagaggcaatgaaaaaatatgacgcagctttagggggagaacaatctggtcacatcattatttctgacctattaccagttggtgacggtctagttacattaatctatgttttgaaagctatgcaacactttggtgtagctttgagtgattttaagagagagcatctttatgaatacccacaaaaactgacaaacctagaattagaaaataaattaaatgacgaagaattagaatacatcaaccaaatagctttggacatgtcaataaaaaaagacttagatggaagatatttaatacgtaattcagggacagagccattattgcgtgtacttgtagaggctaaaagtaatgaagctatggaagatttttcaaatgagcttattacaaaaattaataaatacctaaattaa

SEQ ID NO: 292333 - DNA, 1306 bp, Unknown
  Bacterial polypeptide expressing nucleotide sequence isolated from the Sargasso Sea
ttgaaaaaatatttcggaacagatggcatcaggggaatacctggagaatctcttaaagaggaaatcgtaacaaagatattttcttcagttgagaaaatattagcacctaagtcagtagcaataattttagacacaagggaatcttgtgaaatgattacagaatggattgttaaaggtttttcagaagaagtaagcataactaattatggaatattaccttcagggtcaatgcctattttattagagacttttaatgaagatcttggaataataatatctgcatctcataacccatcagaatataacggaataaaattgatcgataagaatggttcaaaattagatgatgatttggaaatacaaatagagagcgaattagagagggtttctttaccagagaataatgcgaaaattaagaattcaactaaaggctatgatatttatcttcagtatctgaagaatgttaatgattttaagtttgataagtttgatttaattattgatgctgcaaatggttcagcatttaaaatcattgaagatttgctttcagcaaaaaatgcccagtttaatataatctctaataatccagatggaaaaaatataaatgataattgtggtgcaacatttcctgaaaacttgcaaaaaaatatatctaatggtcaagtaggaatttcatttgatggtgacgcagatagattgattatggtagatgagaatcaacaggttgttaatggcgatcttttactaactattttgtctaaatatctgtcagaaaaaggtaatttaaatggtgattttgttgtgagtactgttatgtctaactatggatttaaacttgccatgaatgattttggcttcaagctgattgaaactcctgttggagataaatatgttgctgaagctatgaagaaaaataatgcaaaactaggtggagagcaatcaggccatataattttaggagattttttgcctgttggagatgctttgcttacttgtcttctagtattagaagctctagattattttgatgtttccattgctgattttaggaaaaaatatctaatggagtatccacaaaagttaacaaatattgaattatctaagtctcttaatgatgaggaacttgaatttataaatcaaatagcattagaaatgtcaataaagttagatttagatggtagatatttaatacgaaattccggaacggagcctttattaagggttttagttgaagcaagaagccaagaatcaatggaaaatttctctgaagaactgctttcaaaaattaataattatctaaattaaa

SEQ ID NO: 292334 - DNA, 1114 bp, Unknown
  Bacterial polypeptide expressing nucleotide sequence isolated from the Sargasso Sea
gctatatccatgctaacaaggtctatgaggtgtgatgtaggagtaatgatttcagcgtcccataactcatatgaagataatggtataaaattatttgatcctaatggtgaaaaactgagtgacaaaagtgaacttaaaatagaatccttgatggataaaaatcataaaattaatttagtagattcctcaaaactaggaagagcaaaaagaattgaagatgcggcgggaaggtatttagaatttgttaaatcaacttttccagatgagttatctcttaaaaaattaaaaattgtaatagactgtgctaacggggctgcctaccaagttgctccaagagtattgtgggagctaggtgctgaagtaataccgataggatgtaatcctgatggtacaaatattaactataaatgtgggtcaacctaccctatccatatggcaaatatggttaaaaaacataaagctgatattggtattgcattagatggtgatgctgatcgttgtgtactttgtgatgaaaaaggtaattttatccacggtgataaaataattggattaattgtaaaaagatatttagatcaaggtcttttagaagggaaatctattgttggaactaaaatgacaaataaaggtcttgaaaattacttaaataatttaaatttaaatctaattagagcaaatgtaggcgatagatatgttgtggaaaaaatgagagaaaatggttgtaacattggtggagaacagtcaggccatattattcttggtgaatatggaagtactggtgatggattagtggcatctctccaaataattgcatctatgttagaaaataatattaaaatttctaaattaatggatatattttcattaatgccacaaactgttgaaagtattgcctatgatagcaactactttaaatataaaaatagtgatcaatttataaaaaatataataaaaatgcatgaaaaactacttgggaaagagggtaaaataattataagagcttctggtactgagagtaaacttagaataatgggcgaatgtgaaaataaaatattattaaacaaaacacttaaaaacttaaaaatagaaattacaaattatattaatgaataat

SEQ ID NO: 292335 - DNA, 1078 bp, Unknown
  Bacterial polypeptide expressing nucleotide sequence isolated from the Sargasso Sea
atgttaacaaaatctatgaaagctaacatgggaattatgattacagcatctcataatccttaccatgataacggtcttaaacttttcggaccagatgggatgaaattatcagatcagatagaaaaaaaaattgaaaaacttatagatgcaaaaaatacaaaacaattaactaatccaaaatcattaggcagggtaaagcgattagaggatggaaatgacaaatatattaaaattctaagaaaaaattttccaaaaaattttcatttaaaaggaacaaaaatagttttggattgcgctaatggagctggatataaagctgctcctaaattgttaaaagagctaggagcaaaagtaatatctataggagtaagccctaatggttttaatattaatgaaaagtgtggctcaactcatccttctaaaatcagatctgcagtaagaaaatttaaagcacatgtaggaatatcatttgatggagatgctgacagaattattatgtgcgatgaaaaaggcaagattataaatggagatcaaattatcgctatgcttgctaaaagatggaagtttaaaaaaattttgaaaggtggagtagtgggaaccttaatgtctaattatggtttggaaaattttttaagaaaagaaaagataaaattttatagatccaaagtaggagatagatatgtcaaagaaaagatgaggaaattaaattttaatttaggtggagagcaatcaggacatataattttaggaaaatttgcaactaccggagatggcttgatggtagctttagaggttttattttctctaagaaaaagaaaaaaagcaagtaaattactaaatgtttttaatcctttgcctcaaattttagaaaatattattgttaaagataaaaatataattaacaaaactaaatgtaaaaatgcaattaaaaaagctaataaacttatgggccatagtggaagaattttagttagaaaatctggaactgaacctaaagttaggattatggctgagtcacttaataacagtttaattttaaaatgcataaaaataattaaacaatctataaaaaattgaa

SEQ ID NO: 292336 - DNA, 1333 bp, Unknown
  Bacterial polypeptide expressing nucleotide sequence isolated from the Sargasso Sea
atgtataaaaaatattttggaaccgatggaattagaggaagagtaaatcaaacaaaaattaatggagaaatgttttttaaatttggtttagcctcaggtacatattttaaaaacttaaaaaaaaacaaacaaacagctataattgctaaagatacgagattatctggatattctttagaaccagcattagtttctggacttgcatcagcaggcatgcatgtttacacattaggaccattaccaaccaatggtcttgcaatgttaactaaaaaaatgaaagcaaatatgggcattatgattactgcctcccacaatccatattatgacaacggtttaaaattatttggtccagacggacttaaactatctgataaaatagaaaaaaaaattgaaaaactcattgattcaaaaattaccagaaacctttctcaacctagagttcttggaagagtaaaaagattagaagatgcaaatgataggtatattaatattttaaaagaaaattttccaaaaaaatttaatttaaagggaattaaaatagcaatagattgtgctaatggtgcaggatataaatctggaccaaaacttttaaagtctttgggggctaaaatatatactgttggtacatctcctaatggattaaatattaaccacaaatgtggatcaacatatccaaataaaatcaaatctttagttaaaagacacaaggtaaatctgggaatatccttagacggtgatgctgatagaattattttatgtgatgaaaaaggaaatataattgatggagatcatatcattgcaatgttggccagcagatggaaaagaaaaaaaattcttaagggaggagttattggtacattaatgtctaattatggccttcaaaattattttaaacaagagaaaattagatttataagagcaaaagttggcgataaacacgttaaagaacaaatgaaaaaaaatagatttaatttaggtggagaacaatcaggacacattatacttggaaaatttgcaacaactggagatggtttgctagttgctttagaagtattattttcaatgaaaaaaggaaagaaagcaagtgagttatttaatatttttaaatccactccacaagttttagaaaatgttgtagttagagataaatcaattattaactcaacaaaatgtaaaaaagcaataaaggttgccaaaagattaataaaaaatcggggacgattattagtaagaaagtctggaaccgagtctaaaataagaattatggtagaatccgatcataaaagaacattacatcaatgtgttaacatggttaaaaaggctgttttgtaaa

SEQ ID NO: 292337 - DNA, 1381 bp, Unknown
  Bacterial polypeptide expressing nucleotide sequence isolated from the Sargasso Sea
atggccgatttggcgtcccatccggtgggccaacccctcgagggtggtggcgtcagctttggcaccgatggcatccgtggccgggttggcacggtgatgacaccagccctggcacttcaagtgggctactggagtggtcaggtgttgcctgctggagcaccggtgttgctgggcatggactcccgcagcagtggccccatgcttgtggctgctctggaagccggtctggctgcagctggccgtgaagtgtggacgcttgggctatgccctaccccggctgtagcgcgccttgtgaatcagtttcaggccgccggcggcctgatggtctcagctagccacaatccacctgaagacaacggcatcaagctgtttgggccatcaggagccaagctcagccgcgatcagcagcagttgattgaagcgggtcttcgcggtgaggtgcgccctgcgctgaccagttgtgggcccactcagcgtcgctccgagcttctggagagttacaccgtcttgctggagcagagcctgcagggacgtcgcctcgatggtcgccggattgtgcttgacctctgctggggttcggcaacctcttgcgctgagtccctatttcgccgactcggggccgaggtgatcgccctacatagccagcccgatggtgcggctatcaatgtcggttgcggcagcacccatttggagcccttgcgccaggccgttaaggagcacggagctgagatgggctttgcctttgatggtgatgctgatcgtgtgctggctgtcgatggtcagggccgtttggtggatggcgatcacatcctttatctgtggggctcagctttggccgatgccaactctctgccgcagcaacgactggtggccacggtgatgagcaaccttggctttgagcgggcctggacggcccgtggtggccaactggagcgcacagctgttggtgatcagtacgttcatgccgccatggcagaacttggtgcggcgcttggcggagagcagtcgggtcacatcatcagcgccgatcacggcatgagtggtgatggtgttttgacagccctgcagctcgcggctctgttgcaaccgggcgagaccctggctgatcgggttgatcaaagcttttgctcctacccccagcgtttgcgcaatgtgcgtgttcccgatcgcgaccgtcgaaagggctggcagcagtgtgatgcgctgacggctgcgatcgcagctgctgaggctgctatgggtgatcagggtcgcgttctcgtccgtgcctctggcaccgagccgcttctgcgggtgatggtggaagcctccagccaagagcaggtggatcactggaccgatcacctttctgagatggctgatcagctacttaacgcttgag

SEQ ID NO: 292338 - DNA, 1307 bp, Unknown
  Bacterial polypeptide expressing nucleotide sequence isolated from the Sargasso Sea
tatggatttaaaatttggaactgatggtattcgaggtcctgtcgaaagtaaaataacacctgaagcttgtttgaaaatcggtcatgcaactggaattgtaatgaaagaacttggttggaacacagttgttattggtaaagatactaggatatcaggatatatgcttgaatccgcacttcaagcaggctttatagcttcaggagtaaatgttaacttattgggaccacttccaactccaggggtagcatatcttactaaaacattaaggaaaaaatttggtgtagtaataagcgcttcccataatgattttttagataatggtattaaaatttttaatgaagatggagaaaaaatctctagagaaatagaaaaaaagattgagaaaaatatctctaaagaccttaaaccagttaaaacttctaaaatagggaaagcatataggtttgatgaatcaggaccaagatacatagagttttgtaaatctactgtacctcctggtgtttctttttcatctcttaggattgtaattgattgtgcaaatggcgcttgttataaagtaagtccagaaatttttcaagaacttggagctgaagtaattgagattggaactaaccctgatggctacaacattaaccaagattgtgggtcaaccaaccctgaagttgtcaaagaagcagttgttaaacatagggcagattttggaatttcattagatggagatggcgatagagttattttagtagataaagaaggaaatatacttgatggagatgaccttttatatattcttgcttatgcaaaccccaacagaaccggagcttggtcaggagttgttggaactcatatgagtaatcttgggtttgaaaagggcattcaagaactaggatataagtttattagggccgatgtcggagataagtatgttaccgaaatgcttgcaaaaaaaggttggatgcttggtggggaaacttctggtcacattatttgtaaagatcttgtaagtactggtgatggaacaatagctgccctgaaagttatttcatctctattaatgttagaaaaaagtccacaagaggttttatctaattataaaaaaattcctcaaattaataaggctgttgtagttaaaaataaagacattattaatgataaagatcttcaggctttaacaaaagaaatagagttgaatttaacagtaggaagaattcttgttagaccttcaggcacagaatcaaaaataagaattatggttgagtctcctgatgaaaagggggcagaaaaatttgctaaagatattgaaaaagtaa

SEQ ID NO: 292339 - DNA, 982 bp, Unknown
  Bacterial polypeptide expressing nucleotide sequence isolated from the Sargasso Sea
caaaaagtagtggaggattcaaatcaagatatttcagttcctacaaaagggatgtctttaaaagaggataaagagcttatgaatatttacatagaaagcttaattaaaaccatgggcagagaaagtttaagcggtatgaagataatattagatacatgctatggatccgcaacaacttgcgcacaaaaaatttttaataatcttggtgctgatgtaagggttatcaataactctaaagatggattaaaaattaatatgaattgtggttctactaacctagaaccacttaaaaaagcattaagagagagccctgccgatatgggatttagtttcgatggggatgccgatagagtaattggagtagattgtgaaggcaatgtattagatggagatcatattctttttctatggggtagagaacttatggaagaaaggatgctcacaaataatttactcatatcaactcaaatggcaaatttaggttttgaaaatgcctggaacaaaataggcggatttttacatagaactgatgtaggcgataaatacgttcataacgcaattaaggaaaaaagagctgttttgggaggtgagcagtcaggtcatatactttcaaaaataaatgacttttctggagacgggatattgaccgcgcttcaaatttctaaatactgcaaaaagaaaaatattgctttaaatgactggcttaaaagtagttttgacccttttcctcagaaactaaccaacatcaagctagattttaatattaacaaaatcaatccaaaaaataaaattttaattaatcaaagtatagaaaattttcaggcaatttattctgataattgtagagtatatataaggcctagcggcacagaacccctaataagagttcttgttgaggcaaaaaatcagaagaaagttgattttttatcaagtgagataacaaacaaactttttttagaaattaatagaataattaactaag

SEQ ID NO: 292340 - DNA, 427 bp, Unknown
  Bacterial polypeptide expressing nucleotide sequence isolated from the Sargasso Sea
ttaatcagggcaaaagttggtgatcgatatgtaaaggaaaaaatgatttcagaagatttaaatttaggtggtgaacaatctggacatataattttacgcgattttacatcatcaggagatggaatagtagttgctcttcaagtcctatctatcttaagtagaaaaaaagcaaaagccagtgactgccttcatttattcagccctctaccacaaaacctgattaatttcccagtaaaagaaagaaatattttagatcacgaggatacgaagttatttatcaaatcttgtgaagaaaaagtttcagaagacggaagaatcgtagttagaatgtctggtactgaacctcttttaagagttatgattgaaagcggaaatcagcatacaattgatgaattaactgaaagcgtaacaaaatatttttcataaa

SEQ ID NO: 292341 - DNA, 1045 bp, Unknown
  Bacterial polypeptide expressing nucleotide sequence isolated from the Sargasso Sea
aatgaaaaagttttttggaacagatggagtaagagcaagttcgaatagtcaaaaacttaatggcttgacgcttatgaaacttggcatggcactaggtaaacacttcactgttggagaacatcgtcacaaggtcgttattggtaaagatacaagactatcaggatatatgattgaacaggcattaacctctggattattatctatgggaatggatgtctttctttttgggcccatacctacacctgcagttgcaatgttgacaaaatctatgcgagcagacttagggataatgataaccgcttcacacaaccaatatcaagataatggtattaaaatatttgataaaaatggaaataaattatcagacgaaactgaaattgaaatagagtctcttatggagtctgaattggaaaattcattagcgggtccaggaaaaataggcagagcaaaaaggctcgaagatgcaaatggtagatatatagaattcctaaaaggtacttttcctaaatcacaacggcttgatggtcttaaaattgtaatagattgtgcaaatggggcttcttatatttctgcacctttaattttatgggagcttggtgcagaagttattcaaatagctactcaaccaaatggaactaatataaatttcgaatgtgggtccactaataccaataaacttgctaaaaaagtactagaggagaaggctgatattggtattgccttagacggcgatggtgatcgattggctgttattgatgaaaaaggacatttagtcaatggcgaccagatactggcattactagctattgaaatgtcaaaagataaaaaattaaaaaataataatgtagttggtacttcaatggcaaacatgggcttagaaactttattaaagaaacataacattgggttaatcagggcaaaagttggtgatcgatatgtaaaggaaaaaatgatttcagaagatttaaatttaggcggcgaacaatctggacacataattttacgtgattttacttcatcaggagatggaatagtagttgctctt

SEQ ID NO: 292342 - DNA, 1249 bp, Unknown
  Bacterial polypeptide expressing nucleotide sequence isolated from the Sargasso Sea
atgaatttaaaatttggaaccgacggtattagggggcctgtcgaaaacaaaataacacctgaagcctgcttaaggattggccatgcaactgggcttgtaatgaaagaactaggttgggatacagttgttataggcaaggatactaggatatcaggatatatgcttgagtctgcacttcaagcaggttttattgcttcaggtgtagatgttaatctattgggacctcttcctactcctggggtagcttatcttacaaaaacattaagaaataaatttggtgtagttataagtgcttctcataataatttcttagacaatggtataaagatctttaacgaagatggtgaaaaaatctcaagagatatagaaaaaaagattgaaaaaaatattgctaaaaaccttactccagttgagacatctaaaataggtaaagcatatagatttgatgagtcaggaccaagatatattgaattttgtaaatctacagtacccccagatatttcattttcctctcttagaattgttattgattgcgctaatggcgcatgttacaaggtaagtccagaaatatttcaggaattaggtgcagaagtaataaaaatcggtacagaaccagatggttacaatattaatcaaaattgtggatctactaaccctgaagttgtccaagaggctgtaattaataacagagcagattatggtatttctcttgatggtgatggtgatagggtaattttagtagataaagaagggaatatattagatggagatgatcttttatatatacttgcttttgcaaatccaaatagaacaggttcttggtcaggagttgtaggaactctaatgagcaatcttggattagaagatggaattcagaaacttggttataaatttataagagctgatgttggagataagtacgttaccgaaatgctcacaaagaagggctggatgttaggaggagaggcctctggacatattatttgtaaagatcttgttagtacaggtgatggaacaattgcagctttaaaagttatatcttctttattgatgttagaaaagagtcctcaagaaattctttctaattacacaaagatacctcagattaataaggctgtttcagtaaataataaggatattgttaatgataaagacctcaaagcattaattaaagcaattgaatcagatatgactgttggaaggattttagttagaccatcaggaacggaatctaaaataaggattatgg

SEQ ID NO: 292343 - DNA, 645 bp, Unknown
  Bacterial polypeptide expressing nucleotide sequence isolated from the Sargasso Sea
ctgcagttaaaaaacatagagctaaaattggaatagcatttgatggagatgctgacagagtaattatgtgcgatgaaaaaggaaaaataatagatggcgatcaaattattgcaatgttggctcgtagatggaaatctaaaaaaattttaaaaggtggcgtaattggaacattgatgtccaattatggtttagaaaaatttttacataatgaaaaaataagattttcaaggtctaaagttggagatagatatgttaaagaaaaaatgaaaaagcttaattataatttaggtggtgaacagtctgggcacattattttaggaaaattcgcaacaactggggatggattattagtagccttagaggttttattttctcttcggaagggtaaaaaagctagccgattattaaaagtttttaaaccattaccacaaacattagaaaacgtagaagtaaatgataaaaatgtaattaataaatcaaaatgtaaaaatgcaataaagatagcaaataagcttatgggtcagaagggtagaattttagttagaaaatctggaacagaaccaaaaattaggataatggcagagtcgtatgataaaagtttaattctaaaatgtataaaaataatcaaaagctcgattaaataat

SEQ ID NO: 292344 - DNA, 1231 bp, Unknown
  Bacterial polypeptide expressing nucleotide sequence isolated from the Sargasso Sea
aatgactcctaatggtggcaaagttgcaattggtaaggacactcgaatctccggctatatgtttgaatcagcattagaatctgcttttgttgcacatggtttggaggtgattctgttaggaccgctcccttcgccagctattgcgtattacaccatcaaacaaaattgtgattttggaattgttataagcgcttcacataactcatatgaatataacggtattaagatcatcaatcatcaaggtgaaaaaattgatcgtgagatcgagagtatcattgagtcaaaactttctgatacgcctataacaaatactgcagaaacactagggaaagcaaaaatctcaaatacttctagaaatttgtataaatctcttttgatgtcaatattcgcagacatcgatcaacacttaccgctcaaaggttttaagattgttgtggatgcttcgaatggtgctgcctataaaatagcacctcaggtcttacttgatttaggagccgatgtaataccaattgcttgctcgcccaatggaaagaatattaatctagattgtggatctacacacccagagacgctcagaaaaacagtagtggctactgaatcaaatttaggaatagcgctcgatggagatgctgacagaattttgattgtagatgaagagggaagaatcttggatggcgatcagattctatatatccttgctaagtcaaatatttttaacaaatcatttaatcataaggttgttggaacaattaccactaattctggtcttgagatgaagttacgcgagatgaatattgatctatatcgttcagatgtcggtgataagaatgtttattcgatgatgaaaaaaaccggtgccatcattggaggcgaatcatcaggacatattattaactcggaatactcacctactggtgatgcattattgattgcactgataattattaaagaatctctcactaaagaattaaaaatcagtgagcttgttagtgatttagaacttttacccgtcctaaatgaaaacattgattctgaagatttattacatacgaatgaaaacttcctaagcgatcttgcaaatgagataaattcaaaaaaccctgaaggtcgagtagtcattagaccatcgggaactgaaccacttattcgaatttcaatagaaaataaagaccaagatgttgccagtattttggcgaaagacatcatcaataccattaaagtaaatggataa

SEQ ID NO: 292345 - DNA, 838 bp, Unknown
  Bacterial polypeptide expressing nucleotide sequence isolated from the Sargasso Sea
catggtaaataaatattttggaacagatggtataagaggtaccgtcaatcagggaaatataacaggagaaaaattttttaagtttggattggctgcaggcacttattttaaaaatcaaaaaaaaaataaacagatagcaataatagcaaaagatacgagattatctggctatactttggagccagctctagtatcaggattagtatcaggaggcatgcacgtttttacattaggacctttacccactaatggacttgcaatgttaacaagatctatgaaagcaaatatgggaattatgattaccgcatctcataatccttactatgataatggtttaaaattatttgggcctgatggtctaaaactttcagataaaatagaaaaaaaaattgaaaaattaatagatgccaaaagtacaaaacaacttacaaatcctgataaattgggtagagttaaaagacttgaagatggtaatgatagatatattaaaatattaaaaaaaaattttcctaaaaattttaaactaaaaggaactaaaatagttttggattgtgcaaatggggcaggatatatagctgctcctaaattgctcaaaagtctcggtgcaaaagtttttgcgattggagtaaaaccaaatggtctcaatattaatgacaaatgtggatctacttacccttataaaattcaatctgcagtaaaaaaatataaagcacatgcaggtatagcatttgatggtgatgctgatcgaataataatgtgtgatgaaaatagcaaaataatcgatggagatcagattatagcgactctcgcaaagagatggaggttaaaaagaatttaa

SEQ ID NO: 292346 - DNA, 1339 bp, Unknown
  Bacterial polypeptide expressing nucleotide sequence isolated from the Sargasso Sea
gatggctaaaagtttttttggcacagatggtataagaggaacagtaaatactgagagtcttaattcagaaattgcacttaagctcggacttgcggctggtaaaatttttactcgtggaaatcacaaacatagagtcttaattggcaaagatactagaatatcaggttatatgcttgaatcagcattagagtctggtttcacatcatctggaatggatgtgtttcttactggcccaataccaacaccagccgttgcacatttaactcaagcattaagagctgatttaggagtaatgataacagcttctcataatacttatgaggataatggctttaaactttttggtccagatggctataagcttaccgacgaaaagcaaacagaaataaatgagttaatgaatagatcagatataatgagtctgcaggataaaaaccaaataggcgctgcaagaagagttgatgatgcattgtcgcgttatattgaatttgcaaaagcatcttttccaaattctatgaggttagatcatcttaaaatcgttttagattgcgcaaatggcgctgcttataaggttgcaccaatgatattttgggagctaggtgctgatgttattgttataggggacaaacctaacggaagaaatataaatcaagattgtggatccactaaaacaaaagctttgagaaaaaaagtaatagatgaaaatgctgatttagggattgcatttgatggagatggcgacagattagcaataatagatgaaaatggagatcaagttaatggagatcatttactcgctatgattgctttattacttaagaaaaagaatttgttgaaaaataataaagttgtttcaacaataatggctaatctatctttagaaaactatcttgattcaatcgaccttaaattaattagagctaatgttggagatagatatgttattgaggaaatgttaaatagtggttcaaattttggtggtgagccctcaggccacttaataatcaatgatttttcaaccactggagatgctattatttcctcattgcaggttttatctttaatgattgaagagaataaatcaatttcgaatcttacaaatctttttcctcttatttctcaaaaacattatgagcatatatctgatgataaaaaagatatttcaaactctcatctagaaaatctttcaaaagaaatgaaagaaaaaattggaaatgaaggaagagttattattagaaagagcggaacagagccattaattagagtaatgattgaaactaataatcaaaatcttagcaacgaaatattagatgaagtcaaaacatctttaactctttag

SEQ ID NO: 292347 - DNA, 1077 bp, Unknown
  Bacterial polypeptide expressing nucleotide sequence isolated from the Sargasso Sea
ttggtacagacggaatcagaggaaccgtaaacgaagggaatataactggtgaaaaattttttaagtttggtttggcatctggtacttatttcaaaaatcaaaaaaaatctaaacaaattgcaataattgctaaagatacaagattatctggatacactttggagcccgccctagtctcaggattagtttcgggaggcatgcatgtttttacattgggacctttaccaactaatggtctagctatgttaacaaaatcaatgaaagctaatatgggtataatgattacagcatcccacaatccttattacgataatggcctaaagttatttggcccagatggaatgaagttatctgataaaatagaaaaaaaaatagaaaaattaatagatgctaaaaacacaaaacaattaacaaacccaaaactattgggaagagtaaaacgattagaggacggaaatgataggtatattaaaatattaaaaaataattttccaaataattttcacttgagaggcacaaaaatagttttagattgtgcaaatggggcgagttataaagctgctccaaaactactaaaagagcttggagccaaggttataccgatgggcgtaaagccagatggtttaaatataaacgagaagtgtggatcaacatttccatccaaaataagactagcagttaaaaaatttaaagcacatgttggtatttcatttgacggagatgcggacagaataattatgtgtgatgagaagggaaaaatcattgatggcgatcagattatcgcaatgcttgctaaaagatggaaatctaagaaaattttaaagggcggggttatcggaactttaatgtctaattttggattagaaaagtttttaaaaaacgaacatatcagattttccagatctaaagttggagatagatatgttaaggaaaaaatgaaaaaattaaatttcaacttaggtggagagcagtccggacacataattcttggtaaatttgcaacaacaggcgatggtttgttagtagcattagaagttttattctctttacggaaaggaaaaaggcgagtaaactaat

SEQ ID NO: 292348 - DNA, 1114 bp, Unknown
  Bacterial polypeptide expressing nucleotide sequence isolated from the Sargasso Sea
cattactgcgagccataatccatatgattggaatgggtttaaattcaagtctcatatcggaggaagcgcgaatcaggaaattatcgatcagatagaaagatatgcgaattctgcaaatccatcaggtgatctcgttgatctggaaaataccgaactcattgagtacatccctgccaagaaggtgtataccgatcatgtaaacacaatagttgacataactactgttaagaatgctaatctcaacgttattgtggattgcatgtatggctcagggatcgattacctaactgatatattgagtggttcaagtacacaaataactcagatccataataatatcaatccaagttttccagggatcggccatcctgaaccaataaggcaaaatctagtagaacttatgaacgaagttaactctgatgtaatgatagatttaggattggctttcgatggggatgcggaccgtattggccttattgatgaacaaggtcgttacatttctaccctggattctttttcattattggtctactactttttggcttacaaaaattatcgtggagcaattgtgaaaagtattactcactctgacatgattaataaattgtgtaattcatacaacgttgaggtttatgaaacggctgttggttttaagaatttaggacctaaaatgattgctaccaatgctgtattagcaggagaggaaagtggtggatttgcattccgcgacagtgtaccagaaagagatggaatattgagcgcattgtatcttttagaatttgtagctaatactgggaaaaactgttcagatctgttggacgagctgtatcagatcgttggcccgcatgtgtattctagaatcgatatagttttgaatgaagagcaaagggagaagataactttatttgatgctgcaacgattcctatggaaacattcccaattaagataaatcaaataaacacaatagacggagtgaaattaatcggtgatgctggttgggtcgcttacagactctctggtaccgaaccactactgcggatatacagtgaatccaataaccaacaatcagtggactctttgatagatcatgtacgtacttttttaggagtgtaa

SEQ ID NO: 292349 - DNA, 1327 bp, Unknown
  Bacterial polypeptide expressing nucleotide sequence isolated from the Sargasso Sea
aatgaaatattttggcacagatggaattagagggcacgtgaatagtaaaaatataaatggtgatatgttttttaaatttggcctagcggcaggcaaatattttacaaatttaaaaaagaaaaaacaaattgcgatcatagctaaagatacaagactttcaggttatgcacttgaacctgctttagtttctggtttagcgtcagcaggaatgcatgtttttaccttaggacctttaccaaccaacggactagcaatgttaacaagatctatgaatgctaatttaggaattatgataacggcatctcataatttatttgatgataatgggttaaaactatttggccctaacggactaaaattatctgacaaaattcaaaaaaaaattgagaatttaattgatctaaatgtaaaaaagcatttatctaatccaaaatctcttggaagagtaaagagattagagacaggtacagatgattatttagctataataaaaaaaaaaattcctaagagattaaaattaaaaaatatgaaaattgtattagattgtgcgaatggagctggatataaatctgcacctaaaatgcttaaaacccttggggctaagctgacaataattggagataaaccaaatggttttaatattaataaaaattgtggatctacttatccaaacacattgcaaagatatgtcaaaaaatataaagctgatttaggtatttctttagatggagatgcagatagaattataatgtgtgatgaaaaaggatctataatagatggtgatcaaattatagctgcattagctgttttgtggaaaaaaaaacgaattcttaaaggaggagtagtaggaactttaatgtcaaattatggtttagaggatttttttaaaagaaaaaaaattaaattcattcgagctaatgttggtgacagatatgttaaagaaattatgcaaaataaaaagtttaatttaggaggtgaacaatcgggacatataattcttggaaaatttgctactacaggtgatggtctcttagttgctcttgaagttattcaggcattaaatggaaaaataaaagcaagtaatttttttgatgtatttgagaaaatacctcaagtactagtaaatattaaaattaaaaatgaaaacatattaaaaaaattctctgtaaaaaactcaataaaaattgccaataaattaatcaaaggccatggcaggattcttgtcagaaaatctggaacagaagcaaaaataagaatcatgggagagagcaaaaataaatttttacttaataaatgtattaaaaatattactaaaacaattaattaa

SEQ ID NO: 292350 - DNA, 1075 bp, Unknown
  Bacterial polypeptide expressing nucleotide sequence isolated from the Sargasso Sea
aatgcttacaaaaaaaatgaaagcaaatatgggtataatgattaccgcttctcacaatccttattatgataatggtttaaaattatttggtccagacggtttaaaattatcagataaaatagaaaaaaaaattgaaaaattaatagattcaagaatttcagataaattatcaaatccaaaaatactcggtagagttaaaagactggaagacggacctaaaaaatatattgaaattttaaaaaaaaattttccaaaccaatttaatttaaaaggtttaaagatagctatagactgtgcaaatggagccgcatacaaggttggacctcaattattaagatcgttaggagcagtagtttatgaaattggcacttctccaaatggatttaatattaatgaaaaatgtggatcaacttttccaaataaaattaaaaatttaacgaaaaaaaatagagcacatattggaatttccttagatggagacgctgatagaattattgtatgtgatgagaaaggaaatatcatagatggtgacaaaataattgcaatgttagcacaaagatggaaaagaaaaaaaatcttaaaaggaggagttgttggaacattaatgtctaattatggtttagaaaaattttttaaaaaaaataaaataaagtttttgagatcaaaagttggagatagatatgtaaaagaattaatgcaaaaaaataaatttaatttaggtggtgaacaatctggccatataattcttggtaaatttgcaactactggtgacggaatgttagttgccttagaaattttattttcattgagaaaatgcaagaaagctagtgaattatttaaaaattttaacccaacacctcaattattagaaaatgtagaagtaaaagataaatcagttattaacagcactaagtgcaaaaaggcaataaaaatcgctaataatttagtcaaacataaaggtagaatgttagttagaaaatctggcacagaacctaaaataagaataatgtgtgaaagtgaaaataaaattttacttaagaaatgtataaatattgtaaaaaaatcaattacttaa

SEQ ID NO: 292351 - DNA, 1327 bp, Unknown
  Bacterial polypeptide expressing nucleotide sequence isolated from the Sargasso Sea
atgaagtattttggtactgatggaattagagggcaggtaaatagtgggaacattaatggagatatgttctttaagtttggattagcagcaggaaaatatttcacaaatttaaaaaaaagaaaacaaacagcaattattgctaaagatactagactttcaggatacgcattagaaccagcactagtttctggtttagcatctgcaggaatgcacgtttatacactgggtccattgccgactaatggccttgcaatgttgacaaaatcaatgaacgcaaatcttggtattatgatcactgcttcacacaatttattttatgataatggtttaaagttattcggtcctgatggattaaaactatctgataaaattcaaaaaaaaattgaaaatttaatagatagcaaagttcaaaaacacttatcaaatccaaaaaaattaggaagggttaaaaggctagagactggaactgatgaatatattaaaatttgtaaaaaaaagttatcaagaaactttaaattaaataatttgaaagtagttctagattgtgcaaatggagctggatataaatctgcaccaaaattaatcagatcacttggagcaaaattaaaagttataggcaataaaccaaatggttttaatattaataaaaattgtggttcaacttttccagaaaaactacaaagaaatgttaaaaaattcaaagcagatttgggtatatctttagatggagatgctgacagaataataatgtgtgatgaaaaaggatctataattgatggtgatcaaattatcgctgcattagctttacaatggaaaaagagaaaaattctcaaaggaggcgttgtcgggaccttaatgtcaaactatggtttagaaaaatttttaaaagaaaaaggtattaaatttttaagagctaatgttggggacagatatgttaaggaattgatgcaaaagaaaaaattcaatttaggaggagagcaatcgggtcatattattttaggaaaatttgcaacaactggcgatggtgtgcttgttgctttagagattatcaaatcaatgaatagaaaaactaaagccagtgatttttttaatgtctttaaaaaaattccacaaattttagaaaatataaaaataaaagatgataaaatacttaaaaatcactctgttaaaagatccattaaaattgcaaaaaaattaattaaaaatcaaggtcgaattcttgtaagaaaatcaggcactgaaccaaagataagaataatgggtgagagtgaaaataaaattttgcttaaaaaatgtataaaaataatttcaaaagaatttaaataaa

SEQ ID NO: 292352 - DNA, 1231 bp, Unknown
  Bacterial polypeptide expressing nucleotide sequence isolated from the Sargasso Sea
tttaagaatcttaaaaaaacaaaacaaatagcaattattgctaaagacactagattatctggatatactttagaaccagctttagtttccggtttagcatctgctggaatgcatgtttatactttaggacctttgccaactaatggtcttgcaatgttgaccaaaaaaatgaaagcaaatatgggtataatgattacagcttcgcataatccatattatgacaatgggctaaaattatttggtccagatggacttaaattatctgataaaattgaaaaaaaaattgaaaaactaattgaatctaaaataaataaaaatttgtcaaagccagaaattcttggaagggtaaaaagattagaagatgctaacgacagatatataagaattttaaaaaataattttccagacaattttagtttaaaaggaataaaaattgccatagattgtgcaaatggagcaggatataaatcaggaccaaaacttttgaaatcattaggagcaaaagtatatcagattggtacatcacctaatggcttaaacattaatgataagtgtggatcaacatttcctaataaaataaaatttttagttaaaaaacataaagtaaatttaggtatatctttagatggagatgcagatagaattattttgtgcgatgaaaaaggaaaaataattgatggagatcaaataattgcaatgttggcaaatagatggaaaagaaaaaaaatcctaaaaggaggagtagttggtactttaatgtctaattatggattacaaaattactttagagaacaaaaaacaaaatttttaagagctaatgttggagacaggtatgttaaagaaagtatgcaaaaaaatagatttaatctaggaggagagcaatcaggccatattatattaggaaaattcgcaacaacaggtgatgggcttttagtggcgttagaagttttattttcaatgagaaaagggaaaaaagctagtgatttattaaacgtttttaaacctatgcctcaaattttagaaaatattcttgttagagacaaaaatataataaatgaactaaggtgtaagaaagcaattagaaaagctaacaaattaatgagaagaaatggaaggcttttagtcagaaaatctggtacagaaccaaagattagaattatgggagagtcgcataataaaaatttgattataaaatgtataaaaataattaaacaatcaataaaatattgaa

SEQ ID NO: 292353 - DNA, 1188 bp, Unknown
  Bacterial polypeptide expressing nucleotide sequence isolated from the Sargasso Sea
ctaaagacacaagatattctggatatactttagagccagctttagtttcagggctagtatctggaggaatgaacgtttttactttgggaccactacctacaaatggtttagccatgcttacaaaatcaatgaaagccaacatgggaataatgattacagcttcacacaatcctttttatgacaatggtttaaaattatttggaccagatggaatgaaattgtcagatagtattgaaaaaaaaattgaaaaattaattgatgcaaaaaatacaaatcaactaacaaaacctaaatttttaggaagagttaaaagattagaggatggaaatgaaaggtatataaaaatattaaagaaaaattttcctaacaactataatctcaaaggtacaaaaatagttttagattgtgcaaatggagcctgttataaagcagctccaaaactattaaaagaattaggggctagagttatatccataggcgttaaacctaatggtctaaatattaatgaaaagtgcgggtctacatatccatctaaaattaaacaagctgttaataaatacaaggcacatgttggtatttctttcgatggagatgctgacagaataattatgtgtgatgaaaaaggaaaaattataaatggagatcaaattattgctatgcttgctagaagatggaaatccaaaaagatcctaagaggtggagtaattggaactttaatgtctaatttgggtttagaaaaatttttaaaaaatgaaaaaataaaattttttaggtctaaagtaggcgatagatatgttaaggaaaaaatgaaaaaattgaattttaatcttggcggcgaacagtctggtcatataattttaggaaaatttgcaaccacaggtgatggtctacttgtagcattggaagtattgtattcattaagaaaaggcaaaaaagccagtaaactattaaatgtttttaaaccactgcctcaaattttggaaaatgttgttgttaaagataaaaatataattgataaaattaaatgtaggaatgcaattaaactagctaataaaatgatgattggcaaaggaagagttttagtaaggaaatctggcactgagccaaaaattagaattatggctgagtcatataataaaaatttaattttaaaaagtataaaaataataaaaagatctataaaataaa

SEQ ID NO: 292354 - DNA, 1090 bp, Unknown
  Bacterial polypeptide expressing nucleotide sequence isolated from the Sargasso Sea
accaatggattagctatgcttacaaaaaaaatgagagcaaatatgggtataatgattaccgcttcacataatccttattatgataatggtttaaaattatttggtccagacggtttaaaattatcagataaaatagaaaaaaaaattgaaaaattaattgattcaagaattgtagataaattatcaaatccgaaaatacttggcagagttaaaagactagaagacggatctaaaaaatatattgaaattttaaaaaaaaattttccaaagcaatttaatctaaaaggtttaaagatagctatagactgtgcaaatggagctgcatacaaggttggacctcaattattaagatcgttaggcgcagtagtttatgaaattggtacttctccaaatggatttaatattaatgaaaaatgtggatcaacttttccaaataaaattaaaaatttaacaaaaaaaaataaagcacatattggaatttccttagatggagatgctgatagaattattgtatgtgatgagaaaggaaatatcatagacggtgacaaaataattgcaatgttagcgctaagatggaaaagaaaaaaaatcttaaaaggaggagttgttggaacattaatgtccaattatggtttagaaaaattttttaaaaaaaataaaataaagtttttgagatcaaacgttggagatagatatgtaaaagaattaatgcaaaaaaataaatttaatttaggcggtgaacaatctggtcatataattcttggtaaatttgctactactggtgatggaatgttagttgccttagaaattttattttcaatgagaaaaggtaagaaagctagcgaattatttaaaaattttaaccctacacctcaatttttagaaaatgtagaagtaaaagataaatcagttattaaaagcatcaagtgcaaaagagcaataaaaattgctaataatttaatcaaacataaaggtagaatgttagttagaaaatctggaacagaaccaaaaataagaataatgtgtgaaagtgaaaataaaattttacttaagaaatgtataaatattataaaaaaatcaattaattaaa

SEQ ID NO: 292355 - DNA, 805 bp, Unknown
  Bacterial polypeptide expressing nucleotide sequence isolated from the Sargasso Sea
attgttgtcgatagtgccaacggagcagcatataaagtcgcacctagtgtatttgaagaactgggcgcaaaagtaattaacatcgccaatacgccgaatggcataaatattaataatgattgcggtgcaacttccctcaactcgttgagtaaagcagtcacgacaaataaagctgatctaggcatagccgttgatggcgacgccgatagaatcatgtttgtcgactctcaaggtgaggttgttgatggagatgagattctctttttaatggctcgtgaagctaagcaagctggctataaaggcggtgttgtcggcacactgatgagcaacctaggccttgaaatagcattgaaagaacttgatattccgtttgttagaacaaaagttggggatagatatgtcgtcgagaaacttaaggaaactggttggcgaattgggggggaaacctcaggacatattcttaacttagattatgcatttactggagacgccattatcgctgcgctacaaattttaaccgtagtagtaaaaagtgaatactccttaagtgaactaaaagcagggatgacaaagcttcctcagtgtatggtgaacgttcgtcataacgatctggattcagtgcttgatttagatgtagtaaaagatgaggtcagtcgcgtagaagaggctttaggtaaaaatggacgacttgttcttagaaagtctggaacagaaccattaattcgtgtgatgatagaagctagagatagggggcttgcttctgagttagccaatagcttggctgaagtcatcagagaaaattaaa

SEQ ID NO: 292356 - DNA, 706 bp, Unknown
  Bacterial polypeptide expressing nucleotide sequence isolated from the Sargasso Sea
aatggaataaatatcaatgataagtgcggctcaactaatacggctttattagcaaaaactgtaatagagaaaaaagctgatataggcattgcattagatggagatggagaccgtttagcaatagtcgatgaaaaaggaaatgacattaatggcgaccaaatccttgcgttgttagcaatgcatatgagcaaaaaaaacttactccaaaaaaataaagttgttgggacttcgatggccaatattggcttagaaaatctactcaatgagaataatattgaattagttagagctaatgttggtgatagatatgtcaaagaaaaaatgattcatgaaaatcttaatttaggtggagagcaatcaggtcatattatcatgagggattacacatcctctggtgatggtatcattgttgccctacaagtacttgcaattatcatgcaaaataaaaagcaggctagtgaaatttttaatttatttactccgcatcctcaaaaccttattaattttgaagttaaaactaagaatattttggaaaatgatgaaaccaagaattttattaaaaagtgtgaggaagaagttgcaggtgaaggtagaatcattgttagaatgtctggtactgaaccacttttgagagttatgatagagtgtaaaagtcagaacaaaattgataaattaactaaaaacgttactaaatatttttcttaat

SEQ ID NO: 292357 - DNA, 937 bp, Unknown
  Bacterial polypeptide expressing nucleotide sequence isolated from the Sargasso Sea
atgagcaaaaagtattttggtactgatggtataagaggaaaagtaaatcaatataaaattaacggagaaatgttttttaggtttggtttagcctcagggacatattttaaaaatctaaataaaagtaaacaaacggcaattattgctaaagatacaagactctcaggatatactttagagccagctttagtttcaggattagtatcagctggaatgcatgtctatctcttaggcccattgccaacaaacggacttgccatgctaacaaaaaaaatgaaggctaacatgggcataatgattacagcttctcacaatccatattatgataacggtttaaaactatttggaccagatgggcttaaactttctgatagaatagaaaaaaaaattgaaaaattaattgatagtaaaataattaaaaacctttctagaccagaggctttgggaagggtaataagattagaaaatggtacagataattatattaaaattctgaaaaaaaattttcctagatcgtttagtcttaaagggttaaaaattgcaatcgattgtgcaaatggagcaggatataaagctggaccaaaattacttagatgccttggtgcaaaagtatttgaaattggaacaaatccaaacggtttaaatataaatgataactgtggatctacttttccaaataaaattaaacgcctaactaaaaaatataaagccaatattggaatttctttagatggagatgctgatagaataataatatgtgatgaaaaaagtaatattattgatggagataaaataattgctatgcttgcagagagatggaaaagaaaaaaaattttaaagggaggagtaattgggacattaatgtcaaattatggattagagaaatattttagaaacaataaaattaattttttaagatccaatgtcggagacaagt

SEQ ID NO: 292358 - DNA, 1354 bp, Unknown
  Bacterial polypeptide expressing nucleotide sequence isolated from the Sargasso Sea
atgcaatcaatctttggaactgatggaataagaggaagatttaataaagagataacttattctctagcctacaaagttggttatgctttaggatcggctttggaaaagaaaaatccaatattaattggaagagatacaagaattactggagatattctgcttcaggccataacacaaggtataaatgaaagtggcaaaaaatttataaatattggaatctgtacaaccccagctataccttttttaatcaaacaagagaacctgagcagtggtgtcatgatatctgcaagtcataatccgccagaatataatggaataaaaatttttgatcaaaatggtcaaaaaattactaaaatttttgagagtaaaattcaaaaaataattgaagagtcaaaacaaaatatattaattcctacaaaagtggtttccctaaaaacaaacacagttcttatggatgcttatattaaaagcctaatccaaacaatgggtggagaaagtttaagcggtttgaaaataatattagacacatgctatggatcagcgacaacctgcgcaaaacaaatttttcagtctcttggtgctgatgtaagagttatcaacaattctaaaaatggattgaaaattaatatgaattgtggttctactaacctcgaaccattaaaaaaagcattaagagagaatcctgcagatatgggatttagcttcgatggagatgccgatagagtaattggaatagattcaaaaggtcatgttttagatggggatcacattctctttctttggggcaaagaacttatggaacaaaaaaatctcactaataatctattaatatcaacgcaaatggcaaacttaggcttcgaaaaggcatggaataaaattggaggaattttatatagaactgatgtgggagacaaatatgtttatgacgcaattaaagaaaaaagagctgttttaggcggtgagcaatcaggtcatatactttcaaaaatcaataacttttctggtgatggaatattgactgcacttcaaatttctaaatattgcaaaaagaaaaatattaatttaaatgattggctaaaaagtagtttcaaaccttatcctcaaacactatcaaatatcaatctagattttaatattaaaaaattaaatccaaaaaccaaaatcttaatcgatcaaactatagaaaattttcaggcattatattcggataattgtagagtttttatacggcctagtgggacagaacctttaattagagttctagttgaagccaaaaattatgaggaagttaattccttatctagcgaaataacaaacaaactctttttagaaattaataaaataattaactaac

SEQ ID NO: 292359 - DNA, 1315 bp, Unknown
  Bacterial polypeptide expressing nucleotide sequence isolated from the Sargasso Sea
tttgagtaaagaaagacgatttggcactgatggaataagagggcctgtagactccactatgaatccattatttgtaactcaattaggatgggctgctgggactgtccttttggaagagggcataacaaaagtccttataggaaaggatactaggatttctggttatatgcttgaatcagcgcttcaagcaggttttatttcttctgggatagacgtaatactcttgggtcctttacctacccctggggtttcttttttagctaattcaaacaagcaagcgggagttgttattagcgcctcacataatttatttgaagataatggaataaagtttttcaataaagacggacaaaaattctcttcagcgttagaaaaaaggatagaaactaaactaaatcaagaaattgaaagtgttaagtcaattaatttaggcaaggcaacgaggatgactgatgcgcaaggtagatacatagagttttgtaaatcaaattttattaatttagatttaagtggtttgtctcttcttttagattgtgcgcatggagccacttattcagttgctcctaaggtttttgaagagttaggagctaaagtagccaccattggtactgatcctgatggtgtgaacataaatcaaaattgtggatctacaagcccagagaatataaaagatgagattttgaaaggagattatgatctaggcatagcttttgatggagatggagatagaattttaatagtatctaaaactggaaagattttagatggtgatgatcttctttatatccttactaagcaattagacaaagacagtggagtagtaggcacattaatgactaataaagctcttgaattgtattttgaaaaagaaaatattagattttgtagagcagatgtaggagataaatatgtgctacatagacttctagatgaaggttggcagctaggaggtgagccttcaggacatataatctgtttagatgcgactcaaacaggagatgcaatcgtagcagctttaaagttattgagttgccttaaagaaaatcagtttaatgtggacgattcaatcaaagattttactaaatttccccaaactctaatcaacctttctgttgataatcctaataaaattattcttaacgataagttttggtcagaagtgacagaaattgagaataaattgaatgacaagggtagagtcctgataaggccttccggcactgaacctcttatcagaattatggttgaatctgaaaaagaagaatattcagaagattattgcaataaattagcagacttggcttcaaggctatga

SEQ ID NO: 292360 - DNA, 790 bp, Unknown
  Bacterial polypeptide expressing nucleotide sequence isolated from the Sargasso Sea
aatggcaaaaaaatattttggtactgatggaataagaggtagagtaaacctatctaaaattaatggcgaaatgttctttaaatttggtttagcagtaggaacatattttaaaaatctaagaaaaaaaaaacaaacagctattattgcaaaagatactagactatctggatataccttagaaccagctttagtgtccggattaacatcagctggaatgcatgtatatacacttggacccttgcctacaaatgggctcgcaatgttaacaaaaaaaatgagcgcaaatatgggtataatgataactgcatctcacaatccttattatgataatggtttaaaattgtttggacctaatggcttgaaattatcagataaaattgaaaagaagatagagaaattaatagattccaagattgtaaaaaatctttcagaaccaaattccttaggtagagttaaaaggttagaagatgcaaatgatagatatattaaaattctaaaaaataattttcctaaaaattttcatctaaaaagaatgagaatcgcaatagactgcgcaaatggagctggttataaatcaggaccacttttattaaggtctttaggagcaaaggtttatcaatttggtacttctccaaatggttttaatattaatgacaaatgtggctcaacttttccaaacaaaataaaatatttagtaaaaaagcacaatgcacacataggtatttcacttgatggagacgctgacagaataattgtttcagacgaaaatggaaatattattgatggagat

SEQ ID NO: 292361 - DNA, 1333 bp, Unknown
  Bacterial polypeptide expressing nucleotide sequence isolated from the Sargasso Sea
atgacaaaaaaatactttggtacagatggaataagaggaagagtaaacggaaataaaataaatggtgacatgttttttaagtttggtttggctgctggcacatattttaataataaaaaaaaaactaaacagattgcaataattgcgaaagatactaggttatctggatatgcattggaaccagcattagtatctggtttaacatcagctggaattcacgttttcacttttggaccattaccgacaaatggtcttgcaatgcttacaaaaaaaatgagagctaatatggggatcatgattacagcatcgcataattctttttatgataatggtttaaaattatttggaccagatggtttgaaattgtctgacaaaattgaaaaaaaaatagaaaaactcattgactccaaagtctcaaaaaaattatcaaatcctgaaatattaggtagggttaaaagattagagaatggctcaaataaatatcttgaaatcttaaaaacaaattttcctaaacaatttaatttaagaggtttaagaataacaatagattgtgctaatggtgctgcatataaagtaggaccacaattgtttagatcattaggtgctacagttcatgaaatcggaaccacaccaaatggatttaatataaataaaaaatgtggttctacatttccgaataaaattaaataccataccaaaaaaaataaatcccatattggaatttcattggatggtgatgcagacagaattatagtttgtgatgaaaagagcaacattattgatggagataaaataatagctatgctagcaacaagatggaaaagaaaaaaaattttaagaggcggtgttgtaggaactttaatgacaaactatggattacaaaaatatttttctaaaaataagataaattttataagatctaaagttggtgataggtacgtaaaagaagcaatgcagaaaagtaaatttaatttaggtggagaacaatctggtcatataatccttggtaaatttgcaactaccggtgatggtttattggtagcattagaaattcttttctctatgaggaaaggaaaaaaggcaagtgaaatattcaaaaattttatacccactcctcaattgctagaaaatgttgaagtaaaagataaatcaataattaatagtctcaagtgcaaaaatgcaattaaaaaagcaaaaaatttaataaaaggaaaaggtagaatgttagtaagaaaatctggaacagaaccagtattgagaataatgtgtgaaactaaagataaaactatgctttcaaaatgtgttaatattgtaaaaaaatcaattatttaac

SEQ ID NO: 292362 - DNA, 1366 bp, Unknown
  Bacterial polypeptide expressing nucleotide sequence isolated from the Sargasso Sea
atgagtaaacttgcgtctataagaaataatgaattatcagtcctttctactttaagtaaggatagaaaatttggtactgatggcattcgtggaccagtaacttccacaatgaatcccctttttgttaccaagcttggatgggctgcaggatctattcttattgaagagggtatgtccaaagttctaataggcaaagatacaagaatctctggttatatgtttgagtcagccttacaagcaggtttcatctctgcaggaatggatgtaacactattaggtcctctgccaactccaggagtttcttatttagcaaactctaataatcaagtaggcctagtcattagtgcttcacataatctatttgaagataatggtattaagttttttaataaagatggtcagaaattttcagccgaattagaaaaaaggatcgaaactaaacttacccaagaaatggttgcagtcgaatcaataaatcttggtaaagcctctaggatgaatgatgctcaggggcgttatattgagttctgtaaatcatcctttaccgacttagatttaaatggattatcaattcttttagattgtgcaaatggagcaacttattcagtcgcccccaaagttttttcagaactaggagcaaaagttgaaacaatcggctcatctcctgatggaattaatatcaatcaaaactgtggctcgactaatcctgatttcttgaaggaagaattaatgaagggctcttatgacctaggaattgcttttgatggagatggagataggattttgatagtcaactctgaaggagaaattcttgatggagatgatattttatatattttatccaataatctcgtacctaattcaggagttgttggcactttgatgacaaataaggctttggaaatatattttgaaaaaaatggtattcctttttcacgtgcagaagtaggtgataaatatgtgttacagagattaatggaggaatcatgggtgcttggtggagagccttctggtcatataatctgtttggattctgcgccaactggcgatgccattattgctgcattgaacctattgaatgccattaaagataataacttttctataaaaaaatccttggaaggatttcaaaagtttcctcaaaccctaatcaatctcaaggtaagtaaccctaataaaataataattagtgataaattttggtcagaagttactcgaatagaaaaacagcttggacagaatggaagagtgcttataagaccttctggaacggagcccttaataaggataatggtagagtctgatcgaaatggtgcttcaaatgatttctgcaatgctttggcagatttagctcaaactatatgat

SEQ ID NO: 292363 - DNA, 1039 bp, Unknown
  Bacterial polypeptide expressing nucleotide sequence isolated from the Sargasso Sea
aatgggcataaaaatctttgatcataatggtcaaaaaattactaaagaagttgaaaataagattcaaaaattagttgaagaacaaaatcaatcagttcctacaaaagagttatctttaaaaacaaataacgagcttatggatatttatatgaaaagcttaatccacacaatgggtggagaaaatttaagcggcttgaaaataatattagacacatgctatggatcagctacaacctgcgcaaaaaaaatttttcagaatcttggagctgatgtaagagttatcaataactcaaaaaatggtttaaaaataaatatgaactgtggttctactaaccttgaacccataaaaaaagcattagaagaaaatccttcagatatgggatttagcttcgatggtgatgccgatagagtaattggattagattctagaggcaatgtattagatggagatcatattctttttctttgggggagagaacttatgggaaaaaagattcttacaaataatttactaatatcaactcaaatggcaaatttaggttttgaaaaggcctggaacaaaattggtgggattttatatagaactgatgtaggagataaatacgttcatgacgcaattaaggaaaaaagggctgttttaggaggtgaacagtcaggtcatataatttcaaaaattaataacttttctggagatggtatactgactgcacttcaaattgctaaatactgtaaaaagaaaaatattactttaaatgattggtttaaaagcagtttcgaccctttccctcagaaactaaccaacatcaatttagattttaatattaataaaataaattcaaaaacaaaatttttaattgatcgaactatagaaattttccaggcaaacaattcagataattttagagtttatataaggcctagtggtacagaacccttaatgcgagttcttattgaggccacaaatcagactaaagtcaattctttatcaagtgaaataacacacaaactctctttagaaattaataaaataatgaattaa

SEQ ID NO: 292364 - DNA, 796 bp, Unknown
  Bacterial polypeptide expressing nucleotide sequence isolated from the Sargasso Sea
aatgacaaaaaaatattttggaactgacgggataagaggagctattaatagcaaaaatataaatggtgatatgttctttaaatttggtttagcatcaggaacatattttaagtcacaaaaaaaaagaaaacaaacagcaataattgctaaagacactagactatctggttacactctagaacctgcattagtttctggacttacctctgctggaatgcatgtttatacattaggacctataccaacaaatggtttggctatgcttacaaaagtaatgaaagcaaatatgggtattatgattaccgcttctcataacccacatcatgataatggattaaaactatttggtccagatgggatgaaattatcagataaaattgaaaaaaaaattgaaaacttgatagataaaaaaattacaaaaaatctgtcaaatcctgaaaaattaggcagagtaaagagattagaaacaggaactaaaaattatctaaagattttaaaaaaaaattttactaaagaatttaatttaagaggaatgagaattgtaattgattgtgcaaatggagcaggatataaagctggaccagaattgctaaaatcattaggagcaaaagtaatagcaattggagtaaatccgaacggacttaatataaataataattgtggttcaacctatcctgataaaatcaggcttgctgtaaagaagcataaggcgcatataggaatctctctcgatggtgatgcagatagaattattatgtgtgatgaaactggaaatgtaattgatggtgatcagata

SEQ ID NO: 292365 - DNA, 347 bp, Unknown
  Bacterial polypeptide expressing nucleotide sequence isolated from the Sargasso Sea
aatgacgcagcgcaaatatttcggcaccgacggtatccgcggaaaggtaggcgagagcaatatcaacccagagtttgttacaaaactcgggtgggcagcaggtaaggtccttgccggacgagggacgaacaaagtacttattggtaaagacacgcgtatttctggctacatgctagagtcgtctttagaggcgggtttatcggctgctggtatcaatatcggcttgctaggccccatgccaacgccagccattgcttatctcaccaaaacatttcgctcagaagcagggatagtgattagtgcgtcacataatccgttttatgacaacggcattaaatttttctcag

SEQ ID NO: 292366 - DNA, 1465 bp, Unknown
  Bacterial polypeptide expressing nucleotide sequence isolated from the Sargasso Sea
catggcgtcagcacctctccgcctcagtcctgcgccgatcaagttcggcaccgatggctggcgcggtgtcctgggcgtggacatcaccgtggagcgtttgctgccagtcgcagctgcagcggcccaggagctggcccatcgcgcaccagacggtctcaacagccgcacggtgatcatcggcttcgatcgccgcttcctggcaccagaactggcggaagccatcgccaatgccgtgcgtggctgcgagcttgagccactgctcaccgagacgcccgtgccgacacctgcctgcagctgggcggtggtggaacgcaaagcactgggagctttggtgatcactgccagccataacccccctgaatggctgggtctgaaaatcaaaggtcccttcgggggctcggtggagggggacttcaccgcagcggtggagcgacgcctggcggctggcggcatcacaccacccattgcagcgaccaccagccgtttcgacgggcggggtgagcaccttgagggattgcgtcgcaaattggacctcaccgctttggtgacgggcctgaaaacgatgaacctgaaggtgttcgtcgacccgatgcacggatctgcagccggctgcgtcagcgatctgctcggccctgaagcctctgagttggtggacgagatccgcagcacgcgtgatcccctgttcggcggccatccaccggaacccctggccccatacctcagcgacgtgatcacagcggttcagcactccacggcagcgggcacaccagcggtgggtctggtcttcgatggggatggtgatcgcatcgccgccgtggatgagaacggtcggttctgcagtactcagctgctgatgcccctgctcatcgaccatctcgccagggcccgccagctgcctggaacggtggtcaagactgtgagcggttccgatctgatgcgcctggtcgcggaggcccagggccgtgaggtcctggaactggccgtcgggttcaagtacatcgccagcgagatgctggcgggtgaggtgctgatcggtggagaggagtctgggggggtgggcttcggcatgcatctgccggaacgggatgccctattcgccgcgatgctcgtgctggaagcgctggtggaaggcggccaacccctcggcagccgacttgacgctctgcagcaacgccatggtggtgccagccattacgaccggctggacctgcggctgcaggacatggaggcccgacggcgtctggagaccctgctggcgagctccacaccccaagaggtggccggtgccgcggtggttgaggtgaacaccacagacggcatcaagctgcgcatgggcgccagccattggctgatgctgcgcttctccggcacggagcccctgctgcgcctgtactgcgaagccccggatcgcgatcgggtcggtgctgtgctggcctgggcaaagcgttacgccgaagccgcatga

SEQ ID NO: 292367 - DNA, 760 bp, Unknown
  Bacterial polypeptide expressing nucleotide sequence isolated from the Sargasso Sea
atgacaaaaaaatattttggtacagatggaataagaggaaaggtaaatggaaataaaataaatggtgatatgttttttaagtttggcttagctgttggtacatattttaataataaaaaaaaaactaaacaggtagcaataattgccaaagatactaggttatcaggatatacactagagccagcattagtgtcaggtttaacatcagctggaatgcatgttcttacttttgggccattaccaacaaatggtcttgcaatgcttacaaaaaaaatgagagctaatatgggcatcatgatcactgcatcgcataatcctttttatgataatggtttaaaattatttggaccaaatggcttaaaattgtctgacaacattgaaaagaaaatagaaaaactaattgattctaaagtctcaaaaaaattatcaaatcctaaaatattaggtagggttaaaagattagaggatggatcaaatagatatcttgaaatattaaaaaaaaattttcccaaacaatttaatttaagaggtttaagaattaccattgattgtgctaatggagctgcatataaaacaggacctcaattgtttagatcattgggtgctgtagtccatgagattggtacttctccaaatggatttaatataaataaaaaatgtggttctacatttccaaataaaattagatatcatacaaaaaaaaataaatcacatattggaattgcattggacggtgatgcagatagaattatagtttgtg

SEQ ID NO: 292368 - DNA, 979 bp, Unknown
  Bacterial polypeptide expressing nucleotide sequence isolated from the Sargasso Sea
ggacttaaactatctgataaaatcgaaaaaaaaatagaaaagttaattgactctaaaattgctaaaaatctatcaattcccattcaacttggtagagttaaaagattagaagatgcaaaccaaaattatataaaaatattaaaacaaaatttcccatcttcatttagtctaaaaggtattaaaattgctttagactgtgcaaatggtgctggatataaagctggtcctgatttatttaaatcattaggtgctaaattattcaaaactggaacttctcccaatggattaaatattaatcttaaatctggatctacttatccaagtaaaatttgccaaatgacaaaaaaaagtaaagctcacataggaatctcattagatggtgacgcagatagaattatcgtctgtgatgaaaatggcaaaattatcgatggcgataaaattcttgcaatgttgggcgaaagatggaaaagaaaaaagattttaaaaggtggagtggttgggacattaatgtcgaattacggtttagagaatttttttaaaaaaaataaaattaagtttttaagatcaaatgtaggtgatcgttatgttaaagaaaagatgaaaaaaaataattttaatttaggaggtgaacaatcaggacatataattcttggaaaatttgcgacaactggtgatggtttattagtggcattagaaatccttttctctttaagaaaaacaaaaaaagcaagcgaactttttaataagtttaaacctacacctcaaatattagagaatgtagaagttaaagataaatcagtaattaatagcataaaatgtaaaaaagcaatttctgaagcaaaaaaaatcatgaaaaataaaggtagaatattggttagaaaatctgggacagaaccaaaaataagaattatgagtgagtcagaggactcaagtttaaataaaatttgtgttagtataataaaaaaatctattcaataaa

SEQ ID NO: 292369 - DNA, 1345 bp, Unknown
  Bacterial polypeptide expressing nucleotide sequence isolated from the Sargasso Sea
tttgggaactgacggtataagatgtttagttaataaagagcctctatcagccgaaactactcttaaaatttcaaaagcggtaggttaccttttaaaatcaaaaaaaaagaatagctcaagagtagtcatttgtaaggatacaaggctatctggttatctttatgagcctcttataactgctggattcatctcaatgggtatggaagttattcttgttggacctctgccaacaccagcagtgccacatttaatgagaacattaagagcagacattggggttatgattacagcatctcataatacttttgaatacaatggtttaaaattttttaatgctgatggatataaaataagtaatcaattagaaaaaaaaattgaaaatattgttttgaataaaaaacaatattctaaaattcttaataatgaggttaatactggaaaagcaattagacttgaagatgcttcgggtagatattcagaatttttaaaaaatacattagataagaaaattaaaataaaaaaattaaaagttgttttagactgtggtaatggcgcaacatatgagatagctcctaatttattttgggaattaggacatgaagttattcctatcaataacaaaccaaatggaaaaaatattaatgatcattgtggagcagtaaatgttaaagatttatcaaaaaaagtaatttatgaaaaagcaaatataggttttgcttttgatggagatggagatagattaataattgtagatgaaaatggtaatgaagttgatggtgataaaattattggtttgtttgcaaatcaatttgtgaaaacaaaaaataaaaaaacaaattatccagttattattactgtgatgtcaaatcttggtttagaaaagtttctatcagataaattaaaaataaaaataaaacgctcagcagttggagatataaatgtgattagagaaatgcaaagaaatgaatccatacttggaggtgaacaatctggacatataattttatctaaattttcaaaaactggagatgggattttggcagcattaaaagttacagaaataatttcaaaattaaataaatcggctagttcaatttttaatttatatgaaaattttcctcagattaaaatcaatattccatataaaaatatatctcaaaataatattaaatatataaaatatcttaacaataaaaaaactaataataaaaatattagaacattagttaggttatctgggactgagccattagtaagggttttagttgaaggaaatgatttgaacaaagtaagagaaacagcagaattaattgaaaaagatataaggaaaaaacttgcacaataa

SEQ ID NO: 292370 - DNA, 821 bp, Unknown
  Bacterial polypeptide expressing nucleotide sequence isolated from the Sargasso Sea
caattttcatctaaaaggtactaaaatagttttagattgtgccaatggagcttgttataaagctgctccaaaactactaaaagagcttggagcgaaagttatctctattggagtaaaaccgaatggttttaatattaacgaaaagtgcggatcaacctatccatttaaaattaagtcagccgtaaaaaaatttagagcacatgttggcatctcttttgatggggatgcagacagaataattatgtgtgatgagaagggaaaaatcgtagatggagaccagatcatagccatgcttgcccgaagatggaagtcgaaaagaattttaaaaggtggtgtgatcggaaccttgatgtctaattatggtttagaaaaatttttaaagaatgaaaaaataagattctttagatctaaagtaggggatagatatgttaaggaaaaaatgaaaaaatttgattttaatctaggcggtgagcagtctggccatataattctaggcaaatttgcaacaacaggtgatggtctgctcgtagcattagaagttttattttctttaagaaaaggtaaaaaagccagcaagttattaaatgtttttaaacccttacctcaaattttggagaacatctttgttaaagacaaagatataattagcaaatcgaaatgcaaaaatgcaattaaaaaagccaacaagcttatgggccaaaaaggaagaattttagttagaaaatctggtaccgaaccaaaaattaggattatggccgagtcatatgatagaagtttaattttaaaatgtataaaaacaatcaagagatcgataaagtaaa

SEQ ID NO: 292371 - DNA, 1261 bp, Unknown
  Bacterial polypeptide expressing nucleotide sequence isolated from the Sargasso Sea
gtacttattaaaatcaaaccaaaagcaaaattccagggttattatttgtaaagatacaaggctctctggatatctttatgagcctcttataacagctggatttatctcgatgggtatggaggtaatcttagtaggaccattacccacacctgcagtgccacatctaatgaatacattgagggcagatattggagtaatgattacagcttctcataatacttacgagtataatggtttaaaattttttaattcagatggatacaaaataagttcaatattagaaaaaaaaattgaaaatattattttgaataaaaaaaaatatgcaaaaattattaatggtaattcaaacactggaaaagcaattagacttgaagatgcatcagctagatactctgaatttttaaaaagtacattagataaaaaaattaaatcaaaaaaattaaaagtagttttagattgtggtaatggcgcaacttatgaaatagctccaaatattttttgggaactaggtcatgaggttatttctatcaacgacaagcctaatggaaaaaatataaattataattgtggtgcagtaaatacaaatgcattatctaaaaaagtggttgatgaaagggcagatataggttttgcttttgatggagatggagataggttgattattgttgatgaaaaaggaaatgaaatagatggagataaaattattgcattgtttgctaaatatttaataaaatttaataaaagtaaatttaaatacccgatcgttacaacagttatgtcaaatataggattagaaaactttattttgaatgaatttaaagttaatttaaaacgttcttcagtaggggatataaatgtaattaaagaaatgaaaaagtatagttctcttttggggggagagcaatctggtcatataattttgtctgaatattcaaaaacgggtgatggtattttagcagcactaaaagtaacggaaataatttctaaattaaagaaatctactagttcaatttttagtttatatgaaacctttcctcaaatcaaaattaacatatcgtataaaaaaatgtcaaaaaataccatcgattatattaaaaatattaacaaaaaaaaattaaaagataaaaatatgagattgttaattagattatctggaacagaacctttaataagaatacttgttgaaggaaatgatttaaataaggttaatacaattgcaaaaaatatagaagaaaacattcggacaaaacttggaaaataa

SEQ ID NO: 292372 - DNA, 829 bp, Unknown
  Bacterial polypeptide expressing nucleotide sequence isolated from the Sargasso Sea
aaaaaaactaaaaattgttttagattgtgcgaatggagccacatataatatagctccaaatttattctgggagctaggtcataatataattgccataaataataatccaaatggcttaaacattaataaaaattgtggtgcagtcgatgtaaaatcactctcacaaaatgtcataaaagaaaaggctgatattggatttgcatttgatggtgatggagataggttaatagttgtagatgaagaaggtaaagaagttgatggtgataaaattataggattgttatgtaaaagttatgtaaaacctcagaaaaaaacgaaccaacatgatgttattataacggtaatgtctaatatgggattagaaaattatctcacaaataaattaaaattaaagattaagcgaacatctgttggagatataaacgttataaatcaaatgaaaaaatccaaatctacgataggtggggaacaatcaggacatataatattgtcagaacattctaatactggtgatggaattttggctgctttaaaaattactgaaattttgatatcaaataaaaataaggcgagcaaactttttgatttgtacaatgactttgcccaagaaaaaattaacttaagttataaaacaaagaataccaaactgttaaaaattcttgataacttaaaaaatgataaactatataataataaaaaaatcagatctcttgtaaggttatctgggactgaaccattagttagaatactagtcgaagggcaagaagttactgaggttaaaaagaaatctctagaaataaaaaaattagtaaggccttatcttggttaa

SEQ ID NO: 292373 - DNA, 1039 bp, Unknown
  Bacterial polypeptide expressing nucleotide sequence isolated from the Sargasso Sea
ctggcttcacacaatcaatatcaagataatggtatcaaaatatttgataaaaatggaaataaattatcagacgaaactgaaattgaaatagagtctcttatggagtctgaattggaaaattcattagcgggtccagaaaaaataggcagagcaaaaagactcgaagatgctaatggtagatatatagaattcctaaaaggtacttttcctaaatcacaacgacttgatggtcttaaaattgtaatagattgtgcaaatggggcttcttatatttctgcacctttaattttatgggagcttggtgcagaagttattcaaatagctactctaccaaatggaactaatataaatttcgaatgtgggtctactaataccaataaacttgctaaaaaagtattagaggagaaggctgatattggtattgccttagatggcgatggtgatcgattggctgttattgatgaaaaaggacatttagtcaatggcgaccagatactggcattactagctattgaaatgtcaaaagataaaaaattaaaaaataataatgtagttggtacttcaatggcaaacatgggcttagaaactttattaaagaaacataacattgggttaatcagggcaaaagttggtgatcgatatgtaaaggaaaaaatgatttcagaagatttaaatttaggcggtgaacaatctggacacataattttacgtgattttacttcatcaggagatggaatagtagttgctcttcaagttctatctatcttaagtagaaaaaaaggaaaagccagtgactgccttcatttattcagtcccttaccacaaaacctcattaatttccccgtaaaagaaagaaatattttagatcacgaggatacgaaattatttatcaaatcttgtgaagaaaaagtttcagaagacggaagaatcgtagttagaatgtctggtactgaacctcttttaagagttatgattgaaagtggaaatcagcatacaattgatgaattaactgaaagcgtaacaaaatatttttcataaa

SEQ ID NO: 292374 - DNA, 964 bp, Unknown
  Bacterial polypeptide expressing nucleotide sequence isolated from the Sargasso Sea
aatgaaaaataaatattttggaacagacggtattagagggacagtaaatcaaggaaatataactggagaaaaattttttaaatttggtcttgcttcgggtaattattttaaaaatcaaaaaaaatcaaaacaaatagctataattgcaaaggatactagattatcaggatatactttagaaccagcactagtttctggtttagtatctggtggaatgcatgtttatactttaggtcctttacccacaaatggtttagctatgttgactaaatctatgaaggctaatatgggtataatgattaccgcatcacacaacccttaccatgataatggactgaaattatttggtcctgatgggatgaaactatctgataaaattgaaaaaaaaattgaaaaactaatagatgcaaaaaatacaaaacagttaacaaacccaaaattattgggaagagtaaagcgtctcgaggatggaaatgataaatatacaaaaatactaaaaaataactttccaaacaattttcatctaaaaggtactaaaattgttttagattgtgcaaatggagcttcttataaggccgctcctaaattattaaaagctcttggtgcacaagtgatttctataggagtgaaacccaatggattaaatattaatgaaaaatgtggatcaacatatccctcaaaaataaagactgcagttaaaaaacatagagctaaaattggaatagcatttgatggagatgctgacagagtaattatgtgcgatgaaaaaggaaaaataatagatggcgatcaaattattgcaatgttggctcgtagatggaaatctaaaaaaattttaaaaggtggcgtaattggaacattgatgtccaattatggtttagaaaaatttttacataatgaaaaaataagattttccaggtctaaagttggagatagatatgttaaagaaaaaatgaaaaagctt

SEQ ID NO: 292375 - DNA, 1324 bp, Unknown
  Bacterial polypeptide expressing nucleotide sequence isolated from the Sargasso Sea
catgaatcttaaatttggcactgacggaataaggggacccgtcgagagcgtagtaactcccgaagcctgtcttaaaataggccatgcaactggcttggtaatgaaagagctgggttggaataccgttgttattggcaaggatacaagaatatcaggatatatgcttgagtcggctcttcaggcaggatttattgctgctggtgttaatgtacgcttacttggacctataccaactccaggagtagcttatttaacaaaaactttaagaaataagtttggagtggttattagcgcatctcataatgattttcttgataatggaataaaaatcttcaacgaagacggagaaaaaatctcaagagatgttgaaaaaagaatagagaagcatctatctaaggatttatcacctgtagaaacatctaagattggaaaagcttataggtttgatgaatctggaccaagatatattgagttctgtaaatctactgttcctcctaatatatctttttcatctttaagaatagttttagattgcgcaaatggcgcatgttacaaagtgagtcctgagatttttgaagagttaggtgcagaagttattacgattggtaatgaaccagatggctataatattaatcaagattgtggatcaactcatcccgaagtcatacaagatgcagttattaagcatagagcagattatggtatttctcttgatggagatggtgacagggttattcttgttgatgaaaaaggtaatttgttagacggagatgacattttatatatattagccttttcaaaccctaatagaactggagtatggtctggtgttgtaggaacacatatgagcaatcttggactagaggaaggtattgaaaaattaggttataaatttataagagcagatgttggagataaatacgttagcgaaatgttggctaaaaaaggatggatgcttggaggtgagacatcaggccatattatatgcaaagaccttgtcagtactggtgacggaacagtagcagctttaaaagtaatctcatctttactaattttagaaaaaagaccaagtgaggtgttatcaaacttcaaaaagattccacaaattaataaggctattaaagttaataacaaagacattattaatgacaaagagttaaagtcttttttaaaagagattgaatcagatttaaccattggaagaatactcgtaagaccttctggaacagaacctaagataaggattatggttgaagctcctgaaaaaaatgtcgcagaaaagtttgctgaagatattgaaaaactaatcaaatcaaaaatatga

SEQ ID NO: 292376 - DNA, 876 bp, Unknown
  Bacterial polypeptide expressing nucleotide sequence isolated from the Sargasso Sea
gattagaaacagggactaaaaattatattaaaatattaaaaaaatattttacaaaagagtttaatttaaggggattaagaatagttatagattgtgccaatggtgctggttatcaagcaggtcctgaattattaaaatcattaggtgctaaagttatagcaataggcgtaaaaccaaatggtttaaatataaataaagattgtggttcaatttttccaagaaaaatcagaacagccgtaaaaaaatataaagctcatattggtatttctttagatggagatgctgacagaattataatgtgcgatgaaaaaggtagtattatagatggagatcaaatcatagctgctttggcaacgagatggaaaaataaaaaaatgctaaaaggtggtgttgttggaacattaatgtcaaattatggattagaaaaatattttaaatccaagggaataaaatttataagagctaatgtaggtgacagatatgttaaagaaaaaatgcaaaaatataaatttaatttaggtggcgaacaatcaggacatattattttaggtaaatttgcaacaactggagatggattgctagtagctttagaagctctttttgcactgagaaaaggtaaaaaaactagtgaattttttcagagttttaaaaaaacccctcaactactaaaaaatataactgttaaagataaaaatattattaacaaacctgaaataaaaaaaattataaaactcgcagaaaaattaattaaaggtcagggaagagttttagtaagaaaatcaggaacagagtctaaaattagagtgatggtagaaagtgataataaaattcttttatccagatgtgctaacatgatgtccaaaaaaataaaataaa

SEQ ID NO: 292377 - DNA, 1357 bp, Unknown
  Bacterial polypeptide expressing nucleotide sequence isolated from the Sargasso Sea
atgggacgtcgatatttcggcacggacggcattcgcggcacggtgggcgaggcacccatcacgccggatttcgtgttgcgtctcggctatgcggccggcaaggtactggcaggctcggccgatgtcgcggcaggttcgcgtccgaccgtgctgatcggcaaggacacgcgcgtgtcgggctacatgctcgaagccgcgctcgaggccggattctcggcggcgggcgtcgacgtgatgctggccggcccgatgccgacgccgggcgtcgcgtacctgacgcgcgcgctgcgcctgtcggcgggcgtcgtgatcagcgcatcgcacaacccgtatcacgacaacgggatcaagtttttttccgccgacggcaacaagctgccggacgacaccgaagccgcgatcgaagcgtggctcgacaagccgctcgattgcgcgtcgtccgacggcctcggcaaggcgcgccgccttgacgacgcagccggccgctacatcgagttctgcaagagcacgttcccggccgcgttcaacctgcgcgggctgaagctcgtgatcgattgcgcgcacggcgccgcgtaccagatcgcgccgcacgtgttccacgaactcggcgcggacgtgatcccgatcggtgtcgcgccgaacggcttcaacatcaacgacggtgtcggtgcgaccgcgccggacgcgctggtgcgcgcggtgcgtgcgaaccacgccgatctcggcattgcgctcgacggcgatgcggaccgcctgcaagtggtcgacgcgaccggtcgcctgtacaacggcgacgagctgctctacgtgctcgtgaaggaccggatcgcgaccgacggcaacgtcgaaggcgcggtcggcacgctgatgacgaacctcgcggtcgaagtcgcgctgcagcgcgagggcgtgaagttcgtccgcgcggcggtcggcgatcgctacgtgctcgagcagttgcgcgagcacggctggcagctcggcgcggaaggctcgggccacatcctgtcgctcgaccgccactcgaccggcgacggcatcgtgtcggcgctgctcgtgctggccgcgttgaagcgcagcggcaagaccctcgcgcagatgctcgacggcgtcacgctgttcccgcagaagctgatcaacgtgcggatgaagccgggcgccgactggaagggcagcacgtcgattcgcgccgcgatcgacgcagccgaggccgcgctcgccggcagcggccgcgtgctgatccgcgcatcgggcacggagcccgtgctgcgcgtgatggtcgaagcacagcaggccgccgacgcggtccgccatgcggagacgatcgccgacgctgtgcgcgcggccacgacctgac

SEQ ID NO: 292378 - DNA, 638 bp, Unknown
  Bacterial polypeptide expressing nucleotide sequence isolated from the Sargasso Sea
aaaaaaaaataaatcccatatggaaatttcattggatggcgatgcagacagaattatagtttgtgatgaaaagagcaacattattgatggagataaaataatagctatgctagcaacaagatggaaaagaaaaaaaattttaagaggtggagtagtaggaaccttaatgacaaactatggattacaaaaatatttttcaaaaaataagataaagtttataagatctaaagttggtgataggtacgtaaaagaagcaatgcaaaaaagtaaatttaatttgggaggagaacaatctggccatataatccttggtaaatttgcaactactggtgatggtttattggtagcattagaaattctcttttccatgaagaaaggaaaaaaggcgagtgaaatatttaaaaattttatacccactcctcaattactagaaaatgttgaagtaaaagataaatcaataatcaatagtcttaagtgcaaaaatgcaattaaaaaagcaaatagcttaataaaaggaaaaggtagaatgttagtaagaaaatctggaacagaaccagtagtgagaataatgtgtgaaactgaagataaaacaatgctttcaaaatgtgttaatattgtaaaaaaatcaattatataac

SEQ ID NO: 292379 - DNA, 831 bp, Unknown
  Bacterial polypeptide expressing nucleotide sequence isolated from the Sargasso Sea
tatgactaaaaaatattttggcaccgacggcattcgtggtcgggtcggcgaattcccgatcacccctgatttcatgctcaagctgggttgggcggcaggcatggcgttccgcagcatgggcgcgtgtcgcatcctggtgggcaaggacacccgtatttcgggctacatgtttgagtctgcgctggaggccggattgtccgccgccggggctgatgtgatgctgttgggccctatgcctacgccggcaatcgcttacctgacgcgtaccttccacgccgaggccggtattgtgatcagcgcctcccacaatcctcatgatgacaacggcatcaagtttttctcggggcagggcaccaagctgcctgacgagatcgagttgatgatcgaggagctgctggatgcgccgatgacggtggttgagtcgagcaagctgggcaaggtgtcgcgcattaacgacgcgtcaggtcgctatatcgaattctgtaaaagcagcgttccgagcagcaccaatttcgcaggcttgaagattgttgtcgattgcgctcatggtgcgacctacaaggtggcgccgagcgtcttcaaggagttgggcgcacaggtcaccgtgctgtcggctcagcccaacggcttgaacatcaacgacaactgcggttccacccacatggagcagctgcaggctgcagtgctggctgagcatgcagacctgggcatcgcatttgatggcgatggcgaccgcgtgctgatggtggaccataccggcatgatcgtggatggtgatgacctgttgttcatcattgcccgtgacctgcatgagcgtaacaaagtgcaagg

SEQ ID NO: 292380 - DNA, 760 bp, Unknown
  Bacterial polypeptide expressing nucleotide sequence isolated from the Sargasso Sea
atgataacagcatcacacaatccttattttgataatggattaaaattatttggacctgatggactaaagttgtctgacacgattgaaaaaagaattgaaaaattaattgattcaaaaataacaaagaatttatctaaaccaaatttacttggcagagtaaaaaggttagagaatgctaatgatagatatattgaaattttaaaatctaattttccaaatagttttagtcttaaaggaattaaaattgctatagattgtgcaaatggcgccggttataaatctgggcccaaacttttaacatctttaggtgcaaaagtttataataccggcacatctccaaatggtttaaatattaatcaaaattgtggatctacttttccaaaaaaaattaaatctttagttaaaaaatataaagtagacttgggaatatcattagatggtgatgcagatagaatcattttatgtgatgaaaaaggaactatagttgatggagatcaaattatagcgatgcttgctgataggtggaaaagaaaaaaaatccttagaggtggagtaattggaactttaatgtctaattatggattacaaaactattttaaagaaaaaaaaataaattttataagagcaaaagttggagacaggtatgtgaaggaaaaaatgaaaaaaaatagattcaatttaggaggagagcaatcgggacatattatattagggaaatttgcaacaacaggagatggtctattggtagctttggaagttt

SEQ ID NO: 292381 - DNA, 967 bp, Unknown
  Bacterial polypeptide expressing nucleotide sequence isolated from the Sargasso Sea
aggatatacactcgagccagctcttgtatcaggtttggcatcagctggaatgcatatattacactagccccattaccaacaaacgggttagccatgctcacaaaaaaaatgagagctaatctaggtattatgattacagcctctcacaatccttttcatgataatggtcttaaattatttggaccggatggcatgaaattatcagataaaatcgaaaaaaaaattgaaaatttaattgatacaaaaacagttaatcaattatcagaaccaaaatcgctaggaagagtaaaaagattagaggatggaaatgaaagatacataaatattttaaaaaataattttccagctgattttagcttaagaggtatgcgtattgttctagactgtgctaatggcgctggttacaaatcagcaccaaaaatacttacagaattaggagccaaggttttttcaatcggtacaaaaccaaatggtttgaatattaattataattgtggatcaacatttcctgagattgtaaaaagatatgttaaaaaatttaaagcagatcttggaatttctttagatggtgatgcggatagagtcattatgtgtgatgaaaaggctcaaatagtagacggggatcaaattattgcaatgattgccaagagatggaaaagaaaaaaaattttaaaagggggagtaattggaacattaatgactaattatggattagaaaagtttttttcaagggagaaaatcaaattcaaaagatcgaaagttggcgatagatatgtaaaagaaatgatgaaaaaatataatttcaatttaggtggggaacaatcaggccatattattttaggtaaatttgcgactactggtgatggtttactggtagcattagaaactttatttgctttaaaaaaaggtaaattggcgagtgaaattttcaaagtttataaatcagtccctcaaaaacttctaacat

SEQ ID NO: 292382 - DNA, 1333 bp, Unknown
  Bacterial polypeptide expressing nucleotide sequence isolated from the Sargasso Sea
atgacaaaaaaatattttggcactgatggtataagaggagctatcaatagtaaaaatattaatggagatatgttttttaaatttggtttggcgagtggaacatattttaaatctcaaaaaaaaagaaaacaaactgcaataattgctaaagatacaagattatcaggttatactctagaacctgcgctagtatcaggattagcatcatcaggcatgcatgtttatactttaggccccttacccactaatggtttagcgatgcttacaaaggtcatgaaagcaaatatgggaattatgattactgcttctcataatccccatcatgataatggtttgaaactatttggtccagatggcatgaaattgtcagataaaattgaaaagaaaattgagagtcttatagataaaaaaattaaaaaaaacctctctaaaccagaaaaattaggaagagtaaaaagattagaaacaggaactaaagattatattaaaattttaaaaaagaattttactaaagaatttaatctaagtggacttaaaattgtaattgattgtgcaaatggagctggttataaagcaggacctgaattattaagatctttaggagcaaaagtaatcgcaataggaattaatcctaatggtttgaatattaataaaaattgtggctcaacattccctgaaaagatcaggtctatggttaaaaaatataaagcagatattggtatttcattagatggtgatgctgacagaattattatgtgtgatgaaaaaagcaatatcatagatggagatcaaattattgctgctttagcttcaagatggaaaaagaaaaaaatgcttaaagggggggtagttggaacattaatgtctaattatggtcttgaaagatatttaaaaaaagaaaggattaaatttattcgtgctaacgttggtgatagatatgttaaagaaaaaatgcaaaaaaatagatttaatttaggcggcgaacagtctgggcatattattttgggtaaatttgcaacaacaggagatggattgcttgtagctttagagtgtttatttgctttaagaaaaggaaagaaggctagtgtattttttgaaaaatttaaaaaaactcctcaaatattaaaaaatattgaggttaaagataagactataatcaatagatcagaaatcaaaaattcaattaaactagcaacaaaattaattaagggcaatggaagaattttggtaagaaagtcaggtacagagtcaaaaataaggataatggctgaaagcgagaatgaaaatcttctttcaaaatgtttaaatattgtctcaaaaaaaattaaataat

SEQ ID NO: 292383 - DNA, 1339 bp, Unknown
  Bacterial polypeptide expressing nucleotide sequence isolated from the Sargasso Sea
tatgagcgaacgtaaattttttggaaccgatggtattcgtggcaaggtaggttcaggccagatgactcccgagctggcattaaagttgggttgggctgctgggcgggtgttatcccgcagcggcacgaaaaaagtgattattggtaaagatacccgtatttcgggttatatgtttgagtctgctttagaggcgggtttatcggctgcgggtctcaatgtgatgttgatggggccaatgccaacacctgctgtggcttatctcactcgcactttccgcgccgaagcaggggtggtgatcagtgcatcccacaatccatactatgataatggcattaaatttttctcaaccgatggcagcaagctcgacgataacctagaactggaaattgaagccgaattagaaaagcccttagagtgtgttgagtcacatctattgggcaaagtgtcacgtattgaagatgcacgtggccgttatattgaatactgcaagggcaacttcccagcggatcaaaccctcacagggttaaaaattgtggtggactgtgctcacggtgcgacctatcacattgctcctgcggtatttcgtgagttaggcgcagaggtgattaccattggtgataagcccaatggcgtcaacatcaatgacaaagtgggcgccacgtccatggcaaaaatttgcgaaaccgtattgaccgagggcgccgatttagggattgcgcttgatggtgacggcgaccgtatcatgatggtcaacagccgcggtgaagtaatcgatggcgaccaaatcctctatattctggcctgtgatgctaaagcccgtggcgtgctgcgtggtggcgttgtcggcacacttatgtctaacctcggtctcgatttagccttgcaagccttagatattccctttgcccgctctaaagtgggtgaccgttatgtgatggagttactgaaagaactcgattggcgcatcggcggtgaaaactcgggccatatccttaaccttgaccatggtacgacaggtgatggtatcgtggcgggtatattagtgttggcggcaatgcgtcgacaaaatgccactcttgagcagctcacagccccgatggaaatgctgccacaggtgttagtgaatgtgcgctttgagggcgaacacgacccattaagctcagataaagttaaagccgctcaggctcaggttgagtcacaactaggtgcccgaggtcgcgtattgctacgtaaatccggtactgaaccgttaattcgtgtgatggttgaaggtgatgatcacaatactgtgttagcgcacgccaatttgattgcagatgcggtaaaatcggcgagctaa

SEQ ID NO: 292384 - DNA, 1333 bp, Unknown
  Bacterial polypeptide expressing nucleotide sequence isolated from the Sargasso Sea
aatgacaaaaaaatattttggtaccgatggcataaggggagctatcaatagtaaaaatataaatggagatatgttttttaaatttggcttggcaagcggaacatattttaaatctcaaaaaaaaaagaaacaaattgctataatagcaaaagatacaagattatctggatattctctagaaccagcacttgtatcaggattagcatcagcaggtatgcatgtatatactttaggacctttacccacaaatggtttagcgatgctcacaaaagctatgagggcaaatatgggaattatgattacagcttctcataatcctcacaatgataatggattaaaactatttggacctgatggcatgaaactatcagataaaatagaaaaaaaaattgaaagtttaatagataaaaaaatcatcaaaaatctctctaaaccagaaaaattaggtagagtaaaaagattagagacaggtacaaatgattacataaaaatattaaaaaaaaattttaccaaagaattcaatctaagaggacttagaattgtaattgattgtgcaaatggagcagggtacaaagctggaccagaactattaaaatctttgggagctaaggtgattgcgataggagttaatcctaatggattaaatataaacaaaaattgtggctctacatttcctgagaagataaaatcggcagttaaaaagcataaggctcatttaggtatttcattagatggtgatgcagatagaataattatgtgtgatgaaaaaagtaacattatagatggtgaccaaattatcgctgcactagctacaaggtggaaaaataaaaaaatgttaaaaggtggggtagttggaacattaatgtccaattacggccttgaaaaatattttaaaaaaaaaggtattaaatttatacgtgctaatgttggtgatagatacgtaaaagaggtaatgcaaaaaaataaatttaatttaggtggagaacaatcaggacatattattctaggtaaatttgcaactacaggagatggtttacttgttgctctggagtccttatttgctcttagaaagggaaaaagagccagtgaattttttgaaaactttaataaaaccccacaattacttaaaaatattgaagtgaaagataaaaacataattaacaaacctgaaattaagaaagctattaagctagcctcaaaattaattacaggtagtggtagaattcttgtaagaaaatcgggaacagagtcaaaaataagaattatgggagaaagtgaaaataaaagacttcttgttaaatgtgttaatataatttcgaaaaaaattagataa

SEQ ID NO: 292385 - DNA, 1046 bp, Unknown
  Bacterial polypeptide expressing nucleotide sequence isolated from the Sargasso Sea
aatgggaaaaaaatattttggaactgatggaataagaggcagagtaaatcaagaaaaaataaacggtgaaatgttttttaaatttggtttagcggctgggatatattttaaaaatcaaaagaagagtaaacaaattgctataattgctaaagatactagattatccggatatatacttgaaccagcattagtatcaggattagcttcggcaggaatgcatgtttttacctttggacctctacccactaatggattggctatgcttacaaaaaaaatgaaagcaaacatgggtataatgattacagcatctcataatccctatcatgataacggtttaaaattatttggtcctgatggattaaaattatctgataggatagaaaaaaaaattgaaaaattaattgactcaaaaattgctgacaaattatcaaatccaaaaatacttggtagagttaaaagactggaagacggatctaaaaaatatattgaaattttaaaaacaaattttccaaaccaatttaacctcagaggtttgaagatcgctatagattgtgcaaatggggccgcttacaaggttggaccacaattattaagatcattaggagcaatagtttatgaaattggaacttctccaaatggatttaacattaataataaatgtggatcaacatttccaaataagattagaaatttaacaaaaaaaaatagagcacatattggaatttctttggatggagatgcagatagaattattgtatgtgatgagagaggcaacatagtagatggtgataaaataattgcaatgctagcagaaagatggaagagaaaaaaaatcttaagaggtggtgttgttggaacgttaatgtctaattatggtttagaaaaatttttcaaaaaaaataaaataaagtttttaagatcaaacgttggtgacagatatgtaaaggaattaatgcaaaaaaataaatttaatttaggtggagaacaatctggtcatataatcttaggtaattttgcaactactggagacgggctgttagttgcct

SEQ ID NO: 292386 - DNA, 1336 bp, Unknown
  Bacterial polypeptide expressing nucleotide sequence isolated from the Sargasso Sea
atgagaaataaatattttggcacagacggaattagaggaacagtaaatcaaggaaatattactggtgagaaatttttcaaatttggattagcatctggaacttattttaagaatcaaaaaaaaaataaacaaattgcagtcatagctaaagacaccagactttcaggatatactttagagccagcacttgtatcaggtctagtttctggaggcatgcacgtttttacacttggtcctttaccaactaatggtctagcaatgttaacaaaatctatgaaagctaatatgggaattatgattacagcctcacataatccttatcatgataacggtttaaaattatttgggccagatggaatgaaattatcagataaaatagagaagaaaattgaaaaactaattgatgctaaaaatacaaaacaacttacaaacccaaaacttcttggaagggtaaaacggttagaggatggaaatgataaatatattaaaatattaaaaagcaattttccaaacaattttaatttaaaaggcactaaaattgtcctggattgcgctaatggagcttgttataaagctgcaccgaaattacttagtgaattaggtgcaaaagtcataactattggagtaaaacctaatggtttgaatataaattacaaatgtggttcaactcatccatctaaaattaaattttttgttaaaaaatataaagcaaacgttggtatctcttttgatggtgatgccgacagaatcataatgtgtgacgaaaaaggaaagattattaatggagatcaaattattgcgatgcttgctagaagatggaaatcaaaaaaaatcttaagaggtggggtaattggaacattaatgtcaaattatggcttagagcaattcttaaagaaagaaaatataaaattttttagggcaaaagtcggagatcggtatgtaaaagaaaaaatgaaaaaattaaattttaatttaggcggagagcaatcgggacatataattttgggaaaatttgctactacaggggatggattattagttgcattagaagtattattttctctaagaaaagggatcaaagcaagcaaactattaaatgtttttaaaccattaccacaaatattagaaaatatagatgttaaaaataaaaatattttgaatagttataagtgtagaatagctataagattagctaataaggcaatggaaaaaaacggaagaatattagttagaaaatctgggacagagccaaaaattagaattatggcagagtcttacaacaaaaatttaatttctaaatgtataaaaataattaaaaaatcaatattaaattgaa

SEQ ID NO: 292387 - DNA, 1026 bp, Unknown
  Bacterial polypeptide expressing nucleotide sequence isolated from the Sargasso Sea
aatgaaaaataaatacttcggtacggatggaataagagggactgtaaatcagggaaatataactggtgaaaaattttttaagtttggattggcatccggcacttattttaaaaatcaaaaaaaatccaaacagattgcaattatagcaaaagatacaagattatcaggttatactttagagccggctttagtgtctggtcttgtatctggcggaatgcatgtttttactttaggcccattgcctacaaatggtcttgcaatgttaaccaaatcaatgaaagccaatatgggtattatgattacagcttctcataacccttattatgataatggcttgaaactatttggtcctgatgggatgaagctttctgataaaattgaaaaaaaaatcgaaaagcttatagatgctaaaaatacaaagcaattaacaaatccaaatttattaggacgggtaaaacgattagaagatggaaacgacagatacatcaatatattaaaaaataattttccaagtaattttcatcttaaaggaacaaaaatagttttagattgtgcgaatggcgcctgctataaggctgcacctaaattacttaaagagcttggggcaaaagttatttcaatgggagtaaatccaaacggattaaacataaatgaaaaatgtggatcaacatacccttcaaaaataaaggccgccgttaaaaagaataaagctaacgttggaatagcatttgacggagatgctgacagagtcattatgtgcgatgaaaaaggaaaaataatcgatggtgatcaaattattgcaatgttggcacgtcgctggaaattgaaaaaaattttaaagggtggcgtgatcggaacactaatgtctaattacggcttagaaaaatttttaaataatgaaaaaattagattttctagatctaaagttggagacagatatgttaaagaaaaaatgaaaaaattaaattacaatttaggaggtgagcagtctggtcatattattttaggaaaattgccaactaccag

SEQ ID NO: 292388 - DNA, 1321 bp, Unknown
  Bacterial polypeptide expressing nucleotide sequence isolated from the Sargasso Sea
aatgtcaaaaaaatattttggaacagatggaattagaggaagagtaaatagtaaaaatattaatggagatatgttttttaaatttggcttagcggcaggtacatactttaaaaatcttaaaaaaagcaaacaaacagctattatcgcgaaggatacaagattatctggctatacattagagcctgctttagtctctggattagcgtcagcaggcatgcatgtttttacgctaggacctttgccaacgaatggacttgcaatgctaacaaaaaaaatgaaagccaatatgggaattatgataacggcgtcacacaatccttattttgataatggtctaaaattatttggtccagatggaatgaaattatctgataaaattgaaaaaaaaatagagaaattgatagactcaaggattataggttatttatctaaaccagagtccttaggaagagtaaaaagattagaaaatgctaatgaaaaatatataaaaattcttaaaagaaattttccaaaaaacttcagtttaaaaggaattaaaattgccatagactgtgcaaatggagctggttacaaatctggtcctaagctttttaaatccttaggagcaaaagtgtatgaaataggtacatcgcctaacggtttaaatattaatgataaatgtggatcaacatttccaaataaaatcaggtcttttgtaaaaaaatacagggtaaacctaggtatatctcttgatggagatgcagatagaatcatattgtgcgatgaaaaaggaaatattattgacggagatcaaattattgcaatgttagctactagatggaaaagaaaaaaaatccttaggggaggagttataggaacgttaatgtccaattatggattgcaaaactatctaagtgagaaaaaaattaggtttatcagagctaatgttggagatagatatgtaaaagaaaagatgcaaaaaaataaatataatttaggaggagagcaatccggacatattatacttggaaaatttgcaactacgggagacggtttgttggtagctttagaagttttattttcaatgagaaaaggtagaaaagcgagtgaattatttaaaatttttaaaactacaccacaaattttagaaaatgtagcggttaatgataaatctattattaattctacaaaatgtagaagagctataaatcaagctaataaattaattaaagataagggaagaatgcttgtaagaaaatctggaacagaaccaaaaataagaattatgtgtgaatctgaaaacagaaccttactattaaaatgtattaatattgtaaaaaaa

SEQ ID NO: 292389 - DNA, 1333 bp, Unknown
  Bacterial polypeptide expressing nucleotide sequence isolated from the Sargasso Sea
atgacaaaaaaatattttggaacagatggaattagaggaaaagttaaccaaaataaaattaatggagagatgttttttaaatttggcctagctgctggcacatattttaaaaatcaaaaaaaatttaagcaaactgctataatagcaaaagataccagattatctggttattctcttgagcccgcactcgtctctggattggcatcagctggtatgcatgtttataccttagggcctttacctacaaatggcctagcaatgttaacaaaaaaaatgaaagcaaatttgggtataatgataaccgcatcacataatccatattatgataatggccttaaactgtttggaccagatggtttaaaattgtctgataaaattgaaaaaaaaatagaaaaattaattgatattaaaattgttaaaaatctttcagaaccaaaaatcttgggaagggtaaaaagattagaggatgcaaatgatagatatataaaaatattaaaaaaaaactttccaagtaattttagtttaaaaggcatgaagatagtaattgattgcgcaaacggtgctgcatataaatctggaccaaaactttttagaactctaggtgcaaaagttttcgaatatggggcatcaccaaatggctttaacataaatcaaaattgtggttcaacatttccaaataaaattaaacgcttagtgaaaaaacataacgcacatataggtatatctttagacggtgacgctgacagaattataatctctgatgaaaaagggaacattattgatggtgaccaaattattgctatgttagctacaagatggaaaagaaaaaaaatcttaaaaggtggggttattggaactttgatgtcaaattacggtttgcaaaattattttaaaagtaaaaaaataaggtttattagagctaatgtcggagacagatatgtaaaagaaaaaatgcagattaataatttcaatttgggtggtgaacaatcagggcacataatacttgggaaatttgcaacaactggagatggattgttagttgccttagaagttttattttcaatgagaaaaggcgttaaagctagtcaattgtttaatttatttaaactaactccacaaattctggagaatattaaagttaaagataaatcaataattaattcaaataaatgtaaaatcgctataatgaaagcagaaaaacttattaaaaataatggtaggatgcttataagaaagtcaggaactgaacctaaaataaggattatgggagagtctaataatataaatttattaagaaattgtatcaatattgtaaaaaaatctattaattaaa

SEQ ID NO: 292390 - DNA, 1333 bp, Unknown
  Bacterial polypeptide expressing nucleotide sequence isolated from the Sargasso Sea
atgccaaaaaaatactttggaactgatggtattagaggcgcgataaatagcaaaaatattaatggagatatgttttttaagtttggtctagcatcaggaactttttttagatcacaaaaaaaaaacaaacaagtggctgtaattgccaaagatacaaggctatcaggttatatgctcgaaccagctttggtatcaggattaacctcagctggtatgcacgtttacactttgggacctctaccaactaatggtttagcaatgcttaccaaaaccatgaaagctaatatgggaattatgataactgcatcacacaatccacattatgataatggattaaaattatttggcccagatggaatgaaattgtctaacaaaattgaaaagaaaattgaacatttaatagaccaacatattgaaaaaaatttatctgaacctgaaaaactaggaagggtaaaaagactagaaacaggaactagagattatattaaaattttaaaaaaaaacttttctgaggagtttaatttaagaggacttaggattgttatagactgcgcaaatggagcaggttacaaagctggtcctgaattattaaaatcattgggtgcaaaagtaatagctattggggtggagccgaatggcatgaatatcaataaaaattgtggatcagtctatcctcagaatattaaaagagcagtaaaaaaatataaagctcacattggtatatcattagatggtgatgctgatcgagtaataatgtgtgatgaaaaaagtaatataattgatggtgatcaaattattgctgctttggcctcaagatggaaaaataaaaaaatgttaaaaggaggggtagttggtaccttaatgtccaattatggtttagagcaatactttaaaactcttaatattaattttattagagcaaatgttggtgataggtacgtgaaagaaaaaatgcaaaaacataaatttaatttagggggtgaacagtcaggccatattattcttggaaaatttgcaaccactggagatggtttattggttgccttagaggctttatttgcgttgagaaaaggaaaaaaagctagtgtatttttttcaaaatttaaaaaaattccacaaatattaaaaaatatagatgtaaaagataaaaatataattaataaatcagaaataaaaaattctattaaaattgcagaaaaattaatcaaaggacatgggagaattttagttaggaaatcaggaacagagtctaagataagagtgatgggtgaaagtgaaaatgtagatcttctagaaaagtgtttaaacataattgtcaaaaaaattaaataaa

SEQ ID NO: 292391 - DNA, 895 bp, Unknown
  Bacterial polypeptide expressing nucleotide sequence isolated from the Sargasso Sea
aatggcaagaaagtattttggcaccgacggtgtacgcggcaaggtgggtgaatacccgatcaccccggatttcgtgatgaaactgggctgggctgcgggcaaggtgctctccaagaaaggtactcgcaaggtgctgatcggcaaggatacccgcatctccggctacatgctggagtccgcactggaggctggcctgtccgccgcgggtctcaaggccattctgatgggccccatgcccaccccggccgtcgcctacctgacccgcaccttccgggccgaagccggcatcgtcatcagcgcttcccacaacccctattacgacaacggcatcaagttcttctccgccgacggtaccaagctgcctgacgaagtcgagatggccatcgaagccgagctggaccacgagctgaagtgtgtggagtccgccgagctgggcaaggcactgcgcatcgacgatgccgccggtcgttacatcgaattctgcaagagcacttttccttccaatctgagcctggaagggctgaagatggtggtggactgcggtcatggtgcgacctaccacattgcgccttccgtattccgcgagctgggggcagaagtgatcgccatcggctgcagcccggatggtctcaacatcaacgatggtgtcggttcgaccgcccccgaagccctggcggccaaggtgctggagtgcaaggcggatctgggggtggccttcgatggtgatggcgaccgtctggtgatggtggacaacaccggctatatcatcgacggcgacgaaatcctctacatcattgcccgcgatgcactgcgcaacggtcgcctcaagggcggcgtggtgggcaccctgatggccaacatgggtctggagctggcgctgcagacgctgggtatc

SEQ ID NO: 292392 - DNA, 1339 bp, Unknown
  Bacterial polypeptide expressing nucleotide sequence isolated from the Sargasso Sea
atgacaaaaaaatattttgggacagatggaataagaggagcagttaatagcaaatatataaatggagatatgttctttaaatttggacttgctagtggaacatactttaaatctcaaaaaaaaagaaaacaaacagcaataattgcaaaagatacgagattgtcaggatatacacttgagccagctcttgtttcaggtttggcttcagctggtatgcatgtttatacccttggacccttaccaactaatggtttggctatgctaacaaaagaaatgaaggctaatatgggtataatgatcactgcttctcacaatccacattttgacaacggtttaaaattgtttggtcctgatggaatgaaattatcagataaaatagaaaaaaaaattgagggacttatagataagaaaatctcaaaaaacctttcgcattctgaaaaattaggaagagttaaaagattagaaacaggtactaaaaaatatattaaaatattaaaaaaaaatttcactaaagagttcaatttaagaggactaagaatagtaattgattgtgcaaatggtgctggttataaggcaggtcctgaattattgaaatcattaggagctaaagtcatagcaataggaattaaaccaaatggtttaaacattaataaaaaatgtggatcaacttttccaagaaacatcagatctgctgtaaaaaaatataaagcacatattggaatatctttagatggggatgctgatagaattataatgtgtgatgaaaaaagcaatataatagatggagatcaaattatagctgctttagcaacaagatggaaaaacaaaaaaatgttaaaagggggagttgttggaacattaatgtcaaattatgggttagaaaaatattttaaatcaaaaggaataaaatttctaagggcaaatgttggagatagatatgttaaagaaaaaatgcagaaatataattttaatttaggtggtgaacaatcaggacatattattctaggtaaatttgcaactacaggagatggtttgctagtagctttagaagctctttttgctttaagaaaaggaaaaaaggcaagtgaattttttgatcaatttaagaaaacacctcagcttttagaaaatatcgaagttaaagataaaaatataattaataaaccagagataaaaaaaattataaaaaatgcagataaattaatcaaaggtaatggaagaattttagtaagaaaatcaggaacagagtctaaaataagagtaatgggagaaagtgaaaataaagctcttttatacaaatgtgtaaatatgattacaaaaaaaataaaaaaaaattgaa

SEQ ID NO: 292393 - DNA, 1354 bp, Unknown
  Bacterial polypeptide expressing nucleotide sequence isolated from the Sargasso Sea
atgtctaggaagtattttggtactgatggtgtgcgtggcaaagttggtaaattcccaattacgcctgattttgcgatgaagttaggttgggcggcaggtacagtgctcgcatccacaggcactaaagaggtgttaattggtaaggatactcgtagtagtgggtatatgcttgaatccgcgatggaagcgggtttttcagccgctggtgtcaatgtggcattaattggccccatgccaacgcccgcggtagcgtatttagcttcaacttttagggccgatgctggtgtggtgctcagtgcttcccataatcctttttatgataacggtattaagtttttttcaaacacaggcactaagctaaatgatgcacaagagcttgaaatcgaagcgttattagagcaagcgcttgagcgtaacgcgttgcaatgtgttgcttctgaaaagcttggcaaggtgcgccgcattgatgatgctgccggtcgttatattgagttttgtaagggaaccttcccaaatcatttaagcttggcgggattaaaaattgttgtcgatagcgcccatggtgctgcctaccatattgccccgaatgtgtatcgcgaattaggggccgaggtgattagcattaacgacaaacccaacggcgtgaacattaacgatcattgtggcgcaacacatttggatagcttgcaatctgcggtgatgatccatgaagcggatttaggtattgcgctcgatggtgatgccgaccgagtcatgtttgttgaccataatggccatgtggttgatggcgatgagattttgtttattttggctcaagcagtatatcaaaaaggtgagatgcagggcggggtggttggtacgcttatgtctaatcttggattagaactggcactcaaacaaatggatattccttttgtgcgggctaaggttggtgaccgttatgtggttgaacagctcaaacaaacgggttggaaactgggcggcgaaggctctgggcatattttgagtttgcaacatgcttcaactgacgatggcattgtggcatctttgcaggtgctcaaagccgttttagagtcgggtaagcgtttggccgagcttaaagcgggtatgactaaattgccgcaactgcttatcaatgtgcgtttaacctctggcagtgcggatagtattttggctaaagacagtgttaaacaagctgtgctaaccgctgaggaagttttaggggacaaggggcgagtattattacgcaaatcgggtaccgaacccttaattagagtgatggttgaatccacggacattgccttgacccaacaacaagctgaatatatcgcagaggcagtaagagcggcataag

SEQ ID NO: 292394 - DNA, 1183 bp, Unknown
  Bacterial polypeptide expressing nucleotide sequence isolated from the Sargasso Sea
atgtcaaaaaaatattttggaactgatggaattaggggaaaagtaaaccaaggaaatataaatggagaaatgttttttaaatttggtttagccgcaggaacttattttaagaatttaaaaaaaactaaacaaacagcaattattgctaaagatacaaggctatctggttatactttagagcctgctctagtgtcgggtttagcttctgctggaatgcatgtttatactcttggcccattgccaactaatggtcttgctatgctaacaaaaataatgaaggcaaatatgggtattatgataacagcatcacacaatccttattatgataatggattaaaattatttggccctgacggtttaaagttatctgatacaattgaaaaaaaaatcgaaaaactaatagattcaaatattacaaaaaatttatctaaccccaaaattcttggtagagttaaaaggttagaggatgctaacgacagatatattgaaattttaaaatctaattttccacgtaattttaaattaaaaggaattaaaattgctatagactgtgcaaatggtgctggatataaatctggaccaaagcttttaaaatctttaggtgcaaaagtttatcaagttggcatatctcctaatggcttaaatattaatcaaaattgtggttctacttttccaaaaaaaattaaatctttagttaaaaaatataaagttaatctaggaatatcattggatggagatgcagatagaataattttatgtgatgaaaaagggaacatcgtcgatggtgatcagattattgctatgcttgcaaaaagatggaaaagaaaaaaaattcttaaaggcggtgtaattggaactttaatgtctaattatggactacaaaattattttagagagcaaaaaataagatttgtaagagctaatgtaggtgacagatatgttaaagaaaaaatgcgaaaaaataaatttaatctagggggggagcagtcaggccacattatattaggaaaatttgcaacaacaggtgatggactgttagtagcgttagaagttttgttttcaatgagaaaaggtaaaaaagctagtgaattattaaatatttttaaacctatgccacaaattttagaaaatattactgtaggagacaaaaatataataaataaatttaaatgtaaaagagcaa

SEQ ID NO: 292395 - DNA, 1351 bp, Unknown
  Bacterial polypeptide expressing nucleotide sequence isolated from the Sargasso Sea
ttggagagtagtgtgcagaaaagatattttggaacggatggcattcgtggccgggtcaatgaatttccaatgactgcagaaaatgctctcaaaataggtatggcagctgggcaattttttaaaaacaacaaaaaaaaggtgcatcgtgttgttataggcaaggacaccaggctctcaggttatatgtttgaaaatgctttaactgcaggtttaacttcgatgggaatgaacgttttgcttcttggcccagtaccaactcctgcggtcggtatattgacgccatctatgcgtgcagatctaggtataatgatttcggcaagtcataatcctcacgaagataatgggataaaattttttggtcctgatggttttaaattatcagatgaggctgagcaaaatatagaggaattgattggcaaagaattaagtaatgtcggacttatcgatattggccgggcaaaacgcattgaagacggattgttccggtatgtagagagggtaaaatcaagttttcctagtggtatgaggcttgatggcatgaaggtggtcatagactgcgcaaatggagcaggttatcgtgcggcacctgaagttttatgggagcttggcgcagatgttattcctattggtgtaaatccaaatggcttaaatattaataaaaactgtgggtctacaaatacccaaagggcagctgaagctgtagtttctcatggtgcggacgtgggaatttgccttgatggagatgctgataggatcattttaatcgattctgacgggaatattgctgatggcgatcaaattatgggtgtcatcgcctctagatggtctcaggatggattgcttgctggaagtggaatagcaacgaccgtaatgtcgaatttggggctagaacgttttctgaatcaacgcggcatttcaatggaaaggacacaagttggtgatcgctatgttgttgagcgtatgcgcaaatctggctttaatctcggtggggagcaatcaggtcatataatcttgagtgatttttccacaacgggtgatggtcttattgcagggttgcaatttttggcagaaatcattcgatcagagcgcagctcaaaggaactcgctcacgtatttgagcctgttccgcagttactaaaaaatgcatcttttcgggtaggttctgatcctctcgctaagcccaatgtgataaaagctataaaagcagccgaggcaaaacttaagaacaatggaagattattgatccgaaagtcaggcacagaacccttaataagagtgatggcagagtctgaagatgaagaaaaaatgactagagcggttgatagtgtggttgctgaaattactgcttaaa

SEQ ID NO: 292396 - DNA, 1333 bp, Unknown
  Bacterial polypeptide expressing nucleotide sequence isolated from the Sargasso Sea
atgactaaaaaatattttggaaccgatggaattagagggaaggttaaccagaccaaaattaatggtgaaatgttttttaaatttggcctagcagcaggtacatattttaaaaatcagaaaaaatcaaaacaaacagctattattgcaaaagatacaagactctcaggatatacacttgagcccgcattggtgtctggattggcctcagcaggaatgcatgtctacacgctaggacctttaccaacaaatggattagcgatgttaacaaaaaagatgaaagccaatatgggaattatgattacagcgtctcataacccatattatgataatggactaaaattatttggaccagatggcctaaaactgtctgacaaaattgaaaagaaaatagaaaaactaattgactctaaaatagcaaaaaatctttctgaaccaaaaattttaggaagagtaaagaggttagaggatgcaaatgataaatatataaaaatattaaaagataattttccaagaggttttaagttaaaaggaatgaaaattgcaatagattgtgctaacggagcaggttataaatctggaccaaaattattaaggagcttgggtgcaaaagtaattgagtatgggacttctccaaatggtttaaatattaatgataattgtggctcaacctttccgcaaaagatcaaatctttagttcgaaaaaacaaagctcatattggaatatctttagatggtgatgcagacagaataattgtatctgacgagatggggaacattgttgatggtgataaaattattgcgatgctagcaaccagatggaaaagaaagaaaattctaaaaggtggtgtaattggcaccctaatgtcaaattatggattacaaaatttttttagagatcaaaaaattaaatttatcagagctaatgtaggagacagatatgttaaggaaaaaatgcaaaaagaaaactttaatctaggcggagagcaatctgggcacattatacttggcaaatttgcaacaacaggtgatgggctattagttgcattagaaattctattttcaatgagaaaaggtaaaaaggcgagtgagctttttgacttatttaaattaacacctcaaatattagaaaatgtaaaggttaaagataaatcaattattaattctactaagtgtaaagttgctattaaaaaatctgaaagaataattaaaaattatggtagaatgcttgtaagaaaatctggcacagagcctaaaatcagaattatgggcgagtcaaacaatattcatttattaaaaaaatgtataaatattgtaaaaaggtctattaaataaa

SEQ ID NO: 292397 - DNA, 1015 bp, Unknown
  Bacterial polypeptide expressing nucleotide sequence isolated from the Sargasso Sea
atgtctaaaaaatattttggtactgacggaataagaggagaggtaaataaaggaaacattaatggagaaatgtttttcaggtttggtcttgctgtaggaacttattttaaaaatataagaaaaactaaacaaactgctattattgcaaaagatactagattatccggttatgctttagagcctgcattagtttcaggattagcttcagctggaatgcatgtttacacattaggacctttaccgacaaatggacttgcaatgttaacaaaaaaaatgagagctaatatgggaattatgataaccgcatctcataatccttattatgacaatggattaaaattatttggacctgatggtctaaaattatccgataacatagagagaaaaattgaaaaattaattgactccaaaataattaaaaatttatcaattccaagtgctctcggtagagttaagagactcgaaaatgcaaatgaaaaatatattcaaattttaaaaaaaaattttcctaaaaattttagcttaagcggaacaaaaattgcaattgattgtgcaaacggcgctagctacaagtcaggccctaaactatttaaatctttaggagctaaagtttatgatataggaacatcacccaatggtattaatattaatgataattgtggatccacattcccagataggattaaatttttggttaaaaaacacagagtaaatttaggtatagctcttgatggtgatgcagatagaataattttatgtgatgaaagaggaaaaataattgatggtgatcagatcattgcaatgttagctaataggtggaaaagaaaaaaaattctaaaaggaggtgttataggaactttaatgtcaaattacggtttacaaaattacttaaaaaatcaaagaattaaatttctaagagcaaaagttggcgatagatatgttaaagaaaaaatgcaaaaaaaaaaatataatttaggtggagagcagtcaggacatattatacttgtaaattgca

SEQ ID NO: 292398 - DNA, 1168 bp, Unknown
  Bacterial polypeptide expressing nucleotide sequence isolated from the Sargasso Sea
aaatattttggtactgatggtattagaggggctatcaatagtaaaaatattaatggagatatgtttttcaaatttggcttagcgagcggaacatattttaaatctcaaaagaaaagaaaacaaacagcaataatagcaaaagatacaagattatcaggatacactttagagccagcccttgtatctggattggcatcagcaggtatgcatgtatatactttaggacctttacccacaaatggtttagcgatgctcacaaaagctatgagggcaaatatgggaattatgattacagcttctcacaatcctcataatgataatggattaaaactatttggacctgatggaatgaaactatcagataaaatagagaaaaaaattgaaagtttaatagataaaaatatcattaaaaatctctcaaagcctgaaaaattaggtagagtgaaaagattagaaacaggcacagatgattacatcaagatattaaaaaaaaattttaccaaagagttcaatttaagaggacttagaattgtaattgattgtgcaaatggagcagggtacaaagctggaccagaattattaaaatctttgggagctaaagtaattgcaataggagttgatcctaatggattaaatataaacaaaaattgtggttctacatttcctggaaagataaaatctgcagttaaaaagtataaggctcacataggtatttcattagatggcgatgcagatagaataattatgtgtgatgaaaaaagtaatattatagatggtgaccaaattattgctgcactagcaacaagatggaaaaataaaaaaatgttaaaaggtggggttgtaggaactttaatgtctaattatggccttgaaaaatattttagaaaaaaaggtataaaatttatacgtgctaacgttggtgatagatacgtaaaagaaataatgcaaaaaaataagtttaatttaggaggagaacagtcaggacatattattttgggtaaatttgcaaccacaggagatggcttacttgttgccctagagtctttatttgctcttagaaaggggaaaagagctagcgaattttttgaaaaattcaagaaaacaccccaattgcttaaaaacattgaagtaaaaaataaaaatataattaataaacctgaaataaaaa

SEQ ID NO: 292399 - DNA, 1339 bp, Unknown
  Bacterial polypeptide expressing nucleotide sequence isolated from the Sargasso Sea
atgagcgaacgtaaattttttggaaccgatggtattcgtggcaaggtaggttcaggccagatgacacccgagctggcattaaagttgggttgggctgctggacgggtgttatcccgtagcggcactaagaaagtgattattggtaaagatacccgtatctcggggtatatgtttgaatctgccttagaggcgggcctttcggcagcgggtctgaatgtgatgctgatggggcccatgccaacgccagcggtggcttatttgactcgtacttttcgcgccgaagctggtgtggtaattagtgcttcccacaacccttactatgataacggcattaagtttttctcaactgatggcagtaagcttgatgataatcttgagcttgaaatcgaagccgaattagaaaagcccttagagtgtgttgaatcacatctgttgggcaaagtgtcacgaattgaagatgcacgcggccgttacatcgaatactgcaaaggtaatttccctgcagatcacacattaacagggttaaaaattgtcgtcgattgtgcccatggtgcaacttatcacatcgcaccagcggtatttcgcgagttaggcgccgaagtgattgccattggtgataaaccaaacggagtcaatatcaatgacaaagttggcgcaacgtccatggcaaagatttgtgaaactgttttggccgaaagtgccgatttagggattgcgctcgatggcgatggtgaccgaattatgatggtcaatagcaaaggtgaggtgatcgatggcgatcaaattctttatatccttgcctgtgatgccaaggctcgtggtgtgttacgcggaggtgtggttgggacgttaatgtctaaccttggcctcgatttagcacttcaggcgttggatattccctttgctcgctctaaagtgggcgaccgttatgtgatggagttactcaaagaactcgattggcgtatcggcggtgaaaactcggggcatattcttaacctcgaccatggcacgaccggtgatggtattgttgctggtattttggtgctggcggccatgcgtcgtcaaaatgcaaccttagagcagttaactgcgccaatggaaatgttgccacaggtgttggtgaatgtgcgttttgaaggcgaacatgatccattaagctcagataaagttaaagctgctcaagctcaggttgaatcacaactgggcgctcgaggtcgcgtattgctacgcaaatcaggtactgaaccgttaattcgcgtgatggttgaaggtgatgatcacaatgctgtgttagcgcacgctaatttgattgcagatgcggtaaaatcggctagctaat

SEQ ID NO: 292400 - DNA, 181 bp, Unknown
  Bacterial polypeptide expressing nucleotide sequence isolated from the Sargasso Sea
atgaatcaatttagtgtaattaatatcaattctccttttctagatcaaaaaccaggtacctctggattaagaaaaagtactttaaagttccaggaagaacattatctagaagtttttattgaaagcaatcttacaatcattagaagatttaaaaggttcaacattagtagttggtggtgat

SEQ ID NO: 292401 - DNA, 655 bp, Unknown
  Bacterial polypeptide expressing nucleotide sequence isolated from the Sargasso Sea
agcggttgataatgttgctcgagcattaaatataccttgttttgagacacctactggctggaagttttttggaaatcttttagattctaatttaattactttatgtggagaagaaagttttggaacaggtagtaatcatgtgagagagaaagatggactatgggcagttttgttttggttacaagttttagctgagaaaaaatgttcggtaagtgatttgatgcagaatcattggaaacaatttggtaggaattattattcaagacatgattatgaggcaattccctcaaatattgctaatcaaatttttggtaatctaacttctatgctcgaaaatttaagaggaaatagttttgctggtcatttagttaaagttgcagataacttttcatatttagatcccgttgataattccataagtgaaaatcaaggtttaagattggtccttgatgataattctcgagtaattgtgcgcctttctggaactggaactaagggtgcaacattaagactttactttgagaaatttttcgatcctcaacagaatctttcgttaaatcctcagattgctttgaaacctctaatagatgatttagatgctttattgaacatttcaaaacttactcaactggaaactcctacagtaattacatag

SEQ ID NO: 292402 - DNA, 187 bp, Unknown
  Bacterial polypeptide expressing nucleotide sequence isolated from the Sargasso Sea
tatgactcaagctaatgtaattaatattaattctcctttcttagatcaaaaaccaggaacttcaggtttaagaaaaagtaccttaaagtttcaagaagagcattatttagaaatttttattgaagcaatcttacaatcattggaagatttaaagggttcaacactcatagttggtggtgatggtaga

SEQ ID NO: 292403 - DNA, 106 bp, Unknown
  Bacterial polypeptide expressing nucleotide sequence isolated from the Sargasso Sea
tatgagccaagttagtgtaattaatatcaattctccttttctagatcaaaaaccaggtacctctggtttaagaaaaagtactttaaagtttcagcaagaacattat

SEQ ID NO: 292404 - DNA, 448 bp, Unknown
  Bacterial polypeptide expressing nucleotide sequence isolated from the Sargasso Sea
gatgcgcctcacccccagcgcggcgctcggggtggcggtgaaggacgtcgcgacgacgccgatcgagggccagaagacgggcacctccggccttcgcaagaaggcggcggtgttctccgaggggaactacctcgcgaactgggtgcagagcctcttcctcgccctccccgcggaggaggtgaaggacagcacgatggtgttgggcggggacggccgctggttcaacaaggaggcggcccagatcatcatcaagctcgcggcgggcaacggcgtcggcaagatgtacgtcggccagaacggctacctcgccacccccgcggcgtccgcggtcatccgcgccaggaaggcctacggcgggttcatcatgtccgcctcgcacaaccccggcgggccgaaggaggactggggcatcaagttcaactacacctcgggcgagcccgcgcccgag

SEQ ID NO: 292405 - DNA, 580 bp, Unknown
  Bacterial polypeptide expressing nucleotide sequence isolated from the Sargasso Sea
atctgctggatgccggcaaatcacgctctgcggtgaagagagcttcggcaccggcagcaaccacgtgcgtgaaaaggatggcctctgggctgttcttttctggctgcagatcctggccgagcgccgctgcagcgtcgccgagatcatggctgagcattggaagcgcttcggccgccactactactctcgccacgactacgaagccgtcgccagcgacgcagcccatgggcttttccaccgcctcgagggcatgctccctggtctggtggggcagagcttcgctggccgcagcgtcagcgcagccgacaacttcagctacaccgatcccgttgatggctctgtgaccaagggccagggcctgcgcatcctgctggaggatggcagccgcgtgatggtgcgcctctcgggcaccggcaccaagggcgccacgatccgcgtctatctggagagttatgtaccgagcagcggtgatctcaaccaggatccccaggtcgctctggccgacatgatcagcgccatcaatgaactggcggagatcaagcagcgcaccggcatggatcggcccaccgtgatcacctga

SEQ ID NO: 292406 - DNA, 574 bp, Unknown
  Bacterial polypeptide expressing nucleotide sequence isolated from the Sargasso Sea
catggacccgctcaccgtcacgacgaaggccaccgcgccgatcgagggccagaagcccggcacgtccggcctgcgcaagaagacgaaggtcttcatgggcgagaattacctggagaatttcgtgcagtcggtcttcgacgcgctcgtcgcgacggggacgaaggtggcgggcggcacgctcgtcatctcgggcgacggccgctactggaacacgaacgcgatccagacgatcatcaagatggcggcggccgcgggcgtcgcgaaggtgtggtgcggcacgggcgggctgctctcgacgccggcgatgtcggcggtgatccgcgcgcgcggcaagggcttcgagccgatcggcggcttcatcctctcggcgtcgcacaacccgggcggcatcgacgaggacttcgggatcaagtacaactgcgagaacggcgggccggcgcccgagaaggtgaccaacctgatcttcgagaacacgaaggcgatcaaggagtacaagctgtgcgagtcgctccccgcgatcgacctcgagaagcccgcggcgtacaacatcaccggctcgaagtcgctcaccgtc

SEQ ID NO: 292407 - DNA, 118 bp, Unknown
  Bacterial polypeptide expressing nucleotide sequence isolated from the Sargasso Sea
atgaccacctcggcccccgcggaaccgacccagcgcctagtgcgcctggacgcacctttcaaggatcagaagcccggcacatccgggttgcgcaaaagcagccagcagtcgagcaagc

SEQ ID NO: 292408 - DNA, 655 bp, Unknown
  Bacterial polypeptide expressing nucleotide sequence isolated from the Sargasso Sea
gcggttgataatgttgctcgagcattaaatataccctgtttcgagacacctactggttggaagttttttggaaatcttttagattctaatttaattactttatgtggagaagaaagtttcggaacaggaagtaatcatgtaagagagaaagatggattatgggcagttttgtattggttacaagttttgtctgagaaaaaatgttcggtaagtgatttgatgcagaatcattggagacaatttggtaggaattattattcaagacatgattatgaggctattccctcagatattgctaatcaaatctttagcaatctaaattctatgctcaaaaatttaaaaggaactaattttgctggcaatttagttaagattgcagataacttttcatatttagatcccgttgataattccataagtgaaaatcaaggtttaaggttggtgcttgatgataattcccgggtaattgtgcgcctctctggaactggaacaaaaggggcaacattaagactttactttgagaaattttttaatcctaaacagaatcttacgttaaaccctcaggtagctttgaaacccctaataaatgatttagatgctttattaaacatttcaaaacttactcaaatggaaactcctacagtaattacataga

SEQ ID NO: 292409 - DNA, 434 bp, Unknown
  Bacterial polypeptide expressing nucleotide sequence isolated from the Sargasso Sea
ggagcactgggccaagtacggccgcaacttcttctctcgttacgattacgaaggctgcgaatccgacccgtgcaacgccatggttgaatccctccgcgccaaggctgccgccgccaagaagggcgacaagtacggcgactacgaattggactttgccgacgactttgagtacacggatcccatcgacggttccgtcgccaaaaaacaaggcgtccgcttcgtcttcaccgacggctctcgcttcatcttccgcctctccggcacgggttcctccggcgccaccgtccgcatgtacatcgagcaatacgaagccgatcccgccaagcaaggcgccgacgcccaagacgcgctcgcgcccctcatcgcgatcgccctcgagacgagccaactcgccgagttcaccggccgagaatctcccaccgtgatcacttaat

SEQ ID NO: 292410 - DNA, 400 bp, Unknown
  Bacterial polypeptide expressing nucleotide sequence isolated from the Sargasso Sea
tatgaatcaagttagtgtaattaatatcaattctccttttgtagatcaaaaaccaggtacctctggattaagaaaaagtactttaaagtttcaggaagaacattatctagaagtttttattgaagcaatcttacaatcattagaagatttaaaaggttcaacattagtagttggtggtgatggcagatatggcaatattgaagcaattgaaaaaattatccaaatatgcatagctcataaagttcaaaaggttattgttccaaaatacggtttattatctactcctgcaacatcacatttaattagaaaagaaaaagctattggtggaattattctttctgcaagccataatcctggtgggattgatggcgactttggagttaaattgaatatctctaat

SEQ ID NO: 292411 - DNA, 791 bp, Unknown
  Bacterial polypeptide expressing nucleotide sequence isolated from the Sargasso Sea
tatgcctgaaattaatgttattaatataataaatccttttctagatcagaaaccaggtacttctggtttaagaaaaagtactttgaaatttcaagaagagcattacttagaaatatttatagaagcaatttttaaatcacttgaaaatctgcgagggtcaactttagttgttggtggggatggtagatatgggaatatcgaagcaatcaagaaaattatccaaatatgtgtagctcataaagttggaaaagttattattccaaaaaatggtttattatctactcctgcagcatctcatttgattagaaaagaagaggctattggaggaattattctctcggcaagtcataatcctggtggtattgaaggggatttcggagttaaattaaacactgctaatggtgggcctgcttctgagtcaattacaaatcaaatattccaatgttctcaatcacttaagagttacaaaattagcaaaattaaaatcccagacttagataagtttggtttattctcgtttggtgaaacttcattagaaataattgatggatttaaagattattcaaatttaatggagaatatttttgacttagatcaaataggtgattttttgaaaaaggatttctctttaatttttgatgcaatgaatgcagttactggtccatatgcaaaaaatatttttgttgaaaaaatgggtctcattgatgattgtgtcatgaatggaatacctctagaggattttgggaggttacatcctgatccaaatcttacttatgcgtctaaattggcgg

SEQ ID NO: 292412 - DNA, 484 bp, Unknown
  Bacterial polypeptide expressing nucleotide sequence isolated from the Sargasso Sea
atgaatcaagttagtgtaattaatatcaattctccttttctagatcaaaaaccaggtacctctggattaagaaaaagtactttaaagtttcaagaagaacattatctagaagtttttattgaagcaatcttacaatcattagaagatttaaaaggttcaacactagtagttggtggtgatggcagatatggcaatattgaagcaatagaaaaaattgttcaaatatgtattgctcataaagttcaaaaggttattgttccaaaatacggtttattatctactcctgcgacatcacatttaattagaaaagaaaaagctattggtggaattattctttctgcaagccataatcctggtgggattgatggcgactttggagtgaaattgaatatctctaatggtggcccagctcctgagataattactaataaaatttttgaggcttcgcaattactaactagttataaaatttgcaaaattcaat

SEQ ID NO: 292413 - DNA, 717 bp, Unknown
  Bacterial polypeptide expressing nucleotide sequence isolated from the Sargasso Sea
aatgtgtccctgggtataaagatggtattacaggtgtggcaagatctatgccaaccagctcagcggttgataatgttgctcgagctttaaatataccttgttttgagacacctactggctggaagttttttggaaatcttttagattctaatttaattactttatgtggagaagaaagtttcggaacaggtagtaatcatgtgagagagaaagatggactatgggcagttttgtattggttacaagttttagctgagaaaaaatgttcggtaagtgatttgatgcagaatcattggaaacaatttggtaggaattattattcaagacatgattatgaggcaattccctcaaatattgctaatctaatctttggtaatctaacttctatgctcgaaaatttaaaaggaaatagttttgctggccatttagtaaaagttgcagataacttttcatatttagatcccgttgataattccataagtgaaaatcaaggtttaaggttggtgcttgatgataattctcgagtaattgtgcgcctttctggaactggaactaaaggtgcaacactaagactttacttcgagaaatttttcaatcctcaacagaatctttcgttaagtcctcagatcgcattgaaacctctaataagtgatttagatgctttattaaatatttcaaaacttactcaaatggaaactcctacagtaattacataga

SEQ ID NO: 292414 - DNA, 607 bp, Unknown
  Bacterial polypeptide expressing nucleotide sequence isolated from the Sargasso Sea
tatgaatcaagttagtgtaattaatattaattctccttttctagatcaaaaaccaggtacctctgggttaagaaaaagtactttaaagtttcaggaagaacactatctagaagtttttattgaagcaatcttacaatcattagaagatttaaaaggttcaacattagtagttggtggtgatggcagatatggcaatattgaagcaatagaaaaaattgtccaaatatgtgttgctcataaagttcaaaaggttattgttccaaaatacggtttattatcaactcctgcgacatcacatttaataagaaaagaaaacgctattggtggaattattctttctgcaagccataatcctggtgggattgatggcgactttggagtgaaattgaatatctctaatggtggtccagctcctgagataattactaataagattttcaaggcttcacaattactaacaagttataaaatttgtaaaattcaaatacctgattttagtgaatatggaacttattcttacgacgaaactaccttagaaattattgatggattaacagattattctaatttgatggagaaaatttttgattttgatcaaattagtgat

SEQ ID NO: 292415 - DNA, 357 bp, Unknown
  Bacterial polypeptide expressing nucleotide sequence isolated from the Sargasso Sea
tatgaatcaagttagtgaaattaatatcaattctccttttctagatcaaaaaccaggtacttctggattaagaaaaagtactttaaagtttcaggaagaacattatctagaagtttttattgaagcaatcttacaatcattaggagatttaaaaggttcaacattagtagttggtggtgatggcagatacggcaatattgaagcaatagaaaaaattgtccaaatatgcattgctcataaagttcaaaaggttattgttccaaaatttggtttattatctactcctgcgacttcacatttaattagaaaagaaaacgctcttggtggaattattctttctgcaagccataaccctgg

SEQ ID NO: 292416 - DNA, 821 bp, Unknown
  Bacterial polypeptide expressing nucleotide sequence isolated from the Sargasso Sea
ggcacttcttggtttaagaaaaagtactttaaggtttaaagaagagcattacttagaaatatttatagaggcaatttttaaatcacttaacaatttgcgagggtcaactttggtagttggtggggacggtagatatgggaatatcgaagcaatcaagaagattatccaaatatgtgtagctcatgaagttggaaaagttattattccaaaaaatggtttattatctacacctgcgacttctcatttgattagaaaagagggggctattggaggaattattctctcagcaagtcataatcctggtggaattcatggggatttcggagtcaaattaaatactgctaacggtggacctgctgctgagtcaattacaaatcaaatatataaatgttctcaatcactcatgagttacaaaattagtaatgtcaaaattccagatatagataagttgggcgtattcttctttggtgaaacttcattagaaataattgatggattaaaggattattcaaatttaatggaaaatatttttgattttgatcaaataagtgatttcttgaaaaaggatttctctttaatttttgatgcaatgaacgcagtgactggtccatatgcaaaaaacatttttgttgaaaaaatgggtcttgtagataattgtgtcatgaatagcgtaccacttgaggattttggaggtttacatcctgatccaaatcttacttacgcgtctaaattggccgatttgttattagttcaaaaagcctatagttttggagctgcatgtgatggtgatggtgatagaaatatgattttaggtcagggtt

SEQ ID NO: 292417 - DNA, 744 bp, Unknown
  Bacterial polypeptide expressing nucleotide sequence isolated from the Sargasso Sea
cggcggcgcgacggcggtgcacgactgcacggcgtcggcggcggtgacggtggtgccgacggagccgatcgagggccagaagccgggaacgtcgggcctgcgcaagaagacgaaggtcttccagggcgagaagtacctcgagaacttcgtgcagtcgctcttcgactcgctgccggcgggcgagctggcgggcacgacgctcgtcgtctcgggtgacggccggtaccacaacgccgcggcgatccagacgatctgccggatggcggcggcgaacggcgtggcgcgcgtgtgggtcggccgcggcggcctgctctcgacgccggcggcgtcggcgatcatccgcgagcgcgagggcggcgcggcgtacggcgggatcgtgctgacggcgtcgcacaacccgggcgggcccgacgaggacttcggcatcaagtacaacgtgcagaacggcgggccggcgctcgagagcctgaccgacgccgtctacgagcgcaccggtgcgatcaaggagttcaagctctgcgagggcctgccggcggtcgacctgcagtcggtgggccgccacgtgtatgccgaggagggcggcgcgcctttcttcgaggtcgaggtggtcgacccggcggaggactacctcgtgctgatgcgcaaggccttcgacctcgacgcgctcaaggcgctgctcgcgcgcgacgacatgtcgttcgtcttcgacggcatgcacggcgtcgccggcccgtacgccgcctc

SEQ ID NO: 292418 - DNA, 585 bp, Unknown
  Bacterial polypeptide expressing nucleotide sequence isolated from the Sargasso Sea
tatgactgaagttaatgtaatacatatagattctcctttcttagatcaaaaaccaggaacttctggtttaagaaaaagtactttaaagtttcaggaacaacattatctggaaatctttatagaatcaattttagaatcactggaaaatttacaaggttcaacattagtagttggtggtgatggaagatatggaaatattgaagcaatagaaaaaattgtgcaaatatgtattgctcataaagttcaaaaggttcttgttccaaaatgcggtttattatctactcctgctacatctcatttaattagaaaagaaaatgctattggaggtattattctttcggcaagtcataatcctggaggaataaatggtgactttggagttaagttaaatatttctaatggtggtcctgcccctgaaatgattactaataagatattcaaattatcacaattattaactagttataaaatctgcaaaattcaactacctgattttagtgaatatggaacctatatttttggagaaactactttagaagttattgatggattagaaagatatttctatttgatggagaaaatttt

SEQ ID NO: 292419 - DNA, 610 bp, Unknown
  Bacterial polypeptide expressing nucleotide sequence isolated from the Sargasso Sea
atgaaccaagatagtgtaattaatattaattctccttttctagatcaaaaaccaggtacctctggattaagaaaaagtactttaaagtttcaggaagaacattatctagaagtttttattgaagcaatcttacaatcattagaaggtttaaaaggttcaacattaatagttggtggtgatggcagatatggcaatattgaagcaatagaaaaaattgtccaaatatgcattgctcataaagttcaaaaggttattgttccaaaatatggtttattatctactcctgcgacatcacacttaattagaaaagaaaacgctattggtggaattattctttctgcaagccataatcctggcgggattgatggagactttggagtgaaattgaatatctctaatggtggcccagctccggagataattactaataagatttttaaggcttcgcaattactaactagttataaaatttgtaaatttcaattacctgattttagtgaatatggaatttatgcttacgacgaaactaccttagaaattattgatggattaacagattattctaatttgatggagaaaatttttgattttgatcaaattagtgattttt

SEQ ID NO: 292420 - DNA, 705 bp, Unknown
  Bacterial polypeptide expressing nucleotide sequence isolated from the Sargasso Sea
ggtataaagatggtattacaggtgtggcacgatctatgccaaccagctcagcggttgataatgttgctcgagcattaaatataccttgtttcgagacacctactggttggaagttttttggaaatcttttggattctaatttaattactttatgcggagaagaaagtttcggaacaggtagtaatcatgtaagagagaaagatggattatgggcagttttgtattggttacaagttttagctgagaaaaaatgttcagtaagtgatttgatgcagaatcattggcaacaatttggtaggaattattattcaagacatgattatgaggcaatcccctcaaatattgctaatcaaatctttggtaatctaacttcgatgctcgaaaacttaaaaggaactaattttgctggccattcagttaaaattgcagataatttttcatacttagatcccgtagataattcaataagtgaaaatcaaggtttaaggttggtgcttgatgataattcccgagtaattgtgcgcctttctggaactggaactaagggtgcaacattaagactttactttgagaactttttcaatccccaacaaaatctttcgttaaatcctcaggtagctttaaaacctctaataaatgatttagatgctttattaaacatttcaaaacttactcaaatggaaactcctacagtaattacataga

SEQ ID NO: 292421 - DNA, 522 bp, Unknown
  Bacterial polypeptide expressing nucleotide sequence isolated from the Sargasso Sea
tatgactcaagttaatgtagttaatatcaaatctccttttctagatcaaaaaccagggacatcaggtttaagaaaaagtactttaaaatttcaggaagatcattatttagaaatttttattgaagcaatcttacaatcattagaagatttaaaagactcaacattagtagttggtggtgatggcagatatggcaatattgaagcaatagaaaaaattgtccaaatatgcattgctcataaagttcaaaaggtaattattccaaaaaacggtttattatctactcctgctacatcacatttaatcagaaaagaaaacgctattggtggcattattctatctgcaagccataatcctggtgggattaatggcgactttggagtgaaattgaatatctctaatggtggtccagctcctgagataattactaataaaattttcaaagcttcgcaattactaactagttataaaatttgcaaaattcaattacctgattttagtgaatatggaactttttcctatgg

SEQ ID NO: 292422 - DNA, 790 bp, Unknown
  Bacterial polypeptide expressing nucleotide sequence isolated from the Sargasso Sea
aggaatatgattttaggaagtggatgttttgtaaatcctagtgatagccttgcagttatcactgcaaacacaaaatgcgtccctggttataaagatggtattacaggagtagcacgatctatgccgaccagctcagcggttgataatgttgctcgagcattaaatataccttgttttgagacacctactggctggaagttttttggaaatcttttagattctaatttaattactttatgtggagaagaaagtttcggaacaggtagtaatcatgtgagagagaaagatggactatgggcagttttgtattggttacaagttttagctgagaaaaaatgttcggtaagtgatttgatgcagaatcattggaaacaatttggtaggaattattattcaagacatgattatgaggcaattccctcaaatattgctaatcaaatctttggtaatctaacttctatgctcgaaaatttaaaaggaaatagttttgctgggcatttagttaaagttgcagataacttttcttatttagatcccgttgataattccataagtgaaaatcaaggtttaaggttggtccttgatgataattctcgagtgattgttcgcctttctggaactggaactaagggtgcaacattaagactttactttgagaaatttttcgaacctcaacagaatctttcattaaatcctcagatagctttgaaacctctaatagatgatttagatactttattgaatatttcaaaacttactcaaatggaaactcctacagtaattacataga

SEQ ID NO: 292423 - DNA, 316 bp, Unknown
  Bacterial polypeptide expressing nucleotide sequence isolated from the Sargasso Sea
atgaatcaagttagtataattaatatcaattctccttttctagatcaaaaaccaggtacctctggattaagaaaaagtactttaaagtttcaggaagaacattatctagaagtttttattgaggcaatcttacaatcattagaagatttaaaaggttcaacattagtagtaggtggtgatggcagatatggcaatatcgaagcaatagaaataattgtccaaatatgcattgctcataaagttcaaaaggttattgttccaaaatccggtttattatctactcctgcggcatcacatttaattagaaaagaaaaag

SEQ ID NO: 292424 - DNA, 428 bp, Unknown
  Bacterial polypeptide expressing nucleotide sequence isolated from the Sargasso Sea
tatgactcaagtaaatgtaattaatataaattctccttttttagaccaaaaaccaggaacttctggtttaagaaaaagtactttaaagtttcaggaagatcattatctagaaatttttattgaagcaatcttacaatcattggaagatttacaagattcaacattagtagttggtggtgatggaagatatggcaatattgaagcaatagaaaaaattgtgcaaatatgcatcgctcataaagttcaaaagattattgttccaaaatacggtctattatctactcctgcaacatcacatttaattagaaaagaaaacgctattggtggaattatactttctgcaagccataatcctggtgggattgatggcgactttggagtaaaattgaatatttctaatggtggcccagctcctgaaataattacta

SEQ ID NO: 292425 - DNA, 340 bp, Unknown
  Bacterial polypeptide expressing nucleotide sequence isolated from the Sargasso Sea
tatgactgaagtaaatgtaattaatacaaattctccttttttagatcaaaaaccaggaacttctggtttaagaaaaagtactttaaagtttcaggaagaacattatctagaaatttttatagaagcaattttacgatcgctggaagatttacaagtttcaacattagtagttgggggcgatggtagatatggcaatattgaagcaatagaaaaaattgtgcaaatatgcgttgctcataaagtccaaaaggttcttgttccaaaaggtggtttattatctactcctgcgacatcacatttaattagaaaaagaaaatgctattgggtggtattattcttt

SEQ ID NO: 292426 - DNA, 469 bp, Unknown
  Bacterial polypeptide expressing nucleotide sequence isolated from the Sargasso Sea
tatgactcaagttaatgtaattaatataaattctccttttttagatcagaaaccaggaacctctggtttaagaaaaagtactttaaagtttcaggaagaacactatctagaaatttttattgaagcaatcttgcaatcattggaagatttacaatgttcaacattagtagttggtggtgatggcagatatggcaatattgaagcaatagaaaaaatcgtggaaatatgcgttgctcataaagttaaaaaggttattgttccaaaaaacggtttattatctactcctgcaacatcacatttaattagaaaagaaaacgctatcggtggaattattctttctgcaagccataatcctggtgggattgatggtgactttggagtgaaattgaatatctctaatggtggcccagctcctgagataattactaataaaattttcaaggcttcgcaattactaactaattataaa

SEQ ID NO: 292427 - DNA, 410 bp, Unknown
  Bacterial polypeptide expressing nucleotide sequence isolated from the Sargasso Sea
gatgaccacctcggcccctgcggaatcgacccaacgccaggtgcccctggccacccctttcaccgaccaaaagccagggacctccggcctccgcaagagcagtcgccagttcgaggagccccattacctggagagtttcattgaagcgtcgcttcgcacgctgccgggcgtacagggcggcaccttggtggtggggggagacggccgttacggcaaccgccgtgccatcgacgtgatcctgcggatgggcgcggcccacggcctcagcaaggtgatcatcaccaccggcggaatcctctccacgcctgccgcctccaatctgatccgacagcgccaggccatcggcggcatcatcctttccgccagccacaatccgggtggtgagaacggtgacttcggcgtcaaggtca

SEQ ID NO: 292428 - DNA, 670 bp, Unknown
  Bacterial polypeptide expressing nucleotide sequence isolated from the Sargasso Sea
atgaatcaatttaatgtaatcaatataaattctccttttttagatcaaaaaccaggaacttctggtttaagaaaaagtacattaaagtttcaggaagaacattatctagaaatttttattgaagcaattttacaatcattggaagatttaaaaggatcaacattagtagttggtggtgatggaagatatggtaattttgaagcaatacaaaagattgttcaaatatgtgttgctcataaagttcaaaaggttattgttccaaaatacggtttattatctacacctgctacatcacatttaattagaaaagaaaaagcaattggtggaattattctttctgcaagccataatcctggtgggattgatggcgactttggagtgaaattgaatatctctaatggtggcccagctcctgagataattactaataagatttataaagcttcacaattactaactagttataaaatttgtaaaattcaattgccggattttagtaaatatgaaacttattcttacggcgaaaccactttagaaattattgatggattaaaagattattctaatttgatggagaaaatttttgattttgatcaaattagtgattttttaaaaaaagacttctcgttaatctttgatgcaatgaatgcggttacaggcccatacgcaa

SEQ ID NO: 292429 - DNA, 512 bp, Unknown
  Bacterial polypeptide expressing nucleotide sequence isolated from the Sargasso Sea
tatgaatcaagttaatgtaattaatatcaattctccttttctagatcaaaaaccaggcacttctggtttaagaaaaagtactttaaagtttcaggaagaacattatttagaaatttttattgaagcaatcttacaatcattggaagatttaaaaggttcaacattagtagttggtggtgatggcagatatggcaatattgaagcaatagaaaaaattgtccaaatatgcattgctcacaaagttcaaaagcttattgttccaaaatatggtttattatctactcctgcgacatcacatttaattagaaaagaaaacgctattggtggaattattctttctgcaagccataatcctggtgggattgatggggactttggagtcaaattgaatatttctaatggtggcccagctcctgagaaaataactaataagattttcaaggcttcacaattactaactagttataaaatttgtaaaattcaattacctgattttagtgaatatggaactt

SEQ ID NO: 292430 - DNA, 191 bp, Unknown
  Bacterial polypeptide expressing nucleotide sequence isolated from the Sargasso Sea
catgaatcaagtcagtgtaattaatatcaattctccttttctagatcaaaaaccaggaacctctggattaagaaaaagtactttaaagtttcaggaagaacattatctagaagtttttattgaggcaatcttacaatcattagaagatttaaaaggttcaacattagtagttggtggtgatggcagatatg

SEQ ID NO: 292431 - DNA, 934 bp, Unknown
  Bacterial polypeptide expressing nucleotide sequence isolated from the Sargasso Sea
attgaaagcaatcttacaatcattagaagatttaaaaggttcaacattagtagttggtggtgatggcagatatggcaatattgaagcaatagaaaaaattgtccaaatatgtattgctcataaagttcaaaaggttattgttccaaaattcggtttattatccactcctgcgacatcacatttaattagaaaagaaaacgctattggtggaattattctttctgcaagccataatcctggtgggattgatggtgactttggagtgaaattgaatatctctaatggtggcccagctcctgagataattactaataagattttcaaggcttcacaattactaactagttataaaatttgtaaaattcaattacctgatttttgtgaatatgggacttatttttacgacgaaactaccttagaaattattgatggattaacagattattctaatttgatggagaaaatttttgattttgataaaattagtgattttttaaaaaaagacttctcgttaatctttgatgcaatgaatgcggttacaggcccatatgcaaaaaatatttttgttgaaaaaatgggtcttgctcctgattgtgtcatgaatggtaccccattaaaagattttggaggtttacatcctgatcctaatcttacttacgcatcccacttggctgatttgttattaaataaaaaatcttatagttttggtgctgcatgcgatggagatggagacaggaatatgattttaggaagtggatgttttgtaaatcctagtgatagccttgcagtcattactgctaatacaaaatgtgtcccgggttataaagatggtattactggtgtggcacgatccatgccaaccagctcagcggttgataatgttgctcgagcattaaatataccttgtttcgagacacctactggctggaagttt

SEQ ID NO: 292432 - DNA, 934 bp, Unknown
  Bacterial polypeptide expressing nucleotide sequence isolated from the Sargasso Sea
gcaagtcataatcctggtgggattgatggagactttggtgtgaaattgaatatctctaatggtggcccagctcctgagataattactaataagatttttaaagtttcaaaattactaactagttataaaatttgtaaaattcaattacctgattttagtaaatatggaacttattcttacggtgaaactaccttagaaattattgatggattaaaagattattctaatttgatggagaaaatttttgattttgatcaaattagtgattttttaaaaaccgatttctcgttaatctttgatgcaatgaatgcggttacaggtccatatgcaaaaaatatttttgttgaaaaaatgggtcttgcccatgattgtgtcatgaatggtaacccgttaagagattttggaggtttacatcctgatcctaatcttacatacgcatcccacttggctgatttgttattaaataaaaaagtttatagttttggtgctgcttgtgatggagatggagatagaaatatgattttaggaagtgcatgttttgtaaatcccagtgatagtcttgcagttatcactgctaacacaaaatgtgtaccaggctataaagatggcattacaggtgtggcacgatccatgccaactagctcagcggttgataatgttgctcgagcattaaatataccttgttttgaaacacctactggctggaagttttttggaaatcttttagattctaatttgattactttatgtggagaagaaagtttcggaacaggtagtaatcatgtaagagagaaagatggactatgggcagttttgtattggttacaagttttagctgagaaaaaatgttcggtaagtgatttgatgcagaatcattggaaacaatttggcaggaattattattcaagacatgattatgaggcaatcccctcaa

SEQ ID NO: 292433 - DNA, 839 bp, Unknown
  Bacterial polypeptide expressing nucleotide sequence isolated from the Sargasso Sea
aaaaaatatttttgttgaaaaaatgggtcttgcacctgattgtgtaatgaatggtaacccgttaaaagattttggaggtttacatcctgatcctaatcttacttacgcatcccacttggctgatttgttattaaataaaaaatcgtatagttttggtgctgcatgcgatggagatggagatagaaatatgattttaggaagtggatgttttgtaaatcctagtgatagccttgcagtgatcactgctaacacaaaatgtgtccctggttataaagatggtattacaggtgtggcacgatccatgccaacaagctcagcggttgataatgtcgctcgcgcattaaatataccttgtttcgagacacctactggctggaagttttttggaaatcttttagattctaatttaattactttatgtggagaagaaagtttcggaacaggtagtaatcatgtgagagagaaagatggactatgggcagttttgtattggttacaagttttagctgagaaaaaatgttcggtaagtgatttgatgcagaatcattggaatcaatttggtaggaattattattcaagacatgattatgaggcaattccctcaaatattgctaatcaaatctttggtaatttaacttctatgcttgaaaatttaaaaggaaatatttttgctggccatttagttaaagttgcagataacttttcatatttagatcccgttgataattccataagtgaaaatcaaggtttaagattagtccttgatgataattctcgaataattgtgcgcctttctggaactggaactaagggtgcaacattaagactttactttgaga

SEQ ID NO: 292434 - DNA, 855 bp, Unknown
  Bacterial polypeptide expressing nucleotide sequence isolated from the Sargasso Sea
cgccttggtaatacgcaggtagaagtcattgactccgttgcagactatgcaaacctaatggagtcgattttcgattttccaaaaatagcggctctattgggcaacgcgcgttttcatatgcgattcgatgcgatgcacgcagtcacgggtccctatgctgtggaaatacttgagaaacgactcggcgcagaggctggcacagtgatcaacggtactcccagtgaaaactttggcggtggtcatcctgatcccaatcaggttcatgccgcggagcttgtcagtatgatgaatagtgacgaggctcttgcttttggtgcggcttcagatggtgatggtgatcgcaatatggttatgggcagtgggttttacatcaacccctgcgacagccttgctgtaatggcggcgaacgcaaaattaattccgggctatcgcgatgggcttgctggtgtggcgcgttcgatgccgacaagtagagcgctggatcgagttgcagcgaggctcgagataccctgttacgagaccccaacgggctggaagtttttcggcagcctcatggacgctggaaagatgacgatctgtggtgaggagagctttggcacaggctccaatcatgtgcgtgagaaggatgggctctgggctgttttattttggttaaacctaattgccgtcagaggacagcctgcacgatctattgtcagggatcattgggaaagtttcgggcgagactttttctcgaggcatgactatgaaggtgtcgatagtcaagctgcgcaggcgcttgttgataagttgcgagaaaagttgccagagctgtcaggtcaagtttttgcgggtttgcagatcgagcaggccgag

SEQ ID NO: 292435 - DNA, 913 bp, Unknown
  Bacterial polypeptide expressing nucleotide sequence isolated from the Sargasso Sea
ggtacctctggattaagaaaaagtactttaagttttcaggaagaacattatttagaagtttttattgaagcaatcttacaatcattagaagatttaaaaggttcaacattagtagttggtggtgatggcagatatggcaatattgaagcaatagaaaaaattgtccaaatatgcattgctcataaagttcaaaaggttattgttccaaaatatggtttattatctactcctgcgacatcacacttaattagaaaagaaaacgctattggtggaattattctttctgcaagccataatcctggcgggattgatggagactttggagtgaaattgaatatctctaatggtggcccagctcctgagataattactaataagatttttaaggcttcgcaattactaactagttataaaatttgtaaatttcaattacctgattttagtgaatatggaatttatacttacgacgaaactaccttagaaattattgatggattaacagattattctaatttgatggagaaaatttttgattttgatcaaattagtgattttttaaaaaatgacttctcgttaatatttgatgcaatgaatgcggttacaggcccatatgcaaaaaatatttttgttgaaaaaatgggtcttccccctgattgtgtcatgaatggtaacccgttaaaagattttggaggtttacaccctgaccctaatcttacttacgcatcccacttggctgatttgttgttaaataaaaaatcttatagttttggtgctgcatgcgatggagatggagataggaatatgattttaggaagtggatgttttgtaaatcctagtgatagccttgcagtcatcactgctaacacaaaatgtgtccctggttataaagatgtattacaggtgggcacgatct

SEQ ID NO: 292436 - DNA, 801 bp, Unknown
  Bacterial polypeptide expressing nucleotide sequence isolated from the Sargasso Sea
tatgactaaagttaatgtaataaatataaattctccttttttagatcaaaaaccaggaacttctggtttaagaaagagtactttaaagtttcaggaagaacattatctagaaatttttattgaagcaatattgcaatcattggaagatatacacttttcaacattagtagttggtggtgatggcagatatggcaatattgaagcaatagaaaaaattatacaaatttgcattgctcacaaagttcaaaaggttattgttccaaaacacggtttattatctactcctgcgacatcacatttaattagaaaagaaaaagctattggtggaattattctttctgcaagccataatcctggtgggatcgatggcgacttcggagttaaattaaatatctctaatggtggccccgctcctgagataattacaaacaagatttttaaagcttcacaattacttacaaagtataaaatttgtaaaattcaattacctgattttagttcatatggaacttactcttacggtgaaactaccttagaaattattgatggattgaaagattattctaatttgatggagaaaatttttgattttgatcaaattagtgattttttaaaaaaagacttctcgttaatctttgatgcaatgaatgcggttacaggcccatatgcaaaaaatatttttgttgaaaaaatgggtctcgctcctgattgtgtcatgaatggtaccccgttaaaagattttggaggtttacatcctgaccctaatcttacttacgcatctcacttagctgatttgttata

SEQ ID NO: 292437 - DNA, 904 bp, Unknown
  Bacterial polypeptide expressing nucleotide sequence isolated from the Sargasso Sea
gcctccttcaccgatgcggtcttcgagtgcaccaagaccctggagcaatacacgattgttgaggctccagaaatcccactggatgcccctggtctgcacagcatcggcgcgatgcaggtggaggtgatcgacggtgtcgacgatttcgtcgacttgatgcaggagctgttcaacttcgatcagatccgcgatctgcttcgcagcgacttccccctggccttcgacgccatgcatgccgtcaccgggccctatgccactcgcttgttcgaggggctgctgggtgcaccggcgggaagcgtgcgcaacggcacaccgctggaagacttcggcaacggtcatcccgaccccaacctcacctacgcccacgacctggctgaactgctgctcgagggagatgagtaccgcttcggcgccgcctgcgacggcgatggcgatcgcaacatgattctgggccagcgctgctttgtgaaccccagcgacagcctcgcggtgctcactgcgaacgccacggtggctccggcctacgccgatggcctggccggggtggcgcgttcgatgcccaccagcgctgcggtggatgtggtggccaaagagctggggattgactgcttcgaaacccccacgggctggaaattcttcggcaacctgctggatgccggcaagatcaccctctgcggtgaggaaagcttcggcaccggcagcaaccacgtgcgcgagaaagatggcctttgggccgtgctgttctggctgcagatcctggccgtgcgccgttgcagcgtcgccgagatcatggccgaacactggaagcgcttcggacgccactactactcgcgtcacgactacgaggccgtcgccagcgacgccgcccatggcctctacgaccgcctcgaatccatgctgccca

SEQ ID NO: 292438 - DNA, 905 bp, Unknown
  Bacterial polypeptide expressing nucleotide sequence isolated from the Sargasso Sea
gccgtcaactcttcgagcattgctaggggcccccagcggcaccgtgcgcaacggagggtgtcttgaagactttggtgggggccaccctgatcccaacttgacctacgccaaagacctggcggcgctcctgcttgatggagataactatcgctttggtgcggcctgtgatggtgatggtgatcgcaacatgattttggggcaacgctgctttgtaaaccccagcgacagcctcgccgtcttgacagccaacgccaccctggcaaagggatatgcctctgggctagcaggcgttgcccgctccatgccgacaagcgcagcagtggatgtcgtagccaaacagcttgggatcaactgctttgagactcccaccggctggaagttcttctgcaacctgctagatgcagggcgcatcaccctctgcggcgaagagagcttcggcactggtagtgatcacatccgtgagaaagatggcctctgggctgtgctgttttggctttcaatcttggccaagcgccagtgctcagtcgctgaggtgatgcaacagcactggagcacctacgggcgtcattactactcgcgccatgactatgagggcgtcgacaccgacaaagctcatgggctttatgacagcttgcgcgatcgcctcggaaacttggcaggaacaagctttgccgacagcaacatcgctagcgctgatgacttcgcctacagcgaccctgtggatgggtcactaacgcagaaacaaggtttacggcttctgctggaggacggcagcagggtcatcctgcgtctttcaggaacgggtaccaagggagccaccctgcggctctacctggagcgctatgtcgccacgggcggcaacctcgctcaaaatccgcagcaagcccttgccggcatgattgccg

SEQ ID NO: 292439 - DNA, 802 bp, Unknown
  Bacterial polypeptide expressing nucleotide sequence isolated from the Sargasso Sea
ggcgccgcccatggtctcagcaaggtgatcgtcaccaccggaggcatcctctcaacaccagcggcctcaaacctgattcgcaaacgccaggccatcggcggcatcatcctctccgccagccacaaccctggtggtcctgagggcgattttggcgtaaaggtgaatggctccaacggtggaccgacacccgccacgttcaccgacgcagtttttgagtgcaccaaaacccttgagcagtactccatcgttgatgcggcaacgattccactcgacagcaccggactgcacagcatcggcgcgatgcaggtggaggtgatcgatggcgtcgatgacttcgtcgccctgatgcaggagctgttcaacttcgagcaaatccgcgatctgatccgcagcgacttcccgctggccttcgatgccatgcacgcggtgactgggccttacgccacgcgcctgtttgaaggtctgcttggtgcaccggccggcagcgtgcgcaatggcgttcccctggaaaatttcggcggcggccaccccgacccaaacctcacctatgcccatgagctggctgaactgctgctcgagggcgacgcctaccgcttcggcgccgcctgcgatggcgatggcgatcgcaacatgatccttgggcagcgctgctttgtgaatccaagcgacagcctcgcggtgctcaccgccaatgccacgctggcgccggcctatgcctccggcctggcgggagtggcccgctccatgcccaccagcgctgcggtggatgtagtggccaaggagttgggcattgcctgcttcg

SEQ ID NO: 292440 - DNA, 688 bp, Unknown
  Bacterial polypeptide expressing nucleotide sequence isolated from the Sargasso Sea
atgaccacctcggcccccgcggaaccgaccctgcgcctggtgcgcctggacgcacctttcacggatcagaaacccggcacatccggtttgcgcaaaagcagccagcagttcgagcaagcgaactatctggagagctttgtggaagcggtcttccgcaccttgcccggtgttcaagggggcacgctggtgttgggaggtgacggccgttacggcaaccgccgtgccatcgacgtgatcctgcgcatgggcgcggcccacggcctcagcaaggtgatcgtcaccaccggcggcatcctctccaccccggcggcctcgaacctgattcgccagcgccaggccatcggcggcatcatcctctcggcaagccacaaccctggcggccccgatggagacttcggcgtcaaggtgaatggcgccaacggtggcccgaccccagcatcgttcaccgatgcggtgttcgaatgcaccaagaccctggagcaatacacgatcgttgatgccgcggccatcaccatcgatacccccggcagccacagcatcggcgccatgcaggtggaggtgatcgacggcgtcgacgacttcgtggctctgatgcagcagctgttcgacttcgatcggatccgggagctgatccgcagcgacttcccgctggcgtttgatgcgatgcatgcggtcaccggcccctacg

SEQ ID NO: 292441 - DNA, 859 bp, Unknown
  Bacterial polypeptide expressing nucleotide sequence isolated from the Sargasso Sea
aatggagtacgcgacatttaggattccacgcacgggtatcatgtcgacgcccgccgtatcggccgccattcgtacccgtgccggtggcatttgtcaaggtggtattattttgaccgcctcgcataatcccggtggacccggagaagactttggtatcaaatataatctagagtttggacaaccggctggagaagactttaccgatgatttgtacgatcgtactctaaagattacgtcctttcaaacactcacggaatcaccatcgctcgatttaaatgccagcgtgggaacgacatatcaactcacgtcaacctctaccgtcacgattattgatccctttgaagaatatgtccaggttctcaagagttgcttcgactttgaagcactccaaaagtttgcccaacgcgacgatttttcgctcattttcgatggcatgcacggcgcgggcggtccctttgcgcagcgcgtactcgtggaagaattgggtttacccgactcgtgtcttatgcgatgcaaccctctacccgattttggcaaaggtcatccggatccgaatttatcctacgcggcagatttggtccagaaaatgggactcctacccgacggaagtgccaacccaaaagtcgatttgtcgaccctacccacactaggggctgccaatgatggtgacggtgatcggaatcttattgccggagccggttgctttgtaacaccgtccgatagtctcgccatgatttgtgataattgggccgccattcctcattttgccaaggcgggtggtcccaagggagtggcacggtccatgccaagctcggcagccctggacgtggtggcggcagcgcggggacattccgtgctt

SEQ ID NO: 292442 - DNA, 790 bp, Unknown
  Bacterial polypeptide expressing nucleotide sequence isolated from the Sargasso Sea
ggcggcatcctctccaccccggcagcctccaacctgatccgcaagcgtcaagccatcggcggcatcatcctttcggccagccacaaccccggtggccccgatggtgacttcggcgtgaaggtgaacggggccaacggcggtcccaccccggcctccttcaccgatgccgtgttcgagtgcaccaagacgcttgagcaatacacaatcgttgaggccgcagcagtgcccctcgaggcccctgggctccacagcatcggagcgatgcaggtcgaggtgatcgatggggtggatgacttcgttgccttgatgcaggagttgttcgacttcgagcgcatcagcgacctgatccgctctgatttcccgcttgcttttgatgcgatgcatgcggtcactggcccctacgccagccgtctgctcgaggagatgcttggcgccccggccggcagcgtccgcaacggcgttccgctggaggatttcggcggcggccatccagaccccaatctcacctacgccgctgagctcgccgaccttctgctcaatggcgatgcctacagcttcggtgcagcctgcgatggcgacggtgatcgcaacatgattctgggcaagcgctgcttcgtcaatcccagcgacagcctggcggtgctcacggctaatgcaacagtggtccccgcgtatgcctcaggcctggctggtgtggcgcgctccatgcccaccagctcagccgtggatgtcgtcgccaaggaactgggcatcgattgctacgagactccaacgggttggaagttcttcg

SEQ ID NO: 292443 - DNA, 697 bp, Unknown
  Bacterial polypeptide expressing nucleotide sequence isolated from the Sargasso Sea
tccggcctggcgggtgtggcgcgatcgatgcccaccagtgctgccgttgatgtggtggccaaggaactgggcattgactgcttcgaaaccccgaccggttggaagttcttcggcaacctgctcgatgccggccgcatcaccctctgcggtgaagagagcttcggcaccggaagcaatcacatccgtgagaaagacggcctctgggccgtgctgttctggctgcagatcctggcggagcgccgctgcagcatcgccgagatcatggccgagcactggaagcgcttcggacgccactactactcccgccacgactatgaagcggtgcccagcgacgcggcccatggtctctataaccgcctcgaaggcatgcttcccggcctcatcggccagtccttggcgggtcgcagcatcagcggggccgacaacttcagctacaccgaccccgtcgatggttccgtgaccaaaggccagggacttcgcatactgctcgaggacggcagcagagttgttgttcgcctctccggcacaggcaccaaaggggccacgatccgtgtgtatctcgagagttacgtgcccagcaccggtgatctcaaccaggatccccagatcgctctggccgacatgatcagcggcatcaatgcgctggcggagatccaggagcgcaccggcatggaccgtcccaccgtgatcacctaac

SEQ ID NO: 292444 - DNA, 826 bp, Unknown
  Bacterial polypeptide expressing nucleotide sequence isolated from the Sargasso Sea
atgattcaagttagtgaaattaatatcaattctccttttctagatcaaaaaccaggcacttctggtttaagaaaaagtactttaaagtttcaggaagaaaattatctagaagtttttattgaagcaatcttacaatcattggacgatttaaaaggttcaacattagtagttggtggtgatggcagatatggcaatattgaagcaatagaaaaaattgttcaaatatgcattgctcataaagttcaaaaagttattgttccaaaagacggtttattatctactcctgccacatcacatttaataagaaaagaaaacgctattggtggaattattctttctgcaagccataatccgggtgggattgatggtgactttggagttaaattgaatatctcaaacggtggcccagctcctgagataattactaataagattttcaaggcttcacaattactaactagttataaaatttgtaaaattcaattacccgattttagtgaatatggaacttactcttacggtgaaactaccctagaaattattaatggattaacagattactctaatttgatggagaaaatttttgattttgaccaaattagtgattttttaaaaaaagacttctcgttaatctatgatgcaatgaatgcggttactggtccatatgcaaagaatatttttgttgaaaaaatgggtcttgcacatgattgtgtcatgaatggtaacccgttaaaagattttggaggtttacatcctgatcctaatcttacttacgcatcccacttggctgatttgttattaaataaaaaatcttatagttttggtg

SEQ ID NO: 292445 - DNA, 793 bp, Unknown
  Bacterial polypeptide expressing nucleotide sequence isolated from the Sargasso Sea
tatgacacaagttaatgtaattaatatcaattctccttttctagatcaaaaaccaggcacttctggtttaagaaaaagtactttaaagtttcaggaagaacattatttagaaatttttattgaagcaatcttacaatcattggaggatttaaaaggttcaacattagttgttggtggtgatggcagatatggcaatattgaagcaatagaaaaaattgtccaaatatgcattgctcataaagttcaaaaggttatagttccaaaatacggtttattatctactcctgcgacatcacatttaattagaaaagaaaaagctattggtggaattattctgtctgcaagccataatcctggtgggattgatggcgactttggagtgaaattgaatatatctaatggtggcccagctcctgagataattactaataagattttcaaggcttcacaattactaactagctataaaatttctaaaattcaattacctgaatttagtaaatatggaaagtattcctacggtgaaactacgttagaagttattgatggattaaaagattattcaaatttaatggagaaaatttttgattttgatcaaattagtgattttttaaaaaaagacttctcgttaatctttgatgcaatgaatgcggttactggcccatatgcaaaaaatatttttgttgaaaaaatgggtcttgcacatgattgtgttatgaatgggaacccgttaaaagattttggaggtatacatcctgatcctaatcttacttatgcatctcacttggctgat

SEQ ID NO: 292446 - DNA, 1300 bp, Unknown
  Bacterial polypeptide expressing nucleotide sequence isolated from the Sargasso Sea
atgactcaagttaatgtaattaatattaattctccttttctagatcaaaaaccaggtacttctggtttaagaaaaagtactttaaagtttcaggaagaacattatttagaaattttcattgaagcaatcctacaatcactagaagatttaaaaggttcaacattaataattggtggtgatggcagatatggcaatattgaggcaatagaaaaaattgtccaaatatgcattgctcataaagttcaaaaggttattgttccaaaatacggtttattatctactcctgcgacatctcatttaatcagaaaagaaaaagctattggtggaattattctttctgcaagccataatcctggaggtattgatggcgactttggagtgaaattgaatatctctaatggtggcccagctcctgagttaattactaataagattttcaaggcttcacaattactaactaattataaaatttgtaaaattcaattacctgaatttagtgaatatggaactcattcttatggtgaaactaccttagaaattattgatggattaaaagattattctaatttgatggagaaaatttttgattttgatcaaattagtgattttttaaaaaaagacttttcgttaatctttgatgcaatgaatgcggttacaggtccatatgcaaaaaatatttttgttgaaaaaatgggtcttgcacatgattgtgtcatgaatggtaacccgttaaaagattttggaggtttacatcctgatcctaatcttacttatgcatcccacttagctgatttgttattaaataagaaatcttatagttttggtgctgcttgcgatggagatggagataggaatatgattttaggaagtgcatgttttgtaaatcctagtgatagccttgcagttataactgctaacaccaaatgtgtccctgggtataaagatggtattacaggtgtggcacgatccatgccaaccagctcagcggttgataatgttgctcgagcattaaatataccttgtttcgagacacctactggttggaagttttttggaaatcttttagattctaatttaattactatatgcggagaagaaagtttcggaacaggtagtaatcatgtaagagagaaagatggattatgggctgttttgtattggttacaagttttagctgagaaaaaatgttcagtaagtgatttgatgcagaatcattggcaacaatttggtaggaattattattccagacatgattatgaggcaattcccctcaatattgctaatcaaatcttttggtaat

SEQ ID NO: 292447 - DNA, 1196 bp, Unknown
  Bacterial polypeptide expressing nucleotide sequence isolated from the Sargasso Sea
catggcgacggtgacggtgaaggaggtggcgacgacgcccatcgagggacaaaagacgggcacgagcggattgcgcaagaaggcggccgtgttcagcgaggggaattacttggcgaattgggtgcagtctctcttcagcgcgttgccgagggacgacgtggagggaagctccatggtgctcggaggcgacgggcgatggtttaacaaggaagcgtcgcaaattatcttgaaactcgcggccggtaacggggtgaagaagatgtacgtcgggagagatggatatttgtgcacgccggcggcgagcgccgtcattcgcgcgcgcgaggcgttcggcggattcatcatgagcgcgtcgcacaaccccggtggtccgacggaggattgggggatcaagtttaactacagctcgggcgaacctgcgccggaaaagatcacggacgccatctatggctttacgcaaaccgtcgatacgttgaagatggctgacattccggacgttgacttgagcgtgtgcggcgtcaccaagttcggtgactttgaagtcgaggtcatcgatccggtggatgattacttgaagctcttgaagcaagtgttcgatttcgatctcatcaagtcgttgttaacgcgaccggatttcaagatgcaattcgacgccatgcacgccatcaccggcgcgtacgccaagccgattttcgttgacgtgctcggcgcggacgcgaactcggtcgtcaacggcgtgccgaaggaagatttcgctggtggacacccggatccgaacttgacgtacgcggaagagctcgtcaaggtgatgtactctgccgacgctccggatttcggcgccgcctcggacggcgacggcgaccgtaacatgatcctcggtaacaacttcttcgtcactccgagcgattccgtcgccatcatcgccgccaacgcggtcgactgtatcccgtacttcaagtccggcttgaagggtttggctcgttccatgccgaccgccgccgcgctcgaccgcgtcgccgccggtctcggcgtcgagtgcttcgagacgccgacgggctggaagttcttcggcaacttgatggacgccggtcgtttgtccgtgtgcggtgaagaatccttcggcaccggcgccgaccacgttcgcgagaaggacggtccgtgggccgtgctcgcctggttgtcgatattggcgtacc

SEQ ID NO: 292448 - DNA, 1639 bp, Unknown
  Bacterial polypeptide expressing nucleotide sequence isolated from the Sargasso Sea
atgaaccaagttagtgtaattaatattaattctccttttctagatcaaaaaccaggtacctctggattaagaaaaagtactttaaagtttcaggaagatcattatctagaagtttttattgaagcaatcttacaatcattagaagatttacaaggttcaacattagtagttggtggtgatggtagatatggcaatattgaagcaatagaaaaaattgtccaaatatgcattgctcataaagttcaaaaggttattgttccaaaatacggtttattatctactcctgcgacatcacatttaattagaaaagaaaacgctattggtggaattattctttctgcaagccataatcctggtgggattgatggcgattttggagtgaaattgaatatctctaatggtggcccagctcctgagataattactaataagattttcaaggcttcacaattactaactagttataaaatttgtaagattcaattacctgattttagtgaatatggaacttatccttacgacgaaactaccttagaaattattgatggattaacagattattctaatttgatggagaaaatttttgattttgatcaaattagtgattttttaaaaaaagacttctcgttaatctttgatgcaatgaatgcggttacaggcccatatgcaaaaaatatttttgttgaaaaaatgggtctctcacctgattgtgtcatgaatggttatcctttaaaagattttggtgggctacatcctgatcctaatcttacttacgcatcccacttggctgatttgttattaaataaaaaatcttatagttttggtgctgcatgcgatggagatggagataggaatatgattttaggaagtggatgttttgtaaatcctagtgatagcctcgcagttataactgctaatacaaaatgtgtccctggatataaagatggtattacaggtgtggcacgatctatgccaactagctcagcggttgataatgttgctagagcattaaatataccttgtttcgagacacctactggctggaagttctttggaaatcttttagattctaatttaattactttatgtggagaagaaagttttggaacaggcagtaatcatgtgagagagaaagatggactatgggcagttttgtattggttacaagttttagctgagaaaaaatcttcggtaagtgatttgatgcagaatcattggaaacagtttggtaggaattattattcaagacatgattatgaggcaattcccgcaaatattgctaatcaaatctttggtaatttaacttctatgctcgaaaatttaaaaggaaatagttttgctggccatttagttaaagttgcagataacttttcatatttagatcccgttgataattccataagtgaaaatcaaggtttaaggttggtccttgatgataattctcgagtaattgtgcgcctttcaggaactggaactaagggtgcaacattaagactttacttcgagaaatttttcaatcctcaacagaatctttcgttaaatcctcagattgctttgaaacctctaatagatgatttagatgctttattgaatatttcaaaacttactcaaatgaaaactcctacagtaattacataga

SEQ ID NO: 292449 - DNA, 1294 bp, Unknown
  Bacterial polypeptide expressing nucleotide sequence isolated from the Sargasso Sea
ttacaaggttcaacattagtagttggtggtgatggaagatatggcaatattgaagcaatagaaaaaattgtgcaaatatgtattgcgcataaagtgcaaaaggttattgttccaaactgcggtttattatctactcctgcgacatctcatttaattagaaaagaaaatgctattggtggcattattctttcggcaagtcataatcctggagggattgatggtgactttggggttaagttaaatatttcgaatggtggcccagcccctgaaatgattactaataagatattcaaatcttcacaattactaactagttataaaatctgcaaaattcaactacctgattttagtgaatatgggacgtatatttacggggaaactaccttagaagttattgatggattggaagattattctaatttgatggagaaaatttttgattttgatcaaattagtgattttttaaaaaaagatttttcattaatctttgatgcaatgaatgcggttacaggtccatatgcaaaaaatatttttgtcgaaaaaatgggtctcgcaaatgattgtgttatgaatggtaatccgttaaaagattttggcggcttacatcctgatccaaatcttacttatgcatctcatttagctgatttattattaaataaaaaatcttatagttttggtgctgcttgcgatggagatggtgataggaatatgattttaggaagcggttgttttgtaaatcctagtgatagccttgcagttattactgctaacaccaaatgtgtccctggttataaggatggtattacaggtgtagcccgatctatgccaaccagttccgcagttgataatgttgcgcgcgcattaaatataccttgtttcgaaacacctactggttggaaattttttggaaatcttttagattctaatttaattactttatgtggagaagaaagttttggaacagggagtaaccatgtaagggagaaagatggattatgggcagttttgtattggctacaagttttagctgaaaaaaaatgttctgtaagtgatttgatgcagaatcattggaaacaatatggtaggaattattattcaagacatgattacgaggcaatcccctcaaatattgctaatcaaatttttggtaatctaacttctttgcttgaaaatttaaagggaagtaattttgcaggtcatttagttcaagttgcagataacttttcatatttagaccctgttgatgattccataagtgacaatcaaggcttacgattgattcttgatgataatt

SEQ ID NO: 292450 - DNA, 748 bp, Unknown
  Bacterial polypeptide expressing nucleotide sequence isolated from the Sargasso Sea
atgaaaaggtgttttcttgtcgttattgattctttaggtgttggtgaagcacctgatgcagataaatatggtgatttaggaacaaatactctttcaaatgttgcaagtgctgtaggtggtgtcagtttaccaaccatggaaaagttaggttttggaaaaatcactgaagtaaaaaatatgaatactgaccatattgctacggtgggaagattatctgaaaagtcaattggaaatgattctactactggacactgggagcttgcaggtttaataactgaagaagatttctcaacttatcctgacggatttcctaaagatttaattcactcaattgaacaagaagcaaatattgaattcataggcaacaaacatgcatctggtactgaaatattaaaagaacttggaagagagcatctatcatcgggaaaattaattttatatacttctgctgattcagtttttcaaattgcctctcacgaaaatatttgttctgttgagaaactttataaaatatgcaagatttcaagaaaatattgtgatgaatacaatataggacgagtaatagctagaccatttattggagaatatgacaattttgtccgaacttatgatagaaaagattttggtatgaatcctccaggtgaaacaattctaagttatttatacaaaaataatctatctacatatggaattggtaaaatcagtgatttatttggagataagtttttaacaactgctgttcatacta

SEQ ID NO: 292451 - DNA, 552 bp, Unknown
  Bacterial polypeptide expressing nucleotide sequence isolated from the Sargasso Sea
aatgaaaagatgttttcttgtcgttattgattctttaggtgttggtgaagcacctgatgccgataaatatggtgatttaggaacaaatactctttcaaatgttgcgaatgctgtaggtggtgtcaatttaccaactatggaaaagttaggttttggaaaaattactgaagtaaaaaatatggatactaaccatattgctactgttggcagactttcagaaaagtcaattggaaatgattctactactggacattgggaactcgcaggtttaataactgaacaagatttttcaacttatcctgaaggattccctcaggagttaattcactcaattcaaaaagaagcaaatattgaattcataggcaacaaacatgcatcaggtactgaaatattaaaagaattgggaagagagcatctatcatcgggaaaattaattttatatacttctggagattcagtttttcaaattgccgctcacgaaaatgtttgttctgttgaggaactttacaaaatatgcgagatttcaagaaaatattgtgatgaatacaatat

SEQ ID NO: 292452 - DNA, 519 bp, Unknown
  Bacterial polypeptide expressing nucleotide sequence isolated from the Sargasso Sea
aaaatagacaggatttttatattacctccaccaaatacacacccttatgtgacaaagttatcaaatctggaaaaaaatgttttggcataggtaaaattgcagacatttttgggcatcgaggaattagcaagtctatctctgggatgaccgatgagaaattatttgatgaaatgctacacgtagttgcaaaggctaacactggggatttaatttttgcaaactttgttgagttcgatactctatatggtcataggagagatttacctggttatgcaagagcattggaaaagtttgataagcaattaccaaagcttttttcaattttaaatagagatgactttttgttgattacagcagatcatggaaatgaccctacctttacaggaacagatcatacaagagaacaagttcctgttctgataaaaaaacacaatttgaggaataaatgttacggttcgattaatttttctgatataggatccttggtagaaaccttcctcaggttaaaaaaacactaat

SEQ ID NO: 292453 - DNA, 851 bp, Unknown
  Bacterial polypeptide expressing nucleotide sequence isolated from the Sargasso Sea
aatgggtaaggctgtcttaattgttttggactcactaggaataggtggtgctcctgatgcaagtttttataatgatgagggagctaacacatttggctccatcgctacggcctgtgcaaacggtgatgcagatactggaagaaagggatcgttaatgatcccgaacttagagtctttaggaatttatagtgctacaaggctatcaacaggcctgacctttcctaatactgataacacgattggatcctatgctgtagctcaagagcgttccatgggtaaagatactcctaccggtcatcatgaaatagttggttttacgaatccggttggttggcacaccttctccgaagttgttccagtcttccctgaaaaaaagatgaaaactcttatccagagagctaagttatctggcgttttaggaaacaagcattcatctggcgaagaaatcatcaaagaatttggggaaaagcacctaaatagcggtcgccctatagtgtatacttctgctgatagtgttttgcaaatagcagctcatgaacatgtttttgccttagatcggttatacaaaacttgtgaaattgctgctgaaatctttgatgagttgagagtacagcgaataattgcaagaccttttcttggcgaaaaaaaaggtgaattctttcgtaccaaaaatagaaaagatttcatatcaccgccaccaatagacactttatgtgacaaagtcataaaatctggaaaaaaatgttttggcattggtaaaattgcagacatttttggacaaaggggaattagcgaatcaatatcaggaatgtcagatgataaattatttgaagagatgctaaagataatta

SEQ ID NO: 292454 - DNA, 580 bp, Unknown
  Bacterial polypeptide expressing nucleotide sequence isolated from the Sargasso Sea
aatggtgacttatcagattttaggttcaaatactgttttgcatatcgccgaacacatgcaaaagaaaggtcgtcctcttaacttacctcaattaaacgctcttggattaggttcagctatctaccattccgttggaatagagcaccctaatctaccagttgaaaaagcagctaattgggccgttggaatagaaagctctaagggtaaagatacgccatcaggccactgggaacttgctggcctgcccgttacctgggattggcattattttaaggacaagacaaattcctttcctaaagaaattataagtgccatttgtcggatagctcaagttgatggtatcctcgggaataaacatgcatctggagtcgaaattattgaagaatttgggcaactccatgtcgaaacttctaggccaatctgctatacctcggctgatagtgttttccaaatagctgcacatgaaacggcctatggcctcgaaagactttacgctttatgtgaaaaattagcacctataatgcataatctaaaagttgggcgggtaatcgctcgtccatttataggatcgacagatgaa

SEQ ID NO: 292455 - DNA, 253 bp, Unknown
  Bacterial polypeptide expressing nucleotide sequence isolated from the Sargasso Sea
tatgcaagagcgcttgaaaatttcgacaagcaattaccaaagctattttcaatcttaaataaagacgattttttggtcataacggctgaccatggaaatgatccttcttttgcaggaactgaccatacgagagagcaagttcccgtattaataaaaaaccaaaaattggttaataaatgttacggactaataaatttttctgatataggttcactaatagaaaatttccttagattagaaacatacgattagg

SEQ ID NO: 292456 - DNA, 1032 bp, Unknown
  Bacterial polypeptide expressing nucleotide sequence isolated from the Sargasso Sea
aatgaaaaggtgttttcttgtcgtaatagattctttaggtgttggtgaagcaccagatgcaaaacaatatggagacgaaggcgtaaatacacttggtaatgtcgcaaaacatgttcaaggtgttgatttacccacttttgataaattgggatttggaaagattactaatgttttaggactaggtactgaacacatagcaactgttggtaggctttccgaagtatctacaggaaacgactcaaccacaggacattgggaaattgcaggtctaataactacacaggaatttaaaacatttccagatggatttccacatgaacttaccagcaaaatagaagatgaaattggttttaaatttattgggaatattcatgcttcaggtactgaaattattaaagaccttggtgaacaacacatgcaaactaaagagcttattttatacacatctggtgactcagtgtttcaaatagctgcgcatgaagatgtatgcagtcttgaagagctttatagaatttgtgagatctctagaaaacactgtaatcaatacaatataggtagagtaattgctcgaccatttagaggtcctattaatgcttttgaacgaacttatgataggaaagattatggaatgaatccacctggggaaacacttctaagttatgtatcaaaaaataatttaaaaacttatggaataggaaagatttctgatttgtttggtattgaatttcttagtagttatgttcacactgaaggagatcaaaatggtattgactatttattaaaagaagttgagtacggagataatgattttacttttgttaatttagtagacctagatatgttgtatggacacagagaagaccctgatggttattacaaaggtttacaaataattgataaaggtttagaaaaagttattgaattatttaaacgaaatgacttacttatttttactggagatcacggtacagatccaacagatggaaaaactgaccactcaagggaatatgttccattttgtgcatataaaaa

SEQ ID NO: 292457 - DNA, 289 bp, Unknown
  Bacterial polypeptide expressing nucleotide sequence isolated from the Sargasso Sea
atgaaacgtgcatttattatggtgttggactcctttggtattggtgcgactgaagatgcggatcgctttggcgacgtaggttcagacactatgggacatattgcagaagcctgtgcgaaaggtgaagctgacaatggtcgcaaaggtccactgaatctgcctaacctgacccgtctgggcctggtgaaagctcacgaaggttctactggtaaaattgctgctggcatggacggcaacgcggaagtgattggtgcctacgcatgggcgcatgaacttcttccgggaaaga

SEQ ID NO: 292458 - DNA, 765 bp, Unknown
  Bacterial polypeptide expressing nucleotide sequence isolated from the Sargasso Sea
catgcctagagtttgtattttactgatggattcttttggtgtgggggcgagcttagatgccaaagattttggcgacgaaggtgctgatacgttgggggctatttatcaaggatatgctaatgcgcacgcaggccaatcactcgctatgcccaacttattgcgtttaggcttaggtcatgtgcatgttgccagcacaggcaaaaaatatttcgatttagcaaccttacccgatccacaaagccagtggggatatgccgtagagcaaagtgtgggtaaagacacgcccagtggacactgggaaatcgccggtgtacccgttttatccccgtggggaatgtttcccaaaacacagccttgttttcctacatcgttgattaatgctatttgtcagcaagctaatttacccggtgtgttgggtgaaaaacatgcttctggtactgagattttggttgagctaggtgaggctcatatcgaaaccggcaaacccattttttatacgtcagctgatagtgtgttacaaattgcagcacatgaaagtcactttggcttacagcgattatatgatgtgtgtgaaatcgcgcggcgtgaagtggatgccttggatattggtcgtgtaatcgctaggccttttgtaggcacacaagccagtgattttaaacgcacagcaaatcgtcgtgactatgctacgccaccgcccgcagctacgctattagatgtactgaaagatgctgggcgtgatgttatttccatcggtaagattgatga

SEQ ID NO: 292459 - DNA, 604 bp, Unknown
  Bacterial polypeptide expressing nucleotide sequence isolated from the Sargasso Sea
aatgaaaaaatgtatattaattgtaattgattctttaggtgttggagcagcacctgatgctaaaaaatatggcgatgaagaaagcaatacttttggtaatgtgtcaaaagtaaatggagaactaaatttaccaacatttaatagacttggttttgggaaaattactacgattaatgggttagattcagaaaaatatgtctcaacagtaggaaaattagctgaaaaatctacgggaaatgattcaacaactggacattgggaaatagctggattaattagcgagagtgactttaatatttttccaaatggctttcctgaagaattagtaaatagagtttctaatgaaacaggatttgaatttttaggaaactttcatgcatcaggtacagaaattataaataatctcggagaagaacatttagctactaaaaaattaatactttatacatctggtgattctgtttttcaaatagccgcacatgaagatgtattaagtgttgagaaactatatgatgtatgcaaaacagctcgaaaaatttgtaatgattacaatattggaagagttatagcgagaccttttagaggaaaacctaacaaatttgaa

SEQ ID NO: 292460 - DNA, 979 bp, Unknown
  Bacterial polypeptide expressing nucleotide sequence isolated from the Sargasso Sea
atgaaaaaatgtatattaattgtaattgattctttaggtgttggagcggcacctgatgctaaaaaatatggtgatgaaaaaagcaatacttttggaaatgtgtcaaaagtaaatggagaactaattttaccaacttttaataaacttggttttggtaaaattacaacgattaatggtctagattcagaaaaatatatcgcaacagtaggaaaattagctgaaaaatctacgggaaatgattcaactactggtcattgggaaatagctggattaattagcgaaagtgactttaatattttcccgaatggttttcctgaagatttagtaaatagagtatctgatgaaacaggatttgaatttttaggaaactttcatgcatcaggtacggaaattataaatgatctcggagaagaacatttagctactaaaaaattaattctttatacatctggtgattctgtttttcaaatagctgcacatgaagatgttttaagtgttgagaaactatatgatgtatgtgaaacagctcgaataatttgtaatgattacaatataggaagagttatagctagaccttttataggaaaacctaataattttgaaagaacttatgatagaaaagattttggaattacacccccaggcgaaacgttattgagctatcttcataaaaataattttaaaactctaggaattggtaagattagcgatttatttggagatgagtatttagattcttctatacatacagaaggagatacagatggttttaatactttaattaaatcctataaaaaaggtttatttgatttttactttattaacttagtcgatcttgatatgttatatggccacagagaagatccggttggttactatgaaggtctaaaaattatagataaatatctagagaaattaatagaaatattggatgatgaagacttactaatattaacgggtgatcatggaacggacccta

SEQ ID NO: 292461 - DNA, 997 bp, Unknown
  Bacterial polypeptide expressing nucleotide sequence isolated from the Sargasso Sea
attaatggtctagattcagaaaaatatatcgcaacagtaggaaaattagctgaaaaatctactggaaatgattctacaactggtcattgggaaatagcaggtttaattagtgagagtgaatttaaaattttcccaaatggttttcctgaagatttagtaaataaagtaactgatgaaacaggatttgaatttataggaaattttcatgcatcaggtacagaaataataaataatctcggtgaagaacatctagctactaaaaaattaattctttacacttctggtgattctgttttccaaatagctgcacatgaaaatgttttaagtattgagaaattatatgatgtttgtaaaactgcacgaataatttgtaatgattacaacattggaagagttatagctagaccttttagaggtaaacctactaattttgaaagaacttatgataggaaagattttgggattactccccccggcgaaacgttattgagctatcttcataaaaataattttaaaactctaggaattggaaagattagtgatctatttggtgatgaatttttacattcctctatacatacagaaggagatcaagatggtttaaatactttaattaaaacttattctgaaggtttatacgatttatactttattaacttagttgatcttgatatgttatatgggcatagagaagatcccatcggatactatgaaggtttaaaaataatagataaaaatctcaataaacttatgaagatactaaatgatgaagatttactaatactaactggtgatcatggtacagacccaacagacggtaagactgaccactcaagggagtatgttccattagtggcttataaaaacaacttgaaaggaaacaatataggtgagaaagatagtttttctgttattgcatcctcaattacagaattttttaaccttaaaaacatattttatggagatagctttcttgaagaaattattaaaaaataga

SEQ ID NO: 292462 - DNA, 1159 bp, Unknown
  Bacterial polypeptide expressing nucleotide sequence isolated from the Sargasso Sea
aatgtctaaatgcattttgattgtaatagattccctaggtgttggtgaagctccagatgctgaaagttatggtgacataggtgcaaatacttttggtaatgtagcaaaagcaaatgggcagcttaatctacctacttttgaaaagcttggttttggagcaattacaaatataaacggactcaaagatgaggttacttgctctatagtaggaaaacttgcagagtcatcaaaaggaaacgattcaaccactggacattgggaaatcggtggattaataacacaaagagatttttcagtatttccaaaaggttttccaagtgaattaattgataaaatatctttagaaacaggacacgaatttattggaaattatcacgcgtctggaacagaaataataaatgaacttggtgaagaacatctaagtagcggtaaattaattctttacacgtcaggtgattcagtttttcaaatagcagctcatgaagatattctcccagtaaatgagctttataaaatttgcaagatatcaagagaatattgtaacgaatacaatattggcagagtaatcgctagaccatttattggtgataaaggaaattttcaaagaacttacgatagaaaagattttggaattacacccccaggagaaactattcttagccaattatttaaaaacgggaagaattctctgggaattggaaaaatttctgatttatttagtgatgagtttctcagtaattcaattcacacagaaggtgataaaaatggattggaaatattgattagtgaatatgaagacaaccgttatgatttttattttattaacttagttgacctagacatgctgtacggtcacagagaggatccagcaggttattatgatggtttaaaaattattgataatggcttagataagctaatcagtgttttaaatgatgacgatataattattattactggtgatcatggtactgacccaactgatggtaagactgatcactctagagaatatgtgccatttattatttacagaaataacctaaaacctaaatatattggtgaaggtgatactttttcagatattgctgcaactatttcagatatttatgaaatcgaaaatatatttccaggtaaaagcagtgccaatcatttatcatga

SEQ ID NO: 292463 - DNA, 1156 bp, Unknown
  Bacterial polypeptide expressing nucleotide sequence isolated from the Sargasso Sea
atgccaaaatgtatattaattgttattgactcattaggtgttggagaagcaccggacgctgaactttatggagataaaggttccaatacatttggcaatgtttccaaagcaaatggaggattagaactaccaacatttgaaaaacttggttttggagctattacagaaattgagggtttaaataatcaaaatagtttttctattgttgggaaacttgcagaggcatcaaaaggtaatgattctactactggacattgggaaattgcaggactagtaactaagaaagactttgccgtatttccggatggtttcccagttgaattagttgataatatttcaaaggatatagggtatggctttattggtaattttcatgcttcaggtactgaaataatcaatgaccttggaaaagaacatttagaaactaagaagttaatactttacacctccggagattctgtatttcaaattgccgcacatgaagatatattatcaactaatgagctttataaaatctgtgaaatctcaagaatgcattgtaatgattacaacatagggagagttatagcacgaccattcattggaacaattggaaattttaaaagaacttatgatagaaaagattttggtatcagtccccctggcgacacgttgttaagtcaattatttcaaaatgatatatcaactcttggaattggtaagatttcagatttgtttggagaagaatttctaaataaatcaattcatacggaaggtgatgaaaatggaatgcaaatccttttagataactataaatcggcagattatgatttttattttatcaatttagttgatctagacatgctttatggacatagggaagatgcacaaggttattacgaaggattaaagattatcgataaacatctttcaaaacttatggataatttacatgatgacgatgtattaataattacaggtgatcatggaactgatcctacagatggtaaaactgatcactcaagagaatatgtacctttcgtaatctataaaaacgacataaatccaaaaaatattggctccggaaatacttttgcaaacattgcttctactatttctgaattttatggtttagaaaatatatttccaggaaaaagtttcattcaggatatatgat

SEQ ID NO: 292464 - DNA, 1159 bp, Unknown
  Bacterial polypeptide expressing nucleotide sequence isolated from the Sargasso Sea
atgtctaaatgcattttgattgtaatagattccctaggagttggtgaagctcctgatgctgaaagttatggtgacataggtgcaaatacttttggtaatgtagcaaaagcaaatggtgagctttatctacctacttttgaaaagcttggttttggagcaatcactaatataaacggactcgaagatgaagtaacttgctctattgtaggaaagcttgcagagtcatcaaaaggaaatgattcaactactgggcattgggaaattggtggattaataacacaaaaagatttttcagtatttccaaaaggttttccaagtgaattaattgataaaatatcttcagaatcaggatacgaatttattggaaattatcatgcatctggaacagaaataattaatgaacttggtgaagaacatcttagaagcggaaaattaattctttacacgtcaggtgattcagtttttcaaatagcagctcatgaagatattctcccagtaaatgagctttataaaatttgcaagatatcaagagaatattgtaacgaatacaatattggcagagtaatcgctagaccatttattggtgagaaagataattttcagagaacttacgatagaaaagactttggaattactcccccaggagaaacaattcttagccaattatttaaatatggaaaaaattctctgggaattggaaaaatttctgatttatttggtgatgaatttctcagtaattcaattcacacagaaggtgataaaaatggattggaaatattgattaatgaatatgaagataacagttatgatttttattttattaacttagttgacctagacatgctttacggacatagagaagatccagcaggatattatgaaggtttaaaaattattgatgatggtttagataagctaatgagtgtcttgaatgatgaggatataattattattactggtgatcatggtactgacccaactgatggtaaaactgatcattctagagagtatgtgccttttgttatttacaaaaagaatctaaatccgaaatatattggtgaaggtaatactttttcagatattgcttcaactatttcagatatttatgaaatcgaaaatatatttccaggtaaaagcagtgccaatcatttatcatgac

SEQ ID NO: 292465 - DNA, 550 bp, Unknown
  Bacterial polypeptide expressing nucleotide sequence isolated from the Sargasso Sea
atgaaacgtacagttataatgatgttggattcctttggcgtgggcgcagcaggtgacgccgccaagtttggggatctaggttctgacacttttggccatatcgctaaagcgtgtgccgaaggtaaagccgatattggccgtgaaggtccgttaacgctgccaaacttggcgcgtttaggtttggcccatgccgcgatggaaagcacggggacgtttgcgccaggctttgcggacaatgttgagctgattggtgcctatggccacgctcaggaattaagttcgggtaaagataccccgagcggtcactgggaaatggcgggtgtgcccgtattattcgactggggctattttagcgagcatcaaaactcgttccctaaagagctgacagataagattctagcccgtgcgggactcgatggctttttaggtaactgccatgcttctggtactactattctggaagaattaggcgaagaacatatgcgttctggcaagccgattttttacacttcggcggattcggtattccagatcgcctgccatgaaggca

SEQ ID NO: 292466 - DNA, 795 bp, Unknown
  Bacterial polypeptide expressing nucleotide sequence isolated from the Sargasso Sea
tatgtcaaaggcagtaattttagtaatggatagctttgggattggcagtgcgcccgatgcagctaagttcggtgacgtaggtgccaatacctttgccagcatcagcaaagcattttttcaagccaaaggccgccaattgcagttgccccacctggccagtttaggtttggttaaagcaggttttgctgccagcggtgaaatggcattagttgaagacagtccaactctacttggcagttatggccatgcccgtgaattatccagtggtaaagacacaccaagcggtcattgggaaattgctggtgttcccgtgttgtttgactggggttatttccacgataaacaaaacagctttcctgctgaactgattgacgagttagtacgccgcactggtgtgccaggcattttaggcaattgccatgcctctggcactgacattctggtgaagctgggcgatgaacatatcaaaaccggcaagcctatttgttacacctcggctgacagtgtatttcaggtggccgctcatgaagagcattttggtttggacaagcttttgcagttctgtgaaacagctcgtgagcttctggacagttacaatataggccgtgtgattgcccgtcctttccttggtacagatatcagcaactatgctcgcactgggaacagaaaagactattcggttttacctccggctcctacagtgctggataccctgactcaatctggcggtacagtagtcagcattggtaaaattgccgatatttatgcgcatcagggcatcagcaaagaagtcaa

SEQ ID NO: 292467 - DNA, 568 bp, Unknown
  Bacterial polypeptide expressing nucleotide sequence isolated from the Sargasso Sea
gggcgggtatcgctcgcccatttgttggatcaaagatgagggctggaaaagaacaaaaaatcgcagagactatgcgatgttaccacctggctctgttttaattgactgggttaaagcttcaggcgggaagacttatgcgatagggaaaataggagatattttttcaatgcgaaatatagactttaatttcactggtactgatctggatcttatggatcaactgcaaaaacagatcgggtccgcagaagatggatctttgatttttgcaaattttgtggaatttgatagtttgtttgggcaccgacgggacccaactgggtatgcaaaagctctagaatggttcgataacgaaatagcttcattggttaggaacctgttagaagatgatttacttattattactgcagatcatggcaatgatccaacttggtcaggaacagatcatacaagagaacaagtcccagttcttataaaaggtaaagtagatttaattcaatctggaattgagtttagggatgttgcagagttggcttcaaagcacttgggggttgcaattccagaaccttag

SEQ ID NO: 292468 - DNA, 670 bp, Unknown
  Bacterial polypeptide expressing nucleotide sequence isolated from the Sargasso Sea
tggcctggataaactctacgagctgtgcgaaatcgcccgcgaagagctgaccgaaggcggctacaacatcggccgcgtgatcgcgcgtccgtttattggtgacaaagcgggtaacttccagcgtaccggtaaccgtcacgatctggccgttgagccgccggcgccaaccgtgctgcagaagctggtcgatgagaaagacggtcacgtggtgtccgtgggtaaaatcgcggatatctacgctaactgcggtattaccaaaaaggtcaaagcgaccggtctcgatgcgctgttcgatgccaccatcaaagagatgaaagaagcgggcgacaagaccattgtcttcaccaacttcgtggacttcgactcctcctggggtcaccgtcgcgacgtcgcgggttatgctgcgggtcttgagctgttcgaccgccgcttgccggagctgatggagctggtgggtgaagatgacattctgatcctgaccgcggaccacggctgcgatccaacctggaccggtaccgaccacacccgtgagcacattccggtgctggtgtacggcccgaaagtgaagccgggttcgctgggtcaccgtgaaaccttcgcggacattggccagaccctggcgaaatactttggtacgtctgacatggaatatggcaaggccatgttctga

SEQ ID NO: 292469 - DNA, 758 bp, Unknown
  Bacterial polypeptide expressing nucleotide sequence isolated from the Sargasso Sea
gctgggtgatgaacacgtcaaaaccggcaagcctatttgttacacctcggctgacagcgtatttcaggtggcagctcatgaagagcattttggtttggacaagcttttacagttctgtgaaactgcccgtgagttgttagacagttacaatataggccgtgttattgcccgtccttttttgggtactgacgcaagcaactatgcccgcaccggtaaccgaaaggactattcggttttaccgccagctccaacagtgctggataccttaacccagtcgggtggcactgtgatcagcattggtaaaattgctgatatttatgcacatcagggtatcagcaaagaagtcaaagccactggtttagctgctttggtggatacaactttagctgagatggcgatagcgccagaacgtagtttggtatttaccaatctggtcgactttgatcagaactatggtcatcgccgtgatcctattggttatggtgaagcgctggagtatttcgatactcgtttaccggagattatggctgcactggatgaagatgcggtgctgctgttaactgcggaccatggctgtgaccctacctgggtaggaactgaacacacccgtgaatatgtaccagtgctgttttatggtaaaaaccgcgctgccaaagatttaggcgaaagagcaagtttcgctgatatgggccagactctggccgactattttgatttagcggccatgccttatggccagtcctttttagcttcttaat

SEQ ID NO: 292470 - DNA, 885 bp, Unknown
  Bacterial polypeptide expressing nucleotide sequence isolated from the Sargasso Sea
aatggccggtgtacctgtgttatttgattggggttatttcccaaacacacagccgtgttttccacaagaatttgttgatgagctaattgctcgcgcagagattcctggcattttaggtaactgttatgcctcaggaacgaccattttagaaaagctaggtgaagagcatatgcaaaccggtatgccgatttgctacacctcagttgatagcgtgtttcaaatagccgcgcacgaagaatcatttggactggagaaactttatcaggtttgcgaaatcgcacgggcgctgcttgatgaaatgaacataggaagagtgattgcgcggccatttttgggttcgagccgtgacgattttgcccgtacaggcaatcgtcgtgactattcggtgttacctccgtcgccaaccttgcttgataaattatcgcaagacggcggtgaagtgatcagtattggtaaaattgccgatatctatgcgcaccaaggcatcacccaaaaacacaaagcgccagggttaatgaacttgcttgagaaaacctcagaagtaatcgcaagcgcacctgaccatagtttgatttttacaaacttagttgattttgatgaaaagtacggtcatcgccgtaatgcagttggctatgctaaagcattaaaagagtttgatgattacctaccgaccattttaaatcagctaaatagtgatgatgtgttaattatcacggccgatcacggatgtgatccaacagcagcaggcactgaccatacacgtgaatacgtgccagtacttgcataccaaccgggaatgacaaacaccccgcttggagaacgagctagttttgcagacataggtcaaacccttgcccagtggtttaatcttcctgcacttgaata

SEQ ID NO: 292471 - DNA, 916 bp, Unknown
  Bacterial polypeptide expressing nucleotide sequence isolated from the Sargasso Sea
tggtcctgggaattagctggattacccttaaagtggaattggaaatattttgaaaataaatttagatcattttctgaagatcaaattaaacctatcattaataaatttttacttacaggtattttaggtaattgtcattcgtctggaactgaaataattaaaaaatatggtgaggaacatatccttagcttaaagccaatattttatacatcaaaagatagtgtagttcagattgcgtgtcatgaaaatatttttggattaaaaaaactctatgaattatgtgaattctctgcaaaagtttttcaccctttaaaagttggaagagtaattgccagaccttttttaggagataactcaggtacttttttcagaacaaaaaatagaaaagattatacatttcctcccccaaataaaacactttgtgatttagttgtggaaaataatagatcatgccatgccattggaaaaattgctgatattttttctaacagagggatttcaacaagtgtatctgggttaagtgacgatgctttattttataaaatgattgatgtaataaaaaaagctaaaaatggagacttgatttttgcaaattttgttgaatttgattcactttatggacatagaagagatgtagcaggatttgctgcggctcttgaacgttttgatttaaaattagttaaattattagaaattatcaatcctaatgattttttaataattactgctgaccatgggaatgatcctacttttaaaggtacggatcatactagagaaaaagtacctgtattaatggttggaaattatgcccaaaaaggaaataatggaaatatagttttttctgatgtgggagccactatggctgctttccttaatctaagtgggaaattaaaaggaacaaatatttttaatgata

SEQ ID NO: 292472 - DNA, 925 bp, Unknown
  Bacterial polypeptide expressing nucleotide sequence isolated from the Sargasso Sea
atggctggcgtgcctgtgttatttgactggggatatttcccaaaaacacagcccagtttcccacaagaatttgtagacgagtttatagctcgtacaggtattcctggcattttaggcaattgccatgcatcaggaacaaccatattagaacagctaggtgaagagcacgtaaaaacaggtaaaccaatctgttacacctcagctgatagcgtgtttcaaatagccgcgcatgaagagtcatttggcctagagaagctttatcaagtttgcgaaatcgcacgggcgctgcttgatgaaatgaatatagggcgagtgattgcgcggccatttttgggttcaaatagtcaagactttgcacgaacaggcaaccgtcgtgactattcagtacttccgccagcaccaacattgttagatgttttagcaaaagacggcggcgaagtaattagtattggtaaaatttcagacatatacgcgcatcaaggcataactcaaaagcacaaagcacctgggcttatgaacttgcttgaaaaaaccagcgaggttatttcaacagcacctgatcgcagcttaatttttaccaacttggttgattttgatgaaaaatttggtcatcgccgtaacccggtaggttacgctaaagcattaaaagaatttgatgactatttaccaactatactaaaccagttaaatgcagatgatgtattaatgatcactgccgaccacgggtgtgacccaacctttccaggttctgagcacacgcgtgaatacgtacctgtgatagcgtataagcctggtatggataatacgccgctaggtgaacgaaacagttttgcagatattggtcaaacactagcacagtggtttaacttgtctgagcttgaatatggcgacagctttttaactcaattaaacgcgccaaaataaa

SEQ ID NO: 292473 - DNA, 1216 bp, Unknown
  Bacterial polypeptide expressing nucleotide sequence isolated from the Sargasso Sea
atgaaacgtacagttataatgatgttggattcctttggcgtgggcgcagcaggtgacgccgccaagtttggggatctaggttctgacacttttggccatatcgctaaagcgtgtgccgaaggtaaagccgatatcggccgtgaaggtccattaacgctgccaaacttggcgcgtttaggtttagcccatgcggcgatggaaagcacgggggcgtttgcgccaggctttgcggacaatgttgagctgattggtgcctatggccacgctcaggaattaagttcgggtaaagatactccgagcggtcactgggaaatggcgggggtgcccgtattattcgactggggctatttcagcgagcacaaaaactcgttccctaaagagctgactgataagattctagcccgtgcaggactcgatggctttttaggtaactgccatgcttctggtaccacgattctggaagaattaggtgaagagcacatgcgttctggcaagccgattttttacacttcggcggattcggtattccagattgcctgccatgaaggcacatttggtttagaaaatttatatcgtctttgcgaaatcgcccgtgaagagttagagccttacaacattggccgcgtgattgcgcgtccattcgatggcactggcccaagcgactttgctcgtactggtaaccgtaaggattactccctcgagccgccagcgaagacagtattagataagttaaaagccgccggtggtgaagtggtgagtgtgggcaagattgccgatatttacgcttactgtggcatcaccaaaaaggtgaaggcaaacgggttagaagcactatttgatgcgacgttagccgaagtgaaatcagcgggtgaaaatactatcgtattcactaactttgttgattttgactcccactatggtcaccgccgtgatgtagcaggttatgcgaaagggctggagtatttcgactcgcgtttacctgaaatgctcgcgctgctggatgaggacgatctgttaatcctcaccgctgaccatggttgcgatccaacgtggcaaggtactgaccatacccgtgaatatgtgcctgtattggcctatggcgcagggctgaaagccggttcactcggtcgccgtaacagtttcgccgatatcggccaatctatcgcgagctacttcaagcttgagccgatggaatacggtgagtcgtttatctaag

SEQ ID NO: 292474 - DNA, 763 bp, Unknown
  Bacterial polypeptide expressing nucleotide sequence isolated from the Sargasso Sea
caactgggtgaagagcatatgaaaaccggcaagccgattttctatacctccgctgactccgtgttccagattgcctgccacgaagagacttttggcctggataagctctatgagctgtgcgaaatcgcccgtgaagagctgaccgaaggtggttacaacatcggtcgtgttatcgcccgtccgtttatcggtgataaagccggtaacttccagcgtaccggtaaccgtcacgacctggccgttgagccgccagcaccgaccgtgttgcagaaactggtcgacgagaaagacggtcacgtggtttccgtcggtaaaatcgcggatatctacgctaactgcggcatcaccaaaaaagtgaaagccaccggtctggacgcgctgttcgacgccaccatcaaagagatgaaagaagccggtgataagaccattgtcttcaccaacttcgttgatttcgactcttcctggggacatcgtcgcgatatcgccggttatgctgcgggcctggaactgttcgaccgccgtctgcctgagctgatggagctggtgggtgaagatgacattctgatcctgaccgctgaccacggctgcgacccaagctggaccggcactgaccatacccgtgaacacattccggtactggtttacggcccgaaagtgaaacctggttctttaggtcaccgtgaaaccttcgcggatatcggtcagacgctggcgagctactttggtacgtcgccgatggactacggtaaaaatatgctctgat

SEQ ID NO: 292475 - DNA, 1216 bp, Unknown
  Bacterial polypeptide expressing nucleotide sequence isolated from the Sargasso Sea
atgaaacgtacagttataatgatgttggattcctttggcgtgggcgctgctggtgacgccgccaagtttggggatctaggttctgacacatttggccatatcgccaaagcctgcgccgaaggtaaagcggatactggtcgtaaaggcccattagctctgccaaacttggcccgtttagggttagcccatgccgcgatggagagtactggggcgtttgcaccaggctttgcggacaatgttgacttgattggtgcctatggccacgctcaggaattaagttcgggtaaagatactccgagcggtcactgggaaatggcgggagtacccgtattattcgaatggggctattttagcgagcaccaaaactcattccctaaagagctgaccgataagattttggcccgtgctggactcgatggctttttaggtaactgccatgcttctggtactactattctggaagaattaggcgaagagcacatgcgctctggtaagccaattttttacacctcggcagattctgtattccagattgcatgccatgaaggcacatttggcttagaaaatttatatcgtctttgcgaaatcgctcgtgaagagttagaaccttataacattggccgcgtgattgcgcgtccattcgatggtactggcccaagcgactttgctcgtactggtaaccgtaaggattactccctcgagccgccagcgaagacagtgttagataagttaaaagccgccggtggtgaagtggtgagtgtgggcaagattgccgacatttacgcttactgtggcatcaccaaaaaggtgaaggcaaacggtttagaagcgttatttgatgcaacgttagccgaagtgaaatcagcgggtgaaaatactatcgtattcactaactttgttgattttgactcccactatggccaccgccgtgatgtagcaggttatgcgaaagggctggagtatttcgactcgcgtttacctgaaatgctggcgctgctggatgaggacgatctgttaatcctcaccgctgaccatggttgcgacccaacatggcaaggtacggaccatactcgtgaatatgtgcctgtattggcctatggcgcaggactgaaagccggctcactcggtcgccgtaacagtttcgccgatatcggccaatctatcgctagctacttcaagcttgagccgatggaatacggtgagtcgtttatctaag

SEQ ID NO: 292476 - DNA, 1156 bp, Unknown
  Bacterial polypeptide expressing nucleotide sequence isolated from the Sargasso Sea
atggactcagttggaataggaggagcaccggacgcagataaatattttaatggtgacgtatcagattttggttcaaatacggttttgcatatcgccgaacacatgcaaaagaaaggttgtcctcttagcttacctcaattaaacgctcttgggttaggttcagctatctaccattctgttggaatagagcacccaaatctaccagttgaaaaagcagctaattgggccgttggaatagaaaggtctctgggtaaagatacgccatcgggccactgggaacttgccggtctgcccgttacttgggattggcattattttaaggacaaaacaaattcctttcctaaagaaattttaagtgccatttgtaggatagctcaagttgatggtgtcctcgggaataagcatgcatctggactcgaaattattaaagaatttgggcaatcccatgtcgaaacgttaaggccaatttgctatacgtcggctgatagtgttttccaaatagcggcacatgaaacggcctttggtctcgaaaggctttacgctttatgtgaaaaattagcaccggtaattcataatctaaatgttgggcgggtaatcgctcggccatttgtaggatcgacagatgaaggctggaaaagaacaaaaaaccgcagagactatgcaatgatgccgcctcgctctgttttgattgactgggttaaagcgtcaggcgggaaaacttatgcgattgggaaaataggagatattttttcgatgcgaaacattgatcataaatttactggttctgatctggatcttatggcccagttacaaaaacagataaagtcggcagaagacggatctttgacttttgcgaattttgttgagttcgatagcttatttgggcaccgacgggacccaaccggttatgccaaagcactagaatggttcgacaaggaaatagtcacagtggtgaagaaccttttagaagatgatttacttattataactgcagatcatggcaatgacccaacgtggtcaggaacagatcatacaagagagcaggttccaattcttataaaaggtaaagcagattttattcaatcggcaatagagttcagggatgttgcaaggttagcttctaagcacttgggggttgcaattccagacccttagc

SEQ ID NO: 292477 - DNA, 649 bp, Unknown
  Bacterial polypeptide expressing nucleotide sequence isolated from the Sargasso Sea
gcatgggatggtgatttcgaccgttgcttcttgtttgacgctgatggtgaatttattgaaggatattatatcgttggcttgcttgctgaagcctttatcgagaaaaacaccgacagtaaaatcatttatgaccctcgcgtatactggaatacagaagatatcgtagcgaatgcaggtggtacacccattaagtcgaaaaccggccatgcgtttattaaggagcgtatgcgcaaagaagatgcggtctatgggggtgaaatgagtgcgcaccattactttagagattttgcctactgtgattcaggcatgatcccttggttgttaattgccgaattggtgtgtgtgaaaaagcaaacactagcgagtatggtgaaagcgcgaattgaagcgtttccatcttctggtgaaattaacagtaaactaaaagatgctgacgcagcgctggaacgcgttacaagtaaatatcagccactagccagcgtaatcgaaactaccgatggtttgggtctggagtttggcacatggcgctttaatttacgtaaatcgaatactgagccagttattcgcttaaacgttgaaagtaaaggcgacattgcgttgatggaacaaaaaaccgaagagctactttcgcttattcgcgctgaataac

SEQ ID NO: 292478 - DNA, 443 bp, Unknown
  Bacterial polypeptide expressing nucleotide sequence isolated from the Sargasso Sea
tttgctgcgatacgtggcggatttggacattccgatcaagcgaggaacgttcgtggagtttaggtccgggatgttgaacgtgtcgccgatcgggagaaattgcagccaagaggagcgggacgagtttgaacgtttcgacaaggaggcgggcgttcggacgaagatggtggagactttgaagaaggaattcgccgagtacggattgacgtattccatcgggggtcaaatctctttcgacgtgttcccgaacggatgggataagacgtattgcttgcagtttgtcgagaaggatttcgacgtcattcactttttcggcgacaagacgtacccgggcggaaacgaccacgaaattttcgaatccccgaagacgatcggtcacacggtgacgtctccggaagacacgcgcaagcaagtcaccgaacacattctcgacaagctttaga

SEQ ID NO: 292479 - DNA, 589 bp, Unknown
  Bacterial polypeptide expressing nucleotide sequence isolated from the Sargasso Sea
ccggggaatatgtggtgggtctgcttgccgaagtcttctaagcaaagaaaaggggcgacgattattcacgatcctcgtgtcatttggaatacgatcgaagttgttacaaaatgcggtggccgggccgtggcctcacggacgggccacgctttggtaaaggctgcaatgagaaatctagacgcgatttacggtggagaaatgtcagcgcatcactacttcagggactttgcctattgcgacagtggcatgattccgtggcttttggtctgggaatatctctcgatgtcggatcttttgctgtcagatttaattgctgttaggaaaacttgttttccttccagcggagagttaaattttagagtgtctaatgctgcaacttgcatagaaagagctcaaaatcattatgcggcaaatgcaaatttgatagacgaactggatggcctctcgatgttttttgaaaactggcggttcaatcttagaaagtctaacactgagccgctcgtccgcctcaatattgagacgaaaggcgatttatttttgctcaaagaaaaaataaatgaaatgacaaatttaataaagcagccttaac

SEQ ID NO: 292480 - DNA, 700 bp, Unknown
  Bacterial polypeptide expressing nucleotide sequence isolated from the Sargasso Sea
atgtcgcgcgtgttggcgctgttcgacgtcgacgggacgctcaccgagcctcgaaagaaatcggacgacgtcatgagggcattcatgagagatcttcgaagcaaggtgacggtggggatcgtcggtggatccgatctgacgaagatctcggaacaactcggtgacggcgtcgagcgagagtacgagtacgtgttctcggagaatggactcgtggcgcacgagaggggggcgctgttggcgaagcagtcgctgcgggagtttttgggagaggataaattgaaaaagtttatcaatttcgtgctgcgatacgtggcggatttggacattccgatcaagcgaggaacgttcgtggagtttaggtccgggatgttgaacgtgtcgccgatcgggagaaattgcagccaagaggagcgggacgagtttgaacgtttcgacaaggaggcgggcgttcggacgaagatggtggagactttgaagaaggaattcgccgagtacggattgacgtattccatcgggggtcaaatctctttcgacgtgttcccgaacggatgggataagacgtattgcttgcagtttgtcgagaaggatttcgacgtcattcactttttcggcgacaagacgtacccgggcggaaacgaccacgaaattttcgaatccccgaagacgatcggtcacacgggacgtctccggaagacacgcg

SEQ ID NO: 292481 - DNA, 667 bp, Unknown
  Bacterial polypeptide expressing nucleotide sequence isolated from the Sargasso Sea
tttgggtgaacttgattgttttaaggcttatgatgttcgtggtgaaattggtagaactttcaatcctgaaatctgttacagaatttctagagcatttgcaaaggttttggggaccaagagagttgtaatcgggcatgatgctcgatctacttcaattgattttacagaatgtgctattgaagggcttatacatgaaggtgtggaagtttttgaattagggctgtgtggtacggaagaggtatattgggcaacgactaattttaatgcctgtggtggaattcaagtaactgcttcacataatccgatcaattataatgggctgaaatttgtcaagtctcagtcaagacctctaaactcgatgcaagaattggctgttataaaagatttggcagagaaagaaaaatttggcgataggaaaaaatcagggattcggcgtgatttcagggaggaggctagagaatcttatataaaaaaattgttaacgtttgtagacacagctctttttcgagattataaagtggtcgttaactcaggaaatggggcagcaggcccaacatttgagtgcttgaaacgcaaactatctgacctttcatgccctttaatttttgaacacatgttttcagaaccggacgggaatttcccaatggaattccaaatctatgaatag

SEQ ID NO: 292482 - DNA, 850 bp, Unknown
  Bacterial polypeptide expressing nucleotide sequence isolated from the Sargasso Sea
gagtttggatctgatgcaggcgtagaaattacagcgtcccataaccccattgagtacaatggaatgaaaattgttaagcgaggctctaaacctctatctaaccaagagtttgtgaatatcaaaaagttggcagagaaaaacgagtttcctgtgtcaaagcgtattgggttggtcaaagacaagagagctaacgcgcgaactgcatacgtaaaaaaagttttggattttgtgactttaccaaacttgaggccgctgaaaattgttttgaattcaggtaatggtgctgcgggcccaaccattgatgctcttaatttttatctaaaagaaaagggtgtaaaaacaaactttgtttatgttaatcaccagccagattcatcgtttcccaatggcatacctaaccctctattagaagagaatagaagttcaacagcagatgccataatcgaagaaaaagcagactttggtgtagcatttgacggtgattttgatcgttgctttttctttgatcattttggaaactttattccgggagaatacatagtagggttacttgccaaaatatttttgagtaaagaaaaaggggcaacgataatacacgacccccgcgtcatttggaatacggttgacgtagtaaaaaattgtggtggctatggtgttctctcgaagacggggcatgcatttgttaaagctacaatgagagattttggtgctatttatggtggcgagatgtctgctcaccactattttcgagacttcaattactgcgatagtggcatgatcccatggctcacgatatgggaacttttatcaatatccaatttttcattggcaactctgattgaaaagcgta

SEQ ID NO: 292483 - DNA, 640 bp, Unknown
  Bacterial polypeptide expressing nucleotide sequence isolated from the Sargasso Sea
ggtgactttgaccgctgtttcttatttgatgcggacggtgaattcatgaggggatattatattgttggcttgttagctgaagccttcattgagaaaaataccgatagcaaaatcatttatgatcctcgcgtatactggaacacggaagatattgtagcgaacgcaggcggtactcctattaaatctaaaacagggcatgcatttattaaagagcgtatgcgcaaagaagatgcagtgtatggcggtgaaatgagcgcgcaccattactttagagattttgcttactgtgattcaggtatgattccatggttactgattgccgaattggtatgcgttaagaagcaaactctcgcgagtatggtaaaagcgcgtatagaggcgttcccttcttcaggtgaaattaacagtaagctaaaagatgctgacgccgctttagagcgagtgacgagcaaataccagcctcttgccagtgtcgttgatactaccgatggcctgggtcttgagttcgatacatggcgcttcaacttgcgtaaatcgaacactgaaccagttattcgtttaaatgtagaaagtaaaggcgacattgcgttaatggagcagaaaacagaagagttactttcgcttattcgctcagaatagt

SEQ ID NO: 292484 - DNA, 739 bp, Unknown
  Bacterial polypeptide expressing nucleotide sequence isolated from the Sargasso Sea
atgtctcgcgtgttggcgctgttcgacgtcgacgggacgctcaccgagcctcgaaagaaatcggacgacgtcatgagggcattcatgagagatcttcgaggcaaggtgacggtggggatcgtcggtggatccgatctgacgaagatctcggaacaactcggtgacggcgtcgagcgagagtacgagtacgtgttctcggagaatggactcgtggcgcacgagaggggggcgctgttggcgaagcagtcgctgcgggagtttttgggagaggataaattgaaaaagtttatcaatttcgtgctgcgatacgtggcggatttggacattccgatcaagcgaggaacgttcgtggagtttaggtccgggatgttgaacgtgtcgccgatcgggagaaattgcagccaagaggaacgggacgagtttgaacgtttcgacaaggaggcgggcgttcggacgaagatggtggagactttgaagaaggaattcgccgagtacggattgacgtattccatcgggggtcaaatctctttcgacgtgttcccgaacggatgggataagacgtattgcttgcagtttgtcgagaaggatttcgacgtcattcactttttcggcgacaagacgtacccgggcggaaacgaccacgaaattttcgaatccccgaagacgatcggtcacacggtgacgtctccggaagacacgcgcaagcaagtcaccgaacacattctcgacaagctttaga

SEQ ID NO: 292485 - DNA, 373 bp, Unknown
  Bacterial polypeptide expressing nucleotide sequence isolated from the Sargasso Sea
tttcgtgaatttgcttattgtgatagtggaatgataccttggctattaatctggcagcttttgtccaaaaataatactgatcttgctaatttagtttctcacagaaaatataaatttccttctagtggtgaaatcaattttaaagttgatgatgcgttgagttgtttaacaagagttaaagaaagatatatctctagttcaaaaatttacgatgagttagatggcctttctatgaattttgaaaattggcgttttaacctcaggagttcgaacacagagccacttgtccgcctaaatgttgaaactaaaggtgataaaactttgcttaaaagtaaggtagagcaattaacaaaacttataaataatgcataac

SEQ ID NO: 292486 - DNA, 1000 bp, Unknown
  Bacterial polypeptide expressing nucleotide sequence isolated from the Sargasso Sea
catggacagcggacttgatgaaataaagaatattgctgaagcatcagaatctaagaccgacaaagagcctttcattgagatcattgatgtaaaaaacgaatacatcgataaactcatggaattcattgacccaaaaaaaatcaaacccatgaagattgtcaccaattcaggcaatggttgtgcaggtccaattttagatatgcttgaggataagcttccaattgaattcatcaaaattcagaatgaaccggacggttcatttcccaatggaattcccaatcccttattgccagagaatagaaaaataacttccaaagcagtgattgaacattctgctgatcttgggattgcctgggacggagattttgatcgatgctttttctttgattcgaatggcgaatttatagagagctattacctgattgctttgttgggtgagcaattattaaaacagtcgccgggggagagcattgttcatgatccacgactggtttggaatactgttgaagaagttgatgggtttggcggcactcctgtcatttctaagtctgggcattcattcattaaagaaacgatgcgagagaacaactctgtttatggcggtgagatgagtgggcatcattatttcagagatttctattacagtgacagcggaatgattccctggcttttactcatcgagaatgcatctgtctcgggatcaacgctcaccgatttagtaaaaaacatgatcagcaagtttcctgtgagtggtgaaattaatcgaaccgtgagtgagccagagaagttgcttgaaaagatcaaagatcattacctttcatttgatccaataattgacaacttagatggatacagttttgatttcggttcatggagattcaatcttcgtatgtccaacacagagcctttggttcgcctgaatgttgaatcgagaaatgatgctcatctcatgcaaacaaaaacagaagaagtcctagagcttattgaaaagcttggctga

SEQ ID NO: 292487 - DNA, 1360 bp, Unknown
  Bacterial polypeptide expressing nucleotide sequence isolated from the Sargasso Sea
atgtggtcaaccgactgttttaaaacctatgatattcgcggcatagtgcccactcagctcaatgaagagctggcttaccgtattggtcgggctttatgccagcaactgtcggcgaaaatagtggtcataggccacgatatccgtttatccagcccatccttaagtgcagctttagctcagggtttgcaagagggtggtgctgatgtgatcgacataggtttatgtggcactgagcaggtatatttttctgtatttcatttagaggcagacgccggtgtttgtgtcacagccagccataacccggcgattttcaacggcatgaagtttgtgggcaaagggtccacccctatcagcgccgacacaggtttaaatgccatcagggatctggtggcaaacgcagaatttgccgcccctgttgatgtcggtagctatcagcaacaaaatacactgcctgcttatgttgaccatctgctgacttatctggatgtgcaagcactgaaaccgctgaaggtggtgatgaacccaggcaatggtggtgcaggtttagtggtcaatgcactggcgcccttattgccaatacagattattccgctgcagtttgagccggacggcactttcccacacggcgtacctaaccctttgttagtcgaaaatcgcttaagcaccagtgcagcaattcaagcacatcaagccgatttaggcgtggcatgggatggcgattttgatcgctgtttcttctttgacgaacaaggtcagtttgttgatggatattatctggtcagtttattagcacaagctttattgctgaaaaatccggctgaaaaaatcatttatgaccccaggttatactgggcgacgcagcaaacagtaaaagccgcaggtggagtacctgtgatcagtaaaaccggtcatgcttacattaaagagaaaatgcgctctgaagatgcattatatggcggtgaaatcagtgctcaccattatttccgtgacttcgcgtattgcgacaatggcactattccctggttattaattctagccttgttgtcggctactggccaacctctgtcggctttggtgctgcagttgcagcatcaatttccttgcagcgacgaactgaactttaaagtcacagatgccaaagcggctatagcggccattgccgccttgtatcagcacaaggcacttgaagtggagctgctggatggtttaggtctgaacttcgctgactggcgttttaacctgcgcatgtccaacaccgagcctttgttacggctgaatgtagaaacccgggctgatgcaaagctgctggcaacaaaaattgcggagctgacctcagccttacaacccttcttagtctgat

SEQ ID NO: 292488 - DNA, 1258 bp, Unknown
  Bacterial polypeptide expressing nucleotide sequence isolated from the Sargasso Sea
gctgagtttctttccccaaaaattgttgtcgttggtttcgacattcgtctaaccagttgcgaactcaatgacgctctgatccgagggttgagagactcgggagtggatgttgtaaatattggtttatgtggcactgaggaaatatattttgcgacttcacatcttaatgttgatggtgggatcatcgttacggcgagtcataatcctaaaaactacaatggtatgaagttcgtcaggaagaactcggtaccaattagtggtgatacgggattgaatgaaattagagagatagcggagtccaatttatttaaggactcatcagtaaaaggaaaaatttcgtcagcaaatttaagagacgcttacgtagaccaccttttgagttacattgaccttaatgcgcttaaacccattcgagtcgtttgcaatgcgggaaatggtgcagctggattggtaattgatcaattagaaaaagttttacctattgaatttgtaaagattcatcatgagccaaacggagagtttccgaatggggtaccaaatccccttttagaagaaaatcgcttgccgactattgaggcaattaaaaataataatgctcagttgggaatagcttgggatggagactttgaccgttgctttttttttgatgaacatggaagatttatcgagggttactacatcgtgggattgctctcgcacttttttctgtcgaattcggcaggctcaaagatagttcacgatccaagacttacctggaacacggtcgctgtaacaaaaatatttggtggtcaagcggtatgctgcaaaacgggccacgctttcatgaaagagcgcatgagaagcgaagacgctatttatggtggtgagatgagcgctcaccattacttcaaggattttttttattgtgacagtggaatgatcccttggatactcgtaattcagatgatggcagaccaagacaagtcactttctgaacttgtaaaccagtatatgaccgcatttccagccagtggtgagattaatatagccgttgaaaatccagaggggttgattcagaaaattaaatttcgctatcaaaagtccgcggaggccatagataatatagatggcctatcgatgagcttcaaagattggagatttaatttaagaatgtcaaataccgagcccgtgatccggttaaatgtcgaatctcgtggtaatgccgacttaatgcatgaaaaaacagaagaacttctcaagcatataagtgggtcttgaa

SEQ ID NO: 292489 - DNA, 799 bp, Unknown
  Bacterial polypeptide expressing nucleotide sequence isolated from the Sargasso Sea
aatatcaaaaaacgtgccaattgagattattaagcaaaattttgatccagattcatcttttcctaatggaataccaaatccaatgatagaggaaaatagagcttccacatcacaagcagttattgataataaggctgatctaggtatagcctgggatggagattttgaccgatgttttttcttcgatgaaaaaggcaattttattgaagggtattaccttgttggccttcttgcaaaaagctttcttataaaaaatcgtaatgagaaagttatatatgatccgagattgacatggaatacgattgatgttgtcaaaagacacggtggtgatgctattcagtgtcaatctggacattcttttataaagaagtctatgcgtgataatgatgctgtatacggcggagaaatgagtgcacaccattattttcgtgacttttactattgtgacagtgggatgatcccttggctcttgatacttgaaatgatttccaaagaaaaaatgccattgtcacaaatgattcaaaagtatcgcgaaaaatacccagtgagtggagagattaatcttaaagtgagcaatacaaaaacaataattgattccatcaaagagtattatctcgatgatgcgttaggtgtagatgagacagatggtgttggtatggagtttgaaaaatggagattcaacctacgcgcatcaaatacagagcctctcatcagattaaacgttgaaagcaacagcaatgaatcattaatgaatgaaaaaacgagagagctggtagatagaattaacagcttagattga

SEQ ID NO: 292490 - DNA, 556 bp, Unknown
  Bacterial polypeptide expressing nucleotide sequence isolated from the Sargasso Sea
aatggtgactgaactgacttgttttaaggcttatgatgttcgtggtgaggtgggaaataattttgattctgcaatttgttatagaatatgtagatcatttgcaagggtactgaatacgaagagagtagttattggctatgatgcgcgttcaacctcaatcaacttaacagaaagtgctattgaaggactaaaagatgaaggtgtggaagtgttcgaattgggattatgtgggacagaagaaatgtactgggctaccacatattttaatgcgtgtggaggtatagaagttacggcttctcataatccaatcaattataatggattaaagtttgtaaaatctcgttcacgcccccttgaacctaaaacagaactaatagaaataaagaattttgcagagcagaataaatttggcccaaagaaaaaatcaggagctagatttgatataagtaaggagtccagagagtcttatgtaaaaaaaattctaacactaataaattataatgattttcagaattataaggtggtaattaattcaggaaatggtgctgctggtcca

SEQ ID NO: 292491 - DNA, 481 bp, Unknown
  Bacterial polypeptide expressing nucleotide sequence isolated from the Sargasso Sea
ctggctggcggcagcgctgagcagagtaaaaccggtcacgcattcatcaaggaaaccatgcgacgcgtggatgccgtctacggtggtgagatgagtgcgcatcactatttccgggacttcgcctactgcgatagtggcatgattccgtggttattggtcgctgagatcatgtccaccaccggtaaaacgctggcgtctctggttgaagagcgcactaaggcgttcccctgctccggtgagatcaatcgtactgtgtccgatgcgcaggcgctgattggcaaagtcgaggccttgtatgctgacggggcaaacaccattgagcatatggatggcttgagcctgagttacgatgactggcgatttaatctccgtatgtcgaataccgagcctgtggttcgcctgaacgtcgaaagccgcggtgacgaggcactgatggcagagaaaacgcaggagttattggcgattatcgacgccgcgtagc

SEQ ID NO: 292492 - DNA, 922 bp, Unknown
  Bacterial polypeptide expressing nucleotide sequence isolated from the Sargasso Sea
tctggctgaggaaagtaatttttctcaacctcataagacgggcgtcattttaaataaaaaagaagcggcccgcgcagcttatgtcgaaaaagttttggggtttatggattattctagcctcaaacccctcaaaattgtcattaactccggcaacggcgccgcgggacctactgtgaatgcgatcaataaaaatttaaaagaaaaaggaatagagacaaatttcatctttctacatcatgatccagatccaacttttcccaatggcatccccaaccctttacttgagcaaaacagattgtcgacggtggatgctgtcatcactgagaaagctgattttggcgtggcctttgacggcgactttgaccggtgctttttctttgataactctggggactttattccgggtgaatacgtggtcggtcttcttgctgaaatctttttaaaaaaagaaaagggagcgtcgattattcatgacccccgtgttgtttggaatactttggacgttgttggacaatgtagtggtcaggccgtagtctctaagactgggcacgctttcatgaaggataccatgcgaaaggcggatgcgatttacggtggagagatgtcggcgcatcactacttcagggatttcgcctattgcgacagcgggataattccgtggctcctggtctgggaacacctctcaactttcaatttctcgctattagacttaatctcagagcgaagaaatcgctttccttctagcggagagttaaattttaaagtttctcatgctgcggcttgcatagcaagagttcaaaatcattttgcttcaaaggcaacgtcgataaaccaactggatggtctgtcgatgtcctttgacacctggcgctttaatctccgcaaatctaatacggaaccgctcgttcgactcaatatgaga

SEQ ID NO: 292493 - DNA, 1357 bp, Unknown
  Bacterial polypeptide expressing nucleotide sequence isolated from the Sargasso Sea
aatgaataaagaaatatcctgcttcaaggcatatgatgttagaggcaggataccttctgaactaaatgaggatgttgcttatcgtattggggtcggcattgcatcttttttttctgccaaatcagttgttgttggttacgatgtaagaccttcatccattgaaatactcaatgctttaacaaaaggcatcaatagcatgggcgctaaagtctattcaattggtctatgtggtacagaagagatctactttgccacaaatcatctagaaactgatgctggagtgatgatcactgcgagtcataaccccgctgattacaatggattaaaaattgttggcaagggtgcaaagccagtgagtatgaacagcggacttggtgaaatcaaaaagattgcagatcagtctgaatccaaccttttagctgagtctcatatcgaggtcgtcgatataaaagctgcatatattgagaaacttttagaattcatagattctgacgcaatcaaaccaatgcacatagtcacaaatgccggaaacggttgtgcaggtccaattttggatttgcttgaagaaagactccctcttaaatttactaagattcaaaatgatccagatggcacatttccaaatggaattccgaaccctttgctgcctgagaatagggatattacatcaaaagctgttattgaaaattccgctgaccttggtattgcatgggatggagattttgatcgatgtttcttttttgattcgaatggagatttcatagaaaattactatcttattggtttattgagtgaacagttactgaaattatcacctggtgacagcattgttcatgatccaagattggtttggaataccgttgaagaagtcaatagttttggaggtatccctacgatctcaaagtctgggcattcatttatcaaagaagtcatgcgtgaaaataactcaatatatggtggagaaatgagcggacatcattatttcagagatttttatttcagcgatagtggaatgatcccttggcttttactcgttgaaaatgtatctgcatcaggatcaaatctcactcatcttgtgaaagatagaatcaataagtttcctgtaagtggtgaaattaatcgaacagtcagtaatccagaggaactgcttgaaacggtaaaagatcattatcttaaacttgacccaaatgttgagaatcttgatggatatagtctagattttggagcttggaggtttaatctcaggatgtcaaataccgagcccttggtgcgtttaaatgttgagacaagaggggatattgatctaatgaaaagcaagacagaagagattctcaatctgattgaagatcttggttga

SEQ ID NO: 292494 - DNA, 1309 bp, Unknown
  Bacterial polypeptide expressing nucleotide sequence isolated from the Sargasso Sea
ataccttccgaattaaacgaagatgtcgcctatcgcattggggctggagttgcgtcttactttggagcagaatcggtcgtcgttggatatgacgttagaccctcttccatcgatattctcaatgcgctgacaaaaggcatcaatagcaagggcgcaaaagtatactcaattgggctctgcggtacagaagaaatctactttgccacaaatcatttaaatacggatgcaggtgtaatgatcactgccagccataatccggcagattacaatggattgaaaattgttggcaaaggtgcaaaaccagtcagcatggacagcggacttgatgaaataaagaagattgctgaagcatcagaatctaagaataataaagagcctgtcattgagatcattgatgtaaaaaacgaatacatcgaaaaactcatggaattcattgaccccaaaaaaatcaaacccatgaagattgtcaccaattcaggcaatggttgtgcgggtccaattttagatatgcttgaggataagcttccaattgaattcatcaaaattcagaatgaaccggacggttcatttcccaatggaattcccaaccccttattgccagagaatagagaaataacctccaaagcagtgattggacattctgctgatcttgggattgcctgggacggagattatgatcgatgcttcttctttgattcgggcggcgaatttatagagagctattacctgattgctttattgagtgagcaattattaaaacagtcgccagatgataaaattgttcatgacccacgactggtttggaatactgttgaagaggttaatgggtttggcggcactcctatcatttctaagtctgggcattcattcattaaagaatcgatgcgagagaacaactctgtttacggcggtgagatgagcggacatcattatttcagagatttctattacagcgacagcggaatgattccctggcttttactcatcgaaaatgcatctgtctcgggatcaacgctcaccgatttagtaaaaaacatgatcagcaagtttcctgtgagcggtgaaattaatcgaaccgtgagtgagccagagaagttgcttgaaaagatcaaagatcattacctttcatttgatccaataattgacaacttagatggatacagttttgatttcggttcatggagattcaatcttcgtatgtccaacacagagcctttggttcgcctgaatgttgaatcgagaaatgatgctcatctcatgcaaacaaaaacacaagaagtcctagagcttattgaaaagcttggctgat

SEQ ID NO: 292495 - DNA, 1378 bp, Unknown
  Bacterial polypeptide expressing nucleotide sequence isolated from the Sargasso Sea
aatgttgggtaaactgaactgtttcaaggcttatgatgttcgtggtgagattggtcaaaatttcaatccagaaatttgttaccgaatatctagggcatttgcaaaattttttcaggccaaacggattgtaattgggtatgatgcgcgatctacttcaattgatttaacagaaagtgctattcaaggtcttagagatgaaggtgccgaagtatttgaattgggcttgtgcggtacggaagaagtatattgggcaacaactaattttaatgcctgtggtggaattgaagtaacagcttcacataatcccatcaattacaatggtttaaaatttgttaagtcgcagtcaagacctttagatcctataaaagaactggctattataaaaaatttagctgaagaaggtaaatttgggcccaagaaaaaatcaggaattaggcacaatattggtgaagcggctagagaatcatatataaacaaactattgacgttcgtagacacttcgctatttagagactataaagtggtggttaattcgggaaatggggctgcaggtccaacatttgattgcttaaaaaataagttatctgatctttcttgccctttaatttttgagcacatgtttgcagagccggatggaaacttccctaatggaattccaaaccctatgaatagcgaaaatcaaataccaacaagagctaaagtcctggagtcaagtgcagatttaggaattgcatttgatggtgattttgaccgatgtttcatttgtgatgaaaaagggaattttattgaaggagagtacattgtagctttgctatcagaaatttttttaaagcgggaagtaggtgctactattgttcatgatcctagagttatttgggctattcaggagacagtaaaaagaaacagtggaacttctatccaatcaaccactggacatgctttttttaagaaaaagattagggaatcgaatgcaatttatggaggagagatgtctgcacatcattatttccgagatttttgtttttgtgacagtgggatgataccttggttgataattgtagaatttatgagcctccaggatttatctctttctgagataataaagtgtagaagagtaaatttccccagctcaggtgaaattaattttcaggttcgtgattgtgacatagccatggcaagaatttcagagaattttagcaaagattatgtttataaagattattcagatggattgagcttaacttttactgactggcgtttaaatctaagacaatctcaaactgaaccgttaattagattaaatattgagagccgtggtaatcgtgagctgattagtaaaaagctagatgaaattagtgctcttctaagagaatgttga

SEQ ID NO: 292496 - DNA, 178 bp, Unknown
  Bacterial polypeptide expressing nucleotide sequence isolated from the Sargasso Sea
gacgcccaaagccaccgattccgaacggtttggcaaactgcatcgcgccatgctcgagcggggcgtgtatctgcccccatcggcctttgaggcgggattcacctccctggcccactccgaagcagacattgaggccactgttaatgctttccgcgagagcttcgcggaggtggcctga

SEQ ID NO: 292497 - DNA, 901 bp, Unknown
  Bacterial polypeptide expressing nucleotide sequence isolated from the Sargasso Sea
atgaataaaaatatatccctaaaagaatggcaaagaagagcacagaaggttcttccaggtgcaggttttggtaattttgatcctagcatcagtctaaaaagaggtttaggttcacgtgtatgggatgaagacaataaagaatatatcgattttttaattggttcagggccaatgatactaggccatggaaatgaagaagtattggatgctatacgggcccaactcggtgaaggtcttactttttttactaataattcaaaaggaatagagttagctgaagaaatttgtaacgcagtgaaatgtgctgagcagattagatttgtaagctctggtggtgaagctgatatgtatgcgatgcgattggcgagagcacatactggtagaaataaaatcttcaaatttgagggagggtatcacgggatgagtggagactcattgatgagtcttgcacctaacaaaatggtaaatttcccattggcagtgccggactccgcgggaatacctgaagccgttagagatgatattttggttgcaccattcaacgatcctcaagtcgctacggaaataatgaacgagtattcagatcaaattgctggggtaattgtagagccacttcaaagaataattccgccaataaaaggatttttagagcatctaagggctgaaacaaaaagaattggtgcgcttttgattttcgacgaaatagtaactggttttaggttggcctacggcggtgcacaagagctatacggagtagtgcccgatttatgcacgcttgggaagatcattggaggtggcttacctctagcggctattgccggtgaaaaagaaattatggaccattttgacaaaaatattgttgggcgaagaaaggtttactttccaaatcggtacccttagt

SEQ ID NO: 292498 - DNA, 439 bp, Unknown
  Bacterial polypeptide expressing nucleotide sequence isolated from the Sargasso Sea
aatgaaatcatcaaatcgagaagaaattatagagcataatgctaaagaactttttgatattgtactagatattgaaagttacccttattttattccatggtgttctgcaatgaaggttcattctaagagtgataaagaaatttatgccgatatgatagtttggtataagtacttcatgccgcaaaaatttggttcacatgtggaatttgataaaaaaaatctaaatattaaaactacatatattgaaggtcctttaaaagatcttaaaactagttggctatttaaatatttaaaaaagaataaaacattaattagttttaacgttgaatttgagtttaaaaggttttttcatcaaaaaattgctgaagcattttatcctcttatagaaaataaaatgattgagtcctttaaagatagggctgacgaaatcttagattaa

SEQ ID NO: 292499 - DNA, 358 bp, Unknown
  Bacterial polypeptide expressing nucleotide sequence isolated from the Sargasso Sea
atgaaatcatcaaatcgtgaagaaatcgttgaacataatgctagagaactatttgatatagtattagatatagagagctatccttattttatcccatggtgttctgcaatgaaggttcattctaaaagtgataatgaaatttatgcggatatgattgtttggtataagtattttatgccacaaaaatttggatctcatgttgaatttgataaaaaaaaattaaatattaaaacaacttatattgaaggtcctctaaaagatttaaaaacaagctggttttttaaatctttaaaaaaaaatcaaactttgattagttttaatgtagaatttgaatttaaaagattttttcatcaaaaaa

SEQ ID NO: 292500 - DNA, 367 bp, Unknown
  Bacterial polypeptide expressing nucleotide sequence isolated from the Sargasso Sea
tgatgatttagctgcaattattgttgagcctattgcaggcaatatgggattcattcctggagagcatagatttctttcagctttgcgagagctatgtaataaatttgaatctctccttatttttgacgaagtaatgtctggttttagagtagcagttggaggtgctcaagctatttatgaaatcaagcctgatctaaccgcgcttggtaaagtaataggcgggggtctacctgttggatcttttgggggaaaacaacctattatggatacaacttgccccaatgggtcctatatatcaagcaggaacattatcgggaaatccgcttgcaatgagtgccgggatagccttgctaaatgctttagttaa

SEQ ID NO: 292501 - DNA, 439 bp, Unknown
  Bacterial polypeptide expressing nucleotide sequence isolated from the Sargasso Sea
aatgaaatcatctaatagagaagaaatagtgcaacataacgcacaagaactatttgatattgttctagatattgaaagttatccatattttattccgtggtgctctgcaatgaaagtacattcaaaaagtgaatcggaaatatatgcagatatgattgtttggtataaatattttatgccacaaaggttcggttctcacgttcaatttgataaaaaaaaactcaatataaaaacaacatatattgaaggccctttaaaagatttaaagacaagttggttttttaagtctttaaaaaaaaatcaaaccttaattagctttaatgtagagtttgagtttaaaagattttttcaccaaagaattgcagaagctttctatcctttaattgaaaataaaatgatagagtcatttaaagaaagagctgacgaaatactagattaa

SEQ ID NO: 292502 - DNA, 364 bp, Unknown
  Bacterial polypeptide expressing nucleotide sequence isolated from the Sargasso Sea
aatgaaaactaaaaattcagaagcactctttaaaaaatcaaaagaacatattgctggtggtgtcaactcgccagtaagggctttcaaaagcgtagggggaacaccaatattttttaggaaatcaagagattgctatatttatgatgaggatggtaataaatacttagactttgttggatcttgggggcccatggttcttggtcattcaaataaacaaattattgacgctattaaaaaacaagcaagcaaagcaataagctttggagcacctacaaaaaacgaattagaaattgcaaaaataattaaatcctattttcctagcatggagaaaataagaatggtcaactctggaactgaggcaact

SEQ ID NO: 292503 - DNA, 321 bp, Unknown
  Bacterial polypeptide expressing nucleotide sequence isolated from the Sargasso Sea
aatgaatctattttcagaagcaaaaaaagtaatagctggtggtgtgaattctcccgccagatcattttctggagttgggggtgagccgcttttttttaagtctgccaaaggtgcttatataaaaactgagggtgatcgtgagctaattgattatgtgggatcatggggaccgatgatacttgggcattctttcccaccagtattaaactctataaaaaaagcaattgagaatggattaagctttggagcgccaacaacaatagagacaaaacttgcgaagaaagtgaaagattttatcccctctatcgaaaaattaagaat

SEQ ID NO: 292504 - DNA, 742 bp, Unknown
  Bacterial polypeptide expressing nucleotide sequence isolated from the Sargasso Sea
ctccttttacgatattgattttataagttctataattacaaaattcaaagataaaattgctggaataatagtagaacctcttcaaaggatcattcctccggaacctgggtttcttgagggactgagaaacttatgtgataaaaataatattcttttaatatttgatgagattgttacaggcttcagattagcgtatggaggagcacaagagaaatataatgtaacaccagatttgtgtacacttgggaaaatcatcggaggtggtttcccacttgctgcaattgcaggttcaaatgaaataatgtcacatttcgatcaaaataaagttggtaaggataaatggttaatgcaaattggaacactttcaggaaatccaatagctgcagctgctgggttaaaaacaatggaagttctaagacgagaaaatatgtttgataaacttcgcaaatgcggcaatgaaattatgaattgtttaaatgagaacttaaaaaatgcaaatattggacatagaattgtaggtgatccaactttatttgatgttctttttttggatcaagatgttaaaaattatagagatacaaaaaaggcagacataaaacttaacacattattcaataaaggtcttaggatgagaggaatttttaaatcatctgcaaaaatatatccgagcttagctatatctgatgaagatctttttaatacaaaaaaagcaattcacgatacagtcttaaatcttgtttaa

SEQ ID NO: 292505 - DNA, 838 bp, Unknown
  Bacterial polypeptide expressing nucleotide sequence isolated from the Sargasso Sea
aaatgagtttatctccttcaacttagttaattttccacagcctgttcctgatagtgctggaataccaaaaactatcgagaaggatatattaattgctccttttaacgaccttgattttattaattctataattacagagttcaaagataaaattgctggaataattgttgaacctcttcaaaggataattcctccagaaccaggttttttagaagggctgagaaacatatgtgataaaaataatatccttttaatatttgatgaggttgtaacaggtttcaggttagcgtatggaggtgcacaggaaaagtataatgtaacaccagatttatgtacacttggcaaaattataggaggtggttttccactagctgcaattgcaggttcaaatgacataatgtcacattttgatcaaagtaaagtaggaaaagaaaaatggttaatgcaaattggaacactttcaggaaatccaattgcttctgcggctggcttaaaaacaatggaagtattaaaaagagaaaatatgtttgataaacttagaaaatgtggttccgaaattatgaattgtttgaataataatttaaataaagcaaatattggtcacagaatagtaggagacccaactttatttgatgttctttttttagatcaagatgttaaaaattatagagatacaaaaaaagctgataataaacttagtgtgctatttaataaaggtcttagaaaaagaaaaattttcaaatcaaccggaaaaatatatccaagcttagctatatctgatgaagaccttttaaatacaaaaaaagcaatacaggatacagtcttagatcttgtttaa

SEQ ID NO: 292506 - DNA, 871 bp, Unknown
  Bacterial polypeptide expressing nucleotide sequence isolated from the Sargasso Sea
tttggaaaaaataagtacccagaaagaatggatttcacgagcccaagaggtgttcccagctggaggttttggtaattttgatccgtccgtctttataaaggaaggaagaggttccagggtctgggacgaaaatggtaatgaatacgttgactttttgatagggtcgggtcccatgcttttgggtcatggtcatcctgaggtgctcgaggcgattttggatcaaatacctattgggatgactttttttactaataattcagctggtgtcgaattagcagaagagatttgtcgagcagtgacttgcgcagagcaagtacgttacgttacgtctggtagtgaggcagatatgtatgcaattagattagcgagggcttttactggaaaaagtaaaattctaaaatttgagggtggctatcatggtatgtgctctgaagcacaaatgagccttgccccgaaacatttagcgaattttcctcaagccgtgcccgacagcgccggaattccaacttctgtcgaaagtgaagttcaaattgccccatttaatgataatgactttcttcggtcttttctcggtgagcatggcaataatctggctgcaataattttggagcctttacagcgccaaattccaccagagccaggatttttggagactgtgagggacttgtgctcgaagcacaacataatattaatattcgatgaaattgtgacaggttttcgattggcatatggcggagcgcaggagtactacaatgttgttcctgatatctgcacgttaggaaagataattggcggtgggttcccattggcagccgtggtcggtcggaaagaaatcatgcagcattttgataaatcaaaggtttggggatga

SEQ ID NO: 292507 - DNA, 706 bp, Unknown
  Bacterial polypeptide expressing nucleotide sequence isolated from the Sargasso Sea
aatctagcagcagttcttattgaaccgatgctaggaagtggtggctgtattcctgcggaaaaggacttcctgaaagctatccgatatgagacagagcaacataacatttgtttaatttttgacgaagtcatgacatctagaaattcaagtggtggtctccaaaagatattagaaattcaaccagatctgacaaccctcggaaagtatctaggtggtggggctagttttggtgcatttggaggaaaatctgagataatgaatctttgggacccgacaaaacctaactttttagctcatgctggaacatttaataataacactttgtcaatggctgcaggactaacaggattaactgaggttttcacctctgaaattgcaacagatctatttaataaaggtgaaaattttaagtcatccttgaatagtatatgtgaaagatattcaattaatatacaggtcactggtctcggctcaattttaggaattcatattgggaccaagaaaattgtcaggccctatgcctataatgaacatgatctcaatagactgaaattaattcatcttgaaatggccaacaaaggatttctcttcgctcaaagaggttatatgaccttgaatattgcaatggtagagaaagacaccaatgaatttttaagtgcatttgaggaggtagtaacttctcataaggaaattttcttgatgtgag

SEQ ID NO: 292508 - DNA, 439 bp, Unknown
  Bacterial polypeptide expressing nucleotide sequence isolated from the Sargasso Sea
aatgaaatcatcaaatcgagaagaaattatagatcacaacgcaaaagaattatttgatatagttttagatattgaaagctatccatattttattccttggtgttcagctatgaaagttcattcaaaaagtaataaagaaatttatgcagatatgattgtttggtataaatatttcatgccacaaaaatttggttcgcatgttcaatttgataaaaaaaaattaaatatcaaaacaacttatattgaaggtcctttaaaagatcttaaaacaaattggatttttaagtcattaaagaaaaatcagacattaattaatttctcagttgaatttgaatttaaaagattctttcatcaaaaaatagcagaaactttttttcctttaattgaaaatagaatgatagagtcatttaaaatacgcgctgatgaaattctagattaa

SEQ ID NO: 292509 - DNA, 218 bp, Unknown
  Bacterial polypeptide expressing nucleotide sequence isolated from the Sargasso Sea
gttgaacaccagccgctcccaggccatctttgacgctgctcaggctctgatgcccggcggggtgagctcgccggtgcgcgcgtttaagtctgtgggcggtcaaccgatcgtgttcgaccgggtcaaagggccttacgcctgggatgtggatgggaacaatacatcgattacatcggcagctggggcccggccatctgtgggcatgcccatccggaagt

SEQ ID NO: 292510 - DNA, 439 bp, Unknown
  Bacterial polypeptide expressing nucleotide sequence isolated from the Sargasso Sea
aatgaaatcatctaacagggaagaaattattgaacataatgcaaaagaattatttgatatagttcttgatatagaaagctatccttacttcataccttggtgctctgctatgaaagtgcactctaaaagtgatagtgaaatatatgcagatatgattgtttggtataaatatttcatgcctcaaaaatttggttctcatgttgaatttgataagaaaaaattaaatataagaaccacatatatagaaggtcctttaaaagatttaaaaacaagttggatattcaaatcaataaaaaaaaatcaaactttaattactttcaatgttgagtttgagtttaaaaggttttttcatcaaaaaattgcagaagccttttttcctctaattgaaaataaaatgattgaatcttttaaagaaagggcagatgaaattttaatttaa

SEQ ID NO: 292511 - DNA, 128 bp, Unknown
  Bacterial polypeptide expressing nucleotide sequence isolated from the Sargasso Sea
tttgaaaagaattaaatcagaatctctctttgagcaagctcagatactaatgccaggtggtgtaaattcacctgttagagcatttaaaaatgttgatggccagcctgttttttttaagtctgccaaag

SEQ ID NO: 292512 - DNA, 727 bp, Unknown
  Bacterial polypeptide expressing nucleotide sequence isolated from the Sargasso Sea
atgagtatattgagtacatatgaagaatcgcatacgggttcaagaaagaagtacgaggaggcaaaaaatattttcccgagcggtgttacacacgacaataggtacgctacgccttttcctctgtacatgacacacggtatgggttccaggaaatgggatgtagacggtaatgaatacatagattatgtctgcggtcacggtgctttaattttaggccattctcaccctgaaatagtggaagtagttaataatcaaatggctttagggactcatttaggtgcttgcactgatcaagagttagaatggggttcatatgttaaggcattggtgccttcagtggaacgaataaggtttcatagctccggaacagaagcaacgatgatggctatgagattagcacgagcgtataccggcaaaaatgttgttattaaattacaagatcattttcacggatggcacgattatgcaatatctgattccgctggcccatcttctggtgtgcctgaagctgcttggggttccactaaagtgttaccagctggtgatttagatgctattgaaagttttcttgaaatcaatgatgacgttgcagctataatacttgagcctacaggggcgcattatggccaattaatgtttgacgttctgccttatttgaaagggatacgtgaattgaccattaagcatggggtcgtttttataatggatgaagtggtcacgggattca

SEQ ID NO: 292513 - DNA, 775 bp, Unknown
  Bacterial polypeptide expressing nucleotide sequence isolated from the Sargasso Sea
aatgaataagaatatttctctaaaagagtggcaaagccgagcacagaaggtacttccaggcgctggtttcggtaatttcgaccctaatatcagtctaaaaagaggtttaggttcacgagtatgggatgaagataataaagaatatatagattttttaattggttcagggccaatgatactggggcatggaaatgaagaagtattagatgctatacgagcacaactcagtgaaggtcttacttttttcaccaataattcaaaaggagttgagttagctgaagaaatttgtaacgcagtgaaatgtgccgaacagataagatttgtaagctctggtggtgaagctgatatgtatgcgatgcgattggcaagagcacatacaggtagaaataaaatcctcaagtttgagggaggatatcatgggatgagtggagactcattgatgagtcttgcacctaacaaaatggtaaattttccattagcagtgccagattcagcgggaatacctgaagccgttagagatgatatcctggtcgcaccattcaacgatcctcaagttgctacggaaataatgaatgagtattcagatcaaattgctggggtaattgtagaaccacttcaaagaataattccgccaataagaggatttttaaaacacctaagggctgaaacaaaaagaattggtgcgcttttaatttttgacgaaatagtaactggttttaggttagcctacggcggcgcacaagaactgtacggcgtagtgcctgatttatgcacg

SEQ ID NO: 292514 - DNA, 913 bp, Unknown
  Bacterial polypeptide expressing nucleotide sequence isolated from the Sargasso Sea
gctgagcctctcaaatgctcagcctctcacactcgcaacctctcacactcccatcctctcacactctcagccactcagctactcacctcgatctctctgcctctctgcgtctctccgtctcggcctcctggcctctcagcctctcagcctctcagcctctcgacactccgcacatcagattctcagccactcagctactcagcctctcacacgctcacatgctcacatgctcagcctctcacactcacactcacacacgctcacactctcacacgctcacacgctcacatgctcaacctctcacactcgcaacctctcactctctcagcctgtcagcatctctccctcttggcctctcggcccctcagcagatcagattctcagccactcacactctcgcctctcggcgcctcagcacatcaaatcctcagccactcacactctcacatgctcacactctcacacgctcacatgctcacactctcacactctcacacgctcacatgctcacacgctcacatgctcacactctcacatgctcacactctctcactcgccagcctctcacactctcacactctcggccgttcacactctcagcctcgtagcttcttagcatctcggcctctcacactctcagcctctcagatgctcgcctctcagcctctcagccgctcagcctctctgcctctctgtctctcattcgctcagcctctcagcctctcacactcctctcaagctctcagcctctcacacgctcagcctctcacacgctcagcctctcatacgctcagcctctcacactctcccactcttcacactctcagcctctcacacactcagcctctcagcctctctcacactcgatcttgtagcctctcaccctctcacactcttagcctctcacactctc

SEQ ID NO: 292515 - DNA, 472 bp, Unknown
  Bacterial polypeptide expressing nucleotide sequence isolated from the Sargasso Sea
tttggcggtaaaaaaaaatatatggataaactttcacctataggaccaatatatcatgcgggcacactctctggaaaccctattgcaatgacagcaggaattaaaacaatagaattattatcaagtaagaaatttcataaaaatttagaaaataaaacaaaaaaactaatgcatggaatccaaaatgctgcacataagtacaatattgatttatatgtgacttatgctgggggtatgtttggtttcttttttactaatcaagaaaaaataaaaaattataatcaagtaaaaagttgtaataatttaatgtttgaaaattttttcaaaatcatgctttcaaaaggtatttattttgctccatcctcttttgaagctggatttatttcaagtaaacattcgcaaaaagatataagcttcacaataaaatctgctgaagaggcttttaaagaaatatcaataatgaatttataat

SEQ ID NO: 292516 - DNA, 127 bp, Unknown
  Bacterial polypeptide expressing nucleotide sequence isolated from the Sargasso Sea
catgactgggtttagagtgtctcttggtggggctcaagaaatatatggaattaaaccggacattacaacattaggaaaagtaattggtggcggtctgccagttggtgcatttggtaggaaaaggtaa

SEQ ID NO: 292517 - DNA, 511 bp, Unknown
  Bacterial polypeptide expressing nucleotide sequence isolated from the Sargasso Sea
agtaagagcatttaagaatattgatggtaatccaatcttttttaaaaaagcaaaaggcccatatatttttgatgctgataataataaatatatagattacataggttcatgggggcctatgattatgggtcactctcatcctgaaattgtaaagtcggtttcaaaacagctcgagctaggcactagctatggagcccccacaagtattgaatcaactactgccaagcttataaaaaagtgtgtgccatcaataaaaaaaataagaatggtaaattctggaacagaagcaacaatgagtgcagtaaggctagctagaggttacacaaacagaaataaaattattaagtttgatggttgttatcacggtcatgttgattcattgcttattaaggcaggctcaggagtaacaacttttggcctacctgattctcctggaatcccaaaagagctggcaaaacaaacactaagttgtgaatttaataataaagatgaatttttaaaagatttttaa

SEQ ID NO: 292518 - DNA, 1276 bp, Unknown
  Bacterial polypeptide expressing nucleotide sequence isolated from the Sargasso Sea
atgaaaaaaattaatacccaagaagattggattaatagggctaaagaagtacttccagcggcaggttttggtaattttgaaaatgacataattattaaacgaggcaaaggtagtaaagtctgggatgaaaataataatgaatatattgattatctgattggttctggcccaatgcttcttggacatgggcatccagaggttatggaagcaatttttgaacagttaccaaatggtttaactttttttgcaaataattcaaagggtatagagttggctgaagaaatttgtaaagcagttaaatcctcagagcaagttcgctttgtcagctctggtggtgaagcagatatgtatgctataagattagcaagagcttttacaggaaaagataaaattataaaatttgagggtggttaccacggaatgagtgctgaagcacaaatgagtttatctccctcaaacttagttaattttcctcaacctgttcctgatagtgctggaatacctaaaaatattgaaaaagacatattaattgctccttttaacgatattgattttataaattccataattacagaattcaaagatgaaattgctggaataatagtagagcctcttcaaaggatcatacctccagagcctggatttcttgagggactaagaagcttatgtgataaaaataatattcttttaatatttgatgagattgttacaggtttcagattagcttatggaggagcacaagagaaatataatgtaacaccagatttatgtacacttgggaaaatcatagggggtggtttcccacttgctgcaattgcaggttcgtctgaaataatgtcacatttcgatcaaaataaagtaggaaaggataaatggttaatgcaaattggaacactttcaggaaatccaattgcttcagcggctgggttaaaaacaatggaagttctaagacgagaaaatatgtttgataaacttcgcaaatgcggcaatgaaattatgaattgtttaaatgagaatttaaaaaatgcaaatattggacatagaattgtaggtgatccaactttatttgatgttctttttttggatcaagatgttaaaaattatagagatacaaaaaaagcagacataaaacttaacgcattattcaataaaggtcttaggatgagaggaatttttaaatcatctgcaaaaatatatccaagcttagctatatctgatgaagacctttttaatacaaaaaaagcaatacacgatacagtgttaaatcttgtttaat

SEQ ID NO: 292519 - DNA, 148 bp, Unknown
  Bacterial polypeptide expressing nucleotide sequence isolated from the Sargasso Sea
atgtcaaaatcagatcagctgtttgaacaggcccgccagaccattccgggcggcgtcaactcaccggtccgcgccttcaatggggtcggcggcacaccccgcttcatcgatcacgccgatggcgcctacctctatgacgtggatggcc

SEQ ID NO: 292520 - DNA, 439 bp, Unknown
  Bacterial polypeptide expressing nucleotide sequence isolated from the Sargasso Sea
aatgaaatcttcaaatagagaggaaatagtcgatcacgacgcaaaaggactttttgatattgttttagatattgaaagttatccatattttattccttggtgttcagcaatgagaattcattcaaaaaataaaaatgaaatatatgctgatatggtcgtatggtataaatattttatgccccaaacttttggttctcacgtcacttttgataaaaaaaaactttcaataagtacaacttatattgaaggacctttaaaagaccttaaaactaattggatttttgaatcattaaaaaaaaatcaaacaagaattcattttaatgttgaatttgaatttaaacgattttttcaccaaaaaattgctgaagctttttttcctttaattgaaaacaaaatgattgaatcatttaaagttcgtgctgatgaaattttagattaa

SEQ ID NO: 292521 - DNA, 598 bp, Unknown
  Bacterial polypeptide expressing nucleotide sequence isolated from the Sargasso Sea
ttgatttttgacgaaatagtaactggttttaggttggcttacggcggtgcacaagagctttacggcgtagtgcctgatttatgcacacttgggaagatcattggaggtggcttacctctggcggctattgccggtgaaaaagaaattatgaatcattttgataaaaatattgttggcgaagaaaagtttactttccaaatcggcacccttagtggaaacccattggcagcagttgctggtttaaaaacgatggagatacttagaagagatggtgcttataataagataagagaaaacggacagtttttaatcgatagcattacaaaacattttaagagtaatagtatagagtttcaaattgttggtgatccaacacttttcgatataattttttctgaaacacctgttattaattaccgtgatacaaagaaaaataagactgaatattcaaaaactttcaatcaaatagttagagaactcggaatactcaaagccgatgccaaactttatacacaccttgcgcttaccgaagaagatcttcagaaaacagatagcgcatttaaaaaagcggctgagggcattgcagcaatatcctagt

SEQ ID NO: 292522 - DNA, 831 bp, Unknown
  Bacterial polypeptide expressing nucleotide sequence isolated from the Sargasso Sea
tcgatggcagtttccccgacagtgttcttgaggacacgattatctgtccttacaacaaaccagagatggctcgccagttgataaatcagcacgcctcagagattgccgccattattgtcgaacctattcttggttcaatgggaatgatcggagcgacacgggaatttctacaaactcttagagatgaagcaacagccaatgacattattctaatctttgatgaagtcattaccttgcgaatcaaccacggtggggctcaaaattacttcggcgtcacccccgaccttacctgtatgggtaagatcattggcggtggtcttcctgtcggcgggatcggtggcaaagaggaatttatgcaactgttcaatcccgaaagtagcaatccagttatgcatgccagcacgttttcaggaaatgccttgaccatgtccgcaggactacctgctatgagaatgtacaacgaggatgaatgcaaccgcatcaatttgcttgctgagaggttgcgtgacggattcaatcaggcatttgctgacgcgggaatactaggaaacgcggcaggagtcggatctcttacgaatattaacttcactgagggaatccttaatgattcacgtgattaccttgatggcttgttcaaggcaaaacatatcgggcagttacttcacttgggcatgctccgtcatggtgtcgcatcagcttcgagacttatgtattgcacgagcaccccgatgaccgcagcggatatagacacggcggtagctgcgctacagaattcactcgctgaattacgtccgtatgtcgaatccgaatgccctgagctgattatttaaa

SEQ ID NO: 292523 - DNA, 283 bp, Unknown
  Bacterial polypeptide expressing nucleotide sequence isolated from the Sargasso Sea
atgcctgggggtgtaaattcacctgtaagagcatttaggaatgttaatagtactcctatttttattaagagcgcctctggggcatatctacatgatgttgacgggaatgactatgtagactttattgggtcctggggtccaatgattttaggccacagtaatccaaaaataataaaagcaatcaaggatcaggctgatttaggaacaagttatggggctccaacagaagcagaaacatctataggcgagttaattagaacggtaaatgccctctatcgaaaaa

SEQ ID NO: 292524 - DNA, 781 bp, Unknown
  Bacterial polypeptide expressing nucleotide sequence isolated from the Sargasso Sea
gttgccagccgccggttttgggaattttgatccagcaatctttattcataagggaaaaggatctcgaatttgggatgagaatggaaaagaatacgttgattacctgcttggttcaggaccaatgcttttgggccatgggcatcctgaggtacttgaagccgtatatcagcaactcccaaaaggaatgacttttttcacaaacaacaccgctggagttgagttggctgaagaaatttgcttagctgttaaaagtgcggagcaggttcgctacgtctcgtctggaggtgaagctgatatgtatgcaataagactagctcgcgcttatacaggtaaagagaaaataatcaaatttgagggtggttatcatggaatgagttctgaggcgcagatgagtcttgctcctaatcgtttggctaattttccgcaggcggttcctgatagtgcagggattccagaaacagtaaggtccgaagtattagtagcaccctttaatgatctcgatttcgttcgttctttgcttttggagtatggggatcaggtcgcagcgattattgttgaaccattgcaacgtttaattcctcctgaacctgggtttttagagggattaaggcatgagtgcacaaaatcaggagttctattaatttttgatgaaatagttactggctttaggttcgcttatggcggcgcccaagagcattatggagttttcccagatatctgcacattaggtaaggttattggtggtggattccctttggctgcggtggcgagcagtaaagaa

SEQ ID NO: 292525 - DNA, 664 bp, Unknown
  Bacterial polypeptide expressing nucleotide sequence isolated from the Sargasso Sea
atgaatcagaacaaatcaaacgaactttaccaagtatcctctcaatattttcctggaggagttaattcacctgtaagggcattcaaaagtgttgatggaacacctttatttattaaaaaaggaaaaggagcctatattactgacgttgacggcaataaattcattgatttttgtgcttcatgggggcctctaattcttggccacaatcatcctaaaatcagaaaatcagttgtaaaatcttctaaaaacggtttatcctttggcgcccctacagttcaagaaaatgagctagctgaactcattatcaacaataataaatacattgaaaaaattcgatttgtaagttcagggacagaagcagtaatgagcgctgtaagacttgctagaggatatacaaaaagagaaaaaatcataaaatttgaaggatgttatcatgggcatgttgaccatttattagttaaagcagggagtggcttagttacttttggatcatcttcttcagcaggaattcctgaagcttttgtaaaagaaacattagttctaccattaaataataaggatgctgtagaacaagcatttaaggaatataaagatgaaatagcctgtataattgttgaacctattcctgccaacaatggtttactgttacaagaaaaagagtatc

SEQ ID NO: 292526 - DNA, 807 bp, Unknown
  Bacterial polypeptide expressing nucleotide sequence isolated from the Sargasso Sea
actggccctcagggctcgcaagggggtaaaacagggaagagataaaatccttaaatttaatggctgctaccatggtcatgtcgactctatgttaattaaggctggttctgggttagcagggacatccacagcaagctcaaaaggaatcccaaaaaatgtagccgaagatacactcatcttagacctaaacgatgaaaaagcccttgaagaatgctttgatatacacggcaaatcaattgcaggtgttattattgagccattgcccgcgaataatggtctccttatacaaaactctgatttccttaaaaaaataaacagcctctgtaaagcaaatgggagtcttcttatttttgatgaagtcatttccggattcagagttaacttttctggtatggcccacgatttagatatcacgcctgatattgtgacttatggaaaagttataggtgggggtcttcctgtaggtgcaatcgccgctaccagatctgttatggaaactcttgctcccgtaggagatgtctaccaagctggaacattgagtgccaaccctcttgcaatggtaggaggtttatctactctcaaacaattagacgaaaccacttacaaaaaagttgatgacaatgccttaaagattgaagaactttttagcgactggtttaaaagttatgaaaatggtaaattttctcattataaaataatcagatacaaatcgctcttctggtttgttcccaataactctaatctcaaatcaattgatgacattcctcaaaacctggcccaagaatttcttcctctctttgaaactct

SEQ ID NO: 292527 - DNA, 658 bp, Unknown
  Bacterial polypeptide expressing nucleotide sequence isolated from the Sargasso Sea
atgaaaactaaaaactccaaggagctattcaaaaaatctaaagaacatattgcgggaggtgtaaactctcctgtaagagcttttaaaagtgtgggtggtacgcctattttttttaaaaaatcgagaggttgctatctttatgatgaagatggcaacaaatatttagactttgttggctcttgggggccaatggtcctaggacattcaaataaagcaattgtaaatgctataaaaaaacaagcttccaaagcaattagttttggcgctccaacaaaaaatgaattagaaattgcaaaaataataaagagttatatccccagcatagaaaaacttcgtatggttaattcgggtacggaagctactatgagctgtataagattagcgagaggtacaactggtagaaaaaaaataattaaattcattggttgttaccatgggcacgtggattccttattagtaaaagctggatcaggtgctgcaacacttggtgtgccagactcgccaggaattccggatgaactctctaaattaacaattacacttgaatacaataatgcttctgaactcaagaaggcttttacaaaatttggagaagatattgcagcagtgatagttgaaccaattgctggaaacatgggatttattgaacctagatgaa

SEQ ID NO: 292528 - DNA, 127 bp, Unknown
  Bacterial polypeptide expressing nucleotide sequence isolated from the Sargasso Sea
ctcgagcggggcgtgtatctggccccatcggcctttgaggcgggattcacctccctggcccactccgaagcagacattgaggccacagtcaatgctttccgcgagagcttcgcggaggtggcctgat

SEQ ID NO: 292529 - DNA, 589 bp, Unknown
  Bacterial polypeptide expressing nucleotide sequence isolated from the Sargasso Sea
atgaataatataaataaatctatagaatttttctcagaagcaaaaaaacatctacctggaggtgtaaattctcctgtaagagcttttaaaaatattgatggaaatcccattttctttaaaaaagctaaaggcgcttatgtttttgatgcagataataatgcttatattgattatatcggctcatggggccctatgattatggggcattctcatccaacaataataaaggctatttcaaaacaattaaaattaggtacaagctatggagcacctacaagaatagagtcagaaacagctgatctgattaaacaatgcttcccatcaattaaaaaaattagaatggttaactcaggcaccgaggcaacaatgagtgctattagactagcaagaggatttactaaaagaaataaaataattaaatttgatggttgctaccatggtcatgttgattcactgttaataaaagcaggttcaggggtttcaacatttgggcttcctgactctcctggggtcccgactcaattagccaaagaaactttaagttgtgaatttaataatcaagatgggctttctaaaagttttgagaaaa

SEQ ID NO: 292530 - DNA, 364 bp, Unknown
  Bacterial polypeptide expressing nucleotide sequence isolated from the Sargasso Sea
attgacaaaatttttacttatttataagttagaacatgacaaaatttttctcagagtttcttttattaaaattgtgactgacatattaaattgcacccaatcagaagaagttttctccgctgcccaagaattaatgcctggaggggttagctctccagttagagctttcaagtctgtaggggggcagcccattgtttttgatagagttaaaggcccctttgcttgggatatcgatggaaatagatatatcgactatataggaagctggggtccggcaatatgtggacatgcccaccctgaagttacaacagcactacaggaggcaattgagaaaggtaccagctttggagctccatgcgtttta

SEQ ID NO: 292531 - DNA, 196 bp, Unknown
  Bacterial polypeptide expressing nucleotide sequence isolated from the Sargasso Sea
cctgttagaaacttgtgaggaagccaaatcttctgacactgaactattcagtaaaattcatagactgatgcttcaaaagggtgtttatctagctccaagtgcatttgaagctggttttacatcacttgctcattctgaagatgatataaatgcgacaataaaagcttttcaagaaatcttctctgaaatctcataa

SEQ ID NO: 292532 - DNA, 574 bp, Unknown
  Bacterial polypeptide expressing nucleotide sequence isolated from the Sargasso Sea
catggagaaaataatgagtgcatttgaagcggccaatgatgttttggttggtggcgtaaatagtccggttagggcgtacaaatctgttggtggagaacctgtgtttttaaagtcaggtaaaggcgccgaggtaactgcaattgataatcaaacttacattgattatgtgctttcttatggcccattattggcgggacatgcgcctgaaagtgtgttatccgatattcataacactatgattaaaggcaccacgtttggtgctccaactgaaaatgaaacacaacttgcaaaatccattcggtcattttttccttcatgtgaaaaagtcaggttggtgaattcagggactgaggcaaccatgagtgccattcgtttagctcgaggagcaacaaaacgtgatgttattgttaaatttaatggttgttatcatgggcatgtggattcactcttggttgccatggggtctggggggttaaccttagggaagccaagtagtgccggtattccagatgatgtaaccaagcacacacgtgtattggagtacaatgataccgattctttaaccgctttattt

SEQ ID NO: 292533 - DNA, 760 bp, Unknown
  Bacterial polypeptide expressing nucleotide sequence isolated from the Sargasso Sea
atgaatttatcagcgcaagctcgtcaagtgataccaggaggagtcaattcccctgtgagggcagccttgcaagtgcagagccacgcattgtatttacaatctgcccaaggcgcctatgtgacagatgagggcgggcgagattatattgattatgtcaatggttatggccccgttattctcgggcatgctgatgcgggattacaagaggttatccaagacacggctcgccgaggttgggtgcatgggcattgtcaccgtgctgagattgaattggccagtttgttgacagatatcattccaggcattgagcaagtgcgattaatgaactctgggacagaggcagtgatgacggctgtaagattggccaggggagccaccaaccggacaaaaatcattaaatttaaaggacattatcacggtcatgcagatactttgatgcctcaagagtctcttgagcctgctgtgatcaatggggtgccgcgttccgctactgaagagacaatagtcgctgggtttaatgacctgaactcagtcaagcggttatttgaagctcatcatgcaaacattgcaggggtgctcattgagccgattgcaggaaatatgggtatgatttttgccgatcatgatttcatgaccggccttagagaactctgtgatcagtacggggctttgctgatttttgatgaagtgatgacaggttttcgtgttgggttaacaggtgcggcaggtcattacgagtgtcagcctgatctcaaagttt

SEQ ID NO: 292534 - DNA, 427 bp, Unknown
  Bacterial polypeptide expressing nucleotide sequence isolated from the Sargasso Sea
atcttgctccaatggtcctgtttaccaagcaggtaccttatctggaaatcctttagcaatggcggcaggttctacattaataaaattattaatcaaatcaaatccttacaaaaatctcgaactcaaagcttcaactctcttaagtcagatgaaagatctattccttaatagagacataccctttactacaaaccaaattggaggaatgtttggtttctttttttcaaaagaattaccaaataatttcaaagatgttgagaattcaaatgatattcactttaaaaaatttcttaatagatgtatggcaaatggtatttattttgcgccatccaaatttgaggcaggttttatttctacaaaacatactaataaagaaataaatcatacaataaatgttgttaaaaagattttggatgagggaatgtaa

SEQ ID NO: 292535 - DNA, 610 bp, Unknown
  Bacterial polypeptide expressing nucleotide sequence isolated from the Sargasso Sea
agaacttggaattgttcttatatttgatgaaattcaaagttttagagtatcttcaggaggtgctcaagaatcatttggtataactcctgacatgacaactcttggaaaaataataggagggggactgcctgtaggagcctttggagggaaagatgaaataatggaattatttgatcctacaagttctaattatgatattgcccatgctggaacatttaacggtaatccactaactatggaagctggagttacagtaatggaaaaccttactagtgataattttgaaaaaatgaataatttgggagatagccttagaagtaagctttcttcagtatttaatgaaataaacttagatgttcaagttacaggttatggatctctttttgggatcaactttaatgaaaataaaataaaagactatagatcatttctaaataataattcagatatgacaaagattttattttcatacttaagaaataaaggaattttacttcaacttaaaaatgcaggtgcattaaatatattgatgactgaaaaagaaatagattacctagttgattcgactagagaaatatcttcagaaatgaaagatactttagatgaataa

SEQ ID NO: 292536 - DNA, 868 bp, Unknown
  Bacterial polypeptide expressing nucleotide sequence isolated from the Sargasso Sea
tgtagattctttattagttaatgcaggctctggttctgccacttttggcgttccctcatcacccggtataccaaaagatttaactaaacatacatattctcttgaatataataatattcatgatgttgaaaattgttttaaaaaaaatggtgaaaaaatagcttgcgttatagttgaaccgattgcaggtaacatgaattgcgtattgccagatttaaaatttataaaaaaattaagagcgctatgtaataaatataaatctattctaatcttcgatgaggttatgactggtttcagagtttcaaagggtggagctcaagagttttttggagtacatcctgatataaccacacttggtaaaattgttggaggtggtatgcctgttggagtttttggtggtaaaaaaaaatacatggataaactttctccaataggacctatatatcatgctggaacactctctggtaatcctattgcaatgacagcaggaattaagacaatagaattattatcaagtaaaaaatttcataaaaatttagaaagcaaaacaaaaaaattgatgaatggaattcgtgatgcagcaaataaaaataatattgatttatatataacttatgctgggggaatgtttggtttcttttttacagatcaaaaaaatataaaaaatttcaatcaagtaaaaaaatgtaatagcctgatgtttgaaaattttttcaaaattatgctttcaaagggtatctattttgctccatcttcttttgaagctggatttatttcaagtaaacattcacaagaagatataggttacacaataaaatctgcagaagaggcttttaaggaaatatcaaaaaaaaaattatactattga

SEQ ID NO: 292537 - DNA, 535 bp, Unknown
  Bacterial polypeptide expressing nucleotide sequence isolated from the Sargasso Sea
tctgaaattatttaaagaagccaaattacatattcctggaggtgtaaattctccagtaagggctttcaaaaatattaatgggaatcctatattttttaaaaaagcaaaaggttctaaactttttgatgaagataataatgagtatatagattacataggatcttggggtcccatgataatgggccattctcatccaaaaattataaaagccatatccaaacaagttaaattaggaactagttacggtgctccaactagcatagagtcaaaaactgctgaactaataaaaaaatgcattccttctattgaaaaaataagaatggttaattctggaacagaagcaactatgagcgctataagacttgcaaggggttttactaaaaaaaataagattattaaatttgatggttgctaccatgggcatgctgactctttattgataaaagcagggtcgggagtgtctacttttggattgcctgattctccaggagtgcctcctcaacttgcaaaagaaacattaagttgtgaatttaat

SEQ ID NO: 292538 - DNA, 406 bp, Unknown
  Bacterial polypeptide expressing nucleotide sequence isolated from the Sargasso Sea
tatgaatcaaacacgttcgcaagaattatttaatcgctcccaaaaattgatgccaggaggagtaaatagccctgtaaggtcttttaatggtgtgggaggagtaccccctttcatcgcaaaaggacttggatcaaaagtttgggatgttgacgggaacgaatatttagatttccttggttcctggggacccctaattcttggacatgcaaatccagtgattgtagatgcgattaggtcagctgctcttgaagggactagctttggagcacctactgagaaagaacttttgctagccgaattaatttcaaccgctattccgtctatagaaatgctgcggctagtgagctctggaactgaagccactatgagcgcaattcgcatagctcgtgcatataccaatcgaaac

SEQ ID NO: 292539 - DNA, 376 bp, Unknown
  Bacterial polypeptide expressing nucleotide sequence isolated from the Sargasso Sea
ttgagtaaaacgaataaatctaagtctctttttaataaagcaaaatcggtaatgcctgggggtgtaaattcacctgtaagagcatttgggaatgttaatagtactcctatttttattaagagcgcctctggtgcatatctacatgatgttgacggaaatgattatgtggactttattggatcctggggtccaatgattttaggccacggtaatccaaaaataataaaagcaatcaaggatcaggctgatttaggaacaagttatggggctccaacagaagcagaaacatctataggcgagttaattagaacggtaatgccctttattgaaaaaattagaatggtaaattctggaacagaagcaacaatgagttgca

SEQ ID NO: 292540 - DNA, 595 bp, Unknown
  Bacterial polypeptide expressing nucleotide sequence isolated from the Sargasso Sea
aatgaccgacactcgtgggctcagccataacgcctttacacgcgctcagcaacttattccaggtggagtaaattctcctgcgcgagcattcggagctgtcggtggcgaaccgatattttttcaggcaggccaaggggcttatcttacggatatcgatggccacaagtaccttgattacatcggctcgtgggggccgatgattcttggccaccgccatccgcgggtcgttgcggccattgaaaaggccctctcttgtggcacgagctacggtgctccaacggaggcggagagcggccttgccgagcagataattgaggcggttcctagtatcgaaaaagtccgaatggtgagttctgggaccgaggcagctatgagtgccgttcgacttgctcgcggtgcgactggtcgcgagggtattataaaattcgccggcaattaccatgggcatgctgatagtctgctggtagctgcgggatcagcagcggcaacactcgggattccggattcccccggtgtcacagcagggacagcaaaagacacacttgttcttgaatacaatgacaccgcagctctggttgaaatatttgagaagcga

SEQ ID NO: 292541 - DNA, 721 bp, Unknown
  Bacterial polypeptide expressing nucleotide sequence isolated from the Sargasso Sea
atgaaaaatataaagaattcaaaaaatgttttcaaacaagcattaaagtatatgcctggtggggttaatagtcctgtcagatcatttagtgcagtcaaagaggatccaaggtttataaaaagatcttttggtgcatatatcgaggatatcgataacaatatatatatagattatatatcatcttttgggccactaatttttggtcatgggaaaaaagagatcatagatgctgcaaaaaatgctcttgattttggtaccacatatggcgcttgtcacatgaaagaagttaaacttgctaaaataatttcaaaattaatgccttcaatggaaatgttaagacttactagctctggaactgaagcaactatgagcgcaattagggcggcaaggggtttcaccggaaaagataaaattattaagtttgaaggatgctaccatgggcatatcgaccatttattagtgtcagctggctctggagcctcgacttttggagaagccttttctaaaggagttcctaatgactttataaaaaacaccctaattgcggattttaataatttaaatcaagtaaaaaaaattatatatgataataaagacgagattgccgcaataattatggaacccataccagcaaatatgggactagtcctgccgaatgacaattttgtacaagaaataagaaagatttgtgatgaaaaccgaaatagttttaatttttgat

SEQ ID NO: 292542 - DNA, 433 bp, Unknown
  Bacterial polypeptide expressing nucleotide sequence isolated from the Sargasso Sea
aatggtagctcctgcaggacctgtttaccaagcaggcactttgagcggtaatccactcgcaatgactgctggaataaaaactcttgaattactcaaacaagacggtacatacgataaacttgattcaataacttctagattaattgaaggaataattcaatctgcagaaaataatggtatagctatcaatggtggaagtgtaagtgctatgtttggttttttcttatgtgatgggccagttagaaactttaatgaagccaaaacaaatgatgcccaactttttggtaaattacatagagaaatgcttcaaagaggaatttacttagccccaagtcctttcgaagcaggcttcacatcactagctcacagcgaagaagaaattgataaaactatcgaggcttttgaccaatctttcaatgaaataaaaaaataa

SEQ ID NO: 292543 - DNA, 369 bp, Unknown
  Bacterial polypeptide expressing nucleotide sequence isolated from the Sargasso Sea
tagcgcaaatggaagccctgtgtgaagaaggtctgtatgaaaccctaagcgcgaaaaccaaacgtatcgccgaaggttttaaagccgcggccgacaaacacggcatcccaatggccatcaactatgtcggtggcatgttcggcttcttctttaccgagcaagagcagatcacgcgcttcgaccaagtgactaagtgcaatatcgaacacttccgcactttctatcacggcatgttagatgaaggggtttacttagcaccgagcgcctatgaagcaggcttcctgtcgatggcccatggcgaagaagaactgcgcctcacgctagaagcggctgaccgtgtattaggtcgtatgaaagcggcaatgtaag

SEQ ID NO: 292544 - DNA, 642 bp, Unknown
  Bacterial polypeptide expressing nucleotide sequence isolated from the Sargasso Sea
tatgaaaacaaaaaaatcacaagatttatttgaaaaatccaaacaccacatagctggaggagtaaattcacccgttagggccttcaaaagtgtaggaggaacacctatattttttaaaaaatctagagaatgttatttatatgatgaagatggaaataaatatctagattttgttggctcgtgggggccaatggtactaggtcactcaaacaagaatatagttaatgctatcaaaaatcaggcaagcaaaggaataagttttggagcacccactaagaatgaattagaaattgcaaaaataataaaatcctatttaccaagcatcgagaaactgagaatggtcaactctggcacggaagctactatgagttgtatcaggttggctaggggaactaccaacaaaaagaaaataataaaatttattggttgttatcacggacacgtagattcattactagttaaagctggttcgggattagcaaccttaggagtacctgattcacccggaatacctgaagaattatcacaactaacaatatcacttccttataatgatattccagctctcgataaagcattcaaagaatatggcaatgatatagcagcagtaataatagaaccaattggcgggaaatatgggtt

SEQ ID NO: 292545 - DNA, 769 bp, Unknown
  Bacterial polypeptide expressing nucleotide sequence isolated from the Sargasso Sea
atgaacaatattagaaatagagctcttaatgcatttacaggaggaatctctaatggtgaatttggagtagaagcagaagatattatagtgatagctcgtggtaagggctgtaaattatgggatacttcaggaagagaattcattgacttttctatggcatggggttcatgtttagttggtcattctagaccagaagtagtggatgcagtgagtaagcaagcgcctatgggttctaattttgcacacctcaataataatgtactagaatttgctgaagagatacaatcgatcagtccagcagctgaaaaattgagattctgtgcttcgggcacggaagctaacatgtattgtcaacgtgttgctcgaggttataagggacgcaataaaattcttaagtttgaaggagcttatcatggagccgatgagactggtgttacaagtttatttcccaaacaaatgcttgactatcctacacctgaacctaccagtgctggagtattagatatagataaacttttacttgtagctccctataataacttatcaactgctcaagaaataattgaaaaacataaaaatgatattgctgctgttattgttgaacctttgcaacgttgtataccacctgagaaaggttttttagaaggccttagaaaaatatgtactacaaataatttattattaatttttgacgaggtggttacgggctttaggctcgcgtatggaggtgcacaggaatactatggtgttgcacctgacctaatagcct

SEQ ID NO: 292546 - DNA, 594 bp, Unknown
  Bacterial polypeptide expressing nucleotide sequence isolated from the Sargasso Sea
tctgaaattatttaaagaagccaaattacatattcctggaggtgtaaattctccagtaagggctttcaaaaatattaatgggaatcctatattttttaaaaaggcaaaaggttcgaaactttttgatgaagataataatgagtatatagattacataggatcctggggtcccatgataatgggccattcgcatccaaaaattataagagccatatccaaacaagttaaattaggaactagttatggtgctcctactagcatagagtcgaaaactgctgaactaataaaaaaatgcatcccttctattgaaagaataagaatggtcaactctggaacagaagcaactatgagcgctattagacttgcaaggggttttactaaaaaaaataagattattaaatttgatggttgctaccatggacatgctgactctttattaataaaagcagggtcgggggtgtctacttttggattgcctgattctccaggagtacctcctcaacttgcaaaagaaacattaagttgtgaatttaataattcaaaagactttttaaaaatttttgaaaaggttaagaatgatttagcagcagtcat

SEQ ID NO: 292547 - DNA, 438 bp, Unknown
  Bacterial polypeptide expressing nucleotide sequence isolated from the Sargasso Sea
tgtcaatggtggccccttctggaccagtttatcaagcaggtacattgagtgggaatccactggctatgactgctgggataaaaactcttgagctactcaaacaagaaggtacttacgaaaaactagagttaacaacttctagattaattgaaggtataattcagtctgcagaaaacaatggaattgctattaacggtggcaatgtaagcgctatgtttggatttttcttatgtgatggaccagttagaaactttgatgaagcaaaaacaaataatgctgaactttttggtaagttgcacagagagatgcttcaaagagggatttacctagctccaagtccttttgaggctggtttcacgtcactagctcatagtgaagaagaaattgataaaactatcgaagctttcgatcaatcttttaatgcgataaaagagtaat

SEQ ID NO: 292548 - DNA, 457 bp, Unknown
  Bacterial polypeptide expressing nucleotide sequence isolated from the Sargasso Sea
tttggtaggaaaaggtaagattatggattatcttgctcctaatggtcctgtttatcaggcaggtactttatcagggaatcctctagcaatggcggcaggttcaacattaataaaattactaattcaatccaatccatataaaaatctagaacttaaagcttcgaatctcttggatcagatgaaagacctattccataataaaggtatacctttttctactaatcaaattggaggaatgtttggtttctttttttcacaaaagttaccaaataatttaagagatgttgaaaactcgaacgacacccaatttaaaaaatttcttaataaatgtatgactaatggtatttattttgcgccctcaaaatttgaggcaggttttatttctacaaaacatactaacaaagaaataaatcatacaataagtgttgtaaaaaaaatcttagatgagggaatataa

SEQ ID NO: 292549 - DNA, 712 bp, Unknown
  Bacterial polypeptide expressing nucleotide sequence isolated from the Sargasso Sea
ttgagtaaaacgaataaatctaagtctctttttaataaagcaaaatcggtaatgcctgggggtgtaaattcacctgtaagagcatttgggaatgttaatagtactcctatttttattgagagcgcctctggggcatatcttcatgatgttgacggaaatgattatgtagactttattggatcttggggtccaatgattttaggtcacagtaatccaaaaataataaaagcaatcaaggatcaggctgacttaggaacaagttatggggctccaacagaagcagaaacatctataggcgagttaattagaacggtaatgccctcaatcgaaaaaattagaatggtaaattctggaacagaagcaacaatgagctgcataaggttggctagaggatatacaggtcgcaacaaaattattaaatttactggctgttatcatggtcatgtagattctcttcttataaaagcaggttcaggagtatcgacttttgggctacccgactctccaggtatacctgaagaacttgcaagacataccataagtgtcccctacaatgacataaatgcttttttagaagtctttgagtcaattaaaagtgagcttgcggcagtcataattgaaccaattgctggaaatatgggttttattcccggagataaagattttttagaaactctgagaaccaaacacatgaaagcggttcagtattaat

SEQ ID NO: 292550 - DNA, 999 bp, Unknown
  Bacterial polypeptide expressing nucleotide sequence isolated from the Sargasso Sea
gcctgtgagagcatttaaaaatgtcgacgcaaaacctattttttttaaatctgctaaaggtccaattttaattgatgaggatgataatcaatatatagattttattggttcctggggacctatgatccttggacattcaaatccagttgtattgaatgctataagagctcagcttgagcttggaacaagttatggcgccccaacaagtcttgaaagcatgcttgcaagtctaattaagagccaagtcccaactatggagaaattaagaatggttaattctggcacggaagcaaccatgagttgtattaggctagctagaggctacaccggtaaggacaaaattattaaatttactggttgttatcatgggcatgtagattctttacttgttaaagcaggttctggagtctctacttttggattaccagattctccaggaataccaagtaaattagctgcgctcacatacagctgtccctacaatgatatagaggcggtatcagaagttgtaaatgaaataggtggtgatttagctgcaattattgttgagcccattgcaggcaatatgggattcattcctggagagcataaatttctctcaactttacgagaactctgtaataaatctgaatctttgcttatttttgacgaagtaatgtctggttttagagtggcgcttggaggggctcaatctatctattcgattaagcctgatcttactgctcttggtaaagttataggtgcagggttaccagttggatcttttggaggaaagcagtccattatggatcaactcgctccaataggtcccatctatcaagctggaacattatcaggaaatccattggctatgagcgccggagtagccctgcttgaagctgtaatcaatttaaacccatttgataaactgcaaatagcttcttcagagataatgctgcatataaaaaatctcatgagtgaaaaaggcatgccattttcaacctcctcaatcggtggaat

SEQ ID NO: 292551 - DNA, 691 bp, Unknown
  Bacterial polypeptide expressing nucleotide sequence isolated from the Sargasso Sea
ttcgggagttatactcgagcctattgtaggtaatgctggatttattactccagagcctggattcttggaaggattaagagaattaaccactgagaacggatccttattagtttttgatgaagtaatgactggattcagaataagttatggaggcgctcaagaaaaatttggggttactcctgatttaaccacccttgggaaagtaattggtggaggcctacctgttggagcttatggagggaagaaagaaataatgtcaatggtagctccttcaggtccagtttaccaggcaggtactttgagcggtaatccacttgcaatgactgctggaataaaaactcttgaactacttaaacaagatggtacatacgataaacttgattcaacaacctctagattaattgaagggataattcagtctgcagaaaataacggtttcgctatcaacggtggaagtgtaagcgcaatgtttggtttcttcttatgtgatgggccagtcaggaactttgatgaagccaaaacaaatgatgccgaactttttggtaagttgcatagagaaatgcttagacgaggaatttacctagcgccaagtcccttcgaagctggtttcacatctctggctcacagcgaagaagaaattgataaaactatcgaggcttttgacgaatcttttaatgcaataaaaaaataa

SEQ ID NO: 292552 - DNA, 924 bp, Unknown
  Bacterial polypeptide expressing nucleotide sequence isolated from the Sargasso Sea
agggccatatctaatagacgcagataataataagtatattgactatattggctcatggggccctatgattttaggacattcaaatccaaagattattaaagccgtttctagacagttagagcttggaaccagttatggggctccaacaagtattgaatctgatacagcaaagttaattaagaaatgtttcccttctatccaaaagattcgaatggttaattcgggtactgaagcaactatgagtgctattagacttgcgaggggatatactaataaaactaaaattattaaatttgacggttgttaccatggtcatgtagattcgcttttaattaaagctggatcgggcgtcagcacatttggtttacctgattctcctggtattccaaatgaattagcaaagaaaactttaagctgtgaatttaataataaagatagtttcttaaaaatctttaataaagtaaaaaatgatcttgctgcagtgattgttgaaccaattgctggaaatatgggatttgttcctggcgataaatcatttttaaagttattaagaaaaaaaacctctgaaaataattctttgttgatttttgatgaagttatgacaggttttagagtgtctctaggtggagctcaagaattatatggaattaaacctgacttaactacgctaggaaaagtaattggaggtggacttccagtgggagcttttggtggaaaaaagaaagttatggattgtcttgcacctaatggaccggtttatcaggcaggcactctttccggaaatcccttagcgatggcagcaggatcaactttaattaaacttttagtagataagaatccatataaagatcttgaaagaaaagctaaaaatctcttagagggtatgaaagaaatttttgatagatatgatatcccattctctac

SEQ ID NO: 292553 - DNA, 844 bp, Unknown
  Bacterial polypeptide expressing nucleotide sequence isolated from the Sargasso Sea
tatgtttttagtaaaagcaggatcaggtgtagccactctgggtttgcctgattctccaggcgttccacggacaacaactgccaacacacttactgctccctacaatgaccttgaagcagtaaaaaaattattttctgaaaatcctgatgccatttcgggggtcattcttgagcctatcgttggtaatgctggatttattactccagaacctggattcttggagggattaagggaattaaccactgagaatggatccttattagtttttgacgaagtaatgactggattcagaataagttatggaggagctcaagaaaagtttggggttactcctgatttaacaacccttgggaaagtaattgggggcggcctgcctgttggagcttatggaggcaagaaagaaataatgtcaatggttgccccctcagggccggtataccaagctggcactttgagcggcaatccactcgcaatgactgctggaataaaaactcttgaactgctcaaacaagatggtacgtacgataaacttgattcaacaacttctagattaattgaaggaataattcagtctgcagaaaataacggtattgcaattaacggtggaagtgtaagcgctatgtttggatttttcttatgcgatgggccagttaggaactttgatgaagcaaaaacaaataatgccgaactttttggtaagttgcatagagaaatgcttcgacgaggaatttacctagccccaagccccttcgaagcaggtttcacatcactagctcacagcgaagaagaaattgataaaactattgaagcttttgacgaatcttttaatgcaataaaaaaataa

SEQ ID NO: 292554 - DNA, 604 bp, Unknown
  Bacterial polypeptide expressing nucleotide sequence isolated from the Sargasso Sea
tgtgatgaatataattccctattgatttttgatgaagttatgactggattcagactttctttaggaggagcacaggagttgttaaatgttaaaagtgatattgtaacatttggaaaagttattggaggaggtttacctgttggagcttttggtgcaagaaatgaaattatgagtcatttggcaccagatggacctatataccaggcaggtactttaagtggaaatccattagctatgatagcaggattaacaacattaaaaattttaaaaaataattccagcatatatgaaagtttaaatgccaaaacaattacccttcacaaagaaatgaaaaaacgtttagaaaaaaagggaattagttactggataaatagtattggatcaatgatctcattgcactttactgaaaatgaagttattgattttaaaacagctagtatggcagataatgagatatttaaaaaatattttcatgggatgttgaacaatggaatttatcttcctccaagtcaatttgaaagttattttttaaatgactctctgagctacagagatattgattttacattaaatgcttttgataaggttttaagatctttataac

SEQ ID NO: 292555 - DNA, 841 bp, Unknown
  Bacterial polypeptide expressing nucleotide sequence isolated from the Sargasso Sea
tccatgtgtccttgagaataaacttgctgaaatggtaatagaagctgttccttcagtcgaaatggttaggtttgtgaatagcggaaccgaggcttgtatggcagtcctaaggctaatgagagcgtttactggaagggataaggtaattaagtttgacggatgctatcacggacatgctgatatgtttttagtcaaagcaggttccggtgtagctacacttggcttgccagattctccaggtgtccccaggactactacagctaatacactaactgctccttacaatgatcttgaagctgtaaaaaaattattttctgagaatcccgacgcaatatcaggagtgattcttgaacctattgtcggtaatgcaggatttattactcctgagccaggtttccttgaaggattaagagaacttacaacagaaaatggctctttgttagttttcgatgaggtcatgactggtttcagaattagctatggcggtgctcaagaaaaatttggtgttactcctgatttaacaactcttggtaaagtaataggagggggattgccagtaggtgcttatggaggaaaaaaagaaataatgtccatgattgcaccatcaggacctgtataccaagccggaacattaagtggaaatccattagcaatgacagctggaattaaaactcttgaattacttaaacaagaaggtgcttacgagaaactagaagcaacaacctctaggttaattgaaggtatcattcaatctgctgagaacaatgggattgccattaatggtggcagcataagtgctatgtttggattctttttatgtgaaggacccgtaagaaacttt

SEQ ID NO: 292556 - DNA, 791 bp, Unknown
  Bacterial polypeptide expressing nucleotide sequence isolated from the Sargasso Sea
aatgaagtttaagagaagtatagaagcttttgataaagcaaaatcctttattcctggtggagtaaattcacctgtaagagcatttaaaagtgttaacatgaaccctgttttctttaaaagtggaaaaggaagtaaaatgattgacattgacgataatgaatacatcgattgtgtatcatcatgggggccattgatttttggtcatgctaacagagaaataattgattctgtaattaatgctagcaagaatggaacaacttatggtgcatcaactgaaatagaaaccctagttgcaaaaaaaataattgatatggtcccatcaattgataaagtaagaatggtaaactcaggaactgaagcaacaatgagtgccattcgtctagctagaggctataccaaaagagagaaaatcataaaatttgcaggcaattatcatggtcatggagatagtttcttaattaaagctgggtcaggtgcagtgactctaggacttccagacagtcctggtgttacaaaaaatattgcgaaagacacactcattgcaaattttaacgacataaattcagttgaaaaattatttagtgagaatcaagatgaaatagcagcaattatcgttgaaccaattgctggcaacatgggtctagtaaaaccaatagataactttttacaaggactcagagatctgtgtgataaaaaccagtcagttcttatatttgatgaagtcatgaccggatttagagtttctaaaggtggtgcacaacagatttttgggagtttatcccgatattaca

SEQ ID NO: 292557 - DNA, 625 bp, Unknown
  Bacterial polypeptide expressing nucleotide sequence isolated from the Sargasso Sea
ttagaaggcttaagggaggtaacacaagagaacggagctcttttggtttttgatgaagtaatgactgggtttcgaatcagctatggaggcgctcaagagcgtttcggagtgactcctgatttaactactatgggtaaagtaattggtggaggcctccctgtgggtgcatatggcggtcgcaaagaaattatgtcaatggtttcacctgcagggccaatgtatcaagcaggtacattgagcggtaatcctctcgccatgacagcaggtataaaaactcttgagctccttaaacaagaaggcacctatgaaagattagaagcgatgaccaaaaaacttttagatggaattatggcggctgctaaagaatcaaatatatccatccatggccagagtattagtgcaatgttcggtttttatctatgtgaaggcccagttagaaactttgaagaagctaaatcagctgatacagatagtttcagcaagcttcacagactaatgctacaaaaagggatttatctagctccaagtgcatttgaagcaggtttcacttcacttgctcattcggaggatgacataacttcaacaataaaagcttttcaagaaagcttctcggaaatttcttaaa

SEQ ID NO: 292558 - DNA, 816 bp, Unknown
  Bacterial polypeptide expressing nucleotide sequence isolated from the Sargasso Sea
aatgaaattatcaaagtctcaaaacctttatgaacgagcgagaaaatttatacccggcggagtcaactccccagtgagagcatttaaaggagtgggagggaaccctctgttctttcgcgagggcaccggaccttacttgatcgatgcagacgataaccgctacatcgactatgttggagcctttggtccactaattttgggccacagtcatgaacacatactcagtgctattgaaaatcagctaaaaagaggcattagctttggtgcttcaactgaagccgaaattgatattgcagagaagatttgtaagcatgttcattcaatggacgaggtaagattagtaacttctggcactgaagcgaccatgagcgccatcaggctcgcgagaggattcactaacagagacaaagttgtaaagtttgagggctgctatcacggacatgtagacgggttgttagtaaaggcaggttcgggcgctctaactatcggagaaccagattctttaggcgtaccaaatgcgtatactgatttaactcatgtcctgccctacaacgacacagaagctattgagcagtatttctataaacacggtaaagaaaccgcttgcgtgattgttgaaccaatagccggcaacatgaattgtgttcttccagatgtggggtttctggaagctctaagggaacaatgcacattaaatgagtccgtgttaatttttgacgaggttatgaccggtttcagagtagctcttggtggagctcaatctatatttggtgtggtgccagacataacaaccctcggtaaagtaatcggtggtgg

SEQ ID NO: 292559 - DNA, 588 bp, Unknown
  Bacterial polypeptide expressing nucleotide sequence isolated from the Sargasso Sea
catgcagatcaaacaatctacaaagttattttctctagcccagaaaagactccctgggggagttaacagtcctgtccgtgcttttaaatctgtaaacatgactcccttattcattaaaaggggacaaggatcaaaactctttgacaaggatggtaacgaatatattgactacgtgggttcgtggggaccaatgattcttggacacgccaacccgaaagttgtcagtaaacttaaagaaactctggacaatgggacttcttttggtgcaccaactgaaggtgagattttgttagctgaaatgatatgtgaagcagtaccaagtgtggaaatgattcgccttgtaaattcaggttcagaagcagccatggcagttctgcgtttggctcgcggttatactgaacgagataaaatagtgaaatttgatggctgctatcacggcagtattgaccctcttcttgtaaaggcaggttctggagcaatgacattaggaattccagactctccgggagttccgctttcttttgtcgaacatacacttcaggctaaattcaacgatctggactcagttattagaattacagaagaaaa

SEQ ID NO: 292560 - DNA, 568 bp, Unknown
  Bacterial polypeptide expressing nucleotide sequence isolated from the Sargasso Sea
atgactggattcaggataagttatggaggcgctcaagaaaagtttggagttactcctgatttaaccacccttgggaaagttattgggggaggcctacctgttggagcttatggaggcaagaaagaaataatgtcaatggtagcgccttcagggccggtataccaagcaggtactttgagcggcaatcctcttgcgatgactgctggaataaaaactcttgaactgctcaaacaagatggtacgtacgataaacttgatttaacaacttctcgattaatcgaagggataattcagtctgcagaaaataacggtatcgctatcaatggtgggagtgtaagtgctatgtttggatttttcttatgtgatgggccagtaaggaactttgatgaagccaaaacaaatgatgccgaactttttggtaagttgcatagagaaatgctgcaacgaggaatttatctagcgccaagccccttcgaagctggtttcacatcactagctcacagcgaagaagaaattgataaaaccatcgaggcttttgacgaatctttcaatgcaataaagaaataat

SEQ ID NO: 292561 - DNA, 531 bp, Unknown
  Bacterial polypeptide expressing nucleotide sequence isolated from the Sargasso Sea
aatggcagcattagttgttgagctagctccaaatgtagataaggttagatttgttaactcaggaacagaggcttgcatgagcgcagttagattggctagaggttatacaggaagggataaaattattaagttttcaggatgctatcatggacatgcagatccatttttaattcaagcaggaagtggtgcttctacatttggtatgcccaacagtcctggtgttactccatcaagcgcaaaagataccctcatagcagattacaataatatagaacaagttagtagcttatttgaactgaataaaaatgaaattgctgcggttattttagagccaatagcaggtaatatgggttgcgtacttcctcaagaaaatttcattaaagaattaaaagaacaatgtcatgacaatggtgcactgttgatttttgatgaggttatgactgggtttcgtttggcgttaggcggagcacaagaggtgttgtctattgatgcagatttagtgacttatggaaaagtaattggtggtggttt

SEQ ID NO: 292562 - DNA, 697 bp, Unknown
  Bacterial polypeptide expressing nucleotide sequence isolated from the Sargasso Sea
atgaaaactaaaaactctgacaaactttttgagaaatctaagaatcatattgctggcggtgtaaattctcctgtcagagcattcaaaagtgtaggagggtctccaatattctttagaaaatctagaggatgttatctgtatgatgaagatggcaataaatatctagattttgtaggttcttggggtccaatgattcttggccattctaacaaacagatcactgaagctataaagaagcaatctagcaaaggtataagttttggagcgccaacaaaaaatgaactagaaattgcaaaacttataaagtcttatgtgcctagcatagagaaattaagaatggttaattctggaactgaggcaacaatgagctgcataagactggcaagagggacaacaaacagaaatatcatcataaaatttgtgggttgttatcatggtcatgtagattctcttttagtcaaagctggctcaggtctagcaactcttggggttcctgattctcctggaattccagaagaactttctaaacttactatcactattccatataacgacaataatgcagtaaaggaggctttcaataaacatgcgaaggatattgctgccgttatagttgaaccaatagctggaaatatgggctttattgagcctaatgaagattttcttcaaaatttgagacaaattgtacgaaaataag

SEQ ID NO: 292563 - DNA, 865 bp, Unknown
  Bacterial polypeptide expressing nucleotide sequence isolated from the Sargasso Sea
tttgactgacatattcaatactactcactctgaagaagttttctcttcagctttagaattaatgccaggcggggttagttccccagttagggcattcaagtctgttggtggtcagcctattgtttttgatagagtaaaaggtccttatgcttgggacattgatggtaataggtatattgattacataggtagttggggaccagccatttgtgggcatgcacaccctgaagtaattacagcattgcaagaggcaatagaaaaaggtactagttttggagctccgtgtatattagaaaataaacttgccgagatggttatagatgcagtcccttcggtagaaatggttagatttgtaaacagtggtactgaagcctgtatggcagttttaagactaatgagagcatttactggaagagataaagtaataaaatttgatggatgctatcacggacatgctgatatgtttttggtgaaagctggttctggagtagctactttaggtttaccagattctccaggggttcctagaactacaacagcaaatactctaactgcgccttataacgatcttgaagctgtaaagaaattattttctgagaatcctgatgcaatatcaggagtcattcttgagccaatagtaggtaatgcaggatttattactcctgaacctggtttccttgaaggattgagagagctcacaactgaaaatggctctttactagtttttgatgaagttatgactggtttcagaattagctatggaggggctcaagaaaaatttggagtcacacctgatttaacaactctcggcaaagtaattggaggaggtttaccagtaggagcatatggaggaagaaagaaataa

SEQ ID NO: 292564 - DNA, 928 bp, Unknown
  Bacterial polypeptide expressing nucleotide sequence isolated from the Sargasso Sea
tgtatgagtgcagtgagattagcagagggatataccaatagagaaaaagtgcttaagttctcaggatgttaccatggccatgcagactcttttttaattcaagcaggaagtggagcatctactctaggaacaccaaatagtccaggagttactaaagcaagtgctagtaatactattttagttgaatacaacaataaagaacaactaatagaaacatttaaaaacattggaaaagagttagcagctgttattttggagccaatagcggggaatatgggttgtgtaattccttctgaaggatttgttgaattgattagagaattgtgtgacgagtatggtgttttattgatttttgatgaggtaatgacaggttttagattagctccaggtggagctcaagaagtcttaggaattaaggctgatattattacgtttggaaaagtaattggaggaggcctcccagttggagcttttgctggtaaagatgaaataatgaattttcttgctcctttaggaccggtttatcaagctggaactttaagtggtaacccaattgccatgtcagctggtctttccatgttgacgtatttaaatgaacacaatgaggtctattcgtcattgtcagataaaacaagttatttaagagaaggaatgcaaaaagttttagataaaacaaaaattccttaccaaattaatagtttaggatctatgatttcacttcatttttcagatgaaccagttgttgatttcaaaacagctcaaaaaggggacaatgatcggtttaaaaaatattttcatggaatgcttgatgagggggtttatcttcctcccagtgcatatgaaagctattttttgaatgatgccatcagttatgaagatttagactttacaattaaggcttttgaaaaagttgtttataagatttgaa

SEQ ID NO: 292565 - DNA, 932 bp, Unknown
  Bacterial polypeptide expressing nucleotide sequence isolated from the Sargasso Sea
gataaaattattaaatttactgggttgttatcatgggcacgtagattctttacttgttaaagcaggctctggcgtctcaacttttggtttaccagattcccctggaataccaaaagaattagcagcgcttacatacagttgtccttataacgatatagaggctgtatcagaagttacaaatgagattggtgatgatttagctgcaattattgttgaacctattgcaggtaatatggggtttattcctggagaacataaatttctttcttgtttacgagaactatgtaataaatgtggggctctacttatttttgatgaagtcatgtctggttttagagtagcgcttggaggggctcaatctatatatgcaattaagcctgatctaactgcccttggcaaagtaataggaggaggtctgcctgttgggtcttttggtgggaggcaatccatcatggatcgacttgctccaactggtcccatatatcaagcaggaacattatcaggaaatccattagcaatgagtgctggcatagccttgcttgatactttaattaatgtaaatccattcaataaactacaactagcttcctcagagattatgttgcatacaaaaaatatcatgaatgatagaggcattccattttcaacctcttttattggcggcatgtttggttttttctttagcgaaaatttaccaagaaattttcaagatgtgttagaaactgacgatgaaatgtttaaaaagtttttttatgccgctttaaaccaagggatatactttgctccatcaaagtttgaagctggatttatatccttaactcacgatcaagatataattgataaaactaaaagtaagattgaaaaaagcaatcaaggaattataaaaaatgaaaaaatgatattagccgctatagggaaatggctctcgtttg

SEQ ID NO: 292566 - DNA, 754 bp, Unknown
  Bacterial polypeptide expressing nucleotide sequence isolated from the Sargasso Sea
tatattgactatgtaggttcgtggggcccaatgattcttggacacgccaacccaaaaattgttagtaaacttaaagaaactctggacaatggtacttcttttggtgcaccaactgaaggcgaaacttttttagctgaaaagatatgtgaagcagtaaaaagtgttgaaatgattcgccttgtaaattcaggtacagaagcagcaatggcagttctgcgattggcacgtggatatactaaacgtgataaaataattaaatttgagggctgctatcacggcagcgttgaccccctacttgtaaaggcgggttctggagctttgacattaggaatcccagactctcctggagttccagtttcttttgttgaacatacacttcaggccaaattcaacgatcttgactctgttattagtattacagaggaaaactctcagagtatcgcagcaattattcttgaacctgtagcaggtaatatgggcatgataccgcctgaacatggattccttaaaggtttgcgagatttatgtgatcgtgaaggaatcttgctgatttttgatgaggttatgagtggttttcgtattgattatggtggagcacaatctttgtttggcattgttccagacttaagtatttttggaaaggttattggtggagggctgcctatgggagcatatggtggacgcccaagatattatgcttcagatcgcaccttcaggaccaatatatcaggctggaactttgtctggaaatcca

SEQ ID NO: 292567 - DNA, 819 bp, Unknown
  Bacterial polypeptide expressing nucleotide sequence isolated from the Sargasso Sea
tgagagcattcacagggagagataaagttatcaaatttgatggatgttatcacggtcatgcagatatgtttttggtaaaagccggatcaggtgtagcaactttaggcttgccagattctccaggagttccacgaacaacaacttctaatactcttactgctccttacaacgatcttgaagcagtaaaaaaattattttctgaaaatcctgatgctatttcaggagtgattcttgagcctattgttggcaatgcaggctttattactccagaacctggatttttagaaggattaagagaattaactactgaaaatggatcattattagtttttgatgaagtcatgactggtttcagaattagttatggaggcgcccaagaaaaatttggagttactcctgatttaacaacacttggaaaggtaatagggggaggcttacctgttggagcctatggtggtaaaaaagaaataatgtcaatggtagctccttctggccccgtctatcaggcaggtacattgagtggaaatccacttgcaatgactgccggaattaaaactctcgagctactaaaacaagaaggtacctacgaaaaattagatgcaataacctctagattaattgaaggaataattcagtcagcagataataatgggattgcaattaacggtggaagcgttagtgctatgtttggatttttcttatgtgatgggcctgtaagtaactttgatgaagcgaaattaaacgatgctgaacaatttggtaagttgcacagagagatgcttcaaaggggagtatatttagcccccaagtccttttgaa

SEQ ID NO: 292568 - DNA, 629 bp, Unknown
  Bacterial polypeptide expressing nucleotide sequence isolated from the Sargasso Sea
gttgaacaccagccgctcccaggccatctttggcgcagcacaggggctgatgcccggtggcgtgagctcccctgtgcgggcgttcaagtcggttggcggtcagccgatcgtgttcgaccgggtgaagggtccctacgcctgggacgttgatggcaacaagtacatcgactacatcggcagctggggcccggccatctgcggccacgcccatcccgaggtgatcagcgccctgcaggaggcgattgaaaagggcaccagcttcggagccccctgcgcccttgagaacaccctggccgagatggtgatcgacgccgtccccagtgtggagatggtgcgattcgtcaacagcggcacagaggcctgcatggcggtgctccgcctgatgcgtgccttcactggccgcgacaaggtgatcaagttcgaaggctgttaccacggacatgccgacatgttcctggtgaaggccggatccggtgtggccacactcggcctgcccgattccccaggcgtgccacgcagcaccaccgctaacactctcacggcgccttacaacgacctggaagcggtcaaggctctgttcgccgagaaccctgatgccattgccgggcgtgattctcgagccgatcgtc

SEQ ID NO: 292569 - DNA, 877 bp, Unknown
  Bacterial polypeptide expressing nucleotide sequence isolated from the Sargasso Sea
ccatgcagataaccgaatactaaaaaatatttctaagactattaaaaaaggcataacttttggtgctccctgtaaaaatgaaatcctactggcaaaagagatcattgagatatttcccgcaattgaaaaaattagaatggttaattctggaacagaagcaaccatgagtgctattagattagctagaggttatacaaatcgcgataaaataatcaaatttaatggttgctatcatgggcatggcgattctttcttaattaaagcagggtcaggctcagcaacatttggtaagccagattctaagggtgttacaaaatcactggctaaagatacaatatctttgccatataataatatagataaagtaaaaagtattatcaaaaataataatattgcctgcgtgataatagagccaatagcaggaaatatgaattttgttcgatcaaatcctagttttctcaaagaattaagagcattatgtagtcgctataaaactgttctaatatttgatgaggtaatgactggattaagagtagcaaaagcaggtgcccagaacatatataatattaaacctgatttagttacgcttggtaaagtgcttggcggtggttttccagtaggagcattcggcggaaaaaaaatcataatggataagttagcgcctgatggtgatgtatatcaagcaggtactttatctggtaatcctgtagctatggctgcagggcttaaaactattgaattaatttctgctcctagatattttacgaagttacataacaaaactatgtatttagtaaacgggatgaataatatagctaaaaagtttaataaagacttttatgctgatggagaaggtgggatgtttggaatctttttt

SEQ ID NO: 292570 - DNA, 669 bp, Unknown
  Bacterial polypeptide expressing nucleotide sequence isolated from the Sargasso Sea
catgcagatcacacaatctaaaaagttattttctcaagcccagcaaagactacctggaggagtaaacagtccagtacgcgcttttaaatccgtgaatatgactcccttattcattgcaagtggcaaaggttcaaagctctttgacaaggatggtaatgaatatattgactatgtaggttcgtggggcccaatgattcttggacacgccaactcgaaagttgttagtaaacttaaagaaactctggacaatggaacttcttttggtgcaccaactgaaggtgagacttttttagctgaaatgatatgtgaagcagtaaaaagtgttgaaatgcttcgccttgtaaattcaggtacagaagcagcaatggcagttctgcgattggcacgtggttatactaaacgtgataaaataattaaatttgagggctgctatcacggcagcgttgacccccttcttgtaaaggcgggttccggagctttgacattaggtataccagactctcctggagttccagtttcttttattgaacatacacttcaggccaaattcaacgatcttgactctgttattagtattacagaagaaaactctcagagtattgcggcaattattctcgaacctgtagcaggtaatatgggcatgatacctcctgaacatggattccttaa

SEQ ID NO: 292571 - DNA, 597 bp, Unknown
  Bacterial polypeptide expressing nucleotide sequence isolated from the Sargasso Sea
tgctcatcatcgacgaagtgatgactggtttccgagtatcaagaagcggcgctcaaggccactatggcgttactcctgacttaaccacactgggtaaagtgattggcggcggcatgcctgtgggtgcatttggcggtcgtaaagaagtgatgcagtttatcgctccaacgggtcctgtgtaccaagcgggtaccctgtcaggtaaccctattgcgatgtcagcgggtctagcgcaaatggaagccctgtgtgaagaaggtctgtatgaaaccctaagcgcgaaaaccaaacgtatcgccgaaggttttaaagccgcggccgacaaacacggcatcccaatggccatcaactatgtcggtggcatgttcggcttcttctttaccgagcaagagcagatcacgcgcttcgaccaagtgactaagtgcaatatcgaacacttccgcactttctatcacggcatgttagatgaaggggtttacttagcaccgagcgcctatgaagcaggcttcctgtcgatggcccatggcgaagaagaactgcgcctcacgctagaagcggctgaccgtgtattaggtcgtatgaaagcggcaatgtaag

SEQ ID NO: 292572 - DNA, 787 bp, Unknown
  Bacterial polypeptide expressing nucleotide sequence isolated from the Sargasso Sea
atggaagtgaccatggcgaagctggtgaccgaactggtgccaaccatggacatggtgcgtatggtgaactccggtaccgaagccaccatgagcgccatccgtctggcgcgcggtttcaccggccgtgacaaaatcatcaaattcgaaggctgctaccacggccacgccgactgcctgctggtgaaagcgggttccggcgcgctgaccctcggccagccaaattcaccgggcgtaccggcggacttcgctaagcacaccctcacctgtacttataacgatctggcttccgtacgcgccgcgttcgagcagttcccacaggagattgcctgcatcatcgttgaaccggttgccggtaacatgaactgcattccaccgcaggctgatttcctgccgggcctgcgcgcgctgtgcgacgagtttggcgcgctgctgattatcgatgaagtgatgaccggctttcgcgtggcgctggcaggggcacagtcctactacgacgtggtgccggatctgacctgccttggcaaaatcatcggcggcggtatgccggtgggcgctttcggtggccgtcgcgacgtgatggacgcgctggcaccaacgggcccggtgtaccaggcaggtacgctttccggtaacccaatcgcgatggcagcgggctttgcttgcctgaccgaagtggcacagccgggcgtacacgaaacgctgaccgatctgaccaaccaactggcacaaggactgctggatgccgcgcaagagaccggcattccactggtggtgaacaacgtatact

SEQ ID NO: 292573 - DNA, 551 bp, Unknown
  Bacterial polypeptide expressing nucleotide sequence isolated from the Sargasso Sea
attgtaaaaaatgatcttgctgcagtgattgttgaaccaattgctggaaatatgggatttgttcctggcgataaatcatttttaaagttattaagaaaaaaaacctctgaaaataattctttgttgatttttgatgaagttatgacaggttttagagtgtctctaggtggagctcaagaattatatggaattaaacctgacttaactacgctaggaaaagtaattggaggaggacttccagtgggagcttttggtggaaaaaagaaagttatggattgtcttgcacctaatggaccggtttatcaggcaggcactctttccggaaatcccttagcaatggcagcaggatcaactttaattaaacttttaatagataagaatccatataaagatcttgaaagtaaagctaaaaatctcttagagggtatgaaagaaatttttgatagatatgatatcccattctctacaaatcagattggcggtatgtttgggttctttttttcagaagaattaccaagcaatcttgtggatgtagaaaatactaatgacaa

SEQ ID NO: 292574 - DNA, 613 bp, Unknown
  Bacterial polypeptide expressing nucleotide sequence isolated from the Sargasso Sea
tatgcctggtggtgtcaactcgcccgtgcgagcttttaaaaatgtaaacagctctccgatatttattaaaagtgcaaaagggccttatctttatgatgttgatgataaccaatatgttgattttattggatcatggggccccatgattcttggacattcaaatcccagaatcattaaggctgtagaggaacaattacaattggggacaagttatggagcgcccacagagggagagagcaaaatgggccaattaattacttcggtaatgccatccatagaaatgatgaggatggtcaactcaggtaccgaagcaaccatgagctgtattcgtctggcaagaggagtaacaggtaaagataagattattaaatttactggttgttaccatgggcatgtagattcattacttattaaagctggctcaggagtatctacttttggtttacctgattcacccggaatccctaaagacttagcacagcatactgttaccgtgccatttaatgatattgatgcctttgaaaatacgtataaatctatcaaagatgatttagctgcggtaattattgagcccgtagctggaaacatgggctttattcccggagagattgaa

SEQ ID NO: 292575 - DNA, 787 bp, Unknown
  Bacterial polypeptide expressing nucleotide sequence isolated from the Sargasso Sea
ttgtgtgcgccttgccctgctggaatcaccatgggcagaaaccatttgtgaattagtgccaagcatggaaatggttcgtatggttagctcaggcacagaagcgaccatgagtgctattcgtttagcccggggttttaccggtcgtaacagcattctaaaatttgaaggttgttaccacggtcacgccgactctttgctggtcaaagctggctcaggtgctttaactttaggtgtgccgaattctcctggtgtacccgctgattttgctaaatacacgctcacagcggaatttaacaatctggagcaggtcaaagggatttttgccgaacaaggtgctgatctggcctgtattattgtcgagccggttgcaggcaatatgaactgcattccaccagcaccaggctttttagaaggtttacgtgcgctttgtgaccagtacggtgctgtgctgatttttgatgaagtgatgacgggtttccgtgttgctttaggtggcgctcaggcctattacaacatcaaaccagacctgactactttaggcaaaattattggtggcggtatgccagtcggtgcttttggtggccgtcgcgatattatgcagcatatagcgcctttaggtggtgtctatcaggctggtactttatctggtaaccccatcgctatggcggcaggtttagcggctttgacggaaatccgtaagcctggtgtttatgatgtattaacggccaaaaccacgcagctgattgaaggtttagcggcagcggctaaggaagtgggtattccactg

SEQ ID NO: 292576 - DNA, 912 bp, Unknown
  Bacterial polypeptide expressing nucleotide sequence isolated from the Sargasso Sea
ttatgagggcattcacggaaagagataggttatttaaatttgacggatgttaccatggtcatgcagatatgtttttagtaaaagctggatcaggtgtagctactttaggattaccagattctccaggggttccaagaacaacaactgccaatacactcactgctccttacaacgatctggaagcagtaaaaaaattattttctgaaaatcctgatgccatttcaggtgtaattcttgagcctattgttggtaatgctggttttattaagccagaacctggattcctagagggattaagagaattaacaactgaaaatggatctttattagtttttgatgaggtaatgactgggtttagaataagttatggaggcgctcaagaaaaatttggagttactcctgatttaaccacgcttggtaaagtaattggtggtggactccctgtgggagcttatggaggaaagaaagaaataatgtcaatggttgccccctctggaccagtctatcaggcaggtactttgagcgggaatccacttgcaatgactgctggaataaaaactcttgagctactcaaacaagagggtacatacgataaattagaggctacaacttcaagattaattgaaggtataattcagtctgcagaaaataatggtatttctattaacggtggtagtgtaagcgctatgtttggatttttcttatgtgatgggccagtgagaaactttgatgaagcaaaaacgaataatgctgaactttttggtaaattgcatagagagatgcttcaacggggaatttacttggcgccgagtccttttgaagctggctttacatcactagctcatagcgaagaagaaattgataaaactatcgaagcttttgaccaatcttttaattccataaagaaataat

SEQ ID NO: 292577 - DNA, 818 bp, Unknown
  Bacterial polypeptide expressing nucleotide sequence isolated from the Sargasso Sea
cgtcgagatggtgcgcttcgtcacagcggcaccgaagcctgtatggcggtgttacgtctgatgcgggcctttaccggccgcgagaaggtcatcaaatttgagggctgttatcacggccacgccgacatgttcctggtcaaggctggctccggagttgccacccttggccttcctgactccccaggggtgcctagcagcaccaccgccaacaccctcacggctccttataacgacctcgaagcagttaaggctctgtttgccgaaaaccccgactccatctccggggtgatcctcgagccggtagttggcaatgccggcttcattccacctgattttggcttcctcgaggggctcagagagatcacccgcgagcacggcgccctgctggtctttgacgaagtgatgaccggcttccgcattgcctatggcggcgcccaagcccgtttcggcatcaccccggatctcaccacgatgggcaaggtaattggtggcggtctgccggtgggcgcctacggcggtcgcgccgacatcatgtcgatggtcgctcctgccggaccgatgtatcaggccggcaccctcagcggaaatcccctggccatgaccgctgggatcaagacccttgagctgctgaagcgaccgggggcctacgagcagctggaaaccaccactaagcgcctctccgatgggatccaggaggctgccaaagctgctggtctgccgatttgcggcagcagcatcagcgccatgttcggcttcttcctttgcgacggaccggtccgcaactttgaggaagccaaggcgactgacagcgaacgctt

SEQ ID NO: 292578 - DNA, 700 bp, Unknown
  Bacterial polypeptide expressing nucleotide sequence isolated from the Sargasso Sea
cacgaaggccaaattgctggaataattgtagagccaatagcaggtaatatgggagtggttcctccagatcctggatttctgacaggattaagaaatataaccaaagaaaaagaggctttacttatatttgatgaagtaattacgggatttagagttcattttggaggagcgcagactttgctgggggtgactcctgatataacttgcttaggcaagatcatcggaggaggtttgccggtaggtgcttatggcagtagtgcaaagattatggaatgtgtggctccattaggtccgatgtatcaagcaggaactttatctggaaatccattagcagtaaccgctggtctcactgcattaagattgctaagtcaaaaaggagtatacgacactctggaagatcttggtgcctatgttgaaaatggaataacgggaatcatgaaagaatttgaaatagaatcaaaattcaacagagttggttccatgttcaccgcattttttagtagtaaggaaatttcaaatgtatctgacctcgaaatggtcaacacagatcgttatagtacctattttcatgggttattgaagcaaggtatatatttcgctccgtctcaatttgaatgtgggtttgtttctttgtctcatacaaagtctgatatagatttaaccatggaaaaaatcagagatgttgttaaaggattgtaag

SEQ ID NO: 292579 - DNA, 553 bp, Unknown
  Bacterial polypeptide expressing nucleotide sequence isolated from the Sargasso Sea
aagcggcgctcaaggccactatggcgttactcctgacttaaccacactgggtaaagtgattggcggcggcatgcctgtgggtgcatttggcggtcgtaaagaagtgatgcagtttatcgctccaacgggtcctgtgtaccaagcgggtaccctgtcaggtaaccctattgcgatgtcagcgggtctagcgcaaatggaagccctgtgtgaagaaggtctgtatgaaaccctaagcgcgaaaaccaaacgtatcgccgaaggttttaaagccgcggccgacaaacacggcatcccaatggccatcaactatgtcggtggcatgttcggcttcttctttaccgagcaagagcagatcacgcgcttcgaccaagtgactaagtgcaatatcgaacacttccgcactttctatcacggcatgttagatgaaggggtttacttagcaccgagcgcctatgaagcaggcttcctgtcgatggcccatggcgaagaagaactgcgcctcacgctagaagcggctgaccgtgtattaggtcgtatgaaagcggcaatgtaa

SEQ ID NO: 292580 - DNA, 811 bp, Unknown
  Bacterial polypeptide expressing nucleotide sequence isolated from the Sargasso Sea
ggccaaggttcaaagctctttgacaaagatggtaacgaatatattgactatgtaggttcttggggcccaatgattcttggacacgccaacccgaaagttgttaggaaacttaaagaaactctggacaatggaacttcttttggtgcaccaactgaaggcgagactttgttagctgaaatgatatgtgaagcagtaaaaagtgttgaaatgattcgccttgtaaattcaggtacagaagcagcaatggcagttctgcgattggcacgtggttatactaaacgtgataaaataattaaatttgagggctgctatcacggcagcgttgaccccctacttgtaaaggcgggttccggagctttgacattaggagtccctgactctccaggagttccagtttcttttgttgaacatacacttcaagccaaatttaacgatcttgactctgttattagtattacagaagaaaactctcagagtatcgctgcaattattcttgaacctgtagcaggtaatatgggcatgatacctcctgaacatggattccttcaaggtttgcgtgatttatgtgatcgtgaaggaatcttgctgatttttgatgaggttatgagtggttttcgtattgattatggaggcgcgcaatctttgtttggcattgttccagacttaagtatttttggaaaggttattggtggagggctgcctatgggagcatacggtggacgccaggatataatgcttcagattgcaccttcaggaccaatatatcaggctggaactttgtctggaaatccaatagcagtaactgcaggtt

SEQ ID NO: 292581 - DNA, 453 bp, Unknown
  Bacterial polypeptide expressing nucleotide sequence isolated from the Sargasso Sea
aatgcctgggggtgtaaattcacctgtaagagcatttgggaatgttaacagtactcctatttttattaagagcgcctctggggcatatctacatgatgttgacggaaatgactatgtagactttattgggtcctggggtccaatgattttaggccacagtaatccaaaaataataaaagcaatcacggatcaggctgaattaggaacaagttacggggcaccaacagaagcagaaacatctataggcgagttaattagaacggcaatgccctctatagaaaaaattagaatggtaaattctggaacagaagcaacaatgagctgcataaggttggctagaggatatacaggtcgtaacaaaattattaaatttactggctgttatcatggtcatgtagattctcttcttataaaagcaggttcaggagtgtcgacttttgggctacccgactc

SEQ ID NO: 292582 - DNA, 658 bp, Unknown
  Bacterial polypeptide expressing nucleotide sequence isolated from the Sargasso Sea
atgtttaagttgataaatgaaaggtctaaaaaattatttgaagaggcaaataaagtaatccctggaggggtaaattcaccagtaagagcatttaaatctgtaggtggaacgccaatatttattaaagatgcaaatggggcatatttatttgatgaggatggtaatcaatacattgattttatatcatcatgggggccaatgattttaggccatgctcatccaaaaataattgaagcaataaattatcaatcagttaagggaacatcatatgggatacctacggaattagaaactaaaatagcatctttagtagtttctttagctccaaatgttgataaaataaggtttgttaactctggtactgaggcttgtatgagtgcagtaagattggcaagaggatatactaatagagataaaataattaagttttcaggatgttatcatggacattcagattcttttctaattgaggctgggagtggcgcatcaaatataggcttacctaatagtccaggagttactaaatctactgcttcggataccttactagcagatttcaataacatttctatggtagaatccttatttagaaaatataagaatcaaaaagccgcaattattatagagcctattgcagggaatatgggctggtttgcca

SEQ ID NO: 292583 - DNA, 509 bp, Unknown
  Bacterial polypeptide expressing nucleotide sequence isolated from the Sargasso Sea
aatgccaggtggtgtaaattcacctgtgagagcatttaaaaatgttgacggcaagcctgttttttttaaatctgctaaaggtccaattttaattgatgaagatgataatcaatacatagatttcattggatcctggggtcctatgatacttggacattcaaatccagctgtattggatgccataaaagctcaacttgagcttggaacaagcttcggcgctccaacaagtcttgaaagtgagctggcaagaataattaagagtcaagtcccatctatggaaaaaataagaatggtcaattctggaacggaagcaactatgagttgtattagattagctagaggcttcacgggcagaaataaaattattaaatttactggttgttatcatggacacgtggattctttactagtaaaagctggttcaggtgtttctacttttggtttacctgattctcctggaataccaaaagaattagcagctctcacatacagttgtccttacaacgata

SEQ ID NO: 292584 - DNA, 811 bp, Unknown
  Bacterial polypeptide expressing nucleotide sequence isolated from the Sargasso Sea
aatgaaattatcaaagtctcaaaacctttatgaacgagctagaaaatttatacccggcggagttaactccccagtaagagcatttaaaggagtgggagggaaccctctattctttcgcgagggaaccggacctcatttgatcgatgcagacgataaccgatacatcgactatgttggagcctttggtccgctgattctaggccacagtcatgaacacatactcagtgctattgaaaatcagctaaaaagaggcattagctttggtgcttcaactgaagccgaaattgatattgcagagaagatttgcaagcatgttcattcaatggacgaagtaagattagtaacttctggcactgaagcaaccatgagcgccatcaggctcgcaagaggattcactaacagagataaagttgtaaagtttgagggctgctatcacggacatgtagacgggttgttagtaaaggcaggttcaggcgctctaactatcggagaaccagattctttaggcgtaccaaatgcttatactgatttaactcatgtcctgccctacaacgacgcagaagctgttgagcagtatttcgataaacacggtaaagacaccgcttgtgtaattgttgagccaatagccggcaacatgaattgtgttcttccagatgtagggtttctagaggctcttagggaacagtgcactttaaatgagtccgtgttaatttttgacgaggtgatgaccgggttcagagtagctcttggaggagcccaatccatctttggcgtggtgccagacataacaaccttgggcaaagtaatcggt

SEQ ID NO: 292585 - DNA, 569 bp, Unknown
  Bacterial polypeptide expressing nucleotide sequence isolated from the Sargasso Sea
aatgaaaactaaaaactctgacaaactttttgagaaatctaagaatcatattgctggcggtgtaaattctcctgtcagagcattcaaaagtgtaggagggtctccaatattctttagaaaatctagaggatgttatctgtatgatgaagatggcaataaatatctagattttgtaggttcttggggtccaatgattcttggccattctaacaaacagatcactgaagctataaagaagcaatctagcaaaggtataagttttggagcgccaacaaaaaatgaactagaaattgcaaaacttataaagtcttatgtgcctagcatagagaaattaagaatggttaattctggaactgaggcaacaatgagctgcataagactggcaagagggacaacaaacagaaatatcatcataaaatttgtgggttgttatcatggtcatgtagattctcttttagtcaaagctggctcaggtctagcaactcttggggttcctgattctcctggaattccagaagaactttctaaacttactatcactattccatataacgacaataatgcagtaa

SEQ ID NO: 292586 - DNA, 940 bp, Unknown
  Bacterial polypeptide expressing nucleotide sequence isolated from the Sargasso Sea
catgcagatccgagaatcacttcgaaaatcgaaaaagcagtgcaaaaaggtacttccttcggaacccccacagaaggtgaaatcgaattggcggaaatgatcaatgatgcggtcccaagtgtcgaaatggtccgtcttgtcaattccggatcagaagctgcaatgggtgcacttagagttgccagaggattcactggtcgagacaaaatcattaaatttgagggttgttatcatggaagtgttgatgcacttttagtcaaagctggttctggtgcaaccactttaggaatcccagattctccaggggttccccaatcattcacggaacatacactctctgcgcctttcaatgatcttgatgcagtcatcgaactgacagaaaattttccttatgaaattgcagcaatcgtgctggaaccggttgcgggaaacatgggcatgatacctcctgaacacggattcctccagggactcagagaactttgtgatcgagagggaatccttttgatctttgatgaagtgatgaccggctttcgtgtcgacttctccggagcccaagcactttttcaggtcatgcccgatcttagtatctttggtaaagtgattggcggaggacttccagttggggcttatggggggcgaagggaaatcatgctccaggttgctcctgctggtcctgtctatcaggccggcacgctatcaggaaacccgatagccgtttcagcaggtaaaaccatgttgaaaatcttaaagaaggaagatccttatgcagatttgggacgaaaaacggcaactctcaatgaagcgttaagcaatgctgcaaagaaaaaaggaattcctttggaaacctgctccatgggaggaatgttcggttttttcttctctgaaaaaaaggttagaaactatgaggatgcattgaaatgtaatcgtgaatacttca

SEQ ID NO: 292587 - DNA, 817 bp, Unknown
  Bacterial polypeptide expressing nucleotide sequence isolated from the Sargasso Sea
atgttttataatagtcaattagcgtacaaacaggcaataaaatcaattccaggtggagtaaactcccctgttagagcatttagaagtgttgattcaacgccaatatttttcaagagtggaaatggaagcaaaatgattgatatagatgacaatgaatatatagattgtgttggttcttgggggccattaatttttggtcacgcggataatcacaccattgaagctattgttaattgctcaaaaaatggaacaacttttggagcaccaactgagcttgagacaaaaatggcttctaagataattgaaatggttccttccattgaaaaggtcaggatggtaagctctggaacagaagctacaatgagtgctattagacttgctagaggttatactagaaaaaacctaataatcaaattttctggaaactatcatggtcattttgatggttttttaataaaagctggatctggagcaatgactttaggaactccagatagtcaaggggtaactgaaaatattgctaaggatactttagtggcagaatttaatgatattgattctgtaaataaactatttaatgaaaataaagataaaattgcagcagttattgttgagccaattgcaggaaatatgggtttagtaattccagaaaataattttttgaatgaattaagagctatttgtactgaaaacaatagcctgttaatctttgatgaggttatgagtggattcagagtttcaaaaggtggtgctcaagaattatatgatgtaataccagatattacaacgcttggaaaaattattggtggaggactac

SEQ ID NO: 292588 - DNA, 499 bp, Unknown
  Bacterial polypeptide expressing nucleotide sequence isolated from the Sargasso Sea
caagatcatcggcggcggcatgccggtgggctgcttcggcggcaagcgcgcgatcatgcaatgcatcgccccgctcggcccggtctaccaggccggcaccctgtcgggtaacccgctggccatggccgctggcctgaccacgctgaagctgatcagccgcccgggcttccacaccgagctgagcgactacaccacacgcatgctcgatggcctgcagcagcgcgccgatgccgccggcatccccttcgtcaccacccaggcgggcgccatgttcggcctgtatttcagcggcgccgacgacatcgtcaccttcgccgacgtgatggccagcgacagcgcgcgcttcaaccgcttcttccacctgatgctggacggcggcgtgtacctggcgccgagcgccttcgaagccggtttcacctccatcgcccatggcgacaaggagctggacatcaccttcgcggccgccgagcgcgccttcgccgagctgaaaaaagcctga

SEQ ID NO: 292589 - DNA, 504 bp, Unknown
  Bacterial polypeptide expressing nucleotide sequence isolated from the Sargasso Sea
aatgcctggaggtgtaaattcacctgtgagagcatttgggaatgttaatagtacccctatttttattaagagcgcctctggggcatatttacatgatgttgacggaaatgattatgtagactttattgggtcctggggcccgatgattttaggccacagtaatccaaaaataataaaagcaattaaggatcaggctgatttaggaacaagttatggagctccaacagaagcagaaacatctataggtgaattaattagatcggcaatgccctctattgaaaaaataagaatggtaaattctggaacagaggcaactatgagttgtataaggttggctagaggatatacaggacgtaacaaaattattaaatttactggttgttatcatggtcatgtagactctcttcttataaaagcaggttctggggtatcgacttttgggttacctgactctcctggtatacctgaagagcttgcaagacataccataagtgttcccttcat

SEQ ID NO: 292590 - DNA, 808 bp, Unknown
  Bacterial polypeptide expressing nucleotide sequence isolated from the Sargasso Sea
gggccggctatatgtggacatgcccaccctgaagttacaacggcattacaggaagcaattgagaaagggactagctttggtgctccatgcgttttagagaataaacttgctgagatggttatagatgctgttccatctgtagaaatggttagatttgttaatagtggcactgaagcctgtatggctgttttaaggcttatgagagcattcacgggaagagataaagttattaaatttgatggttgctatcacggtcatgcagatatgtttttggtaaaagctggatcaggtgttgctactttaggattacctgattctcccggggttccacgaacaacaacagcaaacacacttactgccccttacaatgatcttgaagcagtaaaaaaactattttctgaaaatcctgatgccatttcgggagtaattcttgagccgattgttggtaatgctggctttattactcctgagcctggattcctagagggattaagagaattaactactgagaatggatccttattagtttttgatgaagtaatgactggcttcagaataagttatggaggcgcccaagaaaaatttggggttactcctgatttaactacacttggaaaagtaattggtggaggccttcctgttggagcttatggaggcaagaaagaaataatgtcaatggtagctccatccggcccggtctaccaggcaggcactttgagcggtaacccactggcaatgactgctggaataaaaactcttgagcttctcaaacaagaaggtacctacgacaaactagatgcaataactt

SEQ ID NO: 292591 - DNA, 1023 bp, Unknown
  Bacterial polypeptide expressing nucleotide sequence isolated from the Sargasso Sea
catgcgttttagagaataaacttgctgaaatggtaatagatgcagtcccttcagtagaaatggttagatttgttaataatggaactgaagcatgcatggctgttttgaggctcatgcgagcatttactggaagagataaagttatcaaatttgatggatgttatcacggtcatgcagatatgtatttagtgaaagcaggatcaggtgtagccactctaggcttaccagattctccaggagttccgcgaacaacaactgccaacacacttactgctccctacaatgatcttgaagcagttaaaaaattattttctgaaaatcctgatgccatttctggagtaattcttgaacctattgttggtaatgctggatttataactccagaaccaggattcttggaaggattgagagaattaaccactgagaatggatctttattagtttttgatgaagtaatgactggattcagaataagttatggaggcgctcaagaaaaatttggggttactcctgatttaacaacacttgggaaagtaattggtggagggctgcctgttggagcttatggaggcaagaaagaaataatgtcaatggtagctccatcaggaccggtctaccaggcaggtactttaagcggaaacccactagcaatgactgctggaataaaaactcttgaactactcaaacaagaaggtacatacgataaactagagtcatcaacttctagattaattgaagggataatacagtctgcggaaaataatggaatagctattaatggtggaagtgtaagcgccatgtttggattcttcttatgtgatgggccagttaggaattttgatgaagcaaaaacaaatgactctgaactttttggtaagttgcatagagagatgcttaaacgaggaatttacctagcaccaagtccttttgaagctggcttcacatcactagctcatagcgaagaagaaattgataaaaccatcgaggcttttaatcaatcttttaaagcaataaaaaactaaa

SEQ ID NO: 292592 - DNA, 691 bp, Unknown
  Bacterial polypeptide expressing nucleotide sequence isolated from the Sargasso Sea
atgaaaaaaatcaatctctcacaatcaaaagatttgtttaaaagagctttaaaatcgatatccggaggagttaattcgccggtgagatctttcaagaacgttggaggcgaaccgatattctttgaccacgccaaaggctgccacctctacgatgtcgacggcaatcgatttatagactatgtcggctcctggggacccatgattctaggacatagcgccaacgtcacacaaaaaagtatccttactcaactagaaaaagccactagtttcggagcgcccacactaattgaaatagaattagctgagaaaataattgagctcgtccccagcatagaaaaagtaaggatgatgaactctggcacagaagcaaccatgacagccattcgtcttgccagaggcttcacaggtagagacatcgtcataaaatttgagggttgctaccatggacacgctgacgtattgctagcgaaagccggaagcggcgttttaactcttggtatccctgatacacccggcatacctgaatccgttactagcaataccattgtattgcctttcaatgatatagaagccgttaaggaaaccttttcaagtcacgcgaatcaaattgccgcagttatagtcgaaccagttgcaggaaacatgggatgtatacctcctgcaccaggctacctagaaacgcttcgagaaa

SEQ ID NO: 292593 - DNA, 358 bp, Unknown
  Bacterial polypeptide expressing nucleotide sequence isolated from the Sargasso Sea
atgcctggaggtgtaaattcacctgtaagagcatttggaaatgttaatagtactcctatttttattaagagcgcctctggggcatatttgcatgatgttgacggaaatgattatgtggactttattggatcctggggtccaatgattttaggccatagtaatccaaaaataataaaagcaattaaggaccaggctgatttaggaacaagttatggagctccaacagaagcagaaacatccataggtgagttaattagatctgtaatgccttctattgaaaaaataagaatggtaaattctggaacagaggcaactatgagctgtataagattggctagaggatatacaggacgcaaca

SEQ ID NO: 292594 - DNA, 410 bp, Unknown
  Bacterial polypeptide expressing nucleotide sequence isolated from the Sargasso Sea
ggttcctggggcccgatgatcgtcggccacaaccacccggcggtgcgccaggcggtgaagaaggcgatcgacaacgggctgtcgttcggtgcgccgtgcgcggccgaagtgaccatggccgaaaccatcacccggctggtgccgtcgtgcgagatggtgcgcatggtcaactccggcaccgaggccacgctgtcggcgatccggctggcgcgtggcgccaccggccgcaaccgcatcgtcaagttcgaaggctgctaccacggccacggcgactcgttcctggtcaaggccggcagtggcatgctgaccctgggcgtgccgacctcgccaggcgtcccggccggcctgagcgagctgaccctgaccctgccctacaacgatttcgaagccgccaccgcgctgttcgaaca

SEQ ID NO: 292595 - DNA, 550 bp, Unknown
  Bacterial polypeptide expressing nucleotide sequence isolated from the Sargasso Sea
gttattggaggcgcacaagaaaagtttggtgtaactcctgatttaacgaccctcggaaaagtaattggtggaggcctacctgttggagcatatggaggtaaaaaagaaataatgtcaatggtagctcctgcaggaccggtttaccaagcaggcactttaagcggtaatccactcgcaatgactgctggaataaaaactcttgaattactcaaacaagatggtacatacgataaacttgattcactaacttctagattaattgaaggaataattcaatctgcagaaaataacggtatatccattaatggtggaagtgtaagtgctatgtttgggtttttcttatgtgatgggccagttagaaactttaatgaagctaaaacaaatgatgccgaactttttggtaagttgcatagagaaatgctccgaagaggaatttacttagctccaagccctttcgaagccggcttcacatcactagctcacagcgaagaagaaattgataaaactatcgaggcttttgacgaatctttcagtgagataaaaaaataat

SEQ ID NO: 292596 - DNA, 675 bp, Unknown
  Bacterial polypeptide expressing nucleotide sequence isolated from the Sargasso Sea
tgcgcatggtcaattccggcaccgaagccaccatgagcgccattagactggcccgcggttataccgggcgcaacaaaatcatcaagtttgaagggtgctaccacggccatgtagacagcctgctagtaaaagccggctccggcgctatcgctattcctggctctcccggcgtgccggaagcagtgaccgccgacaccctggtactagactacaacgatgccgccagcgtcacccaagccttcaaggaacacggcgacgacatcgccgccgtaattgtggagccggtggccggtaacatgaattgtgttccagccactgaaaatttcctgcagacccttcgccaacaatgtgacgacaacggcgcggtgctgattttcgacgaagtaatgagtggtttccgggttgccttgggcggtgcccagggccattacggcatcaccccggatatgaccaccctaggcaagattgtcggcggcggcatgcctgtgggcgccttcggcggcaagcaagccatcatggagcatctggcgccgctgggtccggtctatcaggcgggcaccctgtccggcaatcctgtggccatggccgcgggcctcgcgactctcaacctgatcagcgagcccggtttccatcaagctttggccgaaaaaactacccggttgcggaagggctgac

SEQ ID NO: 292597 - DNA, 777 bp, Unknown
  Bacterial polypeptide expressing nucleotide sequence isolated from the Sargasso Sea
aatgatttcaaattctgaactatttttgcgggctaagcaagttattcccggtggggttaattctccagtaagagcttttggatcagttggaggaacaccatattttgttactcacgcccaaggcccgtacatatatgacattgaaggaaatagttatattgattatgtacagtcatacggccctggcattcttggccatgcccatcccgcggttatagaggcgatcacaaaagctgctgcatcaggaacgacttttggcgcccctactgaagcagaagtagagctcgctgaaatggttatcgaaagaattcaagggcttgagttaatccgttttgtttcaagtggaacagaagcaacgatgtcagcagtgaggcttgcaagaggagcaactggaagaaaccgaatattgaaatttgcagggtgttatcacggccattctgatgctcttctagcagcaggtggtagcggcgtagcaaatcaaggactaagtgggtgcgaaggagtaactccaggggcggtagcggataccgtcgttgccccatacaacgttgtacccgaaattgatgagacatttgcggcagttattgttgaaccggttgctgcaaacatgggtctaatatcaccaaactcagggtttcttgaagcgttgagaaatgtatgtgatgaaacgggtgcgttgttgattttcgatgaagttattactggatttcgactgtcctatggtggtgcagctgaatattttggagtcactcccgatatttggtgctttgggaaagt

SEQ ID NO: 292598 - DNA, 840 bp, Unknown
  Bacterial polypeptide expressing nucleotide sequence isolated from the Sargasso Sea
ctatcacgggcatgcggactcactgctagtgaaagcgggctcaggggcgctaaccttaggtgtaccaagttcaccaggtgttccagcaaatgttgctgagcatacgcttaccgttgaatacaataacctagacagcgtaaaagaaatcttcgaagcccatggcgatgatattgcgtgcattatcgttgaacctgtcgcaggtaacatgaactgcattcctcctgtggaaggcttccttgaagggcttcgcgctatttgtgaccaatatggcagcgtattgatttttgatgaagtaatgacaggcttccgcgtatctcgtggtggggcgcaagagcgttataacatcaaaccagacctgacttgcttgggtaaagttattggcggcggcatgccagtaggctgttttggtggtcgtcgtgacatcattacccacattgccccaacagggccaatttaccaggcgggtacgctttctggtaacccagtagctatggctgcaggtcttgctgctttaacgcaaataaagcagcctggactttacgattcaattttcgaaaatacgcaaacgctagtagatggtttccaagcccttgctgacaaacacaatattagcctaactaccaatattgccggcagtatgttcggaatcttctttacagacgtagagaaagttacgaactacaagcaagcgattaactgcaatactcagcaattcaacaagttctatcacggtatgttagagcaaggcgtgtatttagcacctgcatcttatgaagcgggctttgtttcaaaagcgcatgacgctgccgtcattgagcaaactcttgctgcagctgataa

SEQ ID NO: 292599 - DNA, 875 bp, Unknown
  Bacterial polypeptide expressing nucleotide sequence isolated from the Sargasso Sea
gttagatttgttaatagtggaactgaagcatgcatggctgttttgagactcatgcgagcatttactggaagagataaagttattaaatttgacggttgctatcacggccatgcagatatgtttttagtgaaagcaggatcaggtgtagccactctaggtttaccagattctccaggtgttcctcggacgacaactgccaacacacttactgctccctacaatgaccttgaagcagtaaaaaaattattttctgaaaatcctgatgccatttcgggggttatacttgagcctatcgttggcaacgctggatttattactcctgaacctggattcttggaaggattaagagaattaacaactgagaatggatccttattagtttttgacgaagtaatgactggatttagaataagttatggtggcgcacaagaaaagtttggggtaactcctgatttgaccacccttggaaaagttattggtggaggcttacctgttggagcttatgggggcaagaaagaaataatgtcaatggtagctccctcgggaccggtttaccaagcaggtactttgagcggtaatccactcgcaatgactgctggaattaaaactcttgaactgctcaaacaagatggtacatacgataaacttgattcaataacttctagattaattgaagggataatacagtctgcagaaaataacggtattgatattaacggtggaagtgtaagcgctatgtttggatttttcttatgtgacgggccagttaggaactttgatgaagccaaaacaaatgatgccgaactttttggtaagttgcatagagaaatgcttcgacgaggaatttacttagccccaagtccttttgaagccgg

SEQ ID NO: 292600 - DNA, 754 bp, Unknown
  Bacterial polypeptide expressing nucleotide sequence isolated from the Sargasso Sea
tactgcaccctacaatgaccttgaagcagtaaaaaaattattttcagaaaatcctgatgccatttcgggggttatactcgagcctatcgttggcaatgctggatttattactcctgaacctggatttttggaaggattaagggaattaaccactgagaatggatccttattagtttttgacgaagtaatgactggattcagaataagttatggaggagctcaagaaaagtttggtgttactcctgatttaaccacccttgggaaagtaattggtggaggcctacctgttggagcttatggaggcaagaaagaaataatgtcaatggtagcgccttcaggaccggtataccaagcgggcactttgagcggcaatcctcttgcaatgactgctgggataaaaacacttgagctgctcaagcaagatggtacatacgataaacttgatttaacaacttctagattaattgaagggataattcagtctgccgaaaataacggtatcgctattaatggtggaagtgtaagtgctatgtttggatttttcttatgcgatgggccagtaaggaactttgatgaagccaaaacaaatgatgccgaactttttggcaagttgcatagagaaatgcttggaagaggaatttacttagcaccaagtccctttgaagctggtttcacatcactagctcacagcgaagaagaaattgataaaactattgaagcttttgacgaatctttcaatgcaataaaaaaataa

SEQ ID NO: 292601 - DNA, 894 bp, Unknown
  Bacterial polypeptide expressing nucleotide sequence isolated from the Sargasso Sea
tcgtcactctggtactgaagccgtcatgactgcactcagactcgcaagaggaaaaactggaagagacaaaatccttaaatttaatgggtgttaccatggtcatgttgactcaatgttaattaaggctggttctggattagcgggaacgtcgacagcaagctctaagggaattccaaagaatgtagctgaagatacactcattttggatttaaatgatgaagaagcacttcagaagtgttttgaccttcatggaaaatcaattgcaggagttattgttgagccactaccagcgaacaatggacttcttattcaaaaccctagctttctgcaaaaaattaaggccctttgtgaagccaatggttctcttcttatttttgatgaagttatttctgggtttagagttaacttctctgggatggcccacgatttggatatcacaccagacattgtgacttacggaaaagttattggaggcggtcttccagttggtgccattgctgctaccaaaactgttatggaagcccttgcccccattggtgatgtttaccaagccgggacattaagtgctaacccactagctatggtcggtggtttatcaaccctcaagcaattggatgagagctcttatgagcaagttgatgtaaatgcttcaaaaattgaaaagctttttacggattggtttaaaaactacgaggatggaaaattctctcactataaaatagttaggtacaaatctcttttctggtttgttccaaacaattcagacctcaaagcaatcagtgatattcctcaaaacctttcagaagagtttctcccactctttgagactcttttggaaaaaggtatttatctatcacctaatgcttatgaaattggctttgtaagtcttgctca

SEQ ID NO: 292602 - DNA, 901 bp, Unknown
  Bacterial polypeptide expressing nucleotide sequence isolated from the Sargasso Sea
gagaataaacttgcagagatggtaatagatgcagtcccatctgtagaaatggttagattcgtgaatagtggaactgaagcttgtatggctgttttaaggcttatgagagcatttacaggtagagataaagttattaagtttgatggttgctaccacggacatgcagatatgtttttggtaaaagcaggatcaggtgtagccacgttaggtttaccagattcccctggagttccacgaacaacaactgctaatacacttactgctccctacaatgaccttgaggcagtaaaaaaattattttctgaaaatcctgatgccatttcgggagtaattcttgagcctatcgttggaaatgctggatttatcactccagagcctggatttctggaaggattaagagaattaactaccgagaatggatccttattagtttttgatgaagtaatgactggattcagaataagttacggaggtgctcaagaaaaatttggagttactcctgatttaaccaccctagggaaagttattggtggaggcttacctgttggtgcttatggaggcaagaaagaaataatgtcaatggttgccccttccggaccggtataccaggcaggtactttgagcggcaacccattagcaatgactgctggaataaaaactcttgaacttctcaagcaagaaggtacatacgataaactgaatactacaacttctaggttaatcgaagggataattcaatctgcagaaaataatggcatcgccattaacggtggaagcgtaagcgctatgtttggatttttcttgtgtgaaggacctgtaagaaattttgatgaagcaaaagcaaataatgcagaactttttggtaagttgcatagagagatgcttcaaagaggaatctacc

SEQ ID NO: 292603 - DNA, 682 bp, Unknown
  Bacterial polypeptide expressing nucleotide sequence isolated from the Sargasso Sea
atgcgatataaaagaagtagtgacctatttaggctagctaaaaagaagattcctgggggtgttaattctccagtaagggcatttaaatctgttggaggatccccaatttttataaaaaaagccaagggtgcatatctttatgatgaagacaataataagtttatagattatatttcaagttggggaccaatgattattggacattcaaatgattatgttattgatgctattgctaatactgcaaaaaaaggaacatcatttggaatacctacttcattggagactgaaatagctgagctagtagtttcctcagttcccaatatagataaaattagatttgttaattcaggaactgaggcatgcatgagtgcgattaggttagcaaggggatttacaaaaagagaaaaaattattaagttttctggttgttatcatggacactctgattcttttttgattcaggctggtagtggtgcagcaaccttaaatagccctagtagtccaggggttacaaaaggtaccgtaatagacaccttaatttcagattataataatattgacagtgttgtttctcattttaaaaattatccaaatgaaatagcggcaattataattgaaccggtggcaggaaatatgggatgtattccaccaaaaaatggatttttagaggctattagaaaaa

SEQ ID NO: 292604 - DNA, 628 bp, Unknown
  Bacterial polypeptide expressing nucleotide sequence isolated from the Sargasso Sea
ttagaaggattaagagaattaacgactgaaaatggatctttattagtttttgatgaagtgatgactgggttcagaataagttatggaggcgctcaagaaaagtttggagttactcctgatttaaccacacttgggaaagtgattggcggaggtttacctgtaggagcctatggaggtaagaaagaaataatgtcaatggtagctcctgctggtccagtttatcaggcaggtactttgagtgggaatccactcgcgatgactgctggaataaaaactcttgagttactcaagcaagaaggcacctacgaaaaactagaggcaacaacctctagattaattgagggtataattcattctgcagaaaataatggtattgctattaacggtggcaatgtaagtgctatgtttggatttttcttatgtgatggaccagttagaaactttgatgaagcaaaaacaaatgatgctgaactttttggtaagttgcatagagagatgcttcaaagaggaatttacctagctccaagtccttttgaagctggttttacatcactagctcatagcgaagaagaaattgataaaaccattgaagcttttgatcaatcttttaatgcgataaaaaaataat

SEQ ID NO: 292605 - DNA, 894 bp, Unknown
  Bacterial polypeptide expressing nucleotide sequence isolated from the Sargasso Sea
ggtcttttgctgctgtatcttcacaccttttatagtaaaaaaatccaaaggatcattgataactgatgttgataataatagttatgttgattttattggatcctggggtgcaatgattctaggtcatagtgatagaagaattttgaaaaagctcaattcagtttcaagaaatggcctgacttacggagctccgaatgaagctgaaaccgagatggcagaatttattgttaagcatattccatcgatagaaaaagttagaatggtaagctctggaactgaggcaactatgagtgctgcaagacttgctagaggttacacaaaaaaagatataataattaaatttaacggttgctaccatggacatggcgatgcatttttagtagaagcaggctctggcgcgactacttttggcaaaccaagttctagtggtgtaacaaagggatcttctaaagacactatatcgttaatgtataatgataaaaatcaaataaagaaaatatttagtaaatacaaaaataaaatagcatgtgtcattatcgagcctattgctgggaatatgaattttgttagagcagatagatctttcttaagcctcgtaaggaaattatgtacacaaaataattctcttctaatttttgatgaggtaatgacaggctttcgtgtgaattttaaaggtgcacaacattgttataacattaagccagacttgactacctttggaaaagttattgggggcggtctcccagtaggtgcatttggaggtaaatctaaaataatgaatatgttagctcctgaaggtcctatatatcaagcagggacattatcaggaaatccattagctatgcattgcggattggaaacacttaaaataatttccaagaaaactttttttaa

SEQ ID NO: 292606 - DNA, 931 bp, Unknown
  Bacterial polypeptide expressing nucleotide sequence isolated from the Sargasso Sea
aggccagccaattgttttgacagagtcaaaggtccctttgcttgggatattgatggaaatagatatattgactacataggaagttgggggccggctatatgtggacatgcccaccctgaagttacaaatgcattacaagaagcaatagagaaaggcactagcttcggggctccatgcgttttagagaacaaactcgcagaaatggtaatagatgcagtcccatctgtagaaatggttagatttgttaacagtggaactgaagcatgcatggctgttttgagacttatgcgagcatttactggaagggataaagtgattaaatttgacggttgctatcacggacatgcagatatgtttctagtgaaagcggggtctggtgtagctactctaggtttgccagattctccaggcgttccaaggacaactactgtcaacacactcactgctccctacaacgaccttgaagcagtaaaaaaattattctctgaaaatcctgatgccatttcgggagttatacttgagcccattgttggtaatgctggattcatcactccagaacctggattcctggaaggtttaagagaattaaccactgagaatgggtccttattagtttttgatgaagtaatgactggattcagaataagttatggaggtgctcaagaaaagtttggggttactcctgatttaaccaccctcgggaaagtaattggtggaggcttacctgttggggcttatggaggcaaaaaagaaataatgtctatggtagctcctgcaggacctgtttaccaagcaggtactttaagcggtaatccacttgctatgactgctggaataaaaactcttgaattgctcaaacaagacggtacatacgataaacttgattcattaacttctaggttaattgaaggtataattcagtctgcagaaa

SEQ ID NO: 292607 - DNA, 868 bp, Unknown
  Bacterial polypeptide expressing nucleotide sequence isolated from the Sargasso Sea
cgaaggttgctatcacggccattcggattcgctgctgatcaaggcaggctcaggtgctctgacgtttggcgtgcccagctcgccgggcgtacccgaagtgttggcacaacacactgtcaccctgccctttaacgaccttgcggcactggaaaccgccatggacgagctgggtgatcaggtcgcatgtgtgattaccgagccggttgccggcaacatgaactgtatcccttcggtcgagggctatctcgaaggcatgcgcgatctctgtactcgccatggcgcgctactaatctttgatgaggtgatgaccggtttccgattcggcaccggcggcgttcagggctttttgggcatcaccccggatctcacctgtctgggtaaggtgatcggcggtggtatgccggtgggcgccttcggcgggcgtcgcgacatcatggaacagatctcgccgctggggccggtctatcaggcgggcacgctatccggaaatccggtagcgatggccgcaggcctggcgaccatgtcgattatcagtgagcctggcttttacgatgatctcttccgtcgcacgggcgacttgtgcaccggcatgcgggaagccgcggccgcagcaggcgtgtcattcaccaccaatcatctaggctccatgtttggcgggttcttcactgaagacgaaaccgtgacccagtaccatcaggttattgactccaatgtggaagccttcaatcagtttttccatctgatgctcgataggggcgtgtatctcgcacccgcatcctttgaagccggcttcatgtcatcagcccacagcgacgacgacatcgccgccaccgttgacgctgcccgtgcagcgtttgcagcgctgtaa

SEQ ID NO: 292608 - DNA, 813 bp, Unknown
  Bacterial polypeptide expressing nucleotide sequence isolated from the Sargasso Sea
agagcattcaaaaatgtagatggcaagcctatcttttttaagtctgcaaaaggtccaattttaatagatgaagatgaaaatcaatacatagattttattggttcttggggtccaatgattctaggtcactcaaatccaattattttagatgctattaaggctcagctagaacttggaacaagttacggtgctcctacgagcttagaaaacagcctcgcaagaatgattaagggtcaagttccatcaatggagaaattgcggatggtaaattctggaactgaagctaccatgagttgcattaggcttgctagaggcttcacgggtaaaaataaaattattaaatttactggttgttatcatggacatgtagattcattgttagtcaaagcaggttctggggtctctacttttggcttaccggattccccgggaataccaaatgagttagcggcattaacatatagctgtccttataatgattttgaagcattattaaaaattactagcgaaattggtgatgaccttgctgcaattattgtcgagcctattgctggcaatatgggatttattccaggagaacccaaatttataaatgctttacgagaattatgcgacaaacacaattctctacttatatttgatgaggttatgtcaggttttcgtgtggggcttggaggagcacaggctatatataagattcaacctgacttaacagctcttgggaaagtcataggcggcggtcttcctgttggagcatttggaggtaagcaatcagttatggatcaactcgctccattaggtcccatatatcaa

SEQ ID NO: 292609 - DNA, 892 bp, Unknown
  Bacterial polypeptide expressing nucleotide sequence isolated from the Sargasso Sea
tgccgacggcaagcgttacatcgactatgtgctgtcatggggcccgatgattatgggtcacaaccacccccgagttcgagaagcggtcgtggaggcggcacaaagcgggctcagctttgggtgtcccaccgagattgaaattgaactcgctgaaaccattagcaaactggtccccagcatgccgctggtacgcatgacgagttcgggcaccgaagctaccatgagcgcaatccgtctggcgcggggtttcacaggtcgggacaagatcatcaagttcgagggctgctaccacgggcattcggactcgctgttgatcaaggcgggctccggggcgctcacgtttggcgtgccgagctcaccgggcgtacccgacgtgctggcacagcacaccgtcaccctacccttcaatgatctcgcggcgctcgaagccgccatggacgaactgggcgatcaggtcgcctgcgtgattaccgagcctgtcgctggcaacatgaactgcatcccctccatcgagggctacctagaaggtatgcgggagctctgtacccgccatggcgcggtattgatctttgacgaagtgatgactggctttcgatttggcactggtggcgtgcagggctttttaggtatcaccccggacctcacctgtcttggcaaggtcatcggcggcggcatgccggtcggtgcctttggcgggcgtcgcgacatcatggagcagatctcgcccctgggaccggtgtatcaagccggtacgctctcgggcaatcccgtcgcgatggcggcggggttggccactatgtcaattatcagtgaacccggtttctatgatgatctgtttcgacacacaagtgaactgtgcgcaggcatgagacaagcggcggcgagtgcgggg

SEQ ID NO: 292610 - DNA, 691 bp, Unknown
  Bacterial polypeptide expressing nucleotide sequence isolated from the Sargasso Sea
cgaccatgagcgccatccggctggcccgcggctacaccggtcgcgacaagatcgtcaaaattcgaaggctgctaccacgggcacgcccgactcccctgctggtcaaggccggctccggcgcgctgaccctgggtcagcccaacagccccgggcgtcccggccgactttgccaagcacaccctcaccctgcgtgttcaacgatctggactcggtgcgcgaagccttcagccagtacggcagcgagatcgcctgcatcatcgtcgagccggtggccggcaatatgaactgcatcccgccggtacccggcttcctggaagggctgcgcgccatctgtgacgagttcggtgccctgctgatcctggatgaggtgatgactggctttcgcgtctccctgcgcggcgcccagggccactacaacatcgacccggatctcaccaccctcggcaagatcatcggtgccggcatgccggtcggcgcctttggcggcaagaagaaggtgatgcagcacatcgccccgaccggccccgtctatcaggccggcaccctctccggcaacccggtggccatggctgccggcctcaccatgctggacctgctgctggagccgggcctctatgagcagctgagcgccaagaccgcccgtgttgccgaagggctgaaagccgccgccgccaagcacggatcccgcttg

SEQ ID NO: 292611 - DNA, 632 bp, Unknown
  Bacterial polypeptide expressing nucleotide sequence isolated from the Sargasso Sea
aatgaagatcagcgagtccaaaaaacttttttctcgagctcaggaagtcatgcccggtggtgtgaacagtcctgtcagggcattcaaatccgtccagtccgaaccattgttcatcactcatgcgaaaggatcacggcttttcgacgccgacggtaattcattcatcgattacattggctcctggggacctatgatcctcggccatgctgatccgagaatcacttcggaaatcgaaaaagcagtgcaaaaaggcacttccttcggaacccccacagaaggtgaaatcgaattggcggagatgatcagtgatgctgtcccaagtgtcgaaatggtccgtcttgtcaattccggatcagaagccgcaatgggcgtacttagagttgccagaggattcaccggtcgagacaaaatcattaaatttgagggttgttatcatggaagtgtggatgcacttttagtcaaagccggttccggtgcaaccactttaggaatcccagattctccaggggttccccaatcattcacggaacatacgctctctgcacctttcaatgatcttgatgcagtcatcgaacttacagaaaattttcctgatgaaattgcagcaatcgtgctggaaccggttgcgggaa

SEQ ID NO: 292612 - DNA, 658 bp, Unknown
  Bacterial polypeptide expressing nucleotide sequence isolated from the Sargasso Sea
atgggtttcattgaaccatcaaaagagtttattaaaagcctcttcaaccttaaggatcagcatgaatctttattgatttttgatgaagttatgactgggtttagagttgcgcaaggcggcgctcaggagttatttaaagtaaaaccagatttaacggctttgggtaaaattgttggtggtggattgcctgttggtgtctatggcggaaagacagaaattatgaatatgattgctccagatggacctgtctatcaagctggtacactttctggtaatcctgtagcagtaagtgctggcactgctttacttaaacaacttaaggatgcaaatatttatttagaattggatagagtaagtaaactttttttaaaaggtgttgcagctgcagctaaaaaaaatcttatcccattctcatattctgttaggggtgggatgtttgggttcttctttacaaatgatcttccacaaaacttcgaagacgttaaaaattcgaatcttgagttattcaaaaggttttttcagggtatgttagaagagaaggtctacttaccaccctctgcatttgaaagttgttttatttctacaaagcattctgaagaagtgattctaaaggctgtaaaatcagctgaaaaagttttctccaagataaaattatgaa

SEQ ID NO: 292613 - DNA, 538 bp, Unknown
  Bacterial polypeptide expressing nucleotide sequence isolated from the Sargasso Sea
gctcaagaaaagtttggggttactcctgatttaacaacccttgggaaagtaattggtggaggattgcctgttggagcttatggaggcaagaaagaaataatgtcaatggtagccccttcagggccggtataccaagcaggcactttgagcggcaatccactagcaatgactgctggaataaaaactcttgaactgctcaaacaagatggtacgtacgataagcttgattcaacaacttctagattaattgaagggataattcagtctgcagaaaataacggtattgctattaacggtggaagtgtaagcgctatgtttggatttttcttatgcgatgggccagttaggaactttgatgaagccaaaacaaatgattccaaactttttggtaagttgcatagagaaatgcttcaacgaggaatttacctagcgccgagtcctttcgaagctggtttcacatcattagctcacagtgaagaagaaattgataaaaccattgaagcttttgacgaatcttttaatgcaattaaaaaataat

SEQ ID NO: 292614 - DNA, 1237 bp, Unknown
  Bacterial polypeptide expressing nucleotide sequence isolated from the Sargasso Sea
atgcctggaggagtgaattctccagtaagagctttcaaaaatgttaactcgaaacctgttttttttaagagtgccaatgggccatatttaattgatgaagatgaaaatcaatatatagactttattggttcctgggggccaatgatattaggccacagtaatcctattatcgttaaggccatcaacgaacagctaaaaaatggtactagttttggggcaccaacaaaactagagaaccaaatggcttccctgattaaggaaagtattggctctattgagagaatcaggatggttaattctggtactgaagcaacaatgagttgcataaggttagcaagaggatatacgaacagaaataccattatcaaatttgatggttgttaccatgggcatgttgattcattgctcgttaaagcaggctcaggtgtatctacttttggcttacctgactctcctggaatccctgaggagcttgctaaattcactatttctattccatacaatgatactgaagcatttattaaaacctttgatgaagtaaaagatgatcttgctgcagtaattgttgaaccaatagctggcaacatgggtttcatcaaaggacatgctgaattcttaaatgatctaagagaaaaaactcatcaaaataattctgttctaatttttgacgaagtaatgtcagggttcagggtcaatctcggtggagcgcaatcaatgtataacattcaacctgacttgactgcgcttggtaagattattggtggaggtcttcctgttggggcatttggtggtaatgcagatattatgaaatgtcttgctcctgaaggccctgtttaccaagcaggtacactttcaggtaatccacttgccatgtcagcaggtatagctctaatctctgagcttcaaaaaactaacccatatgaacaattagaattaactattaaaaacttcttaaaccccatctctaaaagcttagagactaagggtattgatttttcttacaatgcttctggcggaatgtttggtttctttttctcaaaaaaactgcctgaaaattttgaagatgtgtgcgcaacagattcaaaagttttccaaaaattctttataaaatctttgagtaaaggtatttactttgcgccttcaaaatttgaagctggatttttatcaaccacgcatgtagacgaagtaatgcaatctgcatcccaaaaagtcttagatgcaatagaggaattatgaa

SEQ ID NO: 292615 - DNA, 1288 bp, Unknown
  Bacterial polypeptide expressing nucleotide sequence isolated from the Sargasso Sea
atgtccaagtcagaacaattatttcaacaagcacagaacaccattcctggtggcgtgaattcaccagttcgcgcttttaaaagcgttggcggtacacctgtttttattgatagcgccaacggggcttatttgtacgatgtcgatggcaaaaagtatatcgactatatagggtcctggggcccaatgttgctagggcataatcacccagcgatccgtgaagctgtagtcaaagctgcagaaaaaggtttaagttttggtgcgccttgccctgctgaaatcactatggctgaaaccatctgtgaattagtgcccagcatggaaatggtccgtatggtcagctcaggtacagaagcgaccatgagcgctattcgtttggcccgtggttttaccggtcgtaacagtattttaaaatttgaaggctgttaccacggccatgccgactctttattggttaaagccggctcaggcgctttaactctgggtgtgcccaattctcctggcgtccctgctgattttgccaaatataccctgaccgcagagtttaataacttagagcaagtgaagcagatttttgccgaacaaggtgccgatctggcctgtattattgtcgaacctgtggctggcaatatgaactgcatccccccagcgccgggctttttagaaggtctgcgagccctgtgtgacgagtacggtgcagtgctgatttttgatgaagtaatgacggggttccgggtggctttaggcggagctcaggcttattacaacatcaaacctgacctgacgaccttaggcaaaattatcggtggcggtatgccagtgggcgcttttggtggtcgtcgcgatattatgcagcatatagcgcctttaggtggcgtctatcaggcaggtaccttatccggtaatcccattgctatggccgctggtttagctgcactaactgaaatccgtaaacctggtgtgtatgatgttttaacagccaaaaccacacaactgattgaaggtttagcagcagttgctaaagaagtaggtattccattagcgaccacccaggtcggcggtatgtttggtgtattttttagcaaggaagcacaaatcactaactaccagcaagccactcagtgtgatatcgcagcctttaaacgctttttccaccttatgttggagcaaggagtttatctggcaccttcagcttatgaagcaggtttcttgtcgatagctcatagtgacgacgaccttgagtacactatagctgcggctaaaaaagcttttctccagctaaaagcataaa

SEQ ID NO: 292616 - DNA, 1288 bp, Unknown
  Bacterial polypeptide expressing nucleotide sequence isolated from the Sargasso Sea
tatgagatatcaaagaagtagtagattgtttaaagtagcaaaagaagttattcctggtggtgtaaattctccggtaagagcttttaaagctgttggaggaaatcctgtttttgtaaaaaaggcaaaaggagcatatttatttgatgaggataataataaatatatagattatatttctagttggggcccaatgattcttggacatgctcatccgaaagtaacagaatcaataattaaaacaacaaagaatggcacttcttttggaacaccaactgaattagaaacaaagattgcaaaacttgctattaaaatggttccaaatatagatcaaattagatttgtaaattcaggaactgaagcatgtatgagcgcaataagattagcaagaggatttactagaaaagaaaaaattattaaattttctggttgttaccatggtcattcagactcttttttaattcaagctggtagtggaggtgcaacgtttggaaatcctagtagtccaggagttactcagggatcggcaaaagacacgctaattgctgagtttaataacttggataatgtttctaacatatttgataaaaataagaataaaattgctgctttgattattgaacctgttgcaggaaatatgggatgtattcctcctaaaaaagattttttaaaaggtttaagatctctttgtgatgatcataaagcattactcatttttgatgaggtaatgactggatttagattatcaaaaggaggagcacaagaactatatgggataaaagccgatatagttacttttgggaaagttctgggaggaggattacctgttggagcatttgcatcaaatttagaaataatgtcatttttagctccaaaaggagaagtttatcaagctgggactctaagtggaaatcctttagctatgattgctggatataatactctaaaaatattagatgaagatcctgaaatttatagtagattagaaaaaaagacaaaaaaacttgaagaacaattaagatatatttcaataaaaaataaaattaagcatcaaattaatagaattggatctatgatttcaattcattttacagatcatccagttgtaaactttgaaacttcaaaaaaaggtgataatatttattataaaaaatattttcatggaatgttagatcaaaatatttatttaccgccaagtgcttatgaaagttattttttaaatgacgctatttcagataaggatattgatttaacttctgaagcttataatttagttagtttagacttttaa

SEQ ID NO: 292617 - DNA, 1285 bp, Unknown
  Bacterial polypeptide expressing nucleotide sequence isolated from the Sargasso Sea
catgtcaaacaacgaaaccctcttcgagcgcgcccagcgcaccatcccgggcggtgtgaactccccggtccgcgcctttcgctcagtaggcggcacgccgcgcttcatcgagcgcgcgcagggcccctacttctgggacgccgacggccaacgctacatcgactacatcggctcgtggggcccgatgatcctcggccacgtgcacccggaggtcctggaagcggtccagcgagtactggccaacggcttctccttcggcgcgccgaccgaatcggaagtggaaatcgccgaagaaatctgcaagctggtgccgtcgatcgaacaggtccgcatggtctcgagcggcaccgaagcgaccatgagcgcgctgcgtctcgcgcgcggcttcacgaaccgcagccgcatcgtcaagttcgaaggctgctatcacggccacgcggatagcctgctggtcaaagccggctcgggcctgctcacgttcggcaatccgacgtcagccggcgtgccggtcgatatcgccaagcacaccacggtgctcgagtacaacaacgtcgcggaactcgaagaagcgttcaaggcgttcggcaacgagatcgcctcggtgatcgtcgaaccggtggccggcaacatgaacctcgtgcgcgccacgcctgaattcctgcaagcgttgcggcgcctgtgtacggagtacggctcggtcctgattttcgacgaagtgatgtgcggtttccgcgtcgctctcggcggtgcgcaacaggtctacggcatcacgccggatctgacctgcctcggcaaggtgatcggcggcggcatgccggcggcggccttcggcggccggcgcgacatcatggctcacctcgcgccgctcggcggcgtctaccaggcgggtacgttatcgggcaatccgatcgcagtcgccgcgggcctgaagacgctgcaactgatccaggcgccgggcttctacgacacgctcgccgctcgcaccacgcgtctcgcgcaaggtctcgccaatgtcgcgcgcgaagcgaaggtgccgttctcggccgattcgctcggcggcatgttcggcctctacttcaccgggtcggtcccgaccagcttcgccgaagtcacgaagagcgatgtgccgcgcttcaatgcgtttttccacaagatgctcgacgcgggcgtgtacttcgcgccgtcggcctatgaagcgggctttgtttcgatcgcacacgacaacgcgatcatcgacgccacgatcgacgcggcgcgcagcgcgttcgcctcgctcgccgtctga

SEQ ID NO: 292618 - DNA, 1118 bp, Unknown
  Bacterial polypeptide expressing nucleotide sequence isolated from the Sargasso Sea
ttcctggtggcgtaattcacccgttcgcgcttttaaagcagtaggcggtacacctcgcttcatcacgaaagctgatggcgcttacatgtgggatgcggatggcaaacaatatattgactatattcagtcttggggccctatggttcttggtcacaataacgcccaaattcgcgaagcggtaattgaagcgtcgtataacggcctatctttcggtgcacctaccgaagctgaagtgatcatggccgaacttgtcagtgaattagttccttcaatggaaatggtgcgcatggtgaactcgggcacagaagccaccatgtcagccatccgtcttgctcgcggctacaccagcagaaacaaaattgttaagtttgaaggctgctatcatgggcatgcggactcacttctagtgaaagcaggctctggcgcactaacccttggtgtgccaagttcaccaggtgttccagcaaatgttgctgagcatacgcttaccgttgaatacaacaatctagatagcgttcgagaaatctttgaagctcacggcgatgatatcgcctgcattatcgttgaacctgtcgcaggtaacatgaactgtatccctcctgtggaaggcttccttgaaggacttcgcgctatttgtgaccaatatggcagcgtattgatttttgatgaagtaatgacaggcttccgcgtatctcgcggcggggcgcaagagcgttacaacatcaaaccagacctgacttgcttgggtaaagtcattggcggcggcatgccagtgggctgttttggtggccgtcgtgacattattactcatatcgcgccaactggacctatctaccaagcaggtacgctttcaggtaacccggttgccatggccgcaggtcttgctgcattaacccaaattaaacagcctggcctttacgactctatctttgagaatacacaaaagctcgttgatgggttccaagcgctggctgacaaacacaatattagcctaactactaatattgccggcagtatgtttgggatattctttacggacgtagagaaggtcactaactataagcaggcgattaactgtaataccgagcagtttaatagttttatcacggtatgttaga

SEQ ID NO: 292619 - DNA, 928 bp, Unknown
  Bacterial polypeptide expressing nucleotide sequence isolated from the Sargasso Sea
tctgaaattatttaaagaagccaaattacatattcctggaggtgtaaattctccagtaagggctttcaaaaatattaatgggaatcctatattttttaaaaaagcaaaaggttcgaaactttttgatgaagataataatgagtatatagattacataggatcttggggtcccatgataatgggccattcgcatccaaaaattataaaagccatatccaaacaagttaaattaggaactagttatggtgctccaactagcatagagtcgaaaactgctgaactaataaaaaaatgcattccttctattgaaaaaataagaatggttaactctggaacagaagcaactatgagcgctattagacttgcaaggggttttactaaaaaaaataagattattaaatttgatggttgctaccatgggcatgctgactctttattaataaaagcagggtcgggagtatctacttttggattgcctgattctccaggagtacctcctcaacttgcaaaagaaacattaagttgtgaatttaataactcaaaagactttttaaaaatatttgaaaagattaagaatgatttagcagcagttattattgagcctattgcaggaaatatgggattcatcccaagtgatccatcttttttaaaattaattagaaagaagacagctcaaaataaatcgctattaatatttgatgaggtgatgtctggattcagggtatccttaggcggcgcacaagaaatctataaaataaaacctgatttaacaactttgggaaaaataattggtggcggtttgccggttggggcatttggaggaagaaaagatattatggattacttagctccaaatggacctgtttatcaagcaggaactttatctggaaatcctttagctatggccgctggatcagcactaataaaa

SEQ ID NO: 292620 - DNA, 1045 bp, Unknown
  Bacterial polypeptide expressing nucleotide sequence isolated from the Sargasso Sea
ggaaaaaggcacttttccttcggaacccccacagaaggtgaaatcgaattggcggagatgatcagtgatgcggtcccaagtgtcgaaatggtccgtcttgtcaattccggatcagaagccgcaatgggcgcacttagagttgccagaggattcaccggacgtgacaaaattattaaatttgagggttgttatcatggaagtgtggatgcacttttagtcaaagccggttccggtgcaaccactttaggaatcccagattctccgggagttccccaatctttcacggaacataccctctctgcacctttcaatgaccttgatgctgtcatcgaactgacagaaaattttcctgatgaaatttcagcaatcgtgctggaaccagttgcaggaaacatgggtatgatacctcctgaacacggattcctcaagggactcagagaactgtgtgatcgagagggaatccttttgatttttgatgaagtgatgaccggctttcgtgtcgacttctcgggagcccaagcactttttcaggtcatgcccgatcttagtatctttgggaaagtgattggcggaggacttccggttggggcttatggggggcgaagagaaatcatgctccaggttgctcctgctggtcctgtctatcaggctggtacgctatcaggaaacccgattgcagtttcagcgggtaaaaccatgctgaaaatcttaaaggaggaagatccctatgcagatttaggacaaaaaacggcaactctcaatgaagcgttaagcgatgctgcaaagaataaaggaattcctctggaaacctgctccatgggaggtatgttcggttttttcttctctgaaaaaaaggtcagaaactatgaagatgcattgaaatgtaatcgtgattacttcatcaccttctttagagaggtattgagcaggggtatctacttagctccttctccctttgaatcattatttctctcttcaagtcattctgaggcggatcttgatcagactattgaagcatttcaacatggattggctgccatctaga

SEQ ID NO: 292621 - DNA, 876 bp, Unknown
  Bacterial polypeptide expressing nucleotide sequence isolated from the Sargasso Sea
aatgacaaaaaaattattcaatgaagctaaaaagtatattccaggtggagttaactcaccggttcgtgctttcaaagctgtatcaggtacaccgctttttatagacagggcttcgggttcttatttgtatgacactgaaaataaaaaatatatagactacgttggatcttgggggccaatggtagtaggacattgccatcccgaagtaattaaagcagtacatgattcagtcgataacggcttaagttttggcgcaccaactgagattgagactcagatggctaataagatttgtgagctcatgccatcaattgaaaaaattcgtatggtgaattcaggaacagaggcagccatgagcgctattagactggcaagaggttacaccaaaagagatatgattattaaatttgaaggttgttatcatggtcatactgattcattactcgttaaagctggatcaggagctctaacattcggtgtaccaagctcacccggagtccctgaagatcttgccaaacaaacagtaacgcttacctataatgatattgatcaactcaaagatacatttaaaagtattggcgaaaaaattgcagcggttattattgaacccatagcaggaaatatgagtttagtacccgcaaataaaaaattcttagaactacttagaaagctctgtagtgaaaatgagactatattaatttttgatgaagtaatgacagggtttcgagttgcattgggtggtgctcaatcaatatataatattacccccgatttaactatactcggtaaaattattgggggcgggatgcctgttggggcctttggcggaaaagaaaatattatgagtcatatttccccagatgggacctatatacc

SEQ ID NO: 292622 - DNA, 1288 bp, Unknown
  Bacterial polypeptide expressing nucleotide sequence isolated from the Sargasso Sea
atgcaaagagctaaatctcgcaaactattcaataaaacaaaaaaaatgatacctggtggtgttaattcgcctgttcgatcattttcagctgtctctgggacaccatttattgtgaagaaatccataggttcaagaatcattgatatagacaataactcttatgttgactttattggttcatggggagcaatgatactaggtcacagcgataaaagaatactcaaaaaacttaatacagtttctaaaaatggtttaacatacggcgcgccaaatactaccgagactgaaatagcagaatttataatctctaacattccatccatagaaaaaataagaatggttaattctggcaccgaagctacaatgagtgccgctagattagcgcgcgggtatactggtaaagatataataataaaatttaatggttgttaccatggacatggggatgctttcctagtaaaagctggttcgggagcagcaacttttggcaagcctagctctagcggtgtaacaaaaggttcatctaaggatactatatcgctaccgtataatgattatttagctttagagaaaatattcaaaaaaaataaaaataagattgcatgtgtaatcgtcgagccaatagcaggaaatatgaactttgtaagatccactaagaagttcctgcaaactgcgagaaaattatgtactcagcataaatcgttgcttatttttgatgaagtgatgactggtttcagagtaaactttcgtggtgcacaggcaatttatggaataagacctgatttaacaacatttggtaaagtgattggtggagggttgcctgtcggtgcgttcggtggtaaggcgaagataatgaatgaactcgcaccagagggcccgatttatcaagctggaacactatctggtaatcctctagcgatgcattgtggactggagacgcttaaaatcatatcaaacaagatatttttcaaaagattaagcaataagacaagagaatttgttaatggaatgataaacatagcaagcaaacataaatttcctttcactgctgactcagagggtggaatgtttggactgtatttcacaagtaaaattccaaaaaacataacagatatagaaaagtctaatcttcacacctttaatgatttcttcaattatatgcttgataatggtgtcttttttgcaccgtctgcatatgaagctgggttcatatctgattctcatacacaaaaagattttgaaaaagtatacaagttatttgataagtttataaaacttactacttgat

SEQ ID NO: 292623 - DNA, 703 bp, Unknown
  Bacterial polypeptide expressing nucleotide sequence isolated from the Sargasso Sea
tatgcctggtggcgtaaattcacctgtaagagcctttaaaaatattaatggaaatcctattttttttaaaaaagcaaaagggccatatctaatagacgcagataataataaatatattgactatattggctcatggggtcctatgattttaggacattctaatccaaagattattaaagccgtttctagacagttagagcttggaaccagttatggggctccaacgagcattgaatctgatacagcaaagttaattaagaaatgcttcccttctatccaaaagattcgaatggttaattcaggtactgaagcaactatgagtgctgttagacttgctaggggatatactaataaaactaaaattattaaatttgatggttgttaccatggtcatgtagattcgcttttaattaaagctggatcaggtgtcagtacatttggcttgcctgattctcctggtattccaaatgaattagcaaagaaaactttaagctgtgaatttaataataaaggtagtttcttaaaaatctttaataaagtaaaaaatgatcttgctgcagtgattgttgaaccaattgctggaaatatgggatttgttcctggcgataaatcatttttaaagttattaagaaaaaaaacctctgaaaataattctttgttgatttttgatgaagttatgacaggttttagagtgtctctaggt

SEQ ID NO: 292624 - DNA, 1411 bp, Unknown
  Bacterial polypeptide expressing nucleotide sequence isolated from the Sargasso Sea
atgacgttccgcgcgtccgcgcgcgcgccgatcgcgaaccagacggagcgtcgacacaacgccaagggtttatccagacgcgtctctcgcgtctcgatcgtcgcccaggcggtgtccgcgcccgagttgaacacgaagaagagcgaagccatcttcaaggcggcgcaagatatcttacccggtggggtgaactcgcccgtgcgagcgtttaaatcggtcggtggacaaccgatcgtgttcgacaaggttaaggacgcgtacgcgttcgacgtggacgggaacaagtacgtcgattacgtcggctcgtggggtccggcgatctgtggacacgcgaacgaacgagtgaatgaaaagctcaaggcgcagatcgataaggggacgtcgttcggtgcgccgtgtgagttggaaaatgtcttgggcgagatggtgatcgaacgcgtgccgagcgtggagatggtgcgcttttgcaactctggtaccgaggcgtgcttgtccgcgttgcgcgtgatgcgcgcgtacaccggtcgggacatgatcatcaagttcgaggggtgctaccacggtcacgccgatccgttcctcgtcaaggcgggttcgggcgtcatcaccctcggcttgccggattctccgggcgtgccagcggcggccacctcgacgacgctctgcgcgacgtacaacgatctcgatgaggtcaaggctttgtttgccgaacacaaggacaagatcgcgggcgtcatcttggaaccggtcgtcggtaactctggtttcatcgttccggataaggaattcttgcaaggcttgcgcgaggtgtgcaccgccgagggcgccgtcttgtgctttgacgaagtcatgaccggcttccgcatcgccaagggttgcgcgcaagagtactggggcgtcaccccggatttgaccaccatgggtaaggttatcggtggcggtatgccggtcggcgcgtacggcggtaagcgcgaaatcatggacatggtcgccccggcgggtccgatgtaccaagcgggcaccttgtccggtaacccgctcgccatggtcgccggcatcgagaccctctccatcttgggcgaaccgggtcagtacgaaaagttggacaagatgaccaagcgcttgatcgagggcatcttgaaggcgggtcgcgacaacggccacgcggtgtgcggcggctccatctccggcatgtttggtttcttcttccaagagggtccggtgaagaactttgccgacgcggcgaagagcgacaccgacaagttcggccgctggcacagagcgatgctcgaggagggcgtctacctcgcgccgtcctcgtacgaagccggtttcacctctttggcgcacaccgaggaggacatcgacttcaccatcgccgccgcgcagcgcgccatggctcgcatctaaa

SEQ ID NO: 292625 - DNA, 1285 bp, Unknown
  Bacterial polypeptide expressing nucleotide sequence isolated from the Sargasso Sea
atgaagatcagcgagtccaaaaaacttttttctcgagctcaggaagtcatgcccggtggtgtgaacagtcctgtcagggcattcaaatctgtacagtccgaaccattgttcatcactcatgcgaaaggatcacggcttttcgacgccgacggtaattcattcatcgattacattggctcttggggacctatgatcctcggccatgctgatccgagaatcacttcggaaatcgaaaaagcagtgcaaaaaggtacttccttcggaacccctacagaaggtgaaatcgaattggcggagatgatcagtgatgcggtcccaagtgtcgaaatggtccgtcttgtcaattccggatcagaagcggccatgggagcacttagagttgccagaggattcaccggtcgagacaaaatcattaaatttgagggttgttatcatggaagtgtcgatgcacttttagtcaaagctggttccggtgcaaccactttaggaatcccagattctccaggggttccccaatcattcacggaacatacactctctgcgcctttcaatgatcttgaagcagtcatcgaactcacaggaaattttcctgatgaaattgcagcaatcgtgttggaaccggttgcgggaaacatgggcatgatacctcctgaacacggattcctccagggactcagagaactgtgtgaccgagagggaatccttttgatctttgacgaagtgatgaccggctttcgtgtcgatttctccggagcccaagcactttttcaggtcatgcccgatcttagtatctttgggaaagtgattggcggaggacttccagttggggcttatggggggcgaagggaaatcatgctccaggttgctcctgctggtcctgtctatcaggctggcacgctatcaggaaacccgatagccgtttcagcgggtaaaaccatgctgaagatcttaaaggaggaagagccctatgcagatttgggacgaaaaacggcaactctcaatgaagcgttaagcgatgctgcaaagaaaaaaggaattcctctgaaaacctgctccatgggaggtatgtttggttttttcttctctgaaaaaaaggttagaaactatgaggatgctttgaaatgcaatcgggattacttcatcaccttctttagagaggtattgagcaggggtatctacttagctccttctccctttgaatcattatttctctcttcaagtcattctgaggaggatcttgatcagactgttgaagcatttcaacatggattggctgccatctaga

SEQ ID NO: 292626 - DNA, 729 bp, Unknown
  Bacterial polypeptide expressing nucleotide sequence isolated from the Sargasso Sea
aagcagtgaaggcgctgttcgccgaaacccccgatgccatcgccggcgtcattctcgagcccatcgtcggcaacgccgggttcatccaacctgagccaggtttcctggaaggcctgcgggaactcacgaaggagcacggtgcccttctcgtgttcgacgaagtgatgacgggcttccgcatcagttacggcggtgcacaagcccatttcggtgtcacaccggacctcaccacgatgggcaaggtgatcggtggtggtttgccggtgggtgcctatggcggccgcgccgacatcatgggcatggtggctccggccggcccgatgtaccaggccggcacgttgagcggcaatccattggcaatgaccgctggcatcaagacactcgaactgctgaaacagcccggcagttacgaaaaactcacggcgacaaccgccaagctgattgccggtatcaagcaggcggctacggcggctggactccccttcaccggtggcagcgtcagcgccatgttcggcttcttcctctgcgaaggaccagtgcggaacttcgaggacgccaaggcaacggattccgagcgcttcggcaagttgcatcgcgccatgctggagcgcggtgtttacctggccccatccgccttcgaagcgggcttcacctccctggcccactccgacacggacatcgaagccacgatcaatgccttccgcgacagcttcgcggaagtggcctgac

SEQ ID NO: 292627 - DNA, 724 bp, Unknown
  Bacterial polypeptide expressing nucleotide sequence isolated from the Sargasso Sea
gttgaacaccagccgctcccaggccatctttggcgaagcgcaggggctgatgcccggtggcgtgagctcccctgtgcgggcgttcaagtcggttggcggccagccgatcgtgttcgaccgggtgaagggtccctacgcctgggatgtcgacggcaataaatacatcgactacatcggcagctggggcccggccatctgcggccatgcccatcccgaggtgatcagcgccctgcaagaggcgatcgaaaagggcaccagcttcggcgccccctgcgctctcgagaacactctggccgagatggtgatcgacgccgtccccagtgtggagatggtgcgcttcgtcaacagcggcaccgaggcctgcatggcagtgctgcgcctgatgcgagccttcaccggtcgcgacaaggtgatcaagttcgagggctgttatcacggccatgcggacatgttcttggtgaaggcaggctccggggtggccaccctcggcctcccagattctcctggcgttccgcggagcaccaccgccaacacgctcacggcgccttacaacgatctggaggccgtcaaagcgctgttcgccgagaaccctgatgccattgccggcgtgattctcgaacccatcgtcggcaacgccggattcatacagcctgagcctgggttcttggaaggcctgcgggaactcaccaaggaacatggcgcgctgctggtgttcgatgaggtg

SEQ ID NO: 292628 - DNA, 1234 bp, Unknown
  Bacterial polypeptide expressing nucleotide sequence isolated from the Sargasso Sea
atgcctggaggtgtaaattcacctgtaagagcatttggtaatgtaaatagcacccctatctttattaaaagctcctctggagcgtatttacatgatgttgacggaaatgattatgtagattttattgggtcctggggtccaatgattttaggccacagcaacccaaaaataataaaagcaattaaggatcaggctgatttaggtacaagttatggagctccaacagaagcagagacatctataggtgaattaattagaacggtaatgccctctattgaaaaaattagaatggtaaattctggaacagaagcaactatgagctgtataaggttagccagaggatatactggtcgtaataaaattattaaatttactggttgttatcacggtcatgtagactctctccttataaaagcaggttcaggagtatcaacttttgggctacctgactctcctggcatacctgaagaacttgcaagacatactttaagtgttccctataatgacataaatgcttttttggaagtctttgaatctattaagaatgagcttgctgccgtcattattgagccaattgctgggaatatgggttttattcctggaaacaaagattttttagaaactttaagagctaaaacacatgaaaatggatcagtattaatttttgatgaagtaatgacaggctttagagtatctttagggggagctcaagaattatatgaaatcacaccagacctaactgctttaggaaaagtaataggtggaggtcttcctgtaggagcatttggtggcaaagctgaaataatgaacttccttgcaccagaaggacctgtttatcaggcaggtactctttctggcaatcctcttgcagttgctgctggaaaatgtcttattaatgaactcataaaaacaaatccttatcatgagcttgaggcaaattctaactatctattaacaaatattaaaaatgagatgtttaagaaagaaatacccttctcttttaatcaaattggtggaatgtttggattcttttttactgaagaatttccaaaaaactttgatgatgttagctcatcaaatgataagtattttgaaagtttttttaaggactgtctaaatcaaggtatatactttgcaccatcaaaatatgaagctggatttatctcaaccaagcacaataaaaaaattcttgatgaggtaataaataaggttaaagaaatatatgggacatgat

SEQ ID NO: 292629 - DNA, 1444 bp, Unknown
  Bacterial polypeptide expressing nucleotide sequence isolated from the Sargasso Sea
ctgttccttcccgacccgcgcgatccctcgcgcgccgatacgccgcagaccgcgccgcgggcctgccgcgcgcgtctccggtacaatcggacgatcgttccgcccaggcgccgcggcccgtgcacaggcccccgcgcccttctctcgcaggtttcgtccatgtccaacaaccagatcctcttcgaacgcgcccagaaaaccattcccggcggcgtcaactcgccggtgcgcgcattccgttcggtcggcggcacgccgcgcttcgtcgcgcgcgcacaaggcccgtacttctgggatgccgacggcaagcagtacatcgactacatcggctcgtggggcccgatgatcgtcggccacgtccatccggaagtgctgtcggccgtgcaggacgtgctcgccgacggcttctcgttcggcgcgccgaccgaagccgagatcgagatcgccgaggaaatctgcaagctcgtgccgtcgatcgagcaggtgcggatggtgtcgagcggcaccgaggccacgatgagcgcgctgcgtctcgcgcgcggcttcacgggccgcagccgcatcgtcaagttcgagggctgctaccacggccacgcggacagcctgctcgtgaaggccggctcgggcctgctgacgttcggcaacccgacgtcggccggcgtgcccgccgacatcgcgaagcacacgaccgtcctcgaatacaacaacgtcgccgcgctcgaagaagcgttcggcgcgttcggcgacgagatcgccgccgtgatcgtcgaaccggtcgcaggcaacatgaacctcgtgcgcggcacgcccgaattcctgaacgcgctgcgcgcgctgtgcacgaagcacggggccgtgctgatcttcgacgaagtgatgtgcgggttccgcgtcgcgctcggcggcgcgcaggcctactacgggatcacggccgacctcacctgcctcggcaaggtgatcggcggcgggatgccggctgccgcgttcggcggccgccgcgacatcatggcccacctcgcgccgctcggcggcgtctaccaggccggcacgctgtcgggcaacccgatcgcggtcgcggccggcctgaagacgctgcaactgattcaggcgcccggcttctacgacgcgctcaccgcacagacgaagcgtctcgccgacggcctcgcggccgaagcgcgtgcggccggcgtgccgttcgcggccgactcgatcggcgcgatgttcggcctctacttcgccgaacgcgtgccggcgagcttcgccgaagtgacgaagagcgacaccgagcgcttcaaccgcttcttccacctgatgctggacgaaggcgtgtacttcgcgccgtccgcgtacgaggccggcttcgtgtcgagcacgcacgacgacgcggtgatcgacgcgacgctcgcggccgcgcgccgcgcattcgcggcactcgccgcctgac

SEQ ID NO: 292630 - DNA, 1291 bp, Unknown
  Bacterial polypeptide expressing nucleotide sequence isolated from the Sargasso Sea
atgaaaagtatcaacaaatcaattaaattatttaaagaggctaaattacatatgccaggaggtgtcaattctccggtaagggcatttaagaatattgatggtaatcctatattttttaaaaaagctaaaggtccatatgtttatgatgaagatggtaataaatatattgactatattggctcatggggtccaatgattatggggcattcgcacccaataattattaaggcgattgctaaacagatgaatttaggtactagttatggtgctccaacaagtatcgaatcagacacagctaaattaattaaagaatgtgttccgtcgatagaaaaaattagaatggttaattcaggtactgaggcaaccatgagtgcaattaggcttgccagaggatacacgaatagagataagattattaaatttgatggatgttatcacggacatgttgactctttgttgataaaggcggggtctggtgtctcaacttttggactacctgactctccaggaattccttcagaactagctaaaaaaactctaagctgtgaatttaataataaagaagaatttctaaaagtatttaataaaaataaaaaagatatagctgcggtaataattgagcctattgcaggaaacatgggttttatcccagcagataaatctttcttagaattactaagaaaaacaactaaggcaaataactcgttactaatttttgacgaagtaatgtcgggtttcagggtggctcttggtggagcgcaagaactttataaaattaagccagaccttactactcttggtaaagttatcggaggcggattgccagttggagcttttggtggaaataaaaaaattatggactatctggctcctaatggtcctgtatatcaggccggcactttgtctggcaatcctcttgcaatggcggcaggatcgtctttaataaaattactaatcaagaataatccatataaaaatcttgaaagtaaagctagtgccctactgactaatatgaaagatatttttcaaaaatatgatatacccttatctgtaaatcaaaaaggaggtatgtttggatttttcttttcaaaaaaactgcctaagaatttaaatgatgtcattaacacagatgacattctttttaaaagttttttgaacaaatcaattgaaaatggcatatattttgctccttcaaagtttgaagcaggatttatatcaacaaaacatactaataaagaaattaataatacaataaggattattcaaaatattttaaaaaaaggaatttaaa

SEQ ID NO: 292631 - DNA, 829 bp, Unknown
  Bacterial polypeptide expressing nucleotide sequence isolated from the Sargasso Sea
aatgaatctattttctgaagcaaaaaaagtaatagctggtggtgtaaattctcctgccagatcattttctggagtaggaggtgagccgctttttttcaagtctgcaaaaggtgcttatataagaactgagagtggtcgtgagctaattgattatgttggatcatggggtccgatgattctcgggcattctttcccaccagtattaaactctataaaaaaagcaattgagaatggattaagctttggggcgccaacaaaaatagagacaaaacttgcgaagaaagtgaaagattttatcccttctatcgaaaaattaagaatggtaagcacgggcactgaagcaactatgagtgcaattaggttagctcgaggctacacgggaagggatctcattgttaaatttgagggctgctatcatgggcatgttgactcccttctcattaaggctggctcaggagcactaacgcatggagcacctagttcaccagggataccgaagtctctagcaaaaaacacattaattattccttttaatgatcgtgatgccctaaaaaaaatctatgaatcctatggtgatcaaatcgcatgttctattgttgagccaattgctggaaatatgaatatgattaaaccaattccaggctttcttgaagatttgcaagatattagcaaacgacacgggtcactattaatttttgatgaggtaatgacaggatttagggttgcaaaaggaggggcgcaatcaatctataatattgagcctgatatgaccgcacttggaaaattattggaggaggattacctgcagctgcttttggtggaagagata

SEQ ID NO: 292632 - DNA, 400 bp, Unknown
  Bacterial polypeptide expressing nucleotide sequence isolated from the Sargasso Sea
catgcagatctcacaatctaaaaagttattttctctagcccagcaaagactccctggaggagtaaacagtccagtccgcgcatttaaatctgtaaatatgacacccttattcattgcgagtggccaaggttcaaagctctttgataaggatggtaacgaatatattgactatgtaggttcgtggggcccaatgattcttggacacgccaaccagaaagttgttagtaagcttaaagaaactctggacaatggaacttcttttggtgcaccaactgaaggcgagactttgttagctgaaatgatatgtgacgcagtaaaaagtattgaaatgattcgcctagtaaaattcaggtacagaagcagcaatggctgttctgcgattggcacgtggttatactaa

SEQ ID NO: 292633 - DNA, 940 bp, Unknown
  Bacterial polypeptide expressing nucleotide sequence isolated from the Sargasso Sea
tggaacggaagcaacaatgagcgctattagacttgctagaggttttacaaataaaaataaaatcataaaatttgatggttgttatcatggtcatactgactctttattaataaaagcaggttcaggagtatcaacatttgggctgcctgactctccaggaatacctcctcaattagctaaagaaaccctaagttgtgaatttaataatacagaagcttttttagaaatatttaacaaagtaaaagacgatttagctgcagtaattattgagcctattgcaggtaatatgggctttgttcctggtgagttatcttttctaaagatgattagagaaaagacttccaaaaacaaatcgttgttaatatttgacgaagtcatgacaggttttagagtctcacttggtggagcccaagaaatttataaaattaaacctgatctaactacactaggtaaaattattggcggtggcttgccagttggagcatttggtggaagaaaagatgttatggattgcttggctccaaatggtcctgtgtatcaagctggaacgttatctggaaatccgctagctatggcagcaggctcatctttaattaaaattttaatgaaagataatccatataaaaaacttgaagataaggctaaaaaaatgttggataaaatgaaatgtcttttcatagaaaataatattgatttatctacaaatcaaattggaggtatgtttggattctttttttcaaaagaattacctaaaaatcttaatgatgtaattaatactaatgataaacaatttataacattcataaatgagtgtattaaaaatggaatatattttgctccatcaaaatttgaagcaggttttatttctacaaagcatacgaatgctgaaataaataatacaattggtactattaaaaaaatattaaaaaaaggaatataa

SEQ ID NO: 292634 - DNA, 457 bp, Unknown
  Bacterial polypeptide expressing nucleotide sequence isolated from the Sargasso Sea
atgcctggaggtgtaaattcacctgtcagagcatttgggaatgttaatagtactcctatttttattaagagcgcctctggggcatatttacatgatgttgacggaaatgattatgtagactttattggatcctggggtccaatgattttaggccacggtaatccaaaaataattaaagcaattaaggatcaggctgatttaggaacgagttatggggctccaacagaagcagaaacgtctataggcgagttaattagaacggcaatgccctctattgaaaaaattagaatggtaaattctggaacagaagcaacaatgagttgcataaggttggctagaggatacacaggccgtaacaaaattattaaatttactggctgttatcatggtcatgttgattctcttcttataaaagcaggttcaggagtatcgacttttgggctacctgactctccag

SEQ ID NO: 292635 - DNA, 1297 bp, Unknown
  Bacterial polypeptide expressing nucleotide sequence isolated from the Sargasso Sea
atgaaaactaaaaactctgaaaaactttttgaaaaatctaagaatcatatagctggcggtgtaaattctcctgtaagagcatttaaaagtgtgggaggttcgccaattttctttagaaaatctagaggttgttacctatatgatgaagatggcaataaatatctagattttgtaggttcttgggggccaatgattctaggtcattccaataaaaaaattgcagatgctataaaaaagcaatctagcaagggtataagctttggagcaccaacaaaaaatgaattagaaattgcaaaacttataaagtcatatgttccaagcatagaaaaactcagaatggttaattctggtactgaagcaacgatgagctgcataagattagcaagaggaacaacaaaaagaaatatcattataaaatttattggttgttatcatggtcatgtagactctcttctggttaaagctggttccggtctagcaacacttggagtaccagactctccaggaattccagaagaactatctaaacttactatcactattccatataacgatataaatgcattaaaagaggcctttaatagtcattcacaagatattgctgctgtcattgttgaaccgatagctggaaatatggggtttattgaacctagtgaagattttcttaaagaattaagacaaatctgcacagaaaataattcaatattaatctttgacgaagtaatgacaggattccgtgttgcaagaggaggagcacaagaattatttaatataaatccggatttaactgccttaggaaaaattgttggcggtggcttaccagtaggagtatatggtggcaagaaagaaattatggataatatcgctcctgatggacctatttatcaagcaggcactttatcgggtaatcctattgcagttagtgcaggtacagcgttacttaagcagcttaatgaccaaaatatctacagaaaacttgaagaaaatgctcacgttttcttgcaaatagtaaaggactattgtgatcaaaataaaataccattttcgtttaatgtaagaggtggtatgtttggttttttctttagtaaaaaccttcctatgaattttagtgatgtcgaaaattcaaatattgagctttttaaaaagttttttcgcggcatgttggaagaaaatatttatcttcctccttcagcctatgaaagttgttttatttcaacagagcataatgaggataaactagtaaaagcggctaaaactgcaataaaggttttagataagataaataatgaagtttgat

SEQ ID NO: 292636 - DNA, 1153 bp, Unknown
  Bacterial polypeptide expressing nucleotide sequence isolated from the Sargasso Sea
atgtgggatgcggatggtaagcaatatattgactatattcagtcttggggccctatggttctaggtcacaataacgcccaaattcgcgaagcggttattgaagcgtcgtataacggactgtctttcggtgcacctaccgaagctgaagtgatcatggctgagttggttagcgaactggttccatctatggaaatggtacgcatggtgaactctggtacagaggccaccatgtcagctattcgcctggctcgcggctacacgagcagaaacaaaattgttaagtttgaaggctgctatcacgggcacgccgactcactgctagtgaaagcgggctcaggggcgctaacccttggtgtaccaagttcaccaggtgttccagcaaatgttgctgagcatacgcttaccgttgaatacaacaacctagacagcgtaaaagaaatcttcgaagcccatggcgatgatattgcgtgcattatcgttgaacctgtcgcaggtaacatgaactgtatccctcctgtggaaggcttccttgaaggacttcgcgctatttgtgaccaatatggcagcgtattgatttttgatgaagtaatgacaggcttccgcgtatctcgcggcggggcgcaagagcgttataacatcaaaccagacctgacttgcttgggtaaagtcattggcggcggcatgccagtgggctgttttggtggccgtcgtgacattattactcacatagcaccgacagggccaatttaccaagcgggtacgctttctggtaacccagtagcaatggctgcaggtcttgctgctttaacgcaaataaagcagcctggactttacgattcaattttcgaaaatacgcaaacgctagtggatggtttccaagcccttgctgacaaacacaatattagtctaactactaatattgccggcagtatgtttgggatattctttactgacgtagagaaagtcacgaactacaagcaagcaattaactgtaataccgagcaattcaacaagttctatcacggtatgctagagcaaggcgtttacttagcacctgcatcttatgaagcgggctttgtttctaaagcgcatgacgctgcagtcattgagcaaacccttgctgcagcagataaagtgttctcaacactttaag

SEQ ID NO: 292637 - DNA, 1291 bp, Unknown
  Bacterial polypeptide expressing nucleotide sequence isolated from the Sargasso Sea
aatgaaaactaaaaactctgacaaactttttgagaaatctaagaatcatattgctggcggtgtaaattctcctgtcagagcattcaaaagtgtaggagggtctccaatattctttagaaaatctagaggatgctatctgtatgatgaagatggtaataaatacctagattttgtaggttcttggggtccaatgattcttggtcattctaacaaacagatcactgaagctataaagaaacaatctagcaaaggtataagttttggagcaccaacaaaaaatgaactagaaattgcaaaacttataaagtcttatgtgcctagcatagagaaattaaggatggttaattctggaactgaggcaacaatgagctgtataagactggcaagaggaacaacaaacagaaatatcatcataaaatttgttggttgttatcatggccatgtagattctcttttagtcaaagctggctcaggcctagcaactcttggagttcctgattctcctggaattccagaagaactctctaaacttactatcactattccatataacgacaataatgcagtaaaagaggctttcaataaacatgcaaaggatattgctgccgttatagttgaaccgatagctggaaatatgggatttattcaacctaatgaagattttcttcaaaatttaagacaagtttgtacagaaaataagtcaatattaatttttgatgaagtgatgacaggttttcgagttgcaagaggtggagcacaagaattatttaatatagatccagatttaactgctctaggtaaaattgttggaggtggattgccagtaggggtctatggcgggaaaaaagaaattatggataacattgctccagatggtcctatttatcaggcaggaactttatcaggaaatcctatagcagttagcgcaggcacagctctacttaaacaattaaaaaatcaaaagatttatgaaaaacttgaaaaaaatgcaaaaaattttttaaaaataataaaagattactgtgaccaaaataaaatacctttctcatttagtgcaagaggaggaatgtttggtttcttctttagtaaaaatctacctaaaaattttgatgaagttgaaaatactgatatagagttttttaaaaagttttttcgtggaatgttagaagaaaatatatatttaccaccttctgcttatgaaagttgttttatatctactgagcataatgaagataaactagtaaaagcagctaaaacagcaataaaggttttagataagattaagaaatga

SEQ ID NO: 292638 - DNA, 1240 bp, Unknown
  Bacterial polypeptide expressing nucleotide sequence isolated from the Sargasso Sea
catgcccggaggagtaaattcaccagtaagggcctttaagaatattaatggtaatccaatcttttttaagaaagcaaaaggtccatacatttttgatgctgataataataaatatatagattacataggttcatgggggcctatgatcatgggtcactctcatcctgaaattgttaaatcagtttcaaaacaactccaacttggaactagctatggggctcctacaagcattgaatcaactactgctaagctaataaagaagtgtataccatcaataaaaaaaataagaatggtgaattctggaacagaagcgacaatgagtgcggtaaggcttgctagaggttatacaaagagaaataaaataattaaatttgatggttgttatcatggtcatgttgattcgttacttataaaagcaggttctggagtgaccacatttggcctacctgactctcctggaatcccaaaagagctggcaaaacaaacactaagttgtgaatttaataacaaagatgagtttttaaaaatttttaataaggtaaagggtgatcttgctgcagtaattattgagccaatagccggaaatatgggatttatacctgcagataaatcttttttaaaacttatcagagagaagacttctcaaaataaatcaatattgatttttgacgaagttatgtcaggttttagggtttctctaggaggagctcaagagatatataaaataaagccagacttaacaactcttggcaaagtaattggtggaggtcttccagttggtgcctttggtggtcgtaaagatattatggattacctagcgccaaatggtcctgtttatcaagctggcacactatctggaaatcctttagccatggcagctggctcaaagctaatcaaattactaattaaaaataatccatataatgctttagaaaaaaaggctaacaatttattaattaaaatgaagcaattatttttagaaaacgacataccattatcagttaatgcaaaaggtggaatgtttggtttctttttctcaaaaagtcttccaaaaaatctcaatgatgtggttgccacaaatgataaattttttagtagcttcttaaataaatgtattagtgaaggaatctattttgcgccatcaaaatttgaggcaggttttatatcaacaaaacatactaaacttgaaattaatcatacaattaacgttattgaaaaaatattaaaaaaggggatctga

SEQ ID NO: 292639 - DNA, 995 bp, Unknown
  Bacterial polypeptide expressing nucleotide sequence isolated from the Sargasso Sea
aattactgagatggttccctcaattgaaaaagtaaggatggttaattcaggtactgaagccacaatgagtgctatcaggttggcacgaggttatactaaaaaggaaaaaataataaaatttgcaggtaattaccacggacacggagatagttttttaattaaagcaggctcaggcgcagtcacattaggcctaccggatagccctggagttaccaaaaatattgcaaaagatactttgatagcaaatttcaataatctaagctccgttgaacaactgtttaaagaaaataaaagtgagatagccgcagttattgttgaaccaatcgcaggaaatatggggctagtcaaaccacgagagaactttttagaaggactcagaaaactttgtgactcacacaattcattactcatttttgatgaggttatgaccggatttcgagtagctaaaggaggtgcacaagaaatttttggagttagtcctgatctgacaacattaggcaaaatcattggtggtggattacctgtaggagcctatggagggaaacaagaaattatggacatgctagcaccaaatggacctgtataccaagcaggaactttatctggaaatccacttgcaatgacagcaggacttactgttttaaatatgcttaatcaaaatgtttatgataagctcgaaattatatccaagaaaattgaggatggatggaataaaaatattgtcgagacaaatactaatgctcacattgcaaggcaaggctcgatgcttacactatttttttcagataaaaatgaagttattaattatgatgatgctttgaatttggatgtagagaaatatgcaatttattttaaaaaaatgcttgaaatgggagtttacttgccgccatcacaatatgaatgtttattcttgtcgtctgttattgatgaggatgatattgaaaagctaattatttcaaacaggatagcacttgaaaatattaaagatgaataac

SEQ ID NO: 292640 - DNA, 1005 bp, Unknown
  Bacterial polypeptide expressing nucleotide sequence isolated from the Sargasso Sea
tagaaacagcaaaactaataaaacaatgtgttctatctatagaaaaaataagaatggttaactctggaactgaggcaactatgagcgcaataagattagcaagaggatatacaaaaagagataagattattaaatttgatggttgttatcatggccatgtagactcactacttataaaagctggctcaggcgtaagtacatttggacttccagactcaccaggcataccgaatgaattagcaaaaaaaactttgagttgtgagtttaataacaaagaagagttcttaaagattttcaataaagtcaaaaatgatcttgcggctgtaatcgtcgagccggtagcaggaaatatgggttttattccaggtgataagtcttttttaaagttacttagaaaaaaaacatctgaaaataaatcattgttaatctttgatgaagtaatgtctggttttagagtttcacttggcggggctcaagagctttataaaattaagcctgacttgacgactttaggaaaggtgattggtggtggtcttccagtaggtgctttcggtggaaaaaagaaaataatgaattgcctagctcctaacggacctgtttatcaagcaggtaccctttccggaaacccattagccatggcagcaggttcaatgctcattaaattattaattaaaactaacccctataaaaagcttgaagataaggctgctgatcttttacaaggaatgaaaaatgtctttgatgctaatgatatccctttttcagtaaatcaattgggaggtatgtttggtttctttttttcagaaaaattacctaaaaactataaagatgtcgttaaaactaatgataagcactttaagaactttttaaatcagtgcatagagaatggaatatactttgcaccatcaaaatttgaagcaggtttcatttcaacaaaacatactaaaactgaaattaataatacaataatgattacaaaaaatattataagtaaagggatataaa

SEQ ID NO: 292641 - DNA, 406 bp, Unknown
  Bacterial polypeptide expressing nucleotide sequence isolated from the Sargasso Sea
atgcctgggggtgtaaattcacctgtaagagcatttgggaatgttaatagtactcctatttttattgagagcgcctctggggcatatcttcatgatgttgacggaaatgattatgtagactttattggatcttggggtccaatgattttaggtcacagtaatccaaaaataataaaagcaatcaaggatcaggctgacttaggaacaagttatggggctccaacagaagcagaaacatctataggcgagttaattagaacggtaatgccctcaatcgaaaaaattagaatggtaaattctggaacagaagcaacaatgagctgcataaggttggctagaggatatacaggtcgcaacaaaattattaaatttactggctgttatcatggtcatgtagattctcttc

SEQ ID NO: 292642 - DNA, 818 bp, Unknown
  Bacterial polypeptide expressing nucleotide sequence isolated from the Sargasso Sea
catgtcgactccctcccgcagcgccgccctgtttgaacgtgcccagaagaccatccccggcggagtgaactcgccggtacgcgccttccgctcggtgggcggcaccccgcgcttcattgccaaggcagccggcccgtacctgtgggacgccgacggcacccgctatatcgactacgtcggctcgtggggcccgatgatcgtcgggcacgcgcatcccgaggtcgtgcgtgccgtgcaggacgtggcagccgacagcttttcgtttggcgcgcccaccgaggccgaagtcgtcatggccgaggaaatctgcaagctcgtgccgtcgatcgagcaggtgcggctcgtgtcgtcgggcaccgaagcgaccatgagcgccctgcgactggcccgcggctttaccgggcgtgacctgatcgtcaagttcgagggctgctaccacggtcacgccgacagcctgctggtcaaggccggttcgggcctgctgacgtttgccgatacgacgcagaacgcgccctcttccgctggcgtgccggaagacgtggtcaagcacacgatggtgctgccgtacaacgacgtagccgcgctgcgtgaggcctttgcccgccacggcaaggaaatcgccgccgtgatcgtcgagccggtggccggcaacatgaacctggtgcgtggcagccacgaattccatcaggccatgcgcgcgctgtgcaccgagcacggtgccgtactgatctttgacgaggtgatgacgggcttccgcgtggcgctcggttgcgcgcaggcgctctatggcatcaagccggacctgacgtgcctgggca

SEQ ID NO: 292643 - DNA, 1159 bp, Unknown
  Bacterial polypeptide expressing nucleotide sequence isolated from the Sargasso Sea
tctgagggcatatttacatgatgttgacggaaatgattatgtagactttattggatcctggggtccaatgattttaggccacggtaatccaaaaataattaaagcaattaaggatcaggctgatttaggaacgagttatggggctccaacagaagcagaaacgtctataggcgagttaattagaacggcaatgccctctattgaaaaaattagaatggtaaattctggaacagaagcaacaatgagttgcataaggttggctagaggatacacaggccgtaacaaaattattaaatttactggctgttatcatggtcatgttgattctcttcttataaaagcaggttcaggagtatcgacttttgggctacctgactctccaggtgtacctgaagaacttgcaaggcataccataagcgttcccttcaatgacataaatgcttttttagaagtctttgaatctattaaaagtgagcttgcggcagtcataattgagccaattgctgggaatatgggttttattcctggagacaaagattttttagaaactctaagaaccaaaacacatgaaaatggatcagtattaatttttgatgaggtaatgacaggctttcgagtatctttaggaggagctcaagaattatatggaattacgccagacctaactgcattaggaaaagtcataggtggaggccttcctgtaggagcatttggtggcaaggccgaaataatgaactttcttgcaccagaaggccccgtttatcaagctggaactctctcaggtaatcctttggcagttgctgctggaaaatgtcttattaatgagcttataaaaacaaatccttatgatgagcttgaggcaaatgccaactatctattaacaaatattaaaaatgagatgtttaaaaaagaaatacccttctcttttaatcaaattggtggaatgtttgggttctttttcacagatgaatttccaaataactttgatgatgtaagcgcgtcgagcgataagtattttgaaagtttttttaaagactgtctaaatcaaggtatatactttgctccatcaaaatatgaagctggatttatctcaactaagcatactaaaaagattcttgatgaggtaataaataaggtaaaggtgatatatggctcatga

SEQ ID NO: 292644 - DNA, 517 bp, Unknown
  Bacterial polypeptide expressing nucleotide sequence isolated from the Sargasso Sea
cataaaaccagatttaacaacactgggaaaaattattggtgctggtcttcctgttggtgcatttggaggtaagaaaaatattatggattatcttgcccctaatggtccagtttatcaagctggaactttatctggtaatccattagcaatggcagctggagcaacgttaattagcttacttataaaaagtaatccttataaaagcctagagctcaaggcaaaaactcttttagataagatgaaagaaatcttcgaagaatatgagattcccatttcaactaatcaaataggaggaatgtttggtttctttttttcagatgctttgcccgaaaatttaaatgatgttatgaaaacgaatgatattcattttaaaaattttctaaacgcatgcatgaataatggaatttattttgctccatcaaaatttgaagcaggatttatttcaacaaaacatactaaaactgaaattaataatacaattagggccataaaaaaaattttaaaagaaggaatataa

SEQ ID NO: 292645 - DNA, 973 bp, Unknown
  Bacterial polypeptide expressing nucleotide sequence isolated from the Sargasso Sea
ttgaaaagaacaaactcagaatcgctttttaagcaagctcaatctcttatgcccggtggtgtaaattctccagttagagcattcaaaaacgtagatggtaagcctattttttttaagtctgcaaaaggcccaattttaatagatgaagatgaaaatcaatacatagattttataggttcctggggtccaatgattctaggtcactcaaatccaattattttagatgctattaaggctcagctagaacttggaacaagttatggtgctcctacgagcttagaaaatacccttgcaagaatgattaagggtcaggttccatcaatggagaaacttcggatggtaaattctggaactgaagctaccatgagttgtattaggcttgctagaggcttcacgggcaaaaataaaattcttaaatttactggttgttatcacgggcatgttgactcattgctagtcaaagcaggctctggggtctctacttttggcttgccagattctccagggataccgaatgagttagcggcattaacatatagctgttcttataatgatattgaagccttgctaaaaattactagcgaaattagtgatgatcttgctgcaattattgttgagcctattgctggcaatatgggatttattccaggagagcccgaatttctgaacgctttacgaaagttatgcgacaaatacaattccctacttatatttgatgaagtgatgtcaggttttcgtgtggggcttggaggagcgcaagctatatatgagattcaacctgacttaacagctcttggaaaagtcataggcggcggtcttcctgtcggagcatttggaggcaagcaatcagttatggatcaactcgctccattaggtcccatatatcaagcaggcacattatccggaaatccgttagcaatgagtgctggcattgccttaatagatgctttgattaaagagaatccattttgat

SEQ ID NO: 292646 - DNA, 983 bp, Unknown
  Bacterial polypeptide expressing nucleotide sequence isolated from the Sargasso Sea
cgatatggtcccttctatagaaaaagtaagaatggtaagctcaggtacagaggcaacaatgagtgcaatcagattagcaagaggatataaaaggaaagatctcattataaaattctctggaaattatcacggacactttgatagttttttaataagagcaggttcaggtgctatgactttaggaaagcctgacagtcaaggggtaactgataatattgcaagagatacattagttgcagactttaataatattgattctgtaaatgaactttttaaaaaaaataaaaataaaattgctgcagttattatagagcctattgctggaaatatgggcttggtcaaaccaaataaaaattttctgaatgaattaagggttttatgtgatgagaatgatactctcttgatttttgatgaagttatgagtggatttagagtatcaaaaggtggtgcacaagaactttacggagtaaaacctgatcttacaactttaggaaaaattataggaggtggtttacctgcaggagcatacggcggtagtcaagaagttatggatcacgtagcacctgacggtccagtttatcaagctggaaccttatcgggtaatcctcttgcaatggctgctgggctcagtgtattgaacaggctcgacgatcaagtttataaagacttagagataatctcatcaaaaatcgagaatggaataaataaaaatattgataagactggtgtaagcgcaaatatagctagagtaggatctatgatgacattatttttttcaaaaaaacaaaaaatcgaaaattttagtgacgcacaagattgtaatacagaattatattcaaaatactttcattatatgttaaagagaggaatatatcttcccccatctcaatatgagtgtatgtttttatcaaataaaatcgatcaaaaagatattgataatataattgaaagtaatctagattcactaaaaaaattaaactaaa

SEQ ID NO: 292647 - DNA, 1294 bp, Unknown
  Bacterial polypeptide expressing nucleotide sequence isolated from the Sargasso Sea
atgacccgttccgaagcgctatttgaacaggctaaaaaaaccatccccggcggtgttaactctccggttcgtgcatttaacggtgtaggtggctcacccctgtttattgaaaaagctgatggcgcttatatttacgatgccgatggtaaagcttatatcgactatgtcggctcttggggcccgatgatcctcggccacaaccatccgaagatccgtgaagccgtattggctgcggtacataatggtctgtcttttggcgcgccgaccgaacttgaagtacaaatggctgagaaagtgatcgccatggtgccttctatcgagcaagtccgtatggtgagctcaggtactgaagcgaccatgagtgccattcgcttagcgcgcggttttactaatcgtgacaagatcttaaaatttgaaggttgctaccatggtcacgctgactgtctattagttaaagcaggttccggtgcattaaccttaggccaacccagctctcctggtattcctgaagatttcgcaaagcacaccttaactgctgtgtataacgatctggattctgttcgttcgctgttcgagcaatatccaactgagatttcttgcatcattatcgagcccgttgctggcaacatgaactgcattccacctatcccaggcttcctcgaaggtctgcgtagcctgtgtgatgagtttggtgcgctgctgattatcgacgaagtgatgacaggtttccgagtatcaagaagtggcgctcaaggtcactatggcgttacaccagacttaaccacactcggtaaagtcatcggtggcggtatgcctgtgggtgcatttggtggccgtaaagatgtgatgcagtttatcgcaccaactggccctgtataccaagcaggcacgctttcaggtaaccctattgcgatgtcagcgggtctagcacaaatggaagcgctgtgtgaagaaggtctgtacgaagcgctgagcgctaaaaccaagcgcatcgccgaaggctttaaagcggcggcggataagcacggcatcccaatggcgatcaactatgttggcggtatgttcggcttcttctttactgagcaagagcagatcactcgcttcgaccaagtgactaagtgcaatattgagcacttccgcactttctaccatggcatgttagatgaaggcgtttacttagcaccgagtgcttatgaagctggcttcctatcgatggcccatggcgaagaagaattgcgcctcacgcttgaagcggctgatcgcgtattagctcgcatgagagcggcaatgtaag

SEQ ID NO: 292648 - DNA, 1294 bp, Unknown
  Bacterial polypeptide expressing nucleotide sequence isolated from the Sargasso Sea
aatgaaaactaaaaactccaaggagctattcaaaaaatctaaagaacatattgcgggaggtgtaaactcgcctgtaagagcttttaaaagtgtaggtggtacgcctattttttttaaaaaatcgagaggttgttatctttatgatgaagatggcaacaaatatttagactttgttggctcttgggggccaatggtcctaggacattcaaataaagcaattgtaaatgctataaaaaaacaagcttccaaagcaattagttttggtgctccaacaaaaaatgaattagaaattgcaaaaataataaagagttatatccccagcatagaaaaacttcgtatggttaattcgggtacggaagctactatgagctgtataagattagcgagagggacaactggtagaaaaaaaataattaaattcattggttgttaccatggacatgtggattccttattagtaaaagctggatcaggtgctgcaacacttggtgtgccagactcgccaggaatcccggatgaactctctaaattaacaattacacttgaatacaataatggttctgaactcaagaaggcttttacaaaatttggagaagatattgcagcagtaatagttgaaccaattgctggaaatatgggatttattgaaccagaagaaaattttctcaaaactttgagaagtctatgtaccaaaaataaatcaattttaatttttgatgaagtaatgacaggttttagagttgctagaggtggggttcaggagctttttaacataaaaccagatctaactgcactaggaaaaatagttggaggaggattaccagttggagtatatggaggaaaagccaaaataatgaataatatttctcccgatgggcctgtttatcaagcaggtacattatctggtaacccagttgctgtaagtgctggaacagccctgctaaaacaattaaaaaataaaaaaatgtttagtgaattagaaaaaaatggtgaaatcttcctcaaaggtcttaaagaagaggcagaaaaaaataacataccgtttagctacaacataagaggaggtatgtttggcttcttcttttcaagtaaactaccaaaaaatttccaagaagtatctgatacaaatataagcatgtttaataaatttttccgacttatgttagagcaaaatgtatatttacccccttcagcttttgaaagttgttttctatctactgaacatacaaaagaacaattaatgaaaactgttaagctatcctctaatgttttcaaaaatctgaataatggataa

SEQ ID NO: 292649 - DNA, 649 bp, Unknown
  Bacterial polypeptide expressing nucleotide sequence isolated from the Sargasso Sea
cctgaaccaggattcctggagggtctgcgaaccatctgcgatgattatggtgcgctcctcgtcttcgatgaggtcatgaccgggttccgggtagcgctgggaggagcacaggagcgctacaatgtcagacccgacctaacgacactgggtaaaattatcgggggaggtcttccggtcggcgcatatggagggcgggaagacctcatgcgaatgatcgcgcctgacgggcaggtctatcaggcagggaccttatctggaaatcctctcgccgtagcagcgggtcgcacgaccctcggtatcctagagtcaaatccagatatcttttccgagcttgaagggacaggcaagacgctcggtcttggacttgaggcactagggcacgaatacggcgtacccataaggtggcagtcctcagggggtatgggctgtccgtttttctctgaaacaccggtcacagattggcagtcgtccgcagccaccgactcacaagctttcaacaggttttttcacggaatgctccaacgcgatatccatctcccacccagccgctttgaagcttggttttggtcaaccgcgcactcgaccactgacatcgatcgtacactgacatctgcaaaggacattctcgcaggaggactcgatgcctgac

SEQ ID NO: 292650 - DNA, 1291 bp, Unknown
  Bacterial polypeptide expressing nucleotide sequence isolated from the Sargasso Sea
atgaataagatagataaatctctaaaattatttaaagaagccaaattacatatccctggaggtgtaaattctccagtaagggctttcaaaaatattaatgggaatcctatattttttaaaaaagcaaaaggttcgaaactttttgatgaagataataatgagtatatagattatataggatcttggggtcccatgataatgggccattctcacccaaaaattataaaagccatatccaaacaagttaaattaggaactagttacggtgctccaactagcatagagtcaaaaactgctgaactaataaaaaaatgcattccttctattgaaaagataagaatggttaattctggaacagaagcaactatgagcgctataagacttgcaaggggttttactaaaaaaaataagattattaaatttgatggttgctaccatgggcatgctgactctttattaataaaagcagggtcgggagtgtctacttttggattgcctgattctccaggagtgcctcctcaacttgcaaaagaaacattaagttgtgaatttaataactcaaaagactttttaaaaatatttgaaaaggttaagaatgatttagcagcagttattattgagcctattgcaggaaatatgggattcatcccaagtgaaccatcttttttaaaattaattagaaagaagacagctcaaaataaatcgctattaatctttgatgaggtgatgtctggattcagggtatctttaggtggcgcacaagaaatctataaaataaaacctgatttaacaactttgggaaaaataattggtggcggtttgccggttggggcgtttgggggaagaaaagatattatggattacttggctccaaatgggcctgtttatcaagcaggaactttatctggaaatcctttagctatggctgctggatcagcactaataaaacttttaattaaagataacccctatcagagtcttgaagcaaaatccaagttaatgttagaaagaatgaaaggtctttttttagaaaaaaaaattcatttatcaacaaatcaaattggaggtatgtttgggttctttttttcagaagaattgcctaaaaatctcaatgaagtaataaatacaaatgatcaacaatttaaatcattcattaatgaatgtattaaaaacgggatctattttgctccatcaaaatttgaagcgggttttatctcaacaaaacatacgaataaagaaattaataatacaattagcgttattaaagaaatattaaataaaggaatatgaa

SEQ ID NO: 292651 - DNA, 1240 bp, Unknown
  Bacterial polypeptide expressing nucleotide sequence isolated from the Sargasso Sea
tatgcctggtggtgtgaattctccggttagagcttttaagaatattgatggaaatccaatatttttcagtaaggcaaaaggtccatatgtttttgatgctgatgataataaatatatagattacattggttcctggggtccaatgatattgggtcattcaaatccaaatataattcgtgctatttcaaaacaacttcaacttgggacaagttacggggctcccacaaaccttgaatcaaaaacggctcaaataatcaaagattgtgttccgtctatcgaaaagataagaatggtgaattcgggtacagaagcaaccatgagtgcaataagattagcgagaggttttaccaaaagaaataaaatcattaaatttgatggttgttatcatgggcatgttgactctcttttaataaaagctggatcaggagtctctacatttggacttccagattcacctgggatacctaaacagttggctaaacaaacaataagttgtgaatttaataacaaagatgcatttcttgagacttttgaaaatgtaaaaaatgatcttgcggcggtgataattgagcctattgctggaaacatgggttttattcctggaactaaatcctttttaaatcttttgagaaaaaaaactaaagaaaataattcaatacttatttttgatgaggtaatgacaggattcagagtttcgcttggtggtgctcaagaaatctataaaatcaaaccagatatcacaacattagggaaagtgatcggaggaggattaccagttggagcatttggtgggaaaaaagaaattatggattatttggcaccaaatggtcctgtgtatcaagcaggaactctttcaggcaacccacttgcaatggcggctggttacgcactaataaagcttcttgcaaaagaaaacccatataaatcactagaagcaaatgcaaaaaaacttcttacagaaatgcatagagaatttgagcgcaaaaaaattccgttttcatcaaatcaaattggtggaatgtttggtttctttttttcaaaaaaactaccaaaaaatttcaatgatgttgtcaattcaagtgatgagcatttcaaaaaattcttaaatgcttcaataagaaatggggtttactttgcaccatccaagtttgaagctggttttatatcaacaaaacatactaaaaaagaaataagtaatacaataaagattgtaaaaaatattcttaatgaggaaatttaa

SEQ ID NO: 292652 - DNA, 1195 bp, Unknown
  Bacterial polypeptide expressing nucleotide sequence isolated from the Sargasso Sea
atggaaatcctatttttttttaaaaaagctagagggccatatctaatagacgcagataataataaatatattgactatattggctcatggggtcctatgattttaggacattcaaatccaaatattattaaagccgtttctagacagttagaacttggaaccagttatggtgctccaacaagcattgaatctgatacagcaaagttaattaagaaatgtttcccttctatccaaaagattcgaatggttaattcaggtactgaagcaactatgagcgctgttagacttgcgaggggatatactaataaaactaaaattattaaatttgacggttgttaccatggtcatgtagattcgcttttaattaaagctggatcaggtgtcagcacatttggtttacctgattctcctggtattccaaatgaattagcaaagaaaactttaagctgtgaatttaataataaagatagtttcttaaaaatctttaataaagtaaaaaatgatcttgctgcagtgattgttgaaccaattgctggaaatatgggatttgttcctggcgataaatcatttttaaagttattaagaaaaaaaacctctgaaaataattctttgttgatttttgatgaagttatgacaggttttagagtgtctctaggtggagctcaagaattatatggaattaaacctgacttaactacgctaggaaaagtaattggaggaggacttccagtgggagcttttggtggaaaaaagaaagttatggattgtcttgcacctaatgggccagtttatcaggcaggtactctttccggaaatcccttagcgatggcagcaggatcaactttaattaaacttttaatagatcagaatccatataaagatcttgaaagtaaagctaaaaatctcttagagggtatgaaagaaatttttgatagatatgatatcccattctctacaaatcagattggcggtatgtttgggttctttttttcagaagaattaccaagcaatcttgtggatgtagaaaatactaatgacaaacaatttaagaagtttctaaataaatgtatagataatggaatttactttgctccatcaaagtttgaggctggttttatttcaacaaaacatactaaaactgaaataagtaatacaataaaaattgtagaaaagattttaaaagaaggaatataga

SEQ ID NO: 292653 - DNA, 660 bp, Unknown
  Bacterial polypeptide expressing nucleotide sequence isolated from the Sargasso Sea
agggtaatatgaattttataagaagtcaaaaaaagtttttacaagaattgagaaaaatatgtactaaaaataaaatagttcttatttttgacgaagttatgactggttttagagtttcaatatcaggcgctcaaggactatatggtatttcacctgatcttacaacgctagggaaagtattgggtggtggattacctgttggagcttttggtggaaagagagagataatggattgcgtagcaccaaatggggaaatttatcaagctggaacattatctggaaatcctttagctatggcagcaggactaaaaacactgacaataatatctgaaaaaggctatttcgaacagttgtcaaaaaaaacaagctatctagtttctaaatttaaccaggtatctataaaatatggattggatatgtctgcagactcagaaggagggatgtttggtatatattttactaaatcaaaattatcaaatataaatgacattaacaaaacatctaaagatacttttatagatttttttaaccatatgttaaaaaatggtgttttctttgcgccttctatgtatgaagcagggtttctctcttcaagtcatttaaagaaagatatagattatacgattgaagtatttgaggattgggcaaaaaaaagataaa

SEQ ID NO: 292654 - DNA, 1294 bp, Unknown
  Bacterial polypeptide expressing nucleotide sequence isolated from the Sargasso Sea
atgacccgttccgaagcgctatttgaacaggctaaaaaaaccatccccggcggtgttaactctccggttcgtgcatttaacggtgtaggtggttcgccgctgtttattgaaaaagctgatggcgcttatatttacgatgccgatggtaaagcgtatatcgactatgttggctcttggggcccgatgatcctcggccacaaccatccaaagatccgtgaagccgtattagctgcggtgcacaatggtctgtcttttggtgcaccaaccgagcttgaagtgcaaatggctgagaaagtcatcgccatggtgccttctatcgaacaagtgcgtatggtgagctcaggcactgaagccaccatgagtgcgattcgtttagcgcgcggttttaccaatcgtgaaaagatcttaaagtttgaaggctgctaccacggtcacgctgactgcctattagttaaagcaggttctggtgctttgaccttaggccaaccaagctctccaggtattccggaagatttcgcaaagcacaccttaaccgctgtgtataacgatctcgattcagttcgtagcctgttcgagcaatatccgactgaaatctcttgtatcatcatcgagcctgtcgcaggcaacatgaactgtatcccacctatcccaggcttcctcgaaggcctgcgggctatgtgtgatgagtttggtgcgctgctcatcatcgacgaagtgatgacaggtttccgtgtatcaagaagcggcgctcaaggccactatggcgttactcctgacttaaccacactgggtaaagtcatcggcggcggcatgcctgtgggtgcatttggcggtcgtaaagaagtgatgcagtttatcgctcctacgggtcctgtgtaccaagcgggtaccctgtcaggtaaccccattgcgatgtcagcgggtctagcacaaatggaagccctgtgtgaagaaggtctgtacgaagcgctaagcgcgaaaaccaaacgtatcgccgaaggttttaaagcggcggccgacaaacacggcatcccaatggccatcaactatgtcggtggtatgttcggcttcttctttaccgagcaagagcagatcacgcgcttcgaccaagtgactaagtgcaatatcgaacacttccgcactttctatcacggcatgttagatgaaggggtttacttagcaccgagcgcctatgaagcaggcttcctgtcgatggcccatggcgaagaagaactgcgcctcacgctagaagcggcggaccgtgtattaggtcgtatgaaagcggcaatgtaag

SEQ ID NO: 292655 - DNA, 1273 bp, Unknown
  Bacterial polypeptide expressing nucleotide sequence isolated from the Sargasso Sea
atgaataaaaaatcactaaaattatatgcacgagcgaaaaaagttattcctggaggtgtaaattcccctgtacgagcttttttatctgtaaatcagaaacctttttttgtaaaaaaagctcacggacaatatttagtagacgaggataataataaaattattgattatatcgggtcttggggagcccaaatactagggcacggtcattcgaaaattaaaaatacattaactgcatcgcttcgtaaaggtatcacttacggagcaccgtgttcgagagaggtagagcttgcagaaaaaattacaaaaatctatccatctataaataaagttaggatggttagttctggaactgaagctacgatgagcgccataaggcttgcaagaggttatacgggacgaaataaaattctaaaatttaatggctgttatcatgggcatggagattcttttttaataaaagctggttctggcgctgctacttttggggtaccaaattcattaggagttccacccggtcttgctaaggagacaatatctactaatttcaatgatatcgaatcagtcaaaaaagttgtgaaaaagtacaagcttgcttgcattataattgaaccaatagccggaaatatgaattttattagatctgatgaaaattttttacatgaattaagaactatatgctcggaaaatgacattgtgctgatctttgatgaggttatgactggttttagggttgcgttagggggcgctcaatctttgtatagtatcaaaccagatctcactacattgggtaaagtgcttggtggcggattacctgttggtgcatttggtggtaaatcaaagataatgaatcaactctctcctgatggtggagtctaccaggctggtaccttgtcagggaatccgctagcgatggatgccggcttaaaaactctagatttaatatcaaagaagaattacttcaaaaatcttgaaaaaataacccgacaacttacggatggaatcaatgaattatcaagaaaatataataaaaaaatttatgcagattcacaaggtgggatgtttggaatttattttacggacaaaaaagttgttaattatgaaagtatctctaaatcagatataaaaaaatttattcaattttttaaatttatgctaaaaaataaaatatattttgcgccatctgcatacgaagctgggttcgtgtcctctgctcatacagcaaataatattaattatacattagatatctttgagaaatggataaagaattaaa

SEQ ID NO: 292656 - DNA, 1282 bp, Unknown
  Bacterial polypeptide expressing nucleotide sequence isolated from the Sargasso Sea
atgaataattcaaaaaaagcatttgtaaaagcaaaaaatctttttcctggtggcgtaaactctccagtaagagcgtttaaaaacgttaattctgaacctttttttgttaaaagagctaagggaccgtatctttatgatgttgataataaaaagtatatagattttattggctcatggggacctatgattctgggtcatgctaacaaggaaatacttaaagctataagcatttcactaaagaatggaacaagttatggcgctcctactttaattgaatcaaagatggctgaactcataaaaaaaaattttccttccattgaaaaaatgagaatgacaagttctgggacagaagctactatgagtgctattcgtttagcaagaggattttctaaaagagaacttattataaaatttgaaggttgttatcacggtcattcagactctctattgtcagaagctggttcaggattatcaacgtttggtaaccctagctctccaggaatacctaagggattagaaaaactaactattaatctaagatataatgatattaagcagcttgagaattgtttcaagaaatacagtaataaaatcgcgtgtgtaataattgaaccaattgctgggaatatgaacatgattttacctaatttacattttttaaaaaaaattagaacactttgtaataaaaacaaatcgattttaatctttgacgaagtgatgacgggatttagagtgtcaatcggtggagcgcaaaaattatatggtgtaaaacctgatctaacaacactcggaaaaattgtaggaggaggactgcctgtgggagtttttggtggaaaaaaacagataatggactctctttctccggttggaccaatttatcatgcaggaactttatctggaaatcctattgctatgtctgcaggaattaaaacaatcgaacttttaaataagaagaatattcataaaaaacttgaaaataagtgccaacacttactagagggaatgtctttttatgcaaaaaaaaataatataccttttaagtataattatgctggcggtatgtttggatattttttcactaaccttaatgaagtcactaattatgacgaagtaaaaaagtgtaataaaaaaacatttataaaattttttaatatgatgcttagtaagggcgtttattttgcaccttcaatgtttgaagctggctttatttcatacgaacattctgaaaaagatattaataaagttataaatgcttctaaaagtatttttaaaaatttataaa

SEQ ID NO: 292657 - DNA, 451 bp, Unknown
  Bacterial polypeptide expressing nucleotide sequence isolated from the Sargasso Sea
aatgaaaactaaaaactctgacaaactttttgagaaatctaagaatcatattgctggcggtgtaaattctcctgtcagagcattcaaaagtgtaggagggtctccaatattctttagaaaatctagaggatgttatctgtatgatgaagatggcaataaatacctagattttgtaggttcttggggtccaatgattcttggccattctaacaaacagatcactgaagctataaagaagcaatctagcaaaggtataagttttggagcgccaacaaaaaatgaactagaaattgcaaaacttataaagtcttatgtgcctagcatagagaaattaagaatggttaattctggaactgaggcaacaatgagctgcataagactggcaagagggacaacaaacagaaatatcatcataaaatttgtgggttgttatcatggtcatgtagatctc

SEQ ID NO: 292658 - DNA, 1209 bp, Unknown
  Bacterial polypeptide expressing nucleotide sequence isolated from the Sargasso Sea
aatgaagatcagcgagtccaaaaaacttttttctcgagctcaggaagtcatgcccggtggtgtgaacagtcctgtcagggcattcaaatccgtccagtccgaaccattgttcatcactcatgcgaaaggatcacggcttttcgatgcagacggtaattcattcatcgattacattggctcctggggacctatgattctcggccatgccgatccgagaatcacttcggaaatcgaaaaagcattgcaaaaaggtacttccttcggaacccccacagaaggtgaaatcgaattggcggagatgatcagtgatgcggtctcaagtgtcgaaatggtccgtcttgtcaattccggatcagaagccgcaatggcagcacttagagttgccagaggattcaccggtcgagacaaaatcattaaatttgagggttgttatcatggaagtgtcgatgcacttttagtcaaagccggttccggtgcaaccactttaggaatcccggattctccaggggttccccaatcattcacggaacatacgctctctgcacctttcaatgatcttgatgcagtcatcgaacttacagaaaattttcctgatgaaattgcagcaatcgtgctggaaccggttgcgggaaacatgggcatgatacctcctgaacacggattcctccaaggactcagagaactttgtgatcgagagggaatccttttgatctttgacgaagtgatgaccggctttcgtgtcgacttctccggagcccaagcactttttcaggtcatgcccgatcttagtatctttgggaaagtgattggcggaggacttccagttggggcttatggggggcgaagagaaatcatgctccaggttgctcctgctggtcctgtctatcaggctggcacgttatcaggaaacccgatggccgtttcagcgggtaaaaccatgctgaagatcttaaaggaggaagatccctatgcagatttaggacgaaaaacggcaactctcaatgaagcgttaagcgatgctgcaaagaaaaaaggaattcctttggaaacctgctcgatgggaggtatgttcggttttttcttctctgaaaaaaaggttagaaactatgaggatgcattgaaatgtaatcgtgaatacttcatcaccttctttagagaggtattgagcaggggtatctacttagctccttctccctttgaatcattatt

SEQ ID NO: 292659 - DNA, 841 bp, Unknown
  Bacterial polypeptide expressing nucleotide sequence isolated from the Sargasso Sea
gtttttagtgaaagcaggatctggtgtagccactctgggtttaccagattctccaggtgttccgcgtaccacaactgccaacacacttactgcaccttacaacgaccttgaagcagtaaaaaaattattttctgaaaatcctgatgccatttctggggttatactcgagcctatcgttggtaatgctggatttattactccagagcctggattcttggaaggattaagggaattgactactgaaaatggatccttattagtttttgacgaagtaatgactggattcagaataagttatggaggagctcaagaaaagtttggggttattcctgatttaaccacccttgggaaagtaattggtggaggcctacctgttggagcttatggaggcaaaaaagaaataatgtcaatggtagccccttcaggacctgtataccaagcaggtactttgagcggcaatcctcttgcgatgacagctggaataaaaactcttgaactgctaaaacaagatggtacttacgataaacttaattctacaacttctagattaattgaaggtataatccagtctgcagaaaataatggtatcgctatcaatggtggaagtgtgagtgccatgtttggatttttcttatgcgatgggccagttaggaactttgatgaagccaaatcaaatgatgccgaactttttggtaagttgcatagagaaatgcttcgacgcggaatttacttagcgccaagtcccttcgaagctggtttcacatcattagctcacagcgaagaagaaattgataaaactatcgaggcttttgacgaatctttcaatgcaataaaaaaataa

SEQ ID NO: 292660 - DNA, 1183 bp, Unknown
  Bacterial polypeptide expressing nucleotide sequence isolated from the Sargasso Sea
ttctttagaaaatctagaggatgttatctgtatgatgaagatggcaataaatatctagattttgtaggttcttggggtccaatgattcttggccattctaacaaacagatcactgaagctataaagaagcaatctagcaaaggtataagttttggagcgccaacaaaaaatgaactagaaattgcaaaacttataaagtcttatgtgcctagcatagagaaattaagaatggttaattctggaactgaggcaacaatgagctgcataagactggcaagagggacaacaaacagaaatatcatcataaaatttgtgggttgttatcatggtcatgtagattctcttttagtcaaagctggctcaggtctagcaactcttggggttcctgattctcctggaattccagaagaactttctaaacttactatcactattccatataacgacaataatgcagtaaaggaggctttcaataaacatgcgaaggatattgctgccgttatagttgaaccgatagctggaaatatgggctttattgagcctaatgaagattttcttcaaaatttgagacaaatttgtactgaaaataagtcaatattaatttttgatgaagtaatgacaggttttcgagttgcaagaggtggagcacaagaattatttaatatagatccagacttaactgctctaggtaaaattgttggaggtggattgccagtaggtgtctatggcggtaaaaaagaaattatgaataacattgctccagatggtcctatttatcaggcaggaactttatcaggaaatcctatagcagttagcgcaggcacagctctgctcaaacaattaaaagaccaaaagatttatgaaaaacttgaaaagaatgcaaaaaattttttaaaaataataaaagattactgtgaccaaaataaaatacctttctcatttagtgcaagaggaggaatgtttggtttcttctttagtaaaaatctacccaaaaattttgatgaagttgaaaatactgacatagagttttttaaaaagttttttcgtggaatgttagaagaaaatatatatttgccaccttctgcttatgaaagttgttttatatctactgagcataatgaagataaaatagtaaaagcagctaaaaccgcaataaaggttttagataagattaaaaaatgaa

SEQ ID NO: 292661 - DNA, 1278 bp, Unknown
  Bacterial polypeptide expressing nucleotide sequence isolated from the Sargasso Sea
gacatcgattggaactcggcgagaaacgcgtgcgccgccgaggatttgtattatccgcacccgtggattcaagacgccctgtggggcgcgctcatgaagctcgaaccgttcttgctgggcagtcgattgcgcagagcggcgtgcgcggacgcgatgcgtcagattcattacgaggacgaaaacacgcgatacgtggatatcggtccggtgaacaaggtgttcaacatgctctgctgttggtttgaagatccggattcggacgcggtgaagagacacattcctcgcatcgcggattatctctgggtgtcggaggacggcatgaagatgcaaggatacaacgggagtcagttgtgggactgcgcgttcagcgtgcaagccatcgtcgcgacgggattggcggacgagtacggcgagtgcttgcggcgcgcgcacgactacatcgagaagagtcaagtgcgagacgattgtccggacgtgaagaagtggtatcgtcacatatccaagggtgcgtggcctttcagcacgcgcgatcacggatggccgatctccgattgttcgtccgagggtctcaaggcggcgctcacgttggcgtcgatggacagcgcgctcgtcggcgaggcgatttccgtcgagcgtctctccgactgcgtcaacgtcattctctcctaccagaaccgaagcacgggcgggtgggcgacgtacgagaacacgcgttcgtacgcgtgggtcgaatggctcaatccggccgagacgttcggcgacatcatgattgattatccgtacgtggagtgttcgagcgcgagtctgcaggcactgtgcaaattttccgagcgataccccgacgttcgagccaaggatatcgctcgcgcgaaaaagacgggtcgcgcctttttaaaacgcattcaaaaaccagatggaagttggtacggatcgtgggcggtgtgtttcacctacggcacgtggttcggcgtgctcggtttgatcgccacgggatcgacgtacgagacgtgtccggcgctccgaaaagcggtcgagtttttactctccaagcaacaagccaacggcggatggggagagagttacctctcgtgcgaaaagaagacgtaccacgaactcctcgacgccgaggggaacccgacgccgcatctcgtcaacacgggatgggcgacgctcgcgctcatcgccagcggtcaggcgtctcgagacgccgcgccgttgcaccgcgacgcgcgatgcatcctctcgcgacagtgcgcaaacggggattcccgcaacaga

SEQ ID NO: 292662 - DNA, 537 bp, Unknown
  Bacterial polypeptide expressing nucleotide sequence isolated from the Sargasso Sea
aagagcttgatactcagacagtatttaatggtttaaatcatcatttacgtccttatcctatttctattttagctgtagatatagttagtgaagagtttcactcaaggtttgatgcaaaacaaagaaaatatctttatagaattattaaccgaaattctccactcactattgaaaaaggaagagcgtggcatgtttttaaaaatttagatgtagatcaaatggtagaatgtatttcattgatagagggtaaacgcgattttacaacatttcgctcagcccattgccaagcagaaagcccaattaaaacaatggaaagtgtaaaaattaatagtacaaacgaggaggtgcttttaggatttactgctagatcatttctacatcatcaagttaggtctattgttggcagtctcaagcttgtaggtgaagggacttggacagttgaagattttaggcacgcagtggattcaaaagatagatctaaatgtggtgctttagctcccccagaaggtctgtatttaatggaggttacttattaaa

SEQ ID NO: 292663 - DNA, 742 bp, Unknown
  Bacterial polypeptide expressing nucleotide sequence isolated from the Sargasso Sea
aatgataacgtatcaaattagaattgaatatcttggtacaaattttgttggatggcaatttcaaaaaaatggtctttcaattcaagaagtattagaaaaagctttatcacaatatctaaaagaaaatataagagtaataggttctggtagaacggattctggtgttcatgcgagtgagcaatcagcgcattttaaaacaaaaaataagataaataataagggaattttcttaaattcagttaatttttttttaaagaaattccctgtatctattttgaatattcagaaaagatctaataattttcatgcaaggcacagcgccaaggagagggtttataagtatttcgttattaatcgaacctcatctcttgctatagataaaaataaggcctggcatattaaaaaaaaactagatgtaaaattgatgaaaaagggcgctacaattttaaaaggaacacataattttactacgtttagagcctcaaattgtcaggctaaatcgccaatcagaacattaaaaaaaccatcaataagtaaaagtaaaaataagattgtatttacctttcaatcaaagtcttttcttcagcaacaggtaagatcaatggtaggttcattaaaatatttaggtgaaggaaaatggaatttaaaagattttgaaaaagcatttcaatcaaaaaaaagatcaatgtgtgctcccccagctccagcacatggattatatttagtcaaagtcaaatattaa

SEQ ID NO: 292664 - DNA, 388 bp, Unknown
  Bacterial polypeptide expressing nucleotide sequence isolated from the Sargasso Sea
ctggatgaaaagagaatgtcagaggccgcaaatttcttgcttggggagcatgacttttcttcctttagagcacgaggttgccaagccaagtcccccgttagagagataaaagatataagggtatctaggaggcaggaatttgttgtgatcactataaaagcaaacgggttcctgcaaaaaatggtccgcaatatagcaggtcttctgatagatgttggcagtggtaagaaggagccgagctgggctaagaaagtgctgctctctaagaggcgaagtatgaatagtgcgactgctgctccctcgggcttatacctggcctcggtagattacccacaagagtttggaataccttgtaaaactgcgaaaaattattttgactggacctgag

SEQ ID NO: 292665 - DNA, 745 bp, Unknown
  Bacterial polypeptide expressing nucleotide sequence isolated from the Sargasso Sea
cttgaaatataattatcaaattatcatagaatatttaggagcttcttacatcggctggcaaattcaaaaaaaaggtaagtctattcaaggtgaaatacaaaaagcaatctataaaacatttcatacaaaagttaaattaataggtgcagggaggactgacactggggtaaatgctttagcacaatctgcaaatttttacttaaaaaacaagattcaaaacaaaaataaaattttggctacaatgaatttttttttaaaagaaagtaatatttcaattattgatataaaaaggaaaaaaaatagttttcattcaagatttgatgctaaaaagaggagctatgaatatataataataaatagaggagcaaaactttctgtattaaaagacagagcctggctagtaaaaaagaaactcaatataaaaaatatgaaagatgcaattagtttactcataggcaaacatgatttttctacttttagatcttcatcttgctcagcaaaaagtccaataagaactattctaaaagcaaatattaaaaatacgggaagtaaaataataattaactttatttcacgttcttttttacaacaacaagtaagatctatggttggtagtataaaatatgttggagaaaataaatgggatttgagtacttttaaaaaagtttttaaatcaaaaaaaagaaacttctgcgcaccacctgctccaccagaagggctgtatttaaaaaaagtttattattaa

SEQ ID NO: 292666 - DNA, 742 bp, Unknown
  Bacterial polypeptide expressing nucleotide sequence isolated from the Sargasso Sea
atgtttagatatcagcttttgatagaatatttaggcacaaattataaaggttggcaaattcaaaaaaaaaataaaactattcaaggaatactccaagataaaattagaaagttattaaaagaaaatattaccatagttggatcaggtagaacagatgctggtgttcatgctatcgagcagtcagcacattttgatttaaaaaataaattattgaacttagataaatttattaactcaattaatcactttttaaaaaatgaaaatattacaattcttaaaataagaaaaagaactagtaactttcactcaagattttctgcaaaaaagagaatttataaatatttcattttaaatagaacaagttcaccagtgattgaaaaaaatcaagtttggcatgtaagaaaaaaattggatttagatttgatgaaattaggtgcaaaaaaattagttggtactaaagatttctcaacatttagagcttcaagttgcaatgctaagagtccaattagaacgatcgattttgtaaaattaaaatctttaaatgataaaatagaaattcattttaaatctcaatcttttcttcaacagcaagtacgatctatggttggttgtttaaaatatttaggtgaaaagaaatgggatttaaaaaaatttgacaaagctctaaaatctaaaaaaaggtcactatgcgctcctccagcaccacctacaggattatttttatctagagttttttattaga

SEQ ID NO: 292667 - DNA, 742 bp, Unknown
  Bacterial polypeptide expressing nucleotide sequence isolated from the Sargasso Sea
ttgaagtcaaattatcaaataatcattgaatatgatggtacgacttataatggttggcagtatcaaaaaaatggttcttcaattcaaaatgagatagaaaaagctttaaggaaagtaataaaaaaaaaaataagagttattggttcaggaagaactgatgcaggggttcatgcagttggtcagtcagcaaattttttttgtgataaaatagaaaataacaaaaaattcttgaactctttaaattattttttgagtaaaaaaaatataagtattaattcaataaaaaaaaaaaaatttaatttccattcaagatttgatgcaaaaaaaagaacttataaatacataatagtaaacagaaaaaactttttagtattagataagaatagagcttggctggtaaaaaaaaaattaaatatcaattatatgaaaaaagctattaaattattttctggaactcacaattttaatgcttttagagcgtcatcttgcggtgcaaaatcgcccgtaagaacaattgaaaaatcttctcttacaaaaaaaggtgacaaaattataataattttttcatctaaatctttcctacaacatcaagtaagatcaatggttggttgcttaaaatttattggagaaggaaaatggagcatcaatatgttgaaaagattgtttaattcaaaaaaaagatccctatgtgcaccacctgctccttcaagtggattatacttatataaagttatttattaga

SEQ ID NO: 292668 - DNA, 753 bp, Unknown
  Bacterial polypeptide expressing nucleotide sequence isolated from the Sargasso Sea
ctgcactcttaatgaatagatatcaaatcctcgttgagtatgtaggcactaattataatggatggcagatacaaaaaaaaggaaaaacaattcaaggtaaaattcaaaaagttatctctaaaattttgaatgaaaaagtaaatataataggttcaggtagaactgactctggagtacatgccttagaacaatcagctcattttgatacaagtgtaaaaataaaagatagcaataaatttttaaaatcaattaatcattttttatctagatacggcattagtattttagacttaaaaaaaagggaacttacatttcactctcgatactcagcaaaagcgagaatatataaatatgttattttaaaccgtaaatctggctctgtgttaaaaaataaaaggtgttggcacataataaaaaaacttaatatatcaatgatgaaaaaaggagcaaaaaaattaattggtaaaaaagatttttcaacatttagatcatcaagttgttctgcgaaaacaccagtaagaacaataaaatcaataaaatttttaaccaaaaaaaacattattgagattgagataaaagctcagtcatttcttcaaaatcaggtaagatcgatggttggttgtttaaagtatgttggtgaggacaagtggagtattaaaaaatttgacaagataatcaaatcaaaaaaaagaattaattgtgcaccccctgcgccagcagagggactatacttaactaaagtgatttattagt

SEQ ID NO: 292669 - DNA, 601 bp, Unknown
  Bacterial polypeptide expressing nucleotide sequence isolated from the Sargasso Sea
ttgtctagatataaattaataattcaatatgatggtgctgcttattctggatggcagacacaaaaatatcccagaactgtgcaaggtgaattggaaaaagttttaacaaaaatatttaatcaaaaaattaaagtttatgggtctggtagaactgatactggtgtacatgcttgggcccaggtagcacacattgatttaaatacttcactgaaagactatgaaataaaaaatgcaatgaattcaaatttacctattgattgtcgcattatggatgtgaaaccaatcgatagtgattttcattcaagattccacgctagaaaacggatttatagataccaatgtatttcaactgagtcacttttgtataggaaccaatgttggattttttctgaatcattagatttagatttattaaatgaactttcttcaaaaatacttggcatacatgactttttatctttctgtaaatttaactcagaaattagtagcactgtttgtgaagtatatattagtgaatggatatgtgatggaaatatgattgtttataaaagtgccgcaaatagatatttgcatcatatgataaggtatttggttggctcaa

SEQ ID NO: 292670 - DNA, 312 bp, Unknown
  Bacterial polypeptide expressing nucleotide sequence isolated from the Sargasso Sea
aatgttcacttatcagatgacaatagaatatgacggcacaaaatttgtagggtggcaaacccaaaagaatggtctttcaattcaagaactattagaaaaaaaactttctaagtttttaaaaaataaaattactgtgatagggtctggacgtaccgacgccggtgtccatgcaagaggacagtcagctcattttagaattaaaaataaaattaagaacaaaaaaatatttttaaattctttaaacttttttttaaacaaacatcaagtatcagttgtaagtataaaagaaaaaacaaaaaaatttcatgccag

SEQ ID NO: 292671 - DNA, 601 bp, Unknown
  Bacterial polypeptide expressing nucleotide sequence isolated from the Sargasso Sea
ctggaagaaccgactccgggtgttcatgcgagtgaacaatcagcacattttaaaacaaaaaataagataaataatatggatattttcctcaatgcagtgaatttttttttaaaaaaacatcctgtatcaattttaaatattcagaaaagagctaataattttcatgcaaggcacagtgctaaagaaagggtttataagtatttcattattaatcgaacctcatctcttgctatagataaaaataaggcctggcatattaaaaaaaaactagatgtaaaattgatgaaaaagggagctacaattttaaaaggaacacataattttacgacatttagagcctcaaattgtcaggctaaatcgccaatcaaaacattgaaaaaaccattaataagtaaaagcaaaaataagattatatttacctttcaatcaaagtcttttctacagcaacaagtaaggtcaatggtaggctctttaaaatatttaggtgaaggtaaatggaatttaaaagattttaaaagagcatttaaatcaaaaaaaagatcaatgtgtgctcccccagcaccagcacatggattatatttagttaaagtaaaatattaaa

SEQ ID NO: 292672 - DNA, 736 bp, Unknown
  Bacterial polypeptide expressing nucleotide sequence isolated from the Sargasso Sea
aatgcctaattacaaaataacattagaatatgatggaactaattatgttggttggcaacgtcaagaaaatggtccttctgttcaacaattcgttgaagaggcaatagaaaaactatcaaaacaaaaaataacactttttggagctggtcgaacagatgcaggcgttcatgcaagaggacaagtagctaattttgaattagagcaacattttgatactgatactattagagatggcattaatcattatttaagaccccaacccatatctattttacatgctgaagaagtagataaagattttaattctagattttccgcaaaattgagatggtatgaatacaagatcttaaatagaagatcaccaattacgttagagcaaaacaaagtttggtgtgtacataaaaaaatagatgctgaaaaaataataaaacaatcacaacaatttataggcaaatttgatttgtctgcttttagatcaataaattgccaatcgaaatcaccaattaaatctattaattcactggatataaattttaatcatgatgaaataaattttttaatatcagctaaatcctttttacattctcaagttagaatcatggtcggcacactggttgatataggacttagtaaaatagaaaaatctatttcagaaattattaaatccaaaaaaagagaatatgctggagttactgcgccacctgaaggattatatttattgaaaatagattattaa

SEQ ID NO: 292673 - DNA, 751 bp, Unknown
  Bacterial polypeptide expressing nucleotide sequence isolated from the Sargasso Sea
catgacaattagaattaaaattaaaattgaatatgatggaggtctttatattggatggcaaagacagagaattggacggtcaattcaaaaggaaattgaaaattgtttagaggaattatttagaaagaaaatcagtctttatgtttccggaaggacagatgctggagtacatgcattagggcagatagcacactttgatctaaatgctacaaacatagagatcagcaaaatttcatttgctttaaatcatttactcaataaaaaaaaaaataaaattactattttaaaatctgagaaaatttctaacacttttaatgctagattctcagtaaaagaaaaaacatatttatataagatattaaatagacctgttccttcatttatttttgaagatagagtttggtttattccgcaaaaacttagtttagatttgatgagagatgctgcaaactgccttgttggaaaatttgattttaatgcatttcgttcttctgattgccaagctaatacttcaataagatcaataaaagatataaaaataaagaagattggagatattattgaaataagggtggttggtaaatcttttttacataatcaagtaagaataatagtgggaacaatagtaaaggctggaaaaaacatttggaataaaaaaaagatagtagaaattcttaattcaaaagatagacgtaatgctggcccaacagctccttcttttggtctatatttagaaaaaattaaattttga

SEQ ID NO: 292674 - DNA, 694 bp, Unknown
  Bacterial polypeptide expressing nucleotide sequence isolated from the Sargasso Sea
atgaatagataccaaatacttattgagtatgtagggacaaattttagaggatggcaaattcaaaaaaaagggccaactattcaaggattaattcaagaaaaattatcaaagttattaaaagaaaaaattgttttacatggtcaaggaagaactgatgcaggtgttcatgcatttgagcaatctgcacactttgattgcaaaaaaaaaataaccgatacaattaaatttttaaaatctataaatcattttttaaatttaaataacattgcgattaaaaatattaaaaaaagaaataataaatttcatgctagatattcagcaaaacaaagaatttataaatactttatttttaatcaaataagccaaccaataattgaaaaaaatagagcatggcatgttcgtaggcctttaaatttagaaataatgaaaaagggtgcaaaaaagttattaggaacccatgattattcaacttttagatcttcaagctgtcacgctaaaagtccaattaaaactattaaatcaattaaaattaaatcatcaaaaaataaaattgaatttcaatttagttctcaatcatttttacaacatcaagttagatctatggttggttgtttaaaatacttgggagaaactaaatgggatttgaaaacttttgaaaagagatttaagtcaaaaaaaagaacactgtgtgctc

SEQ ID NO: 292675 - DNA, 613 bp, Unknown
  Bacterial polypeptide expressing nucleotide sequence isolated from the Sargasso Sea
accgctagttttaattcaacttcaaaaaacattaaaacaactgaaaagtggtgcagcgcgttaaatgctgtattgccggatgatatcgttgtcaaatatgctcaaactgtgtcaacggattttcacgctaggcacaatgcgattgggaaaagataccgttatctgatttctaacaattcgtatcattcaccatttacaaaaaataaaacctggcaggtaggaaaaattttagatgttgacataatgaagcaggttgctggagttttagtgggggagcacgatttttcagcatttcgttcttcaaattgtagttctccaaacacagtcaaagacattcgggaaatatctatcgacaaatctcattttcaaaattctatacttcaaatagaaattgaggggaactcttttttgcagcacatggtacgaataattacaggaaccttggttgaagcagctcagtctcgcataagctgtgttgatgttaaaaaagctctaaaaaatggtgatcgaaaacttgcaggatgcactgctcctgctcatggattgtattctttaaaagtgatttacccggaaggtttggtgaaatggccttcggaagtgatagataattaaa

SEQ ID NO: 292676 - DNA, 739 bp, Unknown
  Bacterial polypeptide expressing nucleotide sequence isolated from the Sargasso Sea
aatgcaaagatataaaataaaaatagaatatgaaggaacaccatttgtaggatggcaatttcaaaaaaatggcccatctattcaagaagtattgcaaaaggctatatttaatttttcaaatgaaaaagtaatagtaacaggtgcagggagaaccgattctggggtacatgctttagcgcaggtagcccatttcgatttgaaaaaaaaaataaaagataaaaaacttttaccagctatcaatcaaaatattggtgataagcctgtaacagttttaaaaataaataaaacaaataagaaatttcatgctagacacaacgcaaaaaaaagaacctatcgatatttgattgttaatagacaatctcctttagcacttcaaaaaaataaagcttggcacatacggaaaaaattgaatataaaaaatatgaagaaagggtctaaatttctattaggaactcacaatttttcaactttcagagcggcgtcctgtggagcaaagtcaccaataaaaactatggaaaaaatttcaataaaaaaaataaaagatacaatttttttagaatttacttcgagatccttcttacaacaacaagttagatcaatggttgggtgtttaaaatatttaggagaggggaaatggaatttagaaaaatttattaattcatttaaatcgaaaaatcgtacaagctgtgctcctccagcgcctgcttgcggcctttatttaaagaaaataaactactga

SEQ ID NO: 292677 - DNA, 415 bp, Unknown
  Bacterial polypeptide expressing nucleotide sequence isolated from the Sargasso Sea
aaagacttacgaatatgtaatcattaatagacaatctcctcttgctttagaaaaaaataaggcttggcatattcgaaaaaagttaaatattaaagctatggaaaaaggtattaagttattaaaaggaacgcacgatttttcaacttttcgttcatcttcatgtcaggcaaaatcacctattaaaacattaaaaaaaacatcaataaaaaaaaatggtgataaagtaattttaaaatttacttctaaatcatttttacaacagcaagtacgatctatggttggatgtataaaatatttgggagacgagaagtggaacttaaatgactttaaaaattcgtttaaatcaaaaaatcgattaaaatgcgctcctccagctccagcttgtggtctatatttaaagaagatttattattaa

SEQ ID NO: 292678 - DNA, 754 bp, Unknown
  Bacterial polypeptide expressing nucleotide sequence isolated from the Sargasso Sea
aatgaaccggtacagagcatccgtctcttacgatggaggtcccttccatggtttcgcagaaaaccctgatgttgaaacagttgctggtaaattacgggaatcgttagaaaagatcatcggtcatgaaattcacctgacatgcgcagggagaacggacgcaggcgtgcacgctgaaggtcaagtaatctcctttgatgctgaaacttttgatattgagaaaattgaaagatctctgaataaactctgtgctccgttcataacggtaagagacctgcaaaagactaacgatcttttcaacgcaagattttcagctacatgtcgtacatacagatatcgaatccttaatgatgattaccctgatcctttctcccatcgatttgcttggtatattcagacacaattagacatcgatagcatgcaacgagctgctcaggcagtggtaggagaacatgacttcagctcattttgtcgaaaagccacaatccttgttgacggaaaagaggaagaagcttccttaataagagaagtaatctctatcactgtaaaggacgaagggcctttcgttgaaatatgggttacagcaacatcgttttgtcaccaaatggttaggtcaatcgtaggaacgcttgtagcaataggaaaagggcgcttgaataaatcagatgtgtcatcaattatctcaaagaaggacagaaactctgctggacctgtagcgcctcctcaaggacttacgttaatggaagttggttactga

SEQ ID NO: 292679 - DNA, 658 bp, Unknown
  Bacterial polypeptide expressing nucleotide sequence isolated from the Sargasso Sea
caaaatttcgacggtatgctgcgggagaactgatgcaggggttcatgctttaaatcaatttatacattttgataccagttcattaagaaaaatagattcttggataaagggtgttaatgtgaacctgccagatgatattgttgtaaagaatttttataaagtagataaaaattatcatgctcgattcgatgcaacttccagggagtatctttatgtaattaaaaatgcaaatattccaccggcaataggttttaataactgtttatggatcaaacaaactttaaatatccaaaaaatgaacaaagctgcacaatatctgctgggtgaaaaagatttttcagcatttagggcttcagggtgtcaatctaaatctccagttagagagattgtgaagacaaaatttgttagcaagggagagtatctatatttcttcattaaaggaaatgcttttatgcttaatatggtcagaataattatgggcactttgctggatgttggaacaaataaaattaacgtcacagattttaagaaaattattaagcaaaaaaaccgaaagaaagcaggaaaaactatttctccaaaaggattgtattttcttggaccggagtataatgagctaaattatacaaaagaggcaattttagatgaactggattaa

SEQ ID NO: 292680 - DNA, 498 bp, Unknown
  Bacterial polypeptide expressing nucleotide sequence isolated from the Sargasso Sea
aatgtttagatatcagattttgatagaatatgtcggaacaaattttagagggtggcaagttcaagctaaaggcaaaactatacaaggtcttattcaatataaaatttctaaacttttaaaagaaaagattattttattgggtgcaggcagactagataaaggagtccatgcgattgagcaatctgcacattttgagtgtaaaactaaaataataaatttagatagatttattaaatctctaaattactttttaaataaagacatggtgacagttctcaaaattaaaaaacaaaataaaaactttcatgcaagattttctgcaaagatgagaatatataaatacgttataattaatcgtttgagtaaaccagtattggataaaaatagaggatggcatgttaccaataagcttgatttagaaaagatgaaaaaagcggcaaaacaattggttggtacaaatgatttttctacttttagagcttcatcttgtagagcaaa

SEQ ID NO: 292681 - DNA, 562 bp, Unknown
  Bacterial polypeptide expressing nucleotide sequence isolated from the Sargasso Sea
gatgagaatagctctatctgttgagtacattggaaaaaaatattatggatggcagcaacaaaaccattcatcaacaaatactgttcaatactttgttgataaatcactatctaaaattgctgatcataaaataaagactatttgctcggggagaacagatacaggagtgaatgccttgaatcaaatagttcacttcgatactatttcaaaacgatcagataaaaactggatagatggtgctaattctaatttaccagatgatattagagtcaagaggatatatagagttgataatgatttccatgcaagatttcttgctagtaaaagaacttacaaatattttataaatacgaatatcaagagcacgatattcaataatgcctatacttgggttgttggtgataagctatcattttcttctatgcaactttcgatgaaatacttaaagggcgtacatgatttttcaagttttagatcctctggttgtcaggcaagtaatcctcaaagaaatgttagtgatgtctccttagtaaagaataacggtgtaatagttttttcaatt

SEQ ID NO: 292682 - DNA, 674 bp, Unknown
  Bacterial polypeptide expressing nucleotide sequence isolated from the Sargasso Sea
aatgcaaagatataagattaaaatagaatatgaaggcactccatttgtgggttggcaattccaaaaaaatggacaatccgtgcaggaagtattacaaaaagcaatatttaatttttcaaaagaaaatgtaactgttacaggtgccggaagaacagactcgggagtccatgctttagcacaagtagctcattttgatttaaaaaaaaaaatacaaaaaaagaatcttttatctgctattaaccaaaatatttctaataaatctgtaacagttttaaaaataaatagagtaaataaaaactttcattctaggtatgatgctcgaaaaagaacttatttatatttgattattaacaggcaatcacctctagcacttcaaaaaaataaggcatggcacataaaaaaaaaactagatataaaagttatgaaaaaaggagcaaaattgctactgggaacacacgatttttcaacttatagagcagcatcttgtggagctaaatctccaattaaaactatggaaaaaattttaataaaaaaaaacaaagataaaatttctttacaatttacctctagatcatttttacaacagcaagttagatctatggttggttgtattaaatatttgggagaaggaaagtggaatattgaagcatttcaaaaagtatttaaatcgaaaa

SEQ ID NO: 292683 - DNA, 721 bp, Unknown
  Bacterial polypeptide expressing nucleotide sequence isolated from the Sargasso Sea
aatgactaatataaaacttacaattgaatatcatggtttaccttattgtggttggcaatatcaaaaaaatgagaaaactgtgcaaggtgaaatagaaaaagcaatatttaaattctctggtgaaaaaaaaactattcaaggtgctggaagaacagatgcaggtgttcacgctattggacaatgtgccaattttgatttaaaaaaaaaattcgatgactatcaaatactaagtggaataaattttcacctcgggactgaaaagataagagttactaaagttgaaagtgttgacaatgattttaatgctcgttttacagctaaaaataaaatatatcattaccaagtttttaatggtctagccccgtcagttattgaggatgatttcagtttacacattcgacaacctttagatttaaatgcaatgcaagatgctattaagttgtttattggtaaacacgatttttcttcgtttagagcacatggttgtcaggctaacaaaccatttagaactatcgacgaagcatcaattgatgctaaaggtaataaaattatttttgaattcaaggcacaatccttcctttatcaacagattagaataatggttggatctttattggaagttggattaaaaaataaaaatccaaattggataagggaattaattgaagttaaggatagaaggctagcaggaccaacggtcccttcaaaaggtttgatttta

SEQ ID NO: 292684 - DNA, 194 bp, Unknown
  Bacterial polypeptide expressing nucleotide sequence isolated from the Sargasso Sea
aatagaaatagaatttagatctcaatcttttttacaacaacaagttcgttcaatggttggttgtttaaaatatcttggagaaaataaatggtcattaaaaaaatttgaaagtgtaattaaatcaaaaaaaagaattttatgtgctccaccagcacctcctgaaggattatatttagagcgaattatttattaat

SEQ ID NO: 292685 - DNA, 292 bp, Unknown
  Bacterial polypeptide expressing nucleotide sequence isolated from the Sargasso Sea
tggtttgcatgatttttctactttcagagcctcaaattgttattcaaaaactccaatgagaaaattaaatgaagtcaaaattaataaaaaaaatgaaaaaataatattaaagtttaagtccaaatcctttttacgaaatcaggtgagatcaatggttggatgtattgtattacttggaaaagacatttggagcttaaatgaatttgaaaaagtttttagatcgaaaaagagatctttatgcgctccgccagctcctgcggagggtttatatttgtctaaagttgtttattag

SEQ ID NO: 292686 - DNA, 627 bp, Unknown
  Bacterial polypeptide expressing nucleotide sequence isolated from the Sargasso Sea
aatgagaattgcccttcttgttgagtacgatggaaccaattattttggttttcaaaaacaaaaactaaatcaaactaaaactattcaatatcatattgatcagtcaataaaaaaaattgcaaatcatgatgtcaaaactgcttgtggcggaagaactgatacaggtgttcatgcttgtaatcaagtaatacattttgatactagtagcaaaagatcagactttaattggctcaaaggaattaacacttatttaccatcagatatatttgtaaagaatatattccatgtaaagagtgatttccatgctagatttagtgtcatatcaagaacatatcaatatgtgatttataataatgttttatattctcccttaaactcgaaatatgcacttcactatcaaaatataatagatattgaaaaaatccaaaaatcattcaagtattttatcggtgaaaatgattttagcgcattcagaggttctgggtgttcatcaccatcaccaataaaaaatatcaaatctattaaaataaaaaaaaataaggacaaaatttatatcgaaattactgcaaatagttttttatatcatatggtgagaaatatggtaggattctttattgatattggaat

SEQ ID NO: 292687 - DNA, 367 bp, Unknown
  Bacterial polypeptide expressing nucleotide sequence isolated from the Sargasso Sea
atgtataattatttaattaaaattgaatatgatggctcaggatatgttggttggcaatatcaaaaaaatggtaaatctattcaagaaaaaatagaaaaagttttaaaaaaaatattaaaagaaaatattagaattataggtgctggtagaaccgataaaggtgttcatgcaagtgggcaatttgctaattttaaaagtataaaaaaaattgacaataaaaaaaaatttttaagttcaataaattttttcttacgtaaaagctctatctctattgtagatataaaaaagaaaaaaaaagattttcatgcaagattttcagcaaaggagagagtctacacttattatatagtaaatagattggcctcat

SEQ ID NO: 292688 - DNA, 385 bp, Unknown
  Bacterial polypeptide expressing nucleotide sequence isolated from the Sargasso Sea
atgagaattgcgttaactattgaatataatggtgctaaatactttggatggcaaaaacaaaaaataaataaatcaaaaactattcaatatcatgttgatagggcaatagctacaattgctgatgaacctatagctacaatttgtgcaggaagaactgatactggagttcatgcgctttcacaagtagttcactttgatacaacaaaaaaaagaaaagactataaatggattcagggtataaactcatttttaccagctgacattataatcaaagaaatttatcatgtagacgacagttttcatgcccgatatctagctatagataggacctatagatacataatactaaatcaaaaacacccatcatctcatatgcttaagacag

SEQ ID NO: 292689 - DNA, 472 bp, Unknown
  Bacterial polypeptide expressing nucleotide sequence isolated from the Sargasso Sea
attttaagtcttaaaatcagaaaccccagatttcacgcaagacatagtgcaaaaaaaagagaatatgaatacgttataataaatagagccggaagacttgttattgatattaatcgaggatggttaattaataaaaaattagacttaaaaaaaatgaaaaaggcaattatttattttagaggaactcatgatttttcagcattccgatcatcttcatgttcatcaaataatcctatcagaactataagtagtgcaagtgtcttaaaaaaaggggataaaattttcattaattttatttcaaagtctttcctacaaaagcaggttaggtcaatggtggggtgcttaaaatatattggagaaaaaaaatggagtccttataaaattaaacaaataataaattcaaagaaacgtaataattgcgctcccccagctccagcagatggtttatttttaaaaaaagtttactattaaa

SEQ ID NO: 292690 - DNA, 692 bp, Unknown
  Bacterial polypeptide expressing nucleotide sequence isolated from the Sargasso Sea
gatgcatacataccaaattaaagttgagtatcaaggaacaaatttttctgggtggcaaattcaaaagaatggtcttgccgttcaagaagttttagaaaaagctttaaccaaacttttaaaagacaaaatcaaagttgtaggttcgggacgtactgatgcaggcgtacatgcgagtgaacagtcagcacattttaaaacgaaaaaaaaaataattaataaagatatttttattaattcaataaatttttttttaggtcaagattctgttgttattttaagtataaaaaaaaggagcgacaaatttcatgctagacatagtgcaaaaaaaagaacatacaagtattttatagttaatagaccttcacctttaactttagaaaaaaataaagcatggcatatcaaaaaaaaacttaatttaaaaaatatggaaaaaggaacaaaaattcttaaaggaactcataacttttcaacatttagggcatcctcttgtgaggcaaaatcaccgatcaaaactttaaatgaagcaattgttagaaagaaaaaaactaaaataatttttacttttacttcaaaatctttcttgcaaaatcaagtaagatcaatggtcggttctttaaaatatttaggggagggcaaatggaaattaaaagactttaaaaaagccttctcatcgaagaaaagatcaatgtgtg

SEQ ID NO: 292691 - DNA, 545 bp, Unknown
  Bacterial polypeptide expressing nucleotide sequence isolated from the Sargasso Sea
taaaagtaaaattaatgaaccgaaaagattcttaaaatcaattaattattttttaaacaaagagggcgttgcacttcttaaaataaaaaaaaaaaataataattttcattcaagattttcagctaaaatgagaatatataagtatgttattattaatcgaattagtggtccagttttagacaaaaatagaggttggcatgttattaaagaactagatttagatttaatgaaaagaggcgctaaaaaactaattggaactaaagacttttcaacttttagaaagcagagctgcaaagccaaaagtccaattaaaagtatgaaattagttaaaattaaatcttttaaaaataaaattgaaattgagtttagatctcaatcttttttacagcagcaagttcgctcaatggttggttgtctaaaatatcttggtgaaaaaaaatggtcattaaaaaagtttgatagtattatgagatcaaaaaatagaagtttgtgtgctccacctgcacctcccgaaggtctttatctaacgaaaattatttattaaa

SEQ ID NO: 292692 - DNA, 401 bp, Unknown
  Bacterial polypeptide expressing nucleotide sequence isolated from the Sargasso Sea
tttaattattaatcgaccttctacgcttgctttagataaaaataaagcttggcatattaaaaaaaaattagatgtgaagctaatgaaaaaaggtgctgcaattttaaaaggaacacataatttttcaacatttagagcctcaaactgtcaggctaaatcacccgtaaaaactttaaaaaagcccctaattaaaaaaagtaaaaataagatagtttttatttttcaatcaaagtcttttttgcaacaacaggtaagatcaattgttggatctttaaaatatttaggagaaggaaaatgggatttaaaagaatttaaaaaagcatttctatcaaaaaaaagatcaatgtgtgcacctccagctccagcacacggattatatctagtaaaagtaagatattaag

SEQ ID NO: 292693 - DNA, 676 bp, Unknown
  Bacterial polypeptide expressing nucleotide sequence isolated from the Sargasso Sea
aaaaggcaaaagtatacaaaatgaaattgaaaataatttatcaaaattattaaaagaaaaaatattaatttatggttcaggtagaactgatgcaggcgttcatgcaatagaacaatctgctcattttgataccaaaataaaaattaaagaaattaaaaaattaattaaatcactaaattttttcttaaattcaaaaaaaatttctataattaatattcacaaaaaaaaaataaattttcatgcaagatattcagcaaaagaaagaatatataaatattttataataaatcgttttgcatcatctgcattagaaaatgaaagagcttggcatataagaaaaaaattaaatattaaattattaaaaaaaggtgcaaaaaaattaattggaaaacacgatttttcaacttttagagcttcaaattgttatgcaaaaagccctataaaaaaaatgaataaaataacgattaaaaacaataataataaaattcaaattgaatttagatctaaatcatttttaagaaatcaagttaggtcaatggttggatgtttaaaatatttagcagaaaacaagtgggatattaataaatttgaaaaagtttttaaatcaaaaaagagaagcaattgtgctccaccggcacctgcccatggtttattcttgtataaaattatttattga

SEQ ID NO: 292694 - DNA, 511 bp, Unknown
  Bacterial polypeptide expressing nucleotide sequence isolated from the Sargasso Sea
aatgaattataaattaacaatatcatatgatgggacaaattattctggttggcagattcaacctgattccaaaactatacaagaaataattgaaaaaagtttaatgaaaattttttcagatcaaaatattaaagttattggctctggtagaactgatgctggcgttcatgctaatggtcaggtagcaaatgtaaatattgaaaattcaaaaatgaatgaaagtcaaattaaaaatgcaataaatagctatttacctaatgatatttttattaatgattgtactttagttaacgatgaattccatgctagatttactgctaaaaaaagagaatatttttattatatttcaaataattatcatcctaaaaatagattttatatttggaattgtaaatgggaattagatttgaatatattaaataaatgttctgatttactaattggagaacatgattttagtttattcagcaaggcctcaagtgatacaaaaataaaatatgtaaattgtatg

SEQ ID NO: 292695 - DNA, 440 bp, Unknown
  Bacterial polypeptide expressing nucleotide sequence isolated from the Sargasso Sea
aaatataaattttgtaaaagaggtgacggaagatttccatgcaagattttcagctaccaatcgtgcctatcagtattttatattcaacagtagtaatagatcctcactactcagagatagattttggtggatacgagacacattatatgaatctttgatgcaagaaggggcaaaaattctagttggagagcatgattttaactcttttcgagcctcatcctgccaagcttcctcacctataagaacaatcaaaacactggatgttcaaagaaatgatcagtttcttattatctcaataaaagcaaatgctttcttacagaaaatggtgaggaatatagttggctcccttgtgcatattggtcttggggaaaaaacaaatgattggctcattgatgttcttgcggtaagagatagaaagagagccggtattacagcaccat

SEQ ID NO: 292696 - DNA, 742 bp, Unknown
  Bacterial polypeptide expressing nucleotide sequence isolated from the Sargasso Sea
atgataacgtatcaaattacagttgaatatcttggtacaaattttgttggttggcaatttcaaaaaaatggtctttcaattcaagaagttttagaatcagctttatcgcgatatttaaaggaaaaaataagagtgataggttctggaagaaccgattccggcgttcatgcgagtgaacaatcagcccattttaaaacaaaaaataagataaatgatatgggtattttcctcaattcagtgaatttttttttaaagaaacatcctgtatcaattttaaatattaagaaaagatctaatagttttcacgcaaggcatagcgctaaagaaagagtttataagtatttcataattaatcgacactcatctcttgctttagataaaaataaggcctggcatattaaaaaaaaactagacgtaaaattgatgaaaaaaggtgctacaattttaaaaggaacacataatttttcaacatttagggcctcaaattgccaggctaaatcaccaattaaaacattgaaaaaacctttaattagtaaaagcaaaaataagattgtatttacctttcaatcaaagtcttttctacagcaacaggtacgatcaatggtaggttctttaaaatatttaggtgaaggaaaatggaatttaaaagattttaaaaaagcatttctatcaaaaaaaaggtcaatgtgtgctccacctgctccagcacatggattatatttagttaaagttaaatactaaa

SEQ ID NO: 292697 - DNA, 513 bp, Unknown
  Bacterial polypeptide expressing nucleotide sequence isolated from the Sargasso Sea
acaatgggcggcgaccaaacctgttcctcgccccctggagctggcaccgctatcaactccggctggatgagtcccgcatgcgggatgccctcaacggcatgctcgggcttcacgacttcagtgctttcatgcgggccggaagccgtcgggcccatgccagaaccacggttcaggaggtggagctggtgcgccagggcgacatggtgcgggttgagatccaggccagtggtttcctttatggcatggttcgcctgctgatggctcagctggtggcggtgggcgaacaccgtctgtccgtgcgagatttcgagcagcgctggcgtcaacgacgacgccacgaggtccgtgaagcagctccaggccatgggctatgtctgctcagggctggttatgagcaggagatattcaccagagctggctggtacgattgtcaaccgtggttttttctggcggagagtgatcccccaccggatcctccgcctctgccggaagcaagcggatctgaactctgat

SEQ ID NO: 292698 - DNA, 412 bp, Unknown
  Bacterial polypeptide expressing nucleotide sequence isolated from the Sargasso Sea
ttgcatagatataaaatagtaattcagtatgatgggtcattttttaaagggtggcagctgcaaaaaaatcaaaagacagtacagggcgaaattgaaaatgcgttaatgactatagctaaatctaaatcccgtataattgtaaaaggctctggaaggacagatgcgggagttcatgcaatcggtcaagttgcacattttgatttagataaccatttaactgaaaaacaacttttaaatgctttgaatttttacactaatgaaaattgcaagataatgtctttatgtaaaacacatgataggtttgattctagatttgatgcaaaaaatagaacatataaataccaaatctattttggtaaatccattttatatcgaaatcaagcttggctaaaaaatgatagcattgacataa

SEQ ID NO: 292699 - DNA, 232 bp, Unknown
  Bacterial polypeptide expressing nucleotide sequence isolated from the Sargasso Sea
atgaacaggtataaaataaaaattgagtatgatggtaccccgtttgtcggatggcaaagacaagaaaatggacaatcagttcaagggtgtattgaaaaagcaataagtaatatatttgaggaaaacataactatttttggggctggtagaacagatgcaggtgttcacgcaatggggcaggtcgctcattttgatattacgaacaaattacttgaaccatatgtgaattaag

SEQ ID NO: 292700 - DNA, 466 bp, Unknown
  Bacterial polypeptide expressing nucleotide sequence isolated from the Sargasso Sea
tgacataaaaaaaaaatctgaaaaatttcatgctagacatagtgcaaaaaaaagaacttataaatatttaatattaaatagaacatcgccttcggtattagaaaaaaatagagcgtggaatgtaagaaaaaaattagaccttaagatcctaaaaaagggagcgaaacttttgaagggcactaaagatttctcaacttttagatcttcatcttgtaatgctaaatcacctgttaaaactattattgatgtaagaattaaaagatttgataataaaattgaaattaaatttattgcaagatcatttttacaacaacaagtaagatccatggttggctgtttaaaataccttgcagaaggaagatgggacttaaaaagatttaataaagcaataagtttaagaaaaagatctctttgtgctcctccagcgccttcttgtggtttatatctattgaaaattaattattaa

SEQ ID NO: 292701 - DNA, 703 bp, Unknown
  Bacterial polypeptide expressing nucleotide sequence isolated from the Sargasso Sea
atgtttagatatcaaatacttattgagtatgtaggcactaattttagaggctggcaggttcaaagaaaaggaaaaactatacaaggactaattcaagaaaaaatctcaaaacttttaaaagaaaagataatattaacaggttcaggcagaacagacgctggagtgcatgcaattgagcaatcagctcactttgattgtaaaattaaaattaaaaaaactgatagatttttaaaatccataaatcattttttaactagtgaaggagttgtaattttgaaaattaaaaaaagaaataataattttcattctaggttttcagctaaaatgagaatatatagatatgttatttttaatcgtttgagtagaccagttttagaaaagaatagaggctggcatattataaaaaagcttgatttagaagtaatgaaaaaaggtgcgcaaaagttaattggaactaaagatttttctgtttttagagcctctacttgtagagccaaaagtccaataaaaactatgaaattagttaaaattagatcttctaaagataaaatagaaatagaatttagatcgcaatcatttttacaacagcaagtacgttcaatggttggttgtttaaaataccttggtgaaaaaaaatggtcattaaaaaaatttgaaagtattatgaaatctaaaaaaagaattttatgtgctccaccagctc

SEQ ID NO: 292702 - DNA, 556 bp, Unknown
  Bacterial polypeptide expressing nucleotide sequence isolated from the Sargasso Sea
atgactagatataaaattgtaattcaatatgatggtactaacttttcaggctttcagtcacaaaaaaatcaaagcggaatccaagataaaattgaatcatcaatatttgccttaaataataataaaaaagttaagatttttggtgcaagcagaaccgatgctggtgtacacgcattaggtcaagttgctcattttgatttagattctaagttaactgataatgagctacatcgagcaataaatgccagacttaataaagaaataagaatatctcatttgtcaaaaattgaagaaagttttcacagtaggtttgatgcaaagagtaaagagtacaactatttatgttgtttaagtgataatcctctttatttgaaagatcattatcatgtaaagaatattgatataaagttattaatggaagtatcaaaaataattgaaggtaaacacaattttttatctttttctaaattttcaaacaaacaaaataatgattgtgaaatatttacttcaaaatgggtttttgatgataaaaatcataaaaaactattatatatta

SEQ ID NO: 292703 - DNA, 469 bp, Unknown
  Bacterial polypeptide expressing nucleotide sequence isolated from the Sargasso Sea
cattaaaataaagaaaagagataataattttcactcaagattttctgcaaaaatgagaatatataagtatgtaataatcaatcgtcccagtagaccggtaatagataaaaatagaggatggcacattattaataaactcgatttaaagataatgaaaaaagctgcgaaaaaattagttggtactttagatttttctaccttcagagcctcaagctgtagagctaaaagtccgatcaaaacaatgagatcagttaaaataaaatctagaaatagtagaatagagatagaatttcaatctcaatcttttctacaacaacaggttcgttcgatggttggttgtttaaaatatgtaggtgaaaaaaaatggactttaaaaaaattttattttgttatgaactcaaaaaaaaggattttgtgtgcaccgcccgcaccacctgagggactttacttagctagagtaatttattaa

SEQ ID NO: 292704 - DNA, 254 bp, Unknown
  Bacterial polypeptide expressing nucleotide sequence isolated from the Sargasso Sea
tttgaaaagagtagctctaattattcaatatgatggatcttacttttcaggatggcaaaagcaaaaaaatgcagtaactgttcaagagattttagaaaaagcacttttaaaaatatctaatcataatgtaaatacttttgctgcaggacgcacagacgctggagtccacgcctcaggacaagtcgtacattttgatattgacaatattattccagcaaatagatattcatatatcttaaatagccttttgccga

SEQ ID NO: 292705 - DNA, 656 bp, Unknown
  Bacterial polypeptide expressing nucleotide sequence isolated from the Sargasso Sea
taaagaaaagtatttggcttgcactttaaagaaaaatataattggctcaggcagaactgatgcaggtgtgcatgctttaggtcaatctgcaaattttttcatttatggtggaataaatccaaatagaaaaaaagtattacttaacaggtggaactttttattagctaaaaaggggatatctatactttcaattaggacaagaaataaaaattttaatgcaaggcgtagtgctaaagagagaacctacctttataaaattatgaatagagctagttctatagcgttagacaagaaccgagtttggcatgtgaggaaaaaattgagtatgaatgaaatgaaaaaaggagcaaaattacttactggaactcacgatttttcagcatacagatcttcctcgtgtacagctaaatctcccattagaacaattaaaaaaatttcgattaaaaaaaatagaaatggtaaaataataataagatttgtttctaaatcttttttgcaaaaacaagttagatcaatggttggatgtcttaaatttctaggagagggaaaatgggatatttcagatttcaaaaaaactttaaattcaaaaaaaagatcatcatgcgcaccacctgcaccagcttgtggtctttatttggaaaaggttaaatattagt

SEQ ID NO: 292706 - DNA, 289 bp, Unknown
  Bacterial polypeptide expressing nucleotide sequence isolated from the Sargasso Sea
ttgaaaagggtagcattactagttcaatataatggatctaacttttcaggttggcaaagacaaaaaaatgcaactactattcaggaaattctagagaaagcgctttttgaaatttcccatcattacgtaaagacttttgccgcaggtagaactgatgcaggagttcatgcatcaggtcaagtagtacactttgatattgattgcgttattccaggaaatcgttattcagatgtactaaataatcttttaccctcatcaattagaatcttggaatctgttgaggtaaaga

SEQ ID NO: 292707 - DNA, 739 bp, Unknown
  Bacterial polypeptide expressing nucleotide sequence isolated from the Sargasso Sea
atgaaaaagaaataccttgtaataattgaatatgagggtactgcttaccatggctggcaattccagaaaaatggaatttccattcaagaggtcatagaaaaggctctaactaaaattacgaaagctgaaacatgcgttctaagttctggccgcaccgatgcaggtgttcatgccgaaggaatgccggcccattttgttacagaatctaaaatgaagccgtttgaatttctttttgctctcaatagccaacttcccttagatattactgttaaggaggtgaagaaagttcccatgtctttcaatgcgagaggctctgctagacggaaactttaccgatactctgttttaaatcgtgagcacccttcggctctaaattatcgtcgttcttggtttattcctcatgcattagatatagccgcaatgcgaagagctgcaaaatattttgtaggtaagcatgacttcacatcttttcgcgccgggaattgcaacgccaaaactccaattcggatattaaaccgggttgaaatttttaagcaaggttgttttctgcaatttgaatttgaaggaaaaggattcctgaaacatatggtgcgtaatttggtaggaaccctagtccatgtaggacgcaaaaaaatttttgcacgagaagtaaaaacaattcttgaagcccgcaaccgaagtatcgctggtccgaccgctccggcgcaaggcctttgcttagttaaagtttattattgat

SEQ ID NO: 292708 - DNA, 511 bp, Unknown
  Bacterial polypeptide expressing nucleotide sequence isolated from the Sargasso Sea
aatggctaatataaaacttacaattgaatatcatggtttaccttattgtggttggcaatatcaaaaaaatgagaaaactgtgcaaggtgaaatagaaaaagcaatatttaaattctccggtgaaaaaaaaacgattcaaggtgctggaagaacagatgctggtgttcacgctattggacaatgtgccaattttgagttagaaaaaaaattcgatgactatcaaattctaagtggcattaattttcacctcgggactgaaaagataagagttactagagttgaaagtgttgataatgaatttaatgctcgttttactgctaaaaataaaatttataattatcaagtttttaatagtctagccccgtcagttatcgaggatgattttagtattcatattcgtcaacctttagatttagaggcaatgcaaaatgcaattaagctgtttattggtaaacacgatttttcttcgtttagagcacatggttgtcaagctaacaaaccactcagaact

SEQ ID NO: 292709 - DNA, 731 bp, Unknown
  Bacterial polypeptide expressing nucleotide sequence isolated from the Sargasso Sea
aatgcataggtatcatatcttagtagagtatgttggaactaattttcatgggtggcaaactcaatcaaatggaaaaacgatacaaaaaacaattgaacaaaaaatcaaaaaaattattaatgagaaagtaaaacttattgggtcaggaagaacagactcaggtgtccatgctcttgagcaatctgctcattttgattgtaaaaaaaaaattgaaaatttgaataaatttataaaatcaattaattattttcttaatgataatttaatttcaatattaagtataaagaagagaaatatatattttcacgcacgatattcagcaaaaaagagaatttataaatatataatttttaatcggaagagtaagccttcaatatataaggaaagaggatggcacgtatcaaataaacttgatattagtcttatgagaaaaggtgcaaaaaaattattaggcactaatgattattctacatttagagcatcaagttgtaatgcaaaaagttcaattaaatcaattaaattaataaaaataagaaaagcaaataatataatttatattaaatttcaatctcaatcttttttacaacaacaagttcgatcaatggttgggtgtcttaaatatctaggtgaaggaaaatggaacctaaaaaaatttgttagagtatttaaagcaaaaaaaagaattttatgtgcaccacctgcaccacctagtggattatatcttgaaaaag

SEQ ID NO: 292710 - DNA, 609 bp, Unknown
  Bacterial polypeptide expressing nucleotide sequence isolated from the Sargasso Sea
tctgacggaatcttcgtctgcagtgacggatcagccgatcccccaccggatcgctctcagcctgcagtacgacggatcggaattctgcggctggcagcggcaacggaacggcctcagcgtccaggccgttctggagaacgcgatcgagcagctcgatccgcaccggcccattcactgcttcgctgcgggccgcaccgatgccggagtgcacgccgccggccaggtggttcatttcgactgcatcggacccattccggcacacaaatgggctcctgccctcaacggacggctgccagccagcatccgggtgcgggagtcggtggagcgtcctgccgactggcacgcctgctacgacgccatctaccggcgctaccggtacacgattcacaacggccgtcgccccaatctctttctcagcgcctggagctggcaccgctatcagctccgcctggatgagatcagcatgcggacagccctcgaaggcatgctcgggcggcacgacttcggcgccttcatgaaagcaggcagtcgccgtgccgatgccatcacaacggtgcaggacgttctggtggaacgtcagggggacatgctcagggtgggagatcaggc

SEQ ID NO: 292711 - DNA, 660 bp, Unknown
  Bacterial polypeptide expressing nucleotide sequence isolated from the Sargasso Sea
acaaaatttcgaccgtttgctgcgaaagaactgatgcaggggtgcatgctttaaatcaatttatacattttgataccagttcattaagaaaaattgattcatggataaagggcgttaatgtgaacctgccagatgatattgttgtaaagaatttttataaagtagataaaaattatcatgctagattcgatgcaacttctagggagtatctttatgtaattaaaaatgcaaatattccaccggcaataggttttaataactgtctatggatcagacaaactttaaacatcgaaaaaatgaacaaagctgcacaatatctactgggtgaaaaagatttttcagcatttagggcttcagggtgtcaatctaaatctccagttagagagattgtgaagacaaaatttgttagcaagggagagtatctatatttcttcattaaaggaaacgcttttatgcttaatatggtcagaataattatgggcactttgctggatgttggaacaaataaaattaacgtgacagattttaagaaaattattaagcaaaaaaaccgaaagaaagcaggaaaaacaatttctccaaaaggattgtattttcttggaccggagtataatgagctaaattatacaaaagaggcaattttagatgaactggattaaa

SEQ ID NO: 292712 - DNA, 727 bp, Unknown
  Bacterial polypeptide expressing nucleotide sequence isolated from the Sargasso Sea
atgtatagatatcaaattttaatagaatatgttggaactctttatgtggggtggcaaatccaaaaaaaaggaaactctattcaaaaaacagttcaattagctttatcaaaattactgggtcaaaaaattattttatatggatctggcagaactgatgcaggagttcatgcatcagaacaatcagctcactttgatgtaaaaaataaaattcaaaatattgagagaacaattaaatcattaaatttttttttaaaaaataaaatgatttcaataataaaaattaaaaagaaaaaaattaattttcacgccagatactcagctaagcaaagaatatatttatatataattcaaaatagactatcaccatcctctttatataaagatagagaatggcatgtaagaaaaaagttagatattaatttaattaaaaaaggagctaaaaaattagttgggactcatgatttttctgtatttagagcttctaactgtagtgcaaaaagtccaattagaacaattaatgaaattttggtaagtaaggtaaaaaatcgtattatatttaaatttaaatctaaatcttttttaaaaaatcaagttaggtcaatggttggctgtttaaaatatcttggagaaagaaaatggagtgtaaatcaatttataaatgtaattaagagtaaagataggaaaaaagttgcacctccagcaccagcgtgtggattatatctgaaaa

SEQ ID NO: 292713 - DNA, 280 bp, Unknown
  Bacterial polypeptide expressing nucleotide sequence isolated from the Sargasso Sea
tttgcgtaggtataaaattatcattcagtatgatggttctttttttagtgggtggcaattgcagaaggataaaaaaactgttcaaggcgaaattgagaatgcattaaaaataattactgattctaaagaaagaataactattaaaggttcaggaagaacagatgccggagtccatgcaattggacaagttgctcactttgatattgatactagtcttaaaaaagaagagttaaaaaatgctataaattattatatatctaatcattgtaaaataatgtcg

SEQ ID NO: 292714 - DNA, 742 bp, Unknown
  Bacterial polypeptide expressing nucleotide sequence isolated from the Sargasso Sea
atgtttagataccagattattgttgaatatattggaacaaacttaagaggttggcaagttcaaaaaaaaggaaaaaccgtacaagggctgattcaaaaaaaaatttcaaaacttttaaaagaaaaaattatattatttggatctggtagaactgatgctggagtacatgcaattgaacagtccgcacattttgatactagtagtgaaattgtagagataaataaatttttgaaatcaataaattattttttaattaatgagggtatttcaattttaaaaataaaaaaaagaaataaagatttccattctagattttcagcaaaaatgagagtatacaaatacgttatcattaatagattaagtaaacctgcaattgataggaatagaggttggcatatcataaaaaaacttgacctaagtttaatgaacagaggcgcacaaagactaattggaactaaagattttactacttttagagcttctagttgtagagccaaaagtccgataaagactatgaaatctataaagattaaatcatcaaaaaacaaaattataatagaatttaaatctcaatcatttttacaacatcaagttcgatcaatggttggatgccttaagtatcttggtgaaaaaaaatggtctataaaaaaatttaattatatattgaaagcaaaaaacagaaccttatgtgctccacttgcaccagcagaaggtttatttttagcgaaaattatctattagc

SEQ ID NO: 292715 - DNA, 626 bp, Unknown
  Bacterial polypeptide expressing nucleotide sequence isolated from the Sargasso Sea
aatggcgaggtatcaagttcttattgaatatgttggaacgagttttagaggttggcagattcaaaaaaagggctctactattcaaggattcattcaacaacatttatcaaaactattaaaagaaaaaataattctaaatggatctggcagaacagatgcaggtgtacatgctcatgctcagtcagctcactttgattgtcaaaaaaaaattttagatttaacaaaatttttaaaatcaattaatcattttcttaataataaaggcatagcaattactcaaattaaaaaaagaagtgaaaaatttcattcacgattttctgctaaacaaagaatttatagatatataatttttaatcaaataagtgctcctgtaattgaaaatggaagagggtggcatgtgaggaaaatactagatgttgatttaatgaaaaaaggagcaaaaaaattattgggaacgaatgactactcaacctatagatcatcaagttgtcacgctaaaagtccaatcagaacaattaaatcaatcaaaataagaacattaaaaaataaaattgaaatagaatttaaatcacaatcatttttacaacagcaagtaagatcgatggtaggttgtctaaaatatttag

SEQ ID NO: 292716 - DNA, 772 bp, Unknown
  Bacterial polypeptide expressing nucleotide sequence isolated from the Sargasso Sea
atgacccctcgcgtgttcgcgctctggcagaacaagcaaacggataatgtttccaataaaatcgtgccaactgcacaaaactggctcctcctgctgacatttgatggagcctgttaccatggctggcaggttcagcctgatttccctacaatccaagacaccctccaaaaggcaatcctacgtcttacaggagagaccgttagtgtgcacggcgcgggccgaacagatgctggtgtacatgctctcaactacacggcaaattttacttcaacttcaaaaagtatcaaaacaaatgaaaagtggtgcagagcgttaaatgctgtattgcctaatgacattgttgtcaaatctattcaaactgtatcagcagattttcacgcccggcacaaagcgattgggaagagataccgttatctgatatccaatcattcctaccactcaccatttacaaaaaataaaagctggcatgtaggtcagactttagatttagacatgatgaagaaggtggctgaagttttaataggtgaacacgatttttcagcatttcgttcttcaaattgtagctctccaaatacagtcaaagacattcgtgaaatttctatagttaaatcgcattttcaaaattcaatactacaaatagaaattgaggccaactcttttttgcagcaaatggtacgaataattacagggaccttggttgaagcggctcaggctcgcataaggcgtactgatgttaaaaaagccttaaatttcggtgatcgaaatcttgccg

SEQ ID NO: 292717 - DNA, 607 bp, Unknown
  Bacterial polypeptide expressing nucleotide sequence isolated from the Sargasso Sea
tgttattggagccggaagaacagattccggcgtgcatgctttagaacaggtagcgcactttgatttaaaaaaaaagatacaaaaaaaaagtattttacctgccattaatcaaaatattggcaataagcccgtgacagttttaaaaataaataaagtaaacaaaaaattccatgcgaggcatgacgctaaaaaaagaacttatttatatttaattattaataggcaatctccgctaacgctacaaaaaaataaagcttggcacatacgaaaaaaattaaatttaaaaactatgacaaaaggagcaaaactactgttaggtacgcatgatttttcgacctttagagctgcttcatgtggagctaaatcaccagttagaactatggaaaaagttttaataaaaaaaaacaaggataaaattactttaaaatttacttcccgatcatttttgcagcagcaagttcgatcaatggtaggttgcataaaatatttaggtgagggtaaatggaatttaaatgattttaaaaattcatttaaatcaaagagtcgtttaagatgtgcgccacctgcgcctgcatgtggtctttatttaaagaagattgaatactaa

SEQ ID NO: 292718 - DNA, 515 bp, Unknown
  Bacterial polypeptide expressing nucleotide sequence isolated from the Sargasso Sea
tatggagaataaagtaaagtatgctcttttaatagagtataatggtaatagtctggtaggttggcaaagacaagaaacaggcatttctgttcaaggaactttagaaaaagttgccaaccaaattttcaatgatgaatttttaattcaaggctcaggtcgtactgatgcaggtgtacatgctttaggacaagtagcacatatttacttaccttcaaaccatccgttgacaagtaaacatccgttttacatcatttctgcattcaattcttttttaatggatacctcaattagagttgtgtctgcaaagcctgttaaatccaagtttgatgcccgttttagtgcgattaaacgttattacaaatatagaattttatgtcgcgcagctcctgctggcgttgataaaggtaaagtttggcattatagaaaaaaattaaatatcaaatcaatgaaagaaggcattaaatatttaattggcaagcatgatttcacaagtttcagaactataaaatgccaag

SEQ ID NO: 292719 - DNA, 706 bp, Unknown
  Bacterial polypeptide expressing nucleotide sequence isolated from the Sargasso Sea
acaaattattctggatggcaatcacaaaaaaatgcaaaatcaatccaaaaagaaattgaaaaaattttatctaaattcttgaaaaaaaaggtgaatattaccggctcaggaaggaccgatgctggtgtacattcaaaaaaccaatctgctcattttgatcatgaaaaattaatatttgataaatataaattaactacttcagtaaattattttttaaataaaaaaaatatttcaataaaaaaaataataaaaaaaaatatgaattttcacgcaagatattctgcaaaagaaagggaatatgagtatattattctaaatagagatgcgcctccagtattagataaaaacaaagtttggtatttaagatctaggctggacatcaaattattaaaaaaaggagcaaataaattaattggtactcataatttcaatgcatttagatctggtaattgccaggctaaatctccagtgagaactttaaaaaaaataaaaattacaaagaaaaaagaaaaaataatttttactttaaggtcaaaggcatttcttaaaaatcaagtaagatcaattataggttgtttgaaatatgttggtgaaaaaaaatggacgattaatgatcttgaaaaagttttgaagtcaaaaaacagaaattattgcgctccaccagcaccagcgcaaggattatatttatcaaagattatttactaag

SEQ ID NO: 292720 - DNA, 226 bp, Unknown
  Bacterial polypeptide expressing nucleotide sequence isolated from the Sargasso Sea
atgagtagatataaaataattatccaatatgatggtaataatttttcggggtttcaatctcaaaaaaataagtcaggcattcaagatcaaatcgaatcatctctttcaaatcttaataataataaattagtaaaagtttttggggctagtagaacagatgctggcgttcatgctttaggacaagttgcgcattttgatataatctcccaaattatcagacgatgat

SEQ ID NO: 292721 - DNA, 592 bp, Unknown
  Bacterial polypeptide expressing nucleotide sequence isolated from the Sargasso Sea
ttggaaattaaaaatagcataagatacgcattattaatcgagtataatggttacgatcttgttgggtggcagaaacaaaatgaaggtatgtccgtacaaagcagccttgaagaagctgcaaaaaatattttcaatcaaaattttgagattcaaggttcaggccgcaccgatgctggggtacatgcccttggtcaaattgcccatataaatttaccaaaaggtcatagattaacatcaagacatcctttttatattatctctgccttcaactctttattaagagatactaatataagagtaatttccactaaacctgtcaaaccagaatttaatgccagatttagtgcgattaaacgtttttacaaatacagaattctctgtagagcagctcctcccggcttagaaaaggggaaagtatggcattttagaaaaaaattaaatatcagtttaatgcaagaaggtgttggacatttaattggaaaacacgattttacaagttttagaacaataaaatgtcaagctaaatctcctataagaactatagatgaaatttccttttctagggagaatgaagaagttataatgagagttt

SEQ ID NO: 292722 - DNA, 742 bp, Unknown
  Bacterial polypeptide expressing nucleotide sequence isolated from the Sargasso Sea
atgataacgtatcaaattagagttgaatatcttggtacaaattttgttggatggcaatttcaaaaaaatggtctttcaattcaagaagtattagaaaaagctttatcacaatatctaaaagaaaatataagagtaataggttctggtagaacggattctggtgttcatgcgagtgaacaatcagcgcattttaaaacaaaaaataagataaataataagggaattttcttaaattcagttaatttttttttaaagaaattccctgtatcaattttgaatattcagaaaagatctaataattttcatgcaaggcacagcgctaaagaaagagtttataagtatttcattattaatcgaacctcatctcttgctatagataaaaataaggcctggcatattaaaaaaaaactagatgtaaaattaatgaaagagggcgctacatttttaaaaggaacacataatttcacaacttttagagcctcaaattgtcaggctaaatcgccaatcagaacattgaaaaaaccattaataagtaaaagtaaaaataagattgtatttacctttcaatcaaagtcttttctccagcaacaagtaaggtcaatggtaggctctttaaaatatttaggtgaaggaaaatggaatttaaaagattttaaaaaagcatttcaatcaaaaaaaaggtcaatgtgtgctcccccagctcctgcacatggattatatttagtaaaagtaaaatattaaa

SEQ ID NO: 292723 - DNA, 553 bp, Unknown
  Bacterial polypeptide expressing nucleotide sequence isolated from the Sargasso Sea
tgctagttttaaaattgaaaaattaattgagatcaatgttattcgtgatggacttaatcaacatttgcgcccacacccgattgctgtaataacagcagaagttgttaatgatgactttcatgcccgtttctctgcaaaaaacagaacctatcagtataaaattattaatcgccgatctcctttaacaatagaaaaaaatagagcttggtgtgttcacaaaaaattaaatttcgataaaatgttaatagaatcaaaatcatttattggtaaatatgacctaagctcttttaggtcatcacattgtcaatcaaaatcaactattaaaactattaaagatataattattgagcaagaatcagaaactttgatttttaccattactgctaaatcttttttacattcgcaagttaggataatggttggaacactagttgatattggaaaaggattattatcaaaatctatatcagagattattgaatcaaaagatcgtaatgtagctggccaaacagcgcctgcatgtggattatatttaaaaaaaattttctattaa

SEQ ID NO: 292724 - DNA, 751 bp, Unknown
  Bacterial polypeptide expressing nucleotide sequence isolated from the Sargasso Sea
gttgaagaagtttcataactatcttttaaaaattgaatacgatggaaccaaatttgtcggttggcaataccaaaaaaatggaatttcaatacaagaaaaaattgaatgggctttaacaaaattacttaaacgtaaagtaagaattataggagcgggcaggacagataaaggtgttcatgctatgggtcagtacgcaaattttaaggtagaaaaaaaaatagagaatagaataaaatttatcgactcaatgaatttctttctcagaaaaaacttaatttcaatcattaatataaaaaagaaaaatttaacatttcactcgagattcagtgcacttgagagaatatatgtttataagattataaataggacgggatcattatctttaaataataatagagcttggcacataaaaaaaaaattaaatatcaagctattaaaagagggggcaaaaattcttgaggggactcacgacttctcagcatttagagcagcttcttgttctgctaaatctccaataaaaaaaatgaattccgtaaaaataaaaaaaaaagaaaatgaaatattaattcaatttagttctaaatcatttttacaaaatcaagtgagatctatggttgggtcattaaaatatttatcttgtggtaattggagcataaaaaaatttaaagaagtgcttaagaataaaaaaagggcaaattgtgctccacctgctcctgcttacggattatatcttaagaatataaaatattaa

SEQ ID NO: 292725 - DNA, 501 bp, Unknown
  Bacterial polypeptide expressing nucleotide sequence isolated from the Sargasso Sea
atttttttttaaagaaacatcctgtatcaattttaaatattcagaaaagatccaataattttcatgcaaggcacagtgctaaagaaagggtttataaatatttcattgttaatcgaccctcatctcttgctatagataaaaataaggcctggcatattaaaaaaaaactagatgtaaaattgatgaaaaagggcgctacaattttaaaaggaacacataatttttcgacatttagagcttcaaattgccaggctaaatcgccaatcagaacattgaaaaaacctttaattattaaaagcaaaaataagattatatttacctttcaatcaaagtcttttctacagcaacaagtaaggtcaatggtaggttctttaaaatatttaggtgagggaaaatggaatttaaaagattttaaaaaagcatttaaatcaaaaaaaagatcaatgtgtgctcccccagctccagcacatggattatatttagtcaaagtcaaatattaaa

SEQ ID NO: 292726 - DNA, 697 bp, Unknown
  Bacterial polypeptide expressing nucleotide sequence isolated from the Sargasso Sea
aaaagcaatccagcgtattacaggagagacggtcatggtacatggtgcaggccggactgattccggtgttcatgctctaaactacaccgctaattttaattcaacttcaaaaaacatcaagacaaccgagaagtggtgtagcgcgttaaatgctgtattgccggatgacatcgttgtcaaatctattcaaactgtatcagttgattttcacgccagacacaatgcgattggaaaaagatatcgatatctgatttccaatatgtcctaccattctccatttacaaaaaataaatgctggcagataggtaaaattttagatattgacatgatgaagcaggttgctgatattttaataggcaagcatgatttttcagcatttcgttcttcaaattgcaactctccaaacacagttaaagacattcgggaaatttccattggtaaatcacaatttcaaaattctatacttcaaatagaaattgaaggggactcttttttgcagcacatggtgagaataattacgggaaccttggttgaagcagcacagcatcgcataagctgtgttgatgttaaaaaagccttaaaaaatggtgatcgaaatcttgccggagtcactgcgcccgctcatggattgtattctttaaaagtgatttaccctgaaggtttggtgagctggcctttggaagtgatagacaaataa

SEQ ID NO: 292727 - DNA, 289 bp, Unknown
  Bacterial polypeptide expressing nucleotide sequence isolated from the Sargasso Sea
aaaaaagactttagtacatttagagcctctagttgtagagcaaaaagtccgataaaaactatgaaaatggctaaaatcaaatcttcaaaagataaaattgaaattgaatttagatctcaatcttttttacaacaacaagtacgttcaatggttggttgcttgaaatatctgggtgaaaaaaaatggtcattaaaaaaatttgaaagtgttatgaaatcaaaaaaaagaattttatgtgctccaccagcaccaccagaaggactttatttatcgaaggttgtttattaat

SEQ ID NO: 292728 - DNA, 283 bp, Unknown
  Bacterial polypeptide expressing nucleotide sequence isolated from the Sargasso Sea
atgaacaggtacaaaataaaaattgagtatgatggcaccccgtttgtcgggtggcaaagacaagaaaatggacaatcagttcaagggtgtattgaaaatgcaataaataatatatttgaggaaaacataactatttttggggctggtagaacagatgcgggtgttcacgcaatggggcaggtcgctcattttgatgttacagaaaaattactggaaccatatgtaattaagaacgcattaaacgatcacttgaggccatttcctatttccatatggaagtaga

SEQ ID NO: 292729 - DNA, 408 bp, Unknown
  Bacterial polypeptide expressing nucleotide sequence isolated from the Sargasso Sea
catgttcagatatcaaattctaatcgaatatattggatcttctttcataggttggcaggtacaaacaaaaggcaaaactatacaaggattaattcaaaaaaaaatttcatatattttaaatgaaaaaattgcacttattggttcgggaagaacagataccggtgttcatgcaattgagcaatctgcacattttgatgttactgaaaaaatccaaaatttaaataaatttttaaaatcaattaattattttttaaataaatacgaaatagctattttaaaaataaaaaaaaaaaatatgaaatttcatgcacgtttttctgcaaaagaaagagtttataaatatgttattttcaatcaatttagtaaaccgattcttcaaaataagcgaggatggtttgttataaaaaa

SEQ ID NO: 292730 - DNA, 301 bp, Unknown
  Bacterial polypeptide expressing nucleotide sequence isolated from the Sargasso Sea
aacgcctcaccgaacagtgagtagcgtgagtgtacataggcaaggtcgttatgtggtgttagatatccgtgcaaatgcatttttgcatcatatggtacgtaatattactggttcactgctttgcattggggcaggggagcaacctgtcgattggatggcgcatctgcttactttaaaagaccgtgctaaagccgctactaccgctaaacctaacgggttgtatttggttgatgtaacttaccctgagcacttcggtataccaaaatcgccccttgggcctctttttcttccagaatcttaa

SEQ ID NO: 292731 - DNA, 742 bp, Unknown
  Bacterial polypeptide expressing nucleotide sequence isolated from the Sargasso Sea
atgtttacttatcaaattacagttgaataccttggtacaaattttgttggatggcaatttcaaaaaaatggtctctcaattcaagaagttttagagacagctttatcaaaatatttaaaagaaaatataagaatcactggttctggtcgaaccgactccggggttcatgctagtgagcaatcagcacattttaaatcaaaaaataagattaaaaacaggggtatttttataaattcactaaatttttttttaaagaaacatcctgtatctattttaaatattctgaaaagatctaacaattttcacgctagacatagcgccaaagagagaacctataagtattttgttattaatcgaccatcttcgcttgctttagataaaaataaagcttggcatattaaaaaaaaactagatgtgaaactaatgaaaaaaggcgctgcaattttaaaagggacacataatttttcaacatttagggcctcaaactgtcaggctaaatcacccataaaaactttaaaaaaacccctaattaaaaaaagcaaaaacatgatagtatttacatttcaatcaaagtcttttttacaacaacaggtaagatcaatggttggttctttaaaatatttgggagaaggcaaatgggatttaaaagaatttaaaaaagtatttctatcaaaacaaagatcaatgtgcgcacctccagctccagcacacggattatatttggtcaaagtaagatattaaa

SEQ ID NO: 292732 - DNA, 401 bp, Unknown
  Bacterial polypeptide expressing nucleotide sequence isolated from the Sargasso Sea
aatgtttaggtatcagatattaattgaatatgttggaactaattttagaggttggcaagttcaaacaaaaggcaaaactatacaaggattaattcaagataaaatttcaaaacttttgaaagaaagaattattctatttggagctggcagattagacaaaggagtccatgcaattgaacaatctgcacattttgaatgtgaaacaaaaataatagatttagataaatttttaaaatctcttaactattttttaaataaagaaatggtgacagttcttaaaataaaaaagcgaaaaaaagattttcatgcaagattttctgcaaagatgaggatatataagtatgttattgttaatcgtttaagtggaccagtattagataaaaacagaggatggcatataa

SEQ ID NO: 292733 - DNA, 505 bp, Unknown
  Bacterial polypeptide expressing nucleotide sequence isolated from the Sargasso Sea
aatgtttagatatcagatattaattgaatatgtaggtactaattttagaggatggcaaattcagaaaaagggaaaaactgttcaaggactattacaaagcaaaatttcaaaactattaaaagaaaatatcgtaatatatggagctggaaggttggacgtaggggttcatgccaaagagcagtcagcacattttgattgtaaaaataaaattaacaacattgataggtttttaaaatcaatcaatcactttttgaataaagatggagtagcaatacttaagattaaaaaaagaagtaaaaattttcatgcaagattttcagctaaaatgagagtttataattatgtgattataaatcggatcagtggaccagttttagatgaaaatagaggctggcacattatgaaagatcttgatttaaaattaatgagaaaaagcgcaaaaaaattaataggaaccttggattttagtacttttagaaaatctagttgcagggctaaaagctca

SEQ ID NO: 292734 - DNA, 688 bp, Unknown
  Bacterial polypeptide expressing nucleotide sequence isolated from the Sargasso Sea
tggcagcttcaaaaaaacggggtcttcaattcaaaacgagatagagaaagctttatggaaattcttaaaaagaaaaatacgagttattggctcaggaagaaccgatgctggtgttcacgcagttggtcaatcagcaaattttttttgtgacaaaatagagaataataaaaaatttttgaactctttaaactattttttaagtaagaaaaatataagcatcagttcaattaaaaaaaaaaatttaaattttcattcaagatttgatgcaaaaaaaagaacctataagtatattatagttaacagaaaaaactttttagtattagataagaatagagcttggttagtcaaaaaaaaattaaatgtcaattatatgaagaaagccattaaattattttctggaacgcataattttaatgcatttagatcgtcttcttgcagcgcaaaatcacccgtaagaactattgaaaaatcttctctaataaaaaaagatggtaaaattataatgattttttcatctaagtcattcctacaacaccaagtgagatctatggtgggttgtttaaagtatataggagagggtaaatggaatatcgataaattaaaaacattatttaattcaagaaaaagatccctgtgcgcaccacctgccccttcaagcggattatatttatataaagttacttattag

SEQ ID NO: 292735 - DNA, 787 bp, Unknown
  Bacterial polypeptide expressing nucleotide sequence isolated from the Sargasso Sea
attgaaactagctttcacattggaatatgacgggactgatttttcaggttttcaaagtcaaaaaaactcaataactattcaagatcatatcgagagagctattgaaaaaattactaattccaaaacaagaatcaattattctggtcgaactgatgcaggagttcatgcgttgtctcaggtttttgattttgataccgaaattcaaagagaggaagaaaattggatcaaaggtattaatgcaaacttaccgaagacaattgcagtaagaaaagtttttaatgttccagatgattttgattcgaggttttcagcagttgaaaggaggtactcatatgttatatacaattcaaaaaataaacctttattttttgatactttttcatattgggtaacaaataatcttgaaattaatatcataaaaaatcaacttaatatgtttctaggtcatcatgactttagttcatttagaagttcaagttgtaattcaaagaatccaaataaaaatatttcttatgttgatgttaaaaccatagatagttttataattatcacaatagcttcaaatgcatttttacagaatatggttaggattatggttggaaccataatagatattgcaaaaaatgaaaaaaatatgaccattgaagatattattaagaaaaaagataggacatttgcaggtaaaacagctcctgctaacggacttttctttttaggccctaaatataaggatgagctaaatatagatacttttgaaatgaatatacttgatagactaaaaaaataa

SEQ ID NO: 292736 - DNA, 736 bp, Unknown
  Bacterial polypeptide expressing nucleotide sequence isolated from the Sargasso Sea
aatgcctaactacaaaataacattagaatatgatggaactaattatgttggttggcaacgtcaagaaaatggtccttctgttcagcaattggttgaagaggcaatagaaaaactatcaaaacaaaaaataacactttttggagctggtcgaacagatgcaggcgttcatgcaagaggacaagtagctaattttgaattagagcaacattttgatactgatactattagagatggcattaatcattatctaagaccccaacccatatctattttacatgctgaagaagtagataaagattttaattctagattttccgcaaaattgagatggtatgaatacaagatcttaaatagaagatcaccaattacgttagagcaaaacaaagtttggtgtgtgcataaaaaaatagatgctgaaaaaataataaaacaatcacaacaatttataggcaaatttgatttgtctgcttttaggtcaataaattgccaatccaaatcaccaattaaatctattaattcactagatataaatttcaatcatgatgaaataaattttttaatatcagctaaatcttttttacattctcaagttagaatcatggtcggtacactggttgatataggacttagtaaaatagaaaaatctatttcagaaattattcaatccaaaaaaagagaatatgcaggagttactgcaccacctgaaggattatatttattaaaaatagattactaa

SEQ ID NO: 292737 - DNA, 751 bp, Unknown
  Bacterial polypeptide expressing nucleotide sequence isolated from the Sargasso Sea
tctgccgcacggcgttgaggccaaactcagccgcaccatcgcagcgggacgaaccgacagtggagtccacgccgccgctcaggtagcccactttgattgctatgggccgattccagcgggccgttgggccccagccctcaatgggcgcttgcctggaagcatccgggtgagagccagtgctgccgttgatgccaattggcatgcctgcttcagtgcccgctacaggcgctaccgctactgcctctacaacgcccggcggccgaatctgtttctggcccccgtcagctggcaccgctaccagtggcgcctgcgggatgacctgatgggggaactcctgcaagaactggtggggcaccacgacttttccgcgtttcagcgggctggcagtcagcggccccatgcccgcacgaccgttcaagaagtgagtcttcaacgcgatggcgacatcatcacgttggagattcaggccagtggattcctgtacggaatggtgcggctgctggtgggtcagttagtggccgctggagaaggccgaatcagcccagaacaattccgtcagcgctggcatgagcaacgccgcgaggaagtcaaagaagccgctccaccacagggactttgcctgctgcgcgtgggctatccagagcccgtcttcccaaggggtgcgtggtatgattgccaaccgcggtatcggctggagacttccgatccgccccctgagatcaccaacaatccgacaggcgaagttctctga

SEQ ID NO: 292738 - DNA, 787 bp, Unknown
  Bacterial polypeptide expressing nucleotide sequence isolated from the Sargasso Sea
atggctcgattttttgctcaaattgaatatcaaggaacaagatatcatgggtttcaaaaacaaaagaatagtaaaagcactattcaggctaaagttgaatcagcattaagcaaggtagcaaatcataaaatcttaataacctgttcaggaaggacagatgctggagttcatgcaacaaatcaaattattcattttgattcacgctctaaaagaactattgagtcttggattagaggcacaaacacttatttacctgatgatatcgctataaaaaatatttttaaggttaaagatagcctgcatgctcgttttgatgcaaaatctcgtacttatatctatctaataaaaaattcgccacaaaaaccagcaatagaatcgaataatagtttatgggttagggcaaatttgaatataaaaaaaatgaatactgcctgtaagcatcttttaggagagcaagatttttcttcttttagaagctcaaactgtcaatcaaaaacagccatgagaaatttatactcagcccaatttaccaaaaaagaggaatacatattattcgagataaaaggtaatgcttttctgcagaacatgataagaattatagttggaacattaatagaagttggcaagaataatcttactattactgatttcaaaaacattattaaggcaaagaacagaaaaaaggcatgcaaaactgtttctccaaatggattatattttatcggtccagagtataatgacttcacttatacaaaaaataagatttttttagatgaattggattaaa

SEQ ID NO: 292739 - DNA, 277 bp, Unknown
  Bacterial polypeptide expressing nucleotide sequence isolated from the Sargasso Sea
tttgaaaagggtagctttactagtccaatatgacggaactcattattcaggttggcaaaaacaaaaaaatgcaactactgttcaagaaattttagacagagctcttttaaagattacgaatcatacagtaaagacttttgcagcaggtaggactgatgctggggttcatgcatcaggtcaagtagtacactttgatgttgattgtgttgttccaggaaatagttattctgatgttttaaatagtctcttaccctcatcaattaggatcttggaatca

SEQ ID NO: 292740 - DNA, 739 bp, Unknown
  Bacterial polypeptide expressing nucleotide sequence isolated from the Sargasso Sea
atgactaatataaaacttacaattgaatatcatggtttaccttattgtggttggcaatatcaaaaaaatgaaaaaactgtgcaaggtgaaatagaaaaagcaatatttaaattctctggtgaaaaaaaaactattcaaggtgctggaagaacagatgctggtgttcacgctattggacaatgtgccaattttgagttagaaaaaaaattcaatgactatcaaattctaagtggaattaattttcacctcggtactgaaaagataagagttactaaagttgaaagtgttgataatgaatttaatgctcgttttactgctaaaaataaaatttataattatcaagttttcaatagtctagccccatcagttattgaggatgattttagtatacacattcgtcaacctttagatttacaggcaatgcaaaatgcaattaagctgtttattggtaaacatgatttttcttcgtttagagcacatggttgtcaagctaacaaaccgcttagaactattgacgatgcatcaattgatattagaggtaataaaattatttttgtattcaaggcacagtccttcctttatcaacagattagaattatggttggatctttattagaagttggattaaaaaataaaaatactaattggataagtgaattaattgaagctaaggatagaagcttagcaggaccaacggtcccttcaaaaggcttgattttaaaggagatatattattaat

SEQ ID NO: 292741 - DNA, 742 bp, Unknown
  Bacterial polypeptide expressing nucleotide sequence isolated from the Sargasso Sea
aatggcaagatatcaattgcttatagaatatgttggtacaaattatagaggatggcaaattcaaaaaaaaggtttaactattcaagggataattcaacaaaagcttactaagattttaaaagaaaaaataattttaaatggatcaggcagaaccgataaaggtgttcatgcaattgaacaatctgcacattttgattgtaaaaataaaataggagatttaactaaatttttaaaatctataaattattttttaaatgataaaggcattgcaataactaaaattaaaaaaagaaataataaatttcactcaagattttctgcaaaacaaagaatttataaatatacaatttttaatcaaataaatgctccagtaattgaaaaaaaaagaggatggcatgttaaaaaaccattagatttaaaactgattaaattaggagcaaaaaaattaataggaactaatgattattccactttcagatcctctagctgccatgcaaaaagtccaattagaacaattaaatcaataaagattagatcttcaaaaaataagattgaaattgaatttaagtctcaatcttttttgcaacaacaagttaggtctatggttggctgcttaaaatatctaggtgaaaaaaaatgggatttaaaaacttttgatagagcatttaaatcaaaaaaaagagcattgtgtgctccaccagctccaccagaaggactttttttagcgagggttatttattaa

SEQ ID NO: 292742 - DNA, 742 bp, Unknown
  Bacterial polypeptide expressing nucleotide sequence isolated from the Sargasso Sea
aatgagtagatataaaataactattcaatatgatggtaatagtttttctggatttcaatctcaaaaaaataaatcaggtattcaaaatcaaattgaatcatctattgcaaagctaaacaataataaaatagtaaaagtctttggtgctagcaggacagatgctggtgttcatgctttgggacaagtagcacactttgatattgtctctcaattatcggatgatgattttctaagagccataaatgccagattaaataaagaaattagaatttccaaattagtaaaagtagatgattgttttcatagtagatttgatgctaaaagtaaaaaatatgaatatttttgctgtactgaagaaaatccactttttttaaaaaatcatcattttattaaaaatatcgattttaatctaattaaaaaggcatctaagttaatcgagggagagcatgattttttatcattttcaaaattttcaggtaaagaaaataatagatgtaagatttttagctctgaatggctttttgatgataaaaataaacaaaaactatcatatattattcatggaaatagatttttgcatcatatggttagatatttggttggaactatgattgctgtaggacaaaataaaatttcaattgaagattttttaattttgttaaataatccaaagaaagatgcaaggatatttaaagctccgagcaagggcttaattttgagggaaattttttatgagaattaa

SEQ ID NO: 292743 - DNA, 539 bp, Unknown
  Bacterial polypeptide expressing nucleotide sequence isolated from the Sargasso Sea
aaaaattttagatttaacaaaatttttaaaatcaattaatcattttcttaacaacaagggtatatcaattactcaaattaaaaaaagaagtgaaaaatttcattcacgtttctctgctaaacaaagaatttatagatatataatttttaaccaaataagtgctcctgtaattgaaaatggaagagggtggcatgttagaaaaatactagatgttgatttaatgaaaaaaggggcaaaaaaattattggggacgaatgactattcaacgtttagatcatcaagttgtcacgctaaaagttcaattagaacaattaaatcaattaaaataagggcattaaaaaataaaattgtaatagaatttaattctcaatcatttttacaacagcaagtaagatcgatggtaggttgtctaaaatatttgggtgagaagaaatgggatctaaaaacttttgacaaagtatttaaatctaaaaaaagagcactgtgtgctccaccagcaccacctgaagggctttttttatatagagttatttattaat

SEQ ID NO: 292744 - DNA, 742 bp, Unknown
  Bacterial polypeptide expressing nucleotide sequence isolated from the Sargasso Sea
aatgactagatataaaattgtaattcaatatgatggtactaacttttcagggtttcagtcacaaaaaaatctaagcggaattcaagataaaattgaatcctcaatatttgtcttaaataataataaaaaagttaagatttatggggcaagcagaaccgatgctggcgtacacgcattaggtcaagttgctcattttgatttggattctaagttaactgacaaagaactccatcgagcaataaatgccagacttgataaagaaataagaatatcccatttgtcaaaaattgaagaaagttttcacagtaggtttgatgcaaagagtaaagagtataactatttatgttgtttaagtgataatcccctgtatttgaaagatcattatcatgtaaataatattgatataaaattattaatggaagtgtcaaaaataattgaaggtaaacacaatttcttatctttttcaaaattttcaaacaaacaaaataacgattgtgaaatatttgcttcaaaatgggtttttgatgataaaaatcatgaaaaactattatatattattcatggaaatagatttttacatcatatggtaaggtatttagtcggaagcatgattgcagttagtcaaaataaaatttcaattgatgattttaggactttattaaatcagccaattaaagatgcaaaaatatttaaagctccatcaaatggtttagttttaaaggaaattttttatgaaaaataa

SEQ ID NO: 292745 - DNA, 286 bp, Unknown
  Bacterial polypeptide expressing nucleotide sequence isolated from the Sargasso Sea
ttgaaaagggtagctttactaatccaatatgacgggactcattattcaggttggcaaaaacaaaaaaatgcaactactgttcaagaaattttagacaaagctctcttaaagattacgaatcataaagtaaagacttttgcagcaggtaggactgatgctggggttcatgcatcaggtcaagtagtacactttgatgttgattgtgttgttccaggaaatagttattctgatgtcttaatagtcttttaccctcatcaattaggattttggaatcagttgaggtaaa

SEQ ID NO: 292746 - DNA, 742 bp, Unknown
  Bacterial polypeptide expressing nucleotide sequence isolated from the Sargasso Sea
aatggcaagatatcaattgtttattgaatatgtgggtacaaattttagaggatggcaaatccaaaaaacaggcttaacagttcaaggttttattcagaaaaatcttaaaaaacttcttaatgaaaaaattgttttaattggttcagggcgtactgatgctggtgttcatgcaattgagcagtcagctcatttcgattgtaaaaaaaaaattagaaatttagaaagttttgctaaatcaataaatcattttttaaattctaaagatgtagcaataattaaaattaaaaaaagaagcaataattttcattcaagattctctgctaagcaacgaatttataaatatgtaatttttaatcaatcaagcttacctgtaattgaaaaaaatagaggttggtatttaagaaagccattagatttagaattaatgaaaaaaggcgcaaaaaaattgattggttctaatgatttttcaacttttagatcgtctagttgtaacgcaagaagcccaattaaaactattaaatcaataaaaataaaatcatctaaaaataaaattgaaatagagttcaagtcaaaatcatttttacaacaacaagttaggtcaatggtaggttgtttaaaatatttagctgaaaaaaaatggactttaaaaacttttgaaaaagtatttaaatcaaaaaaaagagaattgtgcgcacctcccgctccttcggagggactttttttaaagaaagttatttattaa

SEQ ID NO: 292747 - DNA, 262 bp, Unknown
  Bacterial polypeptide expressing nucleotide sequence isolated from the Sargasso Sea
ttgttacgatataagattatagttcaatatgatggtacagccttttatggatggcaaactcaaaagagtgaaagaacaatccaaggagagctagagctagcactaaagaaaattaatgattcaagaaatgttcgagtccatggttccggtaggactgatactggtgttcatgcaataggacaagtagcacattttgatttaaaaacctctttggatacatttcaattaaaagatgcattaaatggtaatttacctccctgat

SEQ ID NO: 292748 - DNA, 778 bp, Unknown
  Bacterial polypeptide expressing nucleotide sequence isolated from the Sargasso Sea
aatgacagcaagatttttttgtcaacttgaatatgatgggtctagttacaagggttttcaggcacagaaaagcactaaaaaaacaatacagtacgaggttgaacatgcattagcaaaagttgctgatcacgaaataaatatcgtttgttctggtagaactgatgctggtgtgcatgcggtaaaccagatttttcactttgatactacagctgaaagagatattgattcttggataagaggagcaaatgcaaacctaccaaataatatctctttgataaatttttttaatgtagaaactgatagccatgcaaggttcgatgcaatttcaagagaatatatttacttaataacaaactcagactttaagccagcaattcataacaataaaacgctttgggtaagaagagaattagatgtaaaaggaatgaatgatgccgcaaaactattaattggagagaaagattttagttcatttcgtgccacaggctgccaatcaaaacattcagttaggaaaatatatgaggcagaagtacgacaagacaatgatttaatttcatttcggattaaagcaaatgctttcatgctaaatatggtaaggataatagttggaacacttctggcagtaggtcgtaatgaaaagtctttatctgactttgcaaatattattgaagcaaaagatagaaagagatctgggaaaactgttgatccatttgggttgtattttatgggaccagagtataattacttaagttataaaaaaaataggatttttaaatga

SEQ ID NO: 292749 - DNA, 211 bp, Unknown
  Bacterial polypeptide expressing nucleotide sequence isolated from the Sargasso Sea
ggtttcctctataatatggtgagaatcattgctggcacactgcttatggttggtactggtaaacgcccggagacctgggtcggcgacgtgcttgccgaccggcaacgaacatctgcaggcccaacggcaccagcgcaaggccttttgcttttacaaatcaatcttaaaccacaaacagtagttgcagctcgtaatggctcgtcctcctgaa

SEQ ID NO: 292750 - DNA, 742 bp, Unknown
  Bacterial polypeptide expressing nucleotide sequence isolated from the Sargasso Sea
atggcaagatatcaactgcttattgagtatgtgggtacaaattttagaggatggcaaattcaaaaaaaaggctcaacaattcaggatctaattcaagaaaaactcacaaaactattaaaacaaaaaataattttaaatggttctggaagaacagatactggagttcacgcaattgaacaatctgctcattttgattgtaaaaatgaaattaaagatttaacaaaatttttaaaatctattaacttttttttaaatgacaaagatgttgcaattaaaaaaataaaaaaaaggagcaataaatttcactcaagattttctgcaaaacaaagaatctataaatatataatttttaatcaaatcagcgaacctgtgatagaaaaaaaaagaggttggcatgttagaaaaactttagatttaaatttaattaaaaaaggtgcaaaaatactagagggaactaatgattattctacttttagagcatctagctgtcatgctaaaagtccaattaagaccattaaatctatcaaaatcaaatcgtctaaaaataaaatagaaatagaatttaaatctcaatcatttttacaacaacaggtaagatccatggtaggttgtttaaaatatttaggtgaaaaaaaatgggatttgaaaacttttgataagatatttaaatcaaaaaaaagagtattatgtgcaccaccagcacctccagagggactttttttagcgagagtgatttattaat

SEQ ID NO: 292751 - DNA, 736 bp, Unknown
  Bacterial polypeptide expressing nucleotide sequence isolated from the Sargasso Sea
atgcctaactacaaaataacattagaatatgatggaactaattatgttggttggcaacgtcaagaaaatggtccttccgttcaacaattggttgaagaggctatagaaaaactatcaaaacaaaaaataacactttttggagctggtcgaacagatgcaggcgttcatgcaagaggacaagtagctaattttgaattagagcaacattttgatactgatactattagagatggcattaatcattatctaagaccccaacccatatctattttacatgctgaagaagtagataaagattttaattcaagattttcagcaaaattgagatggtatgaatacaagatcttaaatagaagatcaccaattacgttagagcaaaacaaagtttggtgtgtacataaaaaaatagatactgaaaaaataataaaacaatcacaacaatttataggcaaatttgatttgtctgcttttagatcaataaattgccaatcgaaatcaccaattaaatctattaattcactagatataaattttaatcatgatgaaataaattttttaatatcagctaaatcctttttacattctcaagttagaatcatggtcggtacactggttgatataggatttagtaaaatagaaaaatctatttcagaaattattcaatccaaaaaaagagaatatgcaggagttactgcgccacctgaaggattatatttattgaaaatagattattaat

SEQ ID NO: 292752 - DNA, 808 bp, Unknown
  Bacterial polypeptide expressing nucleotide sequence isolated from the Sargasso Sea
gaattgatagtgggtaaagaaatgattataggtgtaaattcttacatttcaggcaatgtaactgaaattgatacgctagaaattgacaatacagaagttcgttcgtcacaaattaaaagactaatcagaattaaaactgaaagagattccgttaagttggaaaaagcactttcaactttagaaaattgcgctgcaactggaaaaggcaatctattagaacttgccgttgaagctgcaaaacatagagctacacttggagaaatttccttagctcttgaaaaaacatttggacgatacaaagcaacaataagaactatttcaggaatttattcatcagaacttatgaacgataaaaattacaatgaagcttttggtttagctaaagaatttgaaaaggttgtaggaagaagacctagaattatgatagcaaaaatgggacaagacggtcatgacagaggagccaaaatcgttgccacttcatttgcagacataggctttgatgttgacataggccctctatttcaaacccctgaagaggcagcaaaacaagctgtcgagaatgatgttcatattttaggtatttcttctttagctgctggacataaatcattggtgcctgcagtaattaaagaattaaatgatttaggaagagaagatataatggtagttgtaggtggtgtaattcctaaaaaggactacgagaccttatttaatgatggtgttgctgctatttttggacctggaacaaacatatctcatgcagcccaagatatcattaagattatgctagaaggttatgaaaaataaa

SEQ ID NO: 292753 - DNA, 385 bp, Unknown
  Bacterial polypeptide expressing nucleotide sequence isolated from the Sargasso Sea
atgttcagatatcaaattctaatagaatatgtaggatcttctttcataggttggcaggtacaaacaaaaggcaaaactatacaaggattaattcaaaaaaaaatttcatatcttttaaatgaaaaaattacacttattggttcgggaagaacagataccggtgttcatgcaattgagcaatctgcacattttgatgtcactgaaaaaatccaaaatttcaataaatttttaaaatcaattaattattttttaaataaatacgaaatagccattttaaaaattaaaaaaaaaaatatgaaatttcatgcacgtttttctgcaaaagagagagtctataaatatgttattttcaatcaattaagtaaaaccgatccttcaaaataaa

SEQ ID NO: 292754 - DNA, 784 bp, Unknown
  Bacterial polypeptide expressing nucleotide sequence isolated from the Sargasso Sea
atgccagctgttttaactaaatatgcatgtggagttgaatatttaggatctcattacaaaggatggcaatctcaagactctcaggagaccattcaagatcaaatcgaaagcgccttatcaaatgtagcaaacgaaaagctacgaatttattcagcaggaagaacggattctggggttcatgcactgggtcaagtttttcacttttcaacaaatgccaatcggactgaaaatcaatggttggatggcatcaattctcatttaccatctgatatcagtattcagtggattgaaattgttgacgaagaatttgatgcaagatactcagctgtttctagaacctatatttatcttattaataataaaaaatttgatgtattcagcgaccaaagatccctttttgttagacaaaagctgaatacagaacatatgagagaggcatgtcagtatctaattggtaggcatgacttttcttcatttagggcttcaagttgtcaatccaataatcccatcagagatatgattagcattgagttggaagttgataagttcatatccataagattcactgcaaatgctttcttacatcacatgattagaaatattgtgggaacgcttttggacgttggaactgaaaagatttcaccaaaggatctcttaagaatacttcatgcaaaagatagaaatgctgcttcaaaaactgcgtctgcggaaggcttatatttggccagagtgaattatcctgaaaaatatgcattcccttctcattcaaatgagatgatatgat

SEQ ID NO: 292755 - DNA, 787 bp, Unknown
  Bacterial polypeptide expressing nucleotide sequence isolated from the Sargasso Sea
atggctcgattttttgctcaaattgaatatcagggaacaagatatcatggttttcaaaaacaaaagaatagtaaaagcactattcaggctaaagttgaattagcattaagcaaagtagcaaatcataaaatcttaacaacctgttcaggaaggacagatgctggagttcatgcaacaaatcaaattattcattttgattcacgttctaagagagctattgagtcttgggttagaggtgcgaacacttatttgcctgatgatatagctgtaaaaaatatttttaaggttaaaggtagcctgcatgctcgttttgatgcaaaatctcgtacttatatctacctaataaaaaattcgccacaaaaaccagcaatagaatcgaataatagtttatgggttagagcaaatttgaatataaaaaaaatgaatactgcttgtaagcatcttttaggagagcaagatttctcttcttttagaagctcaaactgtcaatcaaaaacagccatgagaaatttacactcagctcaatttaccaaaaaagaggaatatgtattattcgagataaaaggtaatgcttttctacagaacatgataagaattatagttggaacattaatagaagttggcaagaataatctcactatcactgatttcaaaaatattattaaggcaaagaacagaaaaaaggcatgcaaaactgtttctccaaatggattatattttatcggtccagagtataatgacttcacttatacaaaaaataaggtttttttagatgaattggattaaa

SEQ ID NO: 292756 - DNA, 406 bp, Unknown
  Bacterial polypeptide expressing nucleotide sequence isolated from the Sargasso Sea
atgtttagatatcatatcttaattgaatatgtgggtacaaattttaggggatggcaaattcaaaaaaaaggaaagactgttcaaagattattacaggatgaaatttcaaaacttttaaaagagaaaatcacaatttatggagcaggaagattagatgttggagtacatgctaaagaacaatcagcacattttgattgtaaaaataagattagcaaaattaatcgttttttaaaatcaataaatcattttttaaatatagatggaatagcaatacttaagattaaaaaaagaaataataattttcatgctaggttttcagctaaaatgagagtttataattacgtgattattaatcggatcggtggaccagttttagatgaaaataggggttggcatatcatttaag

SEQ ID NO: 292757 - DNA, 349 bp, Unknown
  Bacterial polypeptide expressing nucleotide sequence isolated from the Sargasso Sea
atgttcgacaaccttttagatttagactcaatgagaaaagcaattaggtttttattaggaaaacatgatttttcttcatttagggcacaaggttgtcaagctaacaaaccaattagaaccattgatgaagcttcaattgatatcgtagatcaaaaaataatttttatatttaaagctcagtcttttctttatcaacagattagaataatggttggatctttattagaagttggttcaaaaaataaagatataaattggataagtgaattaattgacgctaaagatagaagacttgctggaccaaccgttccctcaaaaggattaattttaaaggagattagctattaaa

SEQ ID NO: 292758 - DNA, 742 bp, Unknown
  Bacterial polypeptide expressing nucleotide sequence isolated from the Sargasso Sea
aatgtttagatatcagcttttgattgaatatttggggacaaattataaaggttggcaaattcaaaaaaaaaataaaactatccaaggaatacttcaagacaaaattagaaaattattaaaagaaaatattactatagttggatcgggcagaacagatgctggtgttcatgccatagagcagtccgcacattttgatttaaaaaaaaaattattaaacttagacaaattcattaactcaataaatcactttttgaaaaatgaaaatattacaattcttaaaataaaaaaaaggaatagtaattttcattcaagattttctgcaaaaaagagaatttataaatatatcattttaaatagaacaagttcaccggtgattgaaaaaaaccaagtttggcatgtaagaaaaaaattagatttagatttaatgaaattaggtgcaaaaaaattagttggtactaaagatttctcaacatttagagcgtcaagttgtaatgcaaaaagtccagttagaacaatggattttgtaaaattaaaatcttcaaatgataaaatagaaattcaatttaaatctcaatcttttcttcaacagcaagtgagatcaatggttggttgtttgaaatatttaggtgaaaagaaatgggatttaaaaaattttgataaagctttaaaatctaaaaaaagatcaatgtgtgctcctccagcaccacctactggcttatttttatctagaattttttattag

SEQ ID NO: 292759 - DNA, 742 bp, Unknown
  Bacterial polypeptide expressing nucleotide sequence isolated from the Sargasso Sea
aatgtttatttatcaaattaaaatagaatattcaggatcagattttgttggctggcaaatacaaaaaaatggactttcaatacagggaattttagaaaaagttttatctaagtttttgaataataaaattaaagttattggctctggacgtacagatgcaggtgtccacgcaaatgaacaatcagctcattttgtcactccaaaaaaaataatttataaagagaaatttataagctccataaattattttttaaaaaattatccaattgtaattttaagtttaaaaaaaagacccaaagggtttcatgctaggcatagtgcaaataacagaatttataaatattttatcattaataggctttcatctttagtattaaaaaaaaataaagcctggcatattaaaaagaagcttaatcttaaagttatgaagaaaggtattaaattattgaaaggaacacataatttttcaacttttaggtcttcttcctgtgaggcgaagtccccaattaaaactatgaaaaaagcaacgattaaaaagcagaaagataaaattatactaaccttttcgtcacagtcttttttacaacaacaagtaagatctatggtaggttgtcttaaatatttaggggaaggcaagtggaatttgaaagattttaaaaaggcatttttatcaaaaaaaagatcaatgtgtgctccaccagcaccagcacacggactttatctttataaggtgaaatattaa

SEQ ID NO: 292760 - DNA, 187 bp, Unknown
  Bacterial polypeptide expressing nucleotide sequence isolated from the Sargasso Sea
atagaatttcaatctcaatcttttctacaacaacaggttcgttcaatggttggttgtttaaaatatgttggtgaaaaaaaatggtctttaaaaaaattcaattttattatgaactcaaagaaacgaattttatgtgcaccgccggcaccacctgagggactttatttagcgagagttatttattaat

SEQ ID NO: 292761 - DNA, 715 bp, Unknown
  Bacterial polypeptide expressing nucleotide sequence isolated from the Sargasso Sea
atggattctaggatagctttaggagttgagtatgatggaactaactatttcggctttcaaaaacaaaacagtacaaaacaaaccctacaaggctctctagaagaatcgatttcaaaggttgcagatcataaagtaaaaactttctgtagtggaagaacagatgcgggtgtgcatgcctttatgcaagtcatgcattttgatacaaaagccgtaagatcatctattgaatggtcgagaggtatcaattcttaccttccaaaagatattagagttttatgggcaaaagaaatagatgagagttttcatgctaggttctctgctaccaaaagatcatatatttacaatattcttaatcattcgaatccctcggcgctttgggcagacaagtcgctatatgtacctattagattagatatacagtcaatgaaaaaaggctctaaatatctgataggagaacatgattttagctcctttagaggttcaggatgtcaatcaaagacacctattagaaacattcaagaaataaaaatctcaaggaatgatgcttttgttacattggaaattacagcaaatgctttcttacttcacatggttagaatcatagttggcactctaataatggttggcaaaaaagaaatacgacccaaggaagttgataaaattctcaaacaaaaaaatagaaaattagcaggtaagacagtgagttcatctggct

SEQ ID NO: 292762 - DNA, 737 bp, Unknown
  Bacterial polypeptide expressing nucleotide sequence isolated from the Sargasso Sea
ctggcaggtccagcctaaccaacccaccattgagggcactttagaaaaggccctgcagcgtctcaccggccaagttatcaaagttcatggttccgggcgaaccgatgccggggtccatggtctgaaccagactgcgagcttttccgttgtttcagaattcagtcctgaaaaatggcgtatcgcactcaacggagttctgcctgacgatctggtggtcaagcatgtccagcaggttccctcggattttcatgcccgacactcatcggtcgggaagcgctatcgttatctggtttgcaacctgccctaccgttctcctttcagcaggaacaaaagctggtgggtccgaaaatctctgaacctggaagccatccgagaggcatcttcgtatttaatgggcaaacatgatttttccgctttccgtgccgcaaactgcagttcacccaatcccaacaaggatctacgcgaaattttgtgtgacgtgaaaccgtggcttcatgctaacctgtgcttggagttggaagcagattcctttctccagcacatggtaaggatcatggttggaactttggtgcaggtcggtaccggaaaactaaagccggaacagatgaaaggaatcctggaaagccgggaccgcacgcaagccgggctgaccgctccggcccatggcctctatgcccttgcggtgcgttatcccgaggacagtattgaatggccagatgtattgatggacttgtgaa

SEQ ID NO: 292763 - DNA, 382 bp, Unknown
  Bacterial polypeptide expressing nucleotide sequence isolated from the Sargasso Sea
atgtataattataaaattattgttgagtatgatggcacaaattttgttggttggcagcagcaagaaaatggtcaatcaatacaagcttttcttcaagatgcagcatttaaactttcaggagaaaaagtaacaatttttggagctggaagaaccgatgcaggtgttcatgcttacggtcaagtagcctcttttactattaataaaaaaattgaaacagatgtaattagagatggattaaatcagcatttaaggcctcacccaatatcagtccaaaaggcagaattagttgatagtgaattccacgcaagattttctgcgataaaaagatggtacgaatacaaaataattaatagaagacctcccctaacgatggataaaaata

SEQ ID NO: 292764 - DNA, 391 bp, Unknown
  Bacterial polypeptide expressing nucleotide sequence isolated from the Sargasso Sea
atgcgtgctgccgccaaggtgctggtggggactcacgactttacctcctatcgggcggttggctgccaggccaaatctcccatcaagaccattcatcatctcgagctgctggagtttggtcggttcatcgtgctggatatccgcgccaatgccttcctgcatcacatggtgcgcaatatcgccggtgtactaatgcagattggctgtggcgagcacccggtcggctgggctgctcaggtgttggccgcccgggatcgcgctcagggtggcctgacggcgccagcctatggtttgtatcttgtggatgtaacctatccggcgcacttcgatctgccggaccgctatctggggccgcattttctgtctgcgctgccggatgtgctggactgac

SEQ ID NO: 292765 - DNA, 241 bp, Unknown
  Bacterial polypeptide expressing nucleotide sequence isolated from the Sargasso Sea
atgagaatagcattaggaattgaatatgctggttgcaattattatggctggcaaacacaatctattacaccaacgatacaagaaacaatagagctagcactttcagaagttgcaaatgaaaaagtaattattcattgtgcagggagaacagatacaggtgttcatgcgattcagcaggtggtgcatttcgagacgtcatcaatacgaaaatcgcataactgggttctcggtgtaaattcca

SEQ ID NO: 292766 - DNA, 514 bp, Unknown
  Bacterial polypeptide expressing nucleotide sequence isolated from the Sargasso Sea
ctcagaggagtgaatcaacacattggaaacaaacctataactattttaaaaattaaaaaagtaaaaaacaaatttcatgcaagatttgatgcaaaaagaagaacctatgaatatataattgttaacagacagtcacctttgacactggaaaaaaataaggcttggcacattcgtaaaaaattaaatattaaggttatgaaaaaaggcgccaagttattaaaaggcactcatgatttttcaacatttcgctcatcttcatgtcaggcaaaatcacctattaaaactttaaaaaaagtttcaattaaaaaaagtggaaacaaaataattttaaaatttgtttctcagtcatttttacaacagcaagtcagatctatggttggttgcatcaaatatttgggggatgaaaaatggaatttgaatgattttaaaaattcatttaaatctaaaaatcgattaaaatgtgcaccaccagctccggcttgtggtctttatttaaagaaagtttcttactaat

SEQ ID NO: 292767 - DNA, 490 bp, Unknown
  Bacterial polypeptide expressing nucleotide sequence isolated from the Sargasso Sea
atgccaagatacaaactaacggtagagtatttaggaactaattttagtggatggcagaaacaaaaaaatagttattctgtccaagaagcaattgaaaaagctgcaaataaattacttcaacaaaaaataaatttggtggttgctggtagaactgatgcaggtgttcatgcagaaggacaagttgctcattttgatataaaaaatgaattttgttcaagaaaaattcaacttggtattaactttcatctcatgacccaaaagtttggaaaagatataagtgttaaaaaagctattaaagttaacaataattttaacgctcgattttctgcaaagaaaaagttatatcaatatttaatacttaattctatatacagaagtcctattttatatgacaagagttggtgggttcgtaaaagacttgattatgaaaaaatgtttgaagcaagtcaaaatttaattggaagccatgattttagttcttttagagcaa

SEQ ID NO: 292768 - DNA, 659 bp, Unknown
  Bacterial polypeptide expressing nucleotide sequence isolated from the Sargasso Sea
attcagggaatgtatagaaattgcgattaaaaaacttactaacgagaatgtcagagtttatggagctggccgtactgatgcaggagttcatgctttagaacaagttgctcattttgaaattaacaaagatattaaaactgaaaacattagagatggtttaaatcagcatttaaaaccaaacacaattgcaataattaacgctgaaaaagttgatgataattttcatgcaagattttctgcaaaactaagatcttatgaatacagagtaattaatagaagaactccacttacaatagatttaaatagagcatggtgtgtgtataaacaacttaacgtagataaaatagtaaatgaagcatcatcatttttaggagagcatgattttgaatcatttagatcatcaaattgtcaatcaagtaaaacaataaaaaaccttaaatcttttgatataaaatataaaaatgataatttattttttaatatatctgcaaaatcttttttgcattcacaagtacgtataatggttggtacattaattgatattggaaaaggagtaattgataaatcactagtagaaattttaaatgcaaaaaaaagatctttagcaggtactacagctccagcgtgtggtttgtacttaaaaaaaatatattattagc

SEQ ID NO: 292769 - DNA, 682 bp, Unknown
  Bacterial polypeptide expressing nucleotide sequence isolated from the Sargasso Sea
tcaaaagaatggactttcagttcaaggggttttggaaaaagctttatctaagtttttaaaagacaaaattagagttataggatcaggccgtacagatgccggcgttcatgcaagtgagcaatcagctcattttaaaacaaaacataaggtaattgacaaaaatacatttataaattctattaatttttttttaagcaaatatcctgtctctgttttaagcataaaaaaaaggtcaaacaaatttcatgcaagacatagtgcaaatgaaagaatctacaaatattttattatcaataggagctcgtctttggttttggaaaaaaataaagcttggcatattaaaaagaggcttgatgtaaaaattatgagaaggggagccgagattctaaagggcacccacaatttttcaacattcagagcctcatcgtgtcaagcgaagtccccaataaagactatgaaaaaggccatgataaaaaaaaataaaaataaaattattttgacttttcagtctaagtcttttttacaacagcaagttagatcaatggtggggtctttaaaatatctaggggaagggaagtggaatttaaatcattttaaaaaatcattcttgtcaaaaaatagagcaatgtgcgctcctccagctcctgcacatggactttatctctataaggtgagatattaa

SEQ ID NO: 292770 - DNA, 742 bp, Unknown
  Bacterial polypeptide expressing nucleotide sequence isolated from the Sargasso Sea
aatgtttacttatcaaattactgtagaatatttaggaacaaattttgttggatggcaaattcaaaaaaacggcctttctattcaagaaattttagagaaggttttatccaagtttttaaaagaaaaaattaaagttataggatctggacggacagatgcaggagttcatgcaagtgagcagtcagctcattttaaaattaaacataatataattgataagaataactttataaattctattaatttttttttaaaaaaatatcctatatctattcttgaaatcaaaaaaaaatctaataaatttcacgcaaggcacagtgcaaataaaagaacttataaatattttattatcaacagatgttcatccttagtgttagaaaaaaacaaagcttggcacattaaaaagaagcttgatataaatattatgaaaaaaggagctgaaattttaaaaggtactcataatttttcaacattcagagcttcatcatgtcaagcaaagtctccaattaaaactttaaaaaaagctgtagttaaaaaagataaaaataaaattgttttgacttttcaatctaagtcctttttgcaacaacaagttagatcaatggtgggttccttaaaatatcttggagaaggaaaatggaatttaaatgattttaaaaaagctttcttatcaaaaaaaagaacaatgtgtgctcctcctgcacccgctcatggactatacttaaccaaagttctttattaa

SEQ ID NO: 292771 - DNA, 477 bp, Unknown
  Bacterial polypeptide expressing nucleotide sequence isolated from the Sargasso Sea
tttgaaaagggtagctttacttgtccagtatgatggatctcattattcaggttggcaaaaacaaaaaaatgcaactactgttcaagaaattttagacagatctctcttaaggattactaatcatacagtaaagacttttgcagcaggtaggactgatgctggggttcatgcatcaggtcaagtagtacactttgatgctgattgtgttgttcctggaaatagttattctgatgtcttaaataatcttttaccctcatcaattaggatcttggaatcagttgaggtaaaagatagttggcatgcatgctattcagcaatgtatagacattatcgatatgtcattaataatagtaaatttccaaacttgttcatcaataattggtcatggcatagatatcaaaaagtattggatgaagttttaatgttaaatgcatccaagaaaatgataggagaacatgatttttttgcttttcagaa

SEQ ID NO: 292772 - DNA, 400 bp, Unknown
  Bacterial polypeptide expressing nucleotide sequence isolated from the Sargasso Sea
aatgactaggtatcaaattttagtagaatatttaggaacttcatttgtgggttggcaagtacaaaaaaaaggaatttctgtacaaaaagtaattcagtcagttttatcaaaattattaaaacagaaaattttattatatggatcgggcagaacagatgcaggtgtacatgcacttgaacaatctgctcattttgacttaaaaaataaaattcaaaatattgaaaaatttataaaatctttaaattattttttaaatccaaaaaaaatttcaataataaatattaaaaaaagaaatttaaaatttcatgcaagattttcagcaaaagaacgatcttatatttatttaatacaaaataggatgtcaccttctgttataataaaaataaagtatggtatataa

SEQ ID NO: 292773 - DNA, 400 bp, Unknown
  Bacterial polypeptide expressing nucleotide sequence isolated from the Sargasso Sea
agacaagcacctctggtgctccaaaaaaatagatactggcatatttggagaaatctagaaatagaacaaatgatggaagcatcaaattttcttgtaggtacacatgattttacaacttttagatcttcaatttgtcaatctaactcaccagtaaaaacaattgatcaaatttgtattaaggaaaaaataattgacgatgaaaaaataataaatttccattttcaggctagaagctttttacataatcaggttagaagtatagtaggaagtctagaaaaggtaggttcaaaaaaatggtcgccaaattatataaaaaccattttagacaaaaaagatagaaaaaagtgtggtcctattgcaccaccagaagggctttatttaaaaaaaatatttttttaat

SEQ ID NO: 292774 - DNA, 628 bp, Unknown
  Bacterial polypeptide expressing nucleotide sequence isolated from the Sargasso Sea
atgaagagatataaaattaaaattgaatatgatggaactccatttataggttggcaaaggcaagacaatgggcaatcgatacaaggggcaatagaagactcgattaaaaatatattcgaagaaactgtaactatttttggagctggaagaacggatgcaggtgttcatgcaatgggacaggtagctcattttgatatcaataacaaagagcttaaaccttttgtaattaaaaatgcactcaatgatcatctacgcccttttccaatagctatcttagaagtcgatgaagtagataataaatttcatgcccgttttaatgcacttcaaagaaaatatttataccgaatagttaatcgtaaatctcccttaactattgaaaagggtagagcatggcatgtgcataaagagatagatgtagatcttatgaaggaatgcatatcatcaattgaaggcaaacacgactttacaacgtttcgttctgctcattgccagtcagacagtcctataaagactattgatagtcttcaaattacaaaatcagatgaaaatatttactttggattttcagcaaaatcctttctgcatcatcaagtaaggtcaattgttgggagtctcaaattggttggtg

SEQ ID NO: 292775 - DNA, 675 bp, Unknown
  Bacterial polypeptide expressing nucleotide sequence isolated from the Sargasso Sea
tatggattttaggatagctttaggggttgagtacgatggaactaactatttcggtttccaaaagcaaaaaagtacaaaacaaaccatacaaggttctctagaagaatcgatttcaagagttgcagatcataaagtaaaaaccttctgtagcggaagaacagatgctggcgtgcatgcctttatgcaagttctacattttgatacaaaggccatcagatcgtctattgaatggtccagaggtataaattcttaccttccaaaggatattagagttttatgggcaaaggaaatagatgaaagttttcatgctaggttctctgctaccaaaagattctatatctacaatattcttaatgatccgactccctcggcactttgggcacataggtcactctatatacctactagattagatatgcagtcaatgaagaaagcttctaaatatctcctaggagagcatgattttagctcctttagaggttcaggatgtcaatcaaagacacccattaggaatattcataaaataaaaatctcaaggaaagatgattttgttactttagaatttacagcaaatgccttcttacttcatatggtgagaatcatttgtgggactttaataatggttggaaaaaaagaaataaaacccgaagaagttgataaaattctcaaacaaaa

SEQ ID NO: 292776 - DNA, 437 bp, Unknown
  Bacterial polypeptide expressing nucleotide sequence isolated from the Sargasso Sea
tgcaagacatagtgccagtgaaagaatctataaatattttattattaatagacgctcttctttagttttagaaaaaaacaaagcttggcacattaaaaaaaagcttgatataaaattaatgaggcaaggagctaacatattaaaaggcacacacaatttttcaactttcagagcttcatcttgtcaagctaaatcaccagtaaagacaatgaaaaacgccacaataaaaaaaaataatcataggataattttgacttttcaatctaaatcttttttacaacaacaagtacgatctatggttggttctttaaaatatctaggagaaggaaaatggaatttaaatgattttaaaaaggcatttttgtcaaagaagagaaaaatgtgcgctcctccagctcctgctcatggtttatatttatctaaaataaaatattaat

SEQ ID NO: 292777 - DNA, 730 bp, Unknown
  Bacterial polypeptide expressing nucleotide sequence isolated from the Sargasso Sea
ctgatcctcgaatacgacggcacggcctacaacggcttccaggcccaggacggtcagccgacggtgcaaggggcgctggagaccgccatccacgccttctcgggcgagcggatccgcatcgccgccgccggccgcaccgacaccggcgttcacgccacggcccaggtggtccatgccgatctggagcgcaactggcccgtcgacacggtgctgaacgcgatgaacgcccatctggtgcgcgaggacgtctgcatcctgtcggccgaacgggcgcccgatcccgactggcacgcccgtttctcggccaccggccggggctatctgtaccggatcctgaaccgccgcccccagccggtgctggagcgggaccgtgtctggcacgtcaagaagaccctggacgccgaggccatgcaccacgcggcccaggtcctggtcggccatcacgacttcaccaccttccgcgacgtggcttgtcagtcgaaatcgccggtcaagtcgctggacgtggcccgcgtcacccgtttcggcgaggaggtccatctggtcttccaggcccgcagcttcctgcaccgtcaggtccggtcgatggccggcaccctggtcgaggtcggcctcggccgctggaccgcccatgacgtcaaggcggcgctggaggcgagggaccgcgcccggtgcggccccgtcgccccctcggcggggctctatctcagcggcgtgcgatacgactgaa

SEQ ID NO: 292778 - DNA, 661 bp, Unknown
  Bacterial polypeptide expressing nucleotide sequence isolated from the Sargasso Sea
caaggattaattcaagaaaaagtctcaataattttaaaagaaaaaataattgtatatggtgccggaagattggatagtggtgtgcatgctattggacaatcagctcattttgattgtttaacaaaaattgaaaaaaaagatagtttcttaaaatctataaatttttttttaaaaaaagaaaatgtttcaattttatcgataaaaaaaagaaatagaaattttcatgccaggttttctgcaaaaattcgggtttataattataaaattataaatcgtttaagtattcctgttttacataaaaatagaagttggcatgttataaaaaaacttaatttgaatttaatgaaagagggcgcaaaaatattaatgggaactaaagatttttcaactttcagagcttcaagctgtcgagcaaaaagtccaataaagacgttggagttagtcaagataatctcatctaaaaatataatcgatatagagtttagatctaaatcttttttacaacaacaagtacgttccatggttggttgtttaaaattcttaggtgaaaaaaaatggtctttaaaaaaatttgacgatgttacaaaatcaaaaaaaagaactttatgtgcaccacccgcaccacccgaaggtctctatttaacgaaagttatttattgat

SEQ ID NO: 292779 - DNA, 340 bp, Unknown
  Bacterial polypeptide expressing nucleotide sequence isolated from the Sargasso Sea
atgtttcgatatcaaatcttaatcgaatatttaggaacttcatttgtgggttggcaagttcaaaaaaaaggaatttctgttcaaaaggtaattcaatcagtttcgtcaaagttattaaaacaaaaaattatattttatggatctggtagaacagatgcaggagttcatgcacttgaacaatcagctcactttgatttaaaaaataaaattcaaaatattgaaaaatttataaaatccttaaattattttttaaatccaaaaaaaatttcagtaattagcatcaaaaaaaaaaatctaaccttccatgcaagattttctgcaaaagagagatcttatattt

SEQ ID NO: 292780 - DNA, 496 bp, Unknown
  Bacterial polypeptide expressing nucleotide sequence isolated from the Sargasso Sea
ttgaaaagagttgctttaataattcaatatgatggatcatttttttctggttggcaaagacagaaaaacgcgaaaagtgttcaagcgactatagaggatgctcttttcgaattttcaaatcaaattattaaaacatttgctgcaggtagaactgatgctggtgttcatgcatctggacaagtagttcattttgatattaaatctataatcccatgcgatcgatatgcagatatattaaataagaaattacctcaaacaataaggatcttagagtcagttgaggtgcaaaatagttggcatgcttgttattctgctgtttatagacattatcgatacgtaattaacaacagtaaaatctctaatttatttttgaataagtggtcatggcacagataccagaaaacactcgatgagtttttaatgtctaatgcgttaaatggcatggttggcgagcatgatttttttgcttttcaaaaaagtggtagtaatagatcaa

SEQ ID NO: 292781 - DNA, 708 bp, Unknown
  Bacterial polypeptide expressing nucleotide sequence isolated from the Sargasso Sea
aatgtttagataccatatattaatagagtattttggaagtagttttaggggctggcaagttcaaaaaaaaggaaagacagtccagggcttgatacaggaaaaaatttcaaaaattttaaaaaaaaaaataactatatatggagcaggtagacttgatagtggagttcatgcaaaagagcaatctgctcattttgactatgataaagaaataaaacaaaaagatagatttttaaaaacaattaatcatttcttagaaaaagagaatgttgtaattttagttttaaaaaaaaggagtaaaaatttccatgcacgattttctgcaaaaatgagagtttataattatgtaattattaaccgtttaagtaagcctgttctagaaagaaatagaggttggcatcttatgaaaaaattagacacagatataatgaaaaaaggtgctaaaaaattagttggaactaaagacttttctactttcagggcctctagttgcagagcaaaaagcccaataaaaacaatgaaattagtcaaaataaaatctttaaaagataaaattgaaatagaatttagatcacaatcatttttacaaaaacaagtgcgttccatggttggttgtttaaaatatttaggcgaaaaaaagtggtctttaaaaaaatttgagtatgtaatgaactcaaaaaaaagaattttatgtgctccaccagcaccacc

SEQ ID NO: 292782 - DNA, 685 bp, Unknown
  Bacterial polypeptide expressing nucleotide sequence isolated from the Sargasso Sea
tacataggttggcaaaaacaagagaatggaaaatctattcaacaaactatagaagattccattgaaatgcttacttctgaaaaaatatcattatatggcgcaggcagaacagatgcaggtgttcatgcatttggtcaagtgggacattttgaaatcaaaaaaaatatagaattaaataaaattagagatggccttaaccaacatttgagacctaatccaattgctattttaaatgtagaaaaagttgatgaaaattttcattcaagattttcagcaaaattaagaagttacaaatatagaattgttaatagaagatctcctttaacaattgatagaaatagagcttgggctgtttataaaaagttaaacataaaaaaaattatttatgaagccaataattttattggcaaacataatttggctgcatttagatcaataaattgtcagtctaaaaccacaacaaaaacaattgaatctataaatgtaaattatgaaaataacgaattagatattaatatcagtgcaaagtcatttcttcattctcaagtaagaataatggtaggtactttaatagaaataggaaagggaaagataaaagaatcaatttccgatatcattaaatcaaaagacaggtctcgcgcaggtatgacagcccctgcacatggcttgtatttaataaaagtta

SEQ ID NO: 292783 - DNA, 454 bp, Unknown
  Bacterial polypeptide expressing nucleotide sequence isolated from the Sargasso Sea
gttaaaaaaaattttcatgctagatttgatgcaaaaaaaagaacttataaatatgttataataaatagaaaatctccactaactttacaaaaaaacaaggcatggcatattaaaaaaaaactagaaattaaaaaaatgaaaaaaggtgcaaaattattagaaggaacacatgatttttcaacttacagatcatcatcctgtcaggcaaaatcaccaataaaaactttaaagaaagtttcaattaaaacaaagggagataatgttgtcttaatatttacgtctaaatcttttttacaacgacaagtaaggtctatggtgggttgtattaagtatcttggtgcaggccaatggaacatagatgattttgaaaactcatttaaatcaaaaaatcgcattaaatgcgcaccaccagctcccgcttgcggactttatttaactcaagttaagtactaaa

SEQ ID NO: 292784 - DNA, 471 bp, Unknown
  Bacterial polypeptide expressing nucleotide sequence isolated from the Sargasso Sea
aatgaacaggtacaaaataaaaattgagtatgatggcaccccgtttgtcggatggcaaagacaagaaaatggacaatcagttcaagggtgtattgaaaaagcgataagtaatatatttgaggaaaacataatcatttttggggctggtagaacagatgcgggtgttcatgcaatggggcaggtcgctcattttgatgttacagacaaattacttgatccatatgtgattaagaacgcattaaatgatcacttgaggccatttcctatttccatattggaagtagagaaagtacataatgattttcatgcaagatttgatgcaactcagagaaaatacctttatagaatagtaaacagaaagtcaccactcactattgagaagggaagagcttggccagtacataaagacattgatgttgaattgatgagggaatgcattcctttcattgaaggtcagcatgacttttacac

SEQ ID NO: 292785 - DNA, 604 bp, Unknown
  Bacterial polypeptide expressing nucleotide sequence isolated from the Sargasso Sea
gtgtatggagcaggaagaacggatgcaggtgttcatgcttatggacaggttgcttcttttgcaatttcaaaaaaaatttctaccgatgtaattagagatggcttaaatcaacatttacgacctctaatgatctcagttttaaaagcagaggaagtagaaaatgattttcatgcaaggttttcagctaaaaaaagatggtatgcatataaaataattaacagaaggtctccattaacaatagatgcaaatcgtgcatggtgtgttcataaaaaattagatacaaaaaaaatgcaaaatgaagctacttcatttattggtaaacatgatttaaacgcttttcgttcagcacactgccaatcaaaaagtagtatcagaactattgatgatataatcatcgatattgaagacgagaatatattgattgaagttgtagcaaaatccttccttcattcacaagtaagaataattgtgggcactttagtagatattgctaagggtaaaataaacatatctatattagatattattaattctaagaatagggaagctgctggtcaaactgcacctgcaagaggactgtatttaaaaaaaattggttattaat

SEQ ID NO: 292786 - DNA, 661 bp, Unknown
  Bacterial polypeptide expressing nucleotide sequence isolated from the Sargasso Sea
aatgtttagataccagatattaattgaatatgttggtactaattttagaggttggcaaattcaaacaaaaggaaaaactatacaaggactccttcaagataaaatttcaaaacttttaaaagaaaaaattattttatttggagccggtagattagataagggagttcatgctattgagcaatctgcacactttgaatgtaaaaaaaaaataattgatttagataagtttataaaatctttaaactatttcttaaacaaacatatggtgtcagttcttaaaattaaaagaagagataaagattttcatgcaagattttcagcaaagatgagaatatacaagtacgtgattattaatcgtttgagtagaccagttttggataaaaataaaggttggcatatcatgagcaaattggatttaaatatgatgaaaaaggcagcaaagaaattagttggtacaaaagatttttctacttttcgtgcatcaagttgtagagctaaaagtcctattaaaactatgaaatccgttaaaataaaatacaaaaataataaaattgaaatagagtttcaatcacaatcttttttacaacaacaagttcgttcaatggtgggttgtttaaaatttgtaggtgaaaaaaaatggactttaaaaaaattattttag

SEQ ID NO: 292787 - DNA, 478 bp, Unknown
  Bacterial polypeptide expressing nucleotide sequence isolated from the Sargasso Sea
attgcaattctaaagataaaaaaaagagataaaaattttcatgcgaggttttcagcaaaaatgaggatttataagtatattattattaatcggcttagtgggccagtcctagaaaaaaatagaggttggcacataatgaaagaacttgatttagatgcaatgaaaaaaggtgctacaaaattagttggaactaaagatttttcaacttttagagcatctagttgtagagcaaaaagtccaattaaaactatgaaattagttaagattaaatcttcaagaaataaaatagaaatcgaatttagatctcaatcatttttacaacaacaagttcgatcaatggttggttgtttaaaatatcttggggaaaataaatggacattaaataaattcgaaaaagtaatgaaatctaaaaaaagaactcaatgtgccccaccagcaccgcccgagggtctttttttaactagagttctttattaat

SEQ ID NO: 292788 - DNA, 601 bp, Unknown
  Bacterial polypeptide expressing nucleotide sequence isolated from the Sargasso Sea
gctggaagattagatgttggtgtacatgccaaagaacagtcagcacattttgattgtaaaaataagattataaaatttgataaatttttaaaatcaatcaatcattttttaaataaagatggaatagcaatacttaaaattacaaaaagaggtaataattttcatgccagattttcagctaaaatgagagtttataattatgtgattattaatcggattagtggaccagttttagataaaaatagaggctggcacattatgaaagatcttgatttaaaactgatgaaaagtgctgcaagaaaattgattggtacaaaagattttagtacttttagaaaatcgagttgtagggctaaaagtccaataaagactatgaaatctgtaaaaattaaatctacaaaagataagatagaaatagaattcagatctcaatcttttttacaacaacaagtccggtctatggttggttgcttaaaatatgttggggaagagaaatggacattaaaaaaatttgtaaatgtaatgcagtctaaaaaaagagaattatgtgctccacctgcaccacctcaaggtctttatttaacgagaattatttattaat

SEQ ID NO: 292789 - DNA, 442 bp, Unknown
  Bacterial polypeptide expressing nucleotide sequence isolated from the Sargasso Sea
tttcatgcaagattctcagctaaattgagaatatataaatacataattattaatcgtataagcaaaccagttttagaagaaaaaagaggttggcatattatgaaaaaacttgatctcaaaattatgaaaaaaagcgctaaaaaattaattggtactaaagatttttcaacatttagagcttcaagttgtagggcaaaaagtccaattaaaactatgaagtcagttaaagtcaaatcctcaaaagataaaattattatagaatttaaatctcagtcatttttgcagcaacaagtacgctcgatggtgggttgtttaaaatacgtaggtgaaaaaaagtggtctttgaaaaaatttgatagagtgattaaatctaaaaaaagaaccttgtgtgctcctccagctccagcagaaggtttatttttatttaaaattatttattaat

SEQ ID NO: 292790 - DNA, 538 bp, Unknown
  Bacterial polypeptide expressing nucleotide sequence isolated from the Sargasso Sea
atgttaaggtataaaattattgttacatatgatggaactaattttgaaggatggcagattcaaaacaattcaagaactattcaaggagaattggaaaatgcgctaaaaattattaataataacaaatgtataaaaatttttggctctggaagaactgactcaggtgttcatgcaatagcccaggtagcccattttgactttgattttaaagaaagatcaaaatttgatctaaaaaatgcaattaatggcaacttaccagaggaaattagaattacaaattgtgaaatagttccatcaaattttcatgcacgattttcagcttcgagtagatcctataaatataaattaagaacaaatgataatatttttgataaaaattatacttggagagttggtaaattgaatttgagtttgttaaatgagttagcttcaatgattactggaactcatgattttacatcatttagcaagattagtagtaatttgaactcaagaaagtgtaatatttatgaatcatcgtggtataaaaaagaataac

SEQ ID NO: 292791 - DNA, 432 bp, Unknown
  Bacterial polypeptide expressing nucleotide sequence isolated from the Sargasso Sea
aatgcctaattataaaattgaaatagaatatgatggaacaaactatgttggttggcaacgtcaagataacggtcaatcaattcaagaattaatagaaattgccataaaaaaacttacgaatgaaattgttgttttatttggagcaggtagaactgatgcaggagttcacgctaaaggacaagttgcgagttttaaaattaaaaaagaaattaatgcaagcgttattagagatggacttaatcaacatttacgcccgcatccaattgcaattatttctgcaaatatagttaatgatgattttcatgcacgattctctgcaaaaaaaagatcgtatgaatataaaatagttaatcgtcgttctccattaacaatagaaaaaaatagagcttggtgtgttcataaaaaattagattttgataaaataattataga

SEQ ID NO: 292792 - DNA, 307 bp, Unknown
  Bacterial polypeptide expressing nucleotide sequence isolated from the Sargasso Sea
ataaaatatttcattgggacacatgatttctcagcctggagagcatcttcttgctcagctaagagcccaataagaactattactcatgcaagtttaaatagttttaaagataaaattacgatgagatttgagtccgagtcctttttgcagaaacaagtaagatcaatggtaggatgtttaaagtatgttggtgaaaataagtggaaaccagaaaaaataaaaaaaattataaaatcaaaaaaaagaaatgaatgtgcaccccctgcacctccagaaggtttgtatttaaaaaaagttttttattgag

SEQ ID NO: 292793 - DNA, 523 bp, Unknown
  Bacterial polypeptide expressing nucleotide sequence isolated from the Sargasso Sea
aagaacgcattaaacgatcacttgaggccatttccaatttccatattacaagtagagaaagcacataatgattttcatgcaagatttgatgcaactcagagaaaatacctttatagaatagtaaacagaaagtcaccactcactatcgagaagggaagagcttggcaagtacataaagacattgatgttgatttgatgaaggaatgcattccttcaattgagggtcagcatgactttacaacattccgttcagctcactgtcaatctgatagtccaataaaaactttagacagcctaaagattagccaatcagaagaaaatatctattttggtttcactgcaagatcatttctgcatcatcaagttagatcaattgttggtagtttgaagttagttggagaaaaaagttggtcacctgacgactttgaaaaagcgtttaattcaaaagatcgctctaactgcggagcacttgctcctcctgagggattatattttatggaggttaaatactcattattgtgag

SEQ ID NO: 292794 - DNA, 562 bp, Unknown
  Bacterial polypeptide expressing nucleotide sequence isolated from the Sargasso Sea
ttgaaaagggtagctttactagtccaatatgatggatctcattattcaggttggcagaaacaaaaaaatgcaactacagttcaagaaacacttgacaaagccctcttaaagattacaagtcataaagtaaagacttttgcagcgggaaggactgatgctggggttcatgcatcaggtcaagtaatacactttgatgttgattgtgttattccaggaaatagttattctgatgtcttaaatagtcttttacctgcaacaattaggatcttggaatcagttgaggtgaaagatagttggcatgcatgctattcagcaatgtatagacattatcgatatgttattaataacagtaaattccctaacttgttcatcaataattggtcatggcatagatatcaaaaagtattagatgaagttttaatgttaaacgcatccaagacaatggaaggagaacatgatttttttgcttttcagaaaagtggaagtaacaggacaaattctattacaacaataaaagatatagatattaaaagagtagaagatttaattttagttgatatta

SEQ ID NO: 292795 - DNA, 355 bp, Unknown
  Bacterial polypeptide expressing nucleotide sequence isolated from the Sargasso Sea
atgcataggtacgctctcactatagaatacgatggttcttcatttcatggctggcaggtgcaaaataatgttacaacggtgcaaggagtaatattcgaggccataaaaaaatttgatgtaaattgcaaaaattttattggagcaggtagaacggacgctggtgtgcatgctatttgtcagattgcccatgttgacttagcaaccaaacacgactgcgagactgtgcgaaaggcaataaattattatcttagcaaatatccaatttccatattaagcgctgagacagttgatgaaaaatttcacgcacgcttttctgcaataaggaggcactatacatataagattttttctagaa

SEQ ID NO: 292796 - DNA, 655 bp, Unknown
  Bacterial polypeptide expressing nucleotide sequence isolated from the Sargasso Sea
tatgaaaatcgcattgggtatcgaatatgctggctgtaattactatggttggcagaagcagagtatttctccaacaattcaggaaacagttgagtccgctctttcggccattgctgatgagagtattaatgtttattgtgcgggaagaactgatacaggcgtccatgcaatacaacaagttattcattttgaaacatcgacaaaacgtaagctctatagttgggttttgggtgcgaactcaaagctaccaaaagatatttcagttatatgggcgctagatgtcgatgataattttcacgcaagatataccgctgaaaataggacttatcaatatttaattctaaatagacgttcaagacccgccatactaaatggcctggtgacttgggaatgcagagagctagattataaaaaaatggttgattcatcgaaatgtcttataggagaaaatgattttacctcttttagagcagtttcatgtcagtcagattctcccattagaacgatacatgaattagagattggtagaattgaagattggtttgttataacagtacgtgctaatggatttcttcatcatatggtacgaaacattgctggtgttttaatagctgtaggtataggtaaagaaagtataaagtgggtagcagatgta

SEQ ID NO: 292797 - DNA, 718 bp, Unknown
  Bacterial polypeptide expressing nucleotide sequence isolated from the Sargasso Sea
atgtctagatatagggcaacactagaatattttggaaagccatttgcaggttggcaacgacagaaaaatgggttttcagttcagcaggccctggaggaggcaataaaaaatttttgtggtcaagatgttgttacttatgttgccggcagaacggatgctggggtgcatgcccttgggcaagtgtgtcactttgaaatagaaaaaaaagaaaccaccaaaaccataagaaacgcgattaattttcatctaaaaccgaatcccataatcgtgttaaatgtagttgaggttgacgaaacatttcatgcgaggttctctgctaaggagagacattaccgatataaatttattaatagggctacaccaagtgctctttatagtgaccttagctggtgggtgcctcaagcacttgacattgatttaatgatagaagcgtcaaagtgcctgattgggaagcacgatttttcgacttttagggctgctggatgccaggctaaaaccccagtaaaaactctaaatagtattacattttggcgagagggagatgaagttattatggagacaagagcaaagtcctttttgtatcatcaagtgcgtaatatggcaggtacgttgaagttggtgggagaaaaaaagtggactatagaggatttttcaaatgcctttaatgctagaacacgagttagaggtggaattacagcacccgcatgtgtctttattt

SEQ ID NO: 292798 - DNA, 717 bp, Unknown
  Bacterial polypeptide expressing nucleotide sequence isolated from the Sargasso Sea
gaatatgttgttcttctttcataggttggcaggtacaatcaaaaggcaaaactatacaaggactaattcaaaaaaaaatttcatatcttttaaatgaaaaaattacacttattggttcgggaagaacagataccggtgttcatgcaattgagcaatccgcacattttgatgtcactgaaaaaatccaaaatttaaacaaatttttaaaatcaattaattattttttaaataaatacgaaatagccattttaaaaataaaaagaaaaaatatgaatttccatgcacgtttttctgcgaaagagagaatttataaatatattatttttaatcaattgagtaaacctatccttgaaaataagcgaggatggtttgttattaaaaagcttgaattagaaataatgaaaaaagcagcaaaaaagttagttggaactcatgatttttcaacttttagagcatctggatgtaattcaaagagcccaataagatcaattaaatcagttaaaattaaaaagataaaaaataaaattgagttagagtttagatctcaatcatttttaaaacaacaagttagatcaatggttggttgtttaaaatatattggtgaaaaaaagtggacattaaaaaaatttacaagtgttattaaattaaaaaatagaaatttatgcgcaccaccagcaccagcagaaggattatttttgaaaagagttttatactaat

SEQ ID NO: 292799 - DNA, 658 bp, Unknown
  Bacterial polypeptide expressing nucleotide sequence isolated from the Sargasso Sea
gatgctggagttcatgccctaggacaagtcgctcatataaatcttcctaaaaatcataaattaacaactagacatccattttatataatctctgctttcaactcacatttaaggaaatctaaaattagagtagtttctactaaacaagttaaatcagagtttaacgctaggttcagtgcaacaaaacgatattataaatatagaattttatgccgtgcagcaccacctggtattgaaaaaggaaaggtttggcattcaaggaaaaagttaaatattcgattaatggaagaggcaactaaatacttaattgggaagcacgattttacaagctttagaactataaactgtcaggccaaatctcctattagaacattagataaaatatcccttttaagtgtaggtgatgaaattataataaacgtatctgcaaaaagttttttacatagtcaagtaagaataattataggaacaatttacaaagtaggtgacgaaacattaaagcctaagaatgtaaaaaatattcttgaaggcaaagatagaaatcttgcagggcccactgctccagcagaaggtctatatcttgaaaaagtagagtatccaaataatttacttgatgacaactggccaataatttatgacagcaatctttataattgaa

SEQ ID NO: 292800 - DNA, 562 bp, Unknown
  Bacterial polypeptide expressing nucleotide sequence isolated from the Sargasso Sea
tctgcacacctttgattgcaaaaataaaataaccgatacaattaaatttttaaaatccattaatcattttttaaatttaaaagacattgcaattaaaaatattaaaaaaagaaataataaatttcatgctagattttcagcaaaacaaagaatttataaatactttatttttaatcaaataagccaacccataattgaaaaaaatagagcatggcatgttcgaaggtctttaaatttagaattaatgaagaaaggtgcaaaaaagttattaggaaccaatgattattcaacttttagatcttcaagctgtaatgctaaaagtccaattaaaactattaaatcaattaaaattaaatcatcaaaaaataaaattgaatttcaatttagttctcaatcatttttacaacatcaggttagatctatggttggttgtttgaaatacttgggagaaactaaatgggatttgaaaacttttgaaaagagatttaagtcaaaaaaaagaacactgtgtgctcctccagcaccaccaagtggtttatttttatttagagttctttattaa

SEQ ID NO: 292801 - DNA, 692 bp, Unknown
  Bacterial polypeptide expressing nucleotide sequence isolated from the Sargasso Sea
aatgtttagatatcagatcataattgaatatgtaggcactaattttagaggatggcaaattcagaaaaagggaaaaactgttcagggattattacaaaataaaatttcaaaactgttaaaggaaaatattacaatatatggagctggaaggttggacgtaggggttcatgctaaagagcagtcagcacattttgattgtaaaaataagattatcgaaattgataggtttttaaaatcaatcaatcactttttgaataaagatggaatagcaatacttaagattaaaaaaagaagtaaaaattttcatgccagattttcagctaaaatgagagtttataattacgttattgtaaatcggatcggcggtccagttttagatcaaaatagaggctggcacatcatgaaagatcttgatttaaaattaatgaggaaaagtgcaaaaaaattaataggaactatagattttagtacttttagaaaatcaagttgcagggctaaaagtccaataaaaactatgaaattagtgaaaatcaaatctacaaaagataagatagaaatagaatttagatcccaatcttttttacaacagcaagtccggtccatggttggttgtttaaaatatgttggtgaaaaaaaatggacattaaaaaaatttgtaaatgtaattgagtctaaaaaaagagaattatgtg

SEQ ID NO: 292802 - DNA, 670 bp, Unknown
  Bacterial polypeptide expressing nucleotide sequence isolated from the Sargasso Sea
atgacacggcgtatccttatcacaatagaatatgatggtggaccctttgttggttggcaacgccaggataatggacctagcgttcaaaccgcgatcgaagatgcagcaaaagcctttattcatgcgccggtggcagttgttggggctgggcgcacagatgcgggtgttcatgcgaccggtcaggcagcacatattgacgtaccaaaaaaatttaccgcgaaccgagtaatggaagccctgaattcgcacctctcatccgtgccgatcacggttcaagacgcatccgaagtgccgggggattttcatgcacgctttaccgctatagggcggcgctatctttaccgtattttgccgcggagacaaccacctgcactggatgtaggccgcgtatggcatcataaacaaaggcttgatccagagcttatggcaagggctgccaaacatttattgggtcgccacgactttaccagctttagggcaagccaatgtcaggcagagtcgccccttcgcacacttgaccggcttgatattgtgactaggggtgatgagatacatattcatatcgaagcccgatcattcctgcatcatcaggtccgcaacatcaccggaacccttgctcttgtaggcaccggaaaatggcaccctgataatatgaaaacccgcacttgag

SEQ ID NO: 292803 - DNA, 586 bp, Unknown
  Bacterial polypeptide expressing nucleotide sequence isolated from the Sargasso Sea
atgaccagacgaattttgatcacaatagaatatgatggcactccctttgttggctggcaacgtcaggataatggcgattcgatccaagccgcgatagaagccgccgcggaggcgtttatcggcacaccaacgcctgttgctggggcagggcgcaccgactctggtgtgcatgccaccggtcaggttgcgcatctggatgtgccagataagttcgacgccaatcgggtgatgcatgcattgaacgcgcatcttggcgaagtgccgataaccattcaccatgcccgcgaggtaccagccacaatacatgctagattttcagcaataggccgacgctacctttatcgtattttgccacaacgtcaaaagcctgcgcttgatctggggcgggtatggcatcatcgccaaccccttgatagcgaccgcatgcacaaggctgcgcaatatcttgttggccaccatgatttcactagctttcgggccagccaatgtcagactgattcgccgctgcgaacactcgataaattaaatgttgaagaggtggacaacgagattcatatccatgccgaagcccgttcatttctgcatc

SEQ ID NO: 292804 - DNA, 668 bp, Unknown
  Bacterial polypeptide expressing nucleotide sequence isolated from the Sargasso Sea
cgcaggtaggactgatgcaggggttcatgcatctggccaagtagtgcactttgatattgattctgttattccaggaaatagtttttctgatatcttaaatagtgttttaccctcaacaattaggatcttagaatcagtcgaggttaaagatagttggcatgcatgctattcagcaaagtatagacattatcgatatgtcattaataacagtaaattcccgaacttattcataaataattggtcatggcatagatatcaaaaagtattagatgaagttttaatgttaaatgcatctaggaaaatgataggagaacatgatttttttgcttttcagaaaagtggtagtaatagaacaaactcaattacaaaaataaaaaatatagatattaaaagagtagaagatttgatttttgttgatattaaagctactggttttctgtatggaatggtccgcttaattattggtcaactagttttagttggagaaaacaaaatatcgcaagaaatttttacagatagatgggtaaacaaaaagaaaaatgatgttaaggaatctgctccagctaaagggttatgttttgtaaatgctgtttatgaagaaaatgtttttaaaaagattaataaaaatgattttttccctgtatttttaattaagggtttttcttaag

SEQ ID NO: 292805 - DNA, 658 bp, Unknown
  Bacterial polypeptide expressing nucleotide sequence isolated from the Sargasso Sea
ctattcaagcgttctgcaagaagcgctagtcaaactatcaaatgaaaaagtaataatatttggagctgggagaacagatgcaggtgtgcatgcttatggtcaagtagcttcttttaccctaagcaaaaaaattgaaacagatataattagagatgggttaaatcaacatttaagaccccatcctattgcagtacaaaatgcagaagtagttgatgataattttcatgcaagattttctgcaaaaaaaagatggtatgaatataaaatcattaatagaagacctcctttaacaattgatttaaatcgagcttggtgtgtctataagaatttagatatcgaaaaaatgaaaagtgagtcactttcttttttaggaaaacatgatttaaatgcatttcgttctgcacattgccaatctaaaaatagtactaaaacaattgatagtgtttctattaaaaatatagatgagcagattattatagaagtaagtgcaaaatcttttttacactcgcaagtaagaataatgattggtacactagttgatattgccaaaggtaatattaacaagacaattttagatattattaattctaaacaaagagattttgcaggtcaaacggctcctgcaaatggtttatatcttaaaaaaattgaatattga

SEQ ID NO: 292806 - DNA, 643 bp, Unknown
  Bacterial polypeptide expressing nucleotide sequence isolated from the Sargasso Sea
tttgaaaagggtagctttactagtccaatatgatggatcttattattcaggttggcaaaaacaaaaaaatgcaactactgttcaagaaattttagaaagagctctcttaaagattacgaatcatacagtaaagacttttgcagcaggtaggactgatgctggggttcatgcatcaggtcaagtagtacactttgatgttgattgtgttgttccaggaaatagttattctgatgtcttaaatagtcttttaccctcatcaattaggatcttggaatcagttgaggtgaaagatagttggcatgcatgctattcagcaatgtatagacattatcgatatgtcattaataacagtaaattccctaacttgttcatcaataattggtcatggcatagatatcaaaaagtattagatgaagttttaatgttaaatgcatccaggaaaatgataggagaacatgatttttttgcttttcagaaaagtggtagtaatagaacaaactcaattacaaaaataaacaatatagatattaaaagagtagaagatttgatttttgttgatattaaagctactggttttctatatggaatggtccgcttaattattggtcaactagttttagttggagaaaacaaaatatcgcca

SEQ ID NO: 292807 - DNA, 478 bp, Unknown
  Bacterial polypeptide expressing nucleotide sequence isolated from the Sargasso Sea
tttgaaaagagtagctttaataatacagtatgatggatcttatttttctggttggcaaagacagaaaaatgcaataagtgttcaagagattatagaagatgctcttttcaaagtatctaatcaaaggataaaaacatttgctgcaggcagaacagatgctggagttcatgcatcaggccaggtggtccattttgatattgagtttttaattccaagtgaccgttatgcagatgtattaaataataaattacctcaggcaattagaatcttagaatcagtagaggtgaaaaatagttggcatgcttgttattctgcagtttacagacattatcgatatgtaattaataatagtaagcttcccaatttgtttttaaataagtggtcatggcatagataccaaaaatctcttgatgagtttttaatgtcaagtgctctagatggcatgctcggggagcatgatttttttgctttcaaaaga

SEQ ID NO: 292808 - DNA, 499 bp, Unknown
  Bacterial polypeptide expressing nucleotide sequence isolated from the Sargasso Sea
ttacctttttaagaaaagaaatatttctattttagctattaaaaaaagaaataagaattttcatgcaagattctctgcgaaaatgagaatatatacctatattattatcaatcgatttagtgagcctgctttagaaaaaaatagaagttggcatattatgaaaaaacttgatttagatataatgagaagaggtgctaaaaaatttgagggcaccaaagacttttcaacttttagggctgctagttgtagggccaaaagtccaataaagacaatgaaactagttgagataaagtgctcaaaaaatgtaattaaaatagaatttagatctcaatcatttttgcaacgacaagtacgttctatggttggttgtcttaagtatctgggcgaaaaaaagtggtctttaaaaaaatttgagaatattatgaaatcaaaagaaagagccttatgtgcaccgccagcaccacctgagggactttatttaacgaaaattatttattaa

SEQ ID NO: 292809 - DNA, 589 bp, Unknown
  Bacterial polypeptide expressing nucleotide sequence isolated from the Sargasso Sea
gatgcaggggttcatgcctttgagcaatctgcacactttgattgcataaataaaataaccgataaaattaaatttttaaaatctataaatcattttttaaatttaaaagacattgcgattaaaaatattaaaaaaagaagtaataaatttcatgctagattttcagctaaacaaagaatttataaatactttatttttaatcaaataagccaaccaataattgaaaaaaatagagcatggcatgttcgtaggcctttaaatttagaattaatgaaaaagggtgcaaaaaagttattaggaacccatgattattcaacttttagatcttcaagctgtcacgctaaaagtccaattaaaactattaaatcaattaaaattaaatcatcaaaaaataaaattgaatttcaatttagttctcaatcatttttacaacatcaggttagatctatggttggttgtttaaaatacttgggagaaactaaatgggatttaaaaacttttgaaaagagatttaagtcaaaaaaaagaacactgtgtgctccaccagcaccaccaagtggtttatttttatttagagttctttattaat

SEQ ID NO: 292810 - DNA, 637 bp, Unknown
  Bacterial polypeptide expressing nucleotide sequence isolated from the Sargasso Sea
aaaagttataaaaagaaaaaaattgttttacatggtcaaggaagaactgatgcaggggttcatgcatttgagcaatctgcacactttgattgcaaaaataaaataaccgataaaattaaatttttaaaatctatcaatcattttttaaatttaaaagacattgcaattaaaaatattaaaaaaagaaacaataaatttcatgctagattttcagcaaaacaaagaatttataaatattttatttttaatcaaataagccaaccaataattgaaaaaaatagagcatggcatgttcgtaggcctttaaatttagaattaatgaaaaagggtgcaaaaaagttattaggaacccatgattattcaacttttagatcatcaagctgtcacgctaagagtccaatcaaaactattaaatcaatcaaaattaaatcatcaaaaaataaaattgaatttcaatttagttctcaatcatttttacaacatcaggttagatctatggttggttgtttaaaatacttgggagaaactaaatgggatttgaaaacttttgaaaagagatttaagtcaaaaaaaagaacactgtgtgctcctccagcaccacctggtggtttatttttatttagagttctttattaat

SEQ ID NO: 292811 - DNA, 669 bp, Unknown
  Bacterial polypeptide expressing nucleotide sequence isolated from the Sargasso Sea
aatgaataggtataaaataaaaattgagtatgatggtaccccgtttgtcggatggcaaagacaagaaaatggacaatcagttcaagggtgtattgaaaaagcaataagtaatatatttgaggaaaacataactatttttggggctggtagaacagatgcaggtgtccacgcaatggggcaggtcgctcattttgatgttacagacaaattacttgaaccatatgtgattaagaacgcattaaacgatcacttgaggccatttcctatttccatattggaagtagagaaagcacataatgattttcatgcaagatttgatgcaactcagagaaaatacctttatagaatagtaaacagaaagtcaccactcactattgagaagggaagagcttggcaagtacataaagacattgatattgatttgatgaaggaatgcattccttcaattgagggtcaacatgactttacaacattccgttcggcccattgtcaatctgatagtccaataaaaactttagatagcttaaaaattagtcaatcagaagaaaatatctattttggtttcactgcaaaatcatttctgcatcaccaggttagatccattgttggtagtcttaaattagttggggaaaatagctggtcacctaatgattttatgaatgcattaaa

SEQ ID NO: 292812 - DNA, 577 bp, Unknown
  Bacterial polypeptide expressing nucleotide sequence isolated from the Sargasso Sea
tcatgcatttgagcaatctgcacactttgattgcaaaaacaaaataattgataaaattaaatttttaaaatccattaatcattttttaaatttaaaagatattgcaattaaaaatattaaaaaaaaaaataataaatttcatgctagattttcagcaaaacaaagaatttataaatactttatttttaatcaaataagccaaccaataattgaaaaaaatagagcgtggcatgttcgtaggcctttaaatttagaattaatgaaaaagggtgcaaaaaaattattaggaactaatgattattcaacttttagatcttcaagttgcaatgctaaaaatccaattaaaactattaaatcaattaaaattaaatcatcaaaaaataaaattgaatttcaatttagttctcaatcatttttacaacatcaggttaggtctatggttggttgtttaaaatacttgggagaaactaaatgggatttgaaaacttttgaaaagacatttaagtcaaaaaaaagaacattgtgtgctcctccagcaccagcaagtggtttatttttatttagagttctttattaa

SEQ ID NO: 292813 - DNA, 589 bp, Unknown
  Bacterial polypeptide expressing nucleotide sequence isolated from the Sargasso Sea
gattcaggagttcacgctttagagcaatctgcaacttttaaaagcgatatcaaaataaaaaataaagttctttttttgagatccatgaatcattttttatccaaaaaaaatatatcaatattgaattttaaaacaaaaaaaataaactttcatgcacgatttagcgcaagaaaaaggagttataaatatattattattaatcgagagtctcctttaagtttaatgaaaaaaaaagcctggcatttaaaaaaaaagttaaatattgatttgatgaaacaaggattgttaatcttaaaaaagaataaagatttttctacatttagatcatcatcctgctcagcaaaatcaccaataagaactttagataaagcgtttgtaaggaaaaaaaatttaaaaattgaaatatttttttcttcaaaatcttttttgcaacaacaagttcgttctatggtgggctgtttaaaatatttaagtgaaggaaagtggtcattaaaagattttgagaaggtagtaaaatctaaacaaagatctaaatgtgcacccccagccccaccgcatgggctatatttaaaaaaagtatactattagt

SEQ ID NO: 292814 - DNA, 586 bp, Unknown
  Bacterial polypeptide expressing nucleotide sequence isolated from the Sargasso Sea
ttgaaaagggtagctttactagtccaatacgacggaactaattattcaggttggcaaaaacaaaaaaatgcaattactgttcaagaaattttagacagagctctcttaaagattacgaatcatacagtaaagacttttgcagcaggtaggactgatgcaggggttcatgcatcaggtcaagtagtacactttgatgttgattgtgttgttccaggaaatagttattctgatgtcttgaatagtcttttaccctcatcaattaggatcttggaatcagttgaggtaaaagatagttggcatgcatgctattcagcaatgtatagacattatcgatatgtaattaataacagtaaattcccaaacttgttcatcaataattggtcatggcatagatatcaaaaaatattagatgaagttttaatgttaaatgcatccaagaaaatgataggagaacatgatttttttgcttttcagaaaagtggtagtaatagaacaaactcaattacaaaaataaaaaatatagatattaaaagggtagaagatttgatttttgttgatattaaagcaactggttttctttatggaa

SEQ ID NO: 292815 - DNA, 478 bp, Unknown
  Bacterial polypeptide expressing nucleotide sequence isolated from the Sargasso Sea
attgcgattaaaaatattaaaaaaagaaataataaatttcatgctagattttcagcaaaacaaagaatttataaatactttatttttaatcaaataagccaaccaataattgaaaaaaatagagcatggcatgttcgtaggcctttaaatttagaattaatgaaaaagggtgcaaaaaagttattaggaacccatgattattcaacttttagatcctcaagctgtcacgctaaaagtccaattaaaactattaaatcaattaaaattaaatcatcaaaaaataaaattgaatttcaatttagttctcaatcatttttacaacatcaggttagatctatggttggttgtttaaaatacttgggagaaactaaatgggatttaaaaacttttgaaaaaagatttaagtcaaaaaaaagaacactgtgtgctccaccagcaccaccaagtggtttatttttatttagagttctttattaat

SEQ ID NO: 292816 - DNA, 448 bp, Unknown
  Bacterial polypeptide expressing nucleotide sequence isolated from the Sargasso Sea
aatgcatagatatcaattaaagatagaatatgttgggtcaaaatattttggctggcaaattcaacaaaaaggcaaaacaattcaaaagactattcaatcagtattaaaaaaaatatttaaaaaaaaaattcaattatatggttctggacggacagatacaggtgtacacgcaatagaacaatctgcacattttgaaactgaaaaaaaaattcacaacctaaagaaatttttagaaacaattaatttttttttaaataataaagatatatcaattttagaaattaataaaaaatcctcaaatttccatgctagattttctgcaaaagaaagagtttataaatacattatatataacagatccagcaaactatctttgaacaatttaagaggttggcatattaaaaaaaaattagatgttaatttaatgaaaattggtggtcaaaactaa

SEQ ID NO: 292817 - DNA, 701 bp, Unknown
  Bacterial polypeptide expressing nucleotide sequence isolated from the Sargasso Sea
tttgaaaaggatagctttattagtccaatatgatggttctaattattcaggttggcaaagacaaaaaaacgcaattacagttcaggagatattagagaaagcgcttttcgaaattacaaatcatgacgtaaagacctttgctgcaggaagaactgatgcgggggttcatgcatcaggccaagtagtacactttgatattgattatgttattccggggaatagttattcagatttacttaatagttatttaccttcatcaattaggattttagaatctgttgaagttcaagatagttggcactcatgctattcagcaatgtatagacattatagatatgtcattaataacagtaaattccctaacttgttcataaataattggtcttggcataggtaccaaaaagtgctagatgaagttttaatgtcaaatgcttcaaagagaatggaaggagaacatgatttttttgcttttcaaaaaagtggaagtaatagaaagaactctattacaaaaataaaaaatatagatattaaaagagtagaggatttaattttagttgatattaaagctactggttttctatatggaatggtccgcttaattatttggtcactagttttagttggagaaaaaaaaatatcgccagaaatttttacagatagatgggtgaacaaaaggaaaatgatgttaagaatctgctcca

SEQ ID NO: 292818 - DNA, 414 bp, Unknown
  Bacterial polypeptide expressing nucleotide sequence isolated from the Sargasso Sea
aaatctatctttataaaattcttaaccgatccactaattctcatttacttgaaaaaagagtatggttttttccttctaatttaaatattacagcgatgagagaatcatctttgcctttggttggaaaccatgatttcagtgcatttagatcaactgattgccaagcaaagaaaactataaggtcaattgattctataagaatatctaaaaggaaggatttagtagagattagagttagaggtaaatcttttcttcacaatcaagtcagaattattgttggaactttagtcagggtaggcaatggattttggaacactaggaaaattaaagaaataattaactcaaaagatagaaaaaatgcaggacctacagccccaccggaaggtctatatctggaaaaaattttttattgaa

SEQ ID NO: 292819 - DNA, 625 bp, Unknown
  Bacterial polypeptide expressing nucleotide sequence isolated from the Sargasso Sea
atgaatagataccaaatacttatcgagtatatagggacaaattttaaaggatggcaaattcaaaaaaaaggtccaacaattcaaggattaattcaagaaaaattatcaaagttattaaaagaaaagataattttacatggtcaaggaagaacagatgcaggggttcatgcatttgagcaatctgcacactttgattgtaaaaataaaataacagatacaattaaatttttaaaatcaataaatcattttttaaatttaaaagacattgctattaaaaatattaaaaaaagaaataataaatttcatgctagattttcagcaaaacaaagaatttataaatattttatttttaatcaaataagccaaccaataattgaaaaaaatagagcatggcatgttcgaaaacctcttaatttggaattaatgaaaaagggtgcaaaaaaattattaggaacaaatgattattcaacttttagatcttcaagctgtagtgctaaaagtccaattaaaactattaaatcaataaaaattaaatcattaaaaaataaaattgaacttcaatttagctctcaatcatttttgcaacatcaggttagatctatggttggttgtttgaaatattagg

SEQ ID NO: 292820 - DNA, 808 bp, Unknown
  Bacterial polypeptide expressing nucleotide sequence isolated from the Sargasso Sea
tttgaaaagggtagctttactagtccaatatgatggatctcattattcaggttggcaaaaacaaaaaaatgcaactactgttcaagaaattttagacggagctctcttaaagattacaaatcataaagtaaagacttttgcagcagggagaactgatgctggggttcatgcatcaggtcaagtagtacactttgatgttgattgtgttgttccaggaaatagttattctgatgtcttaaatagtcttttaccctcatcaattaggatcttggaatcagttgaggtaaaagatagctggcatgcatgctattcagcgatgtatagacactatcgatatgtcattaataacagtaaattcccaaacttgttcatccataattggtcatggcatagatatcaaaaagtattagatgaagttttaatgttaaatgcatcaagggaaatgattggagaacatgatttttttgcttttcagaaaagtggtagtaatagaacaaactcaattacaaaaataaaaaatatagatattaaaagaatagaagatttgatttttgttgatattaaagctactggttttctatatggaatggtccgcttaattattggtcaattagttttagttggagaaaacaaaatatcgccagaaagttttacagatagatgggtaaacaaaaagaaaaatgatgttaaagaatctgcaccagctaaggggttatgttttgtaaatgctgtttatgaagaaaatgtttttaaaaagattaataacaatgatttttttcctgtatttttaattaagggtttttcttaa

SEQ ID NO: 292821 - DNA, 709 bp, Unknown
  Bacterial polypeptide expressing nucleotide sequence isolated from the Sargasso Sea
tatgatggtacaaattttgttggtgggcaggagcaagaaaatggtcaatcaatacaagctcttcttcaagatgcagcatttaaactttcaggagaaaaagtaacaatttttggcgctggaagaacagatgcaggtgttcacgcttacggtcaagtggcctcttttagtattaataacaaaattgcaacagatgtaattagagatggaataaaccagcatttaagacctcacccaatttcagttcaaaaggcagaattagttgatggtgaatttcacgcaagattttctgcaataaaaagatggtatgaatacaaaattattaatagaagacctcccttaacaattgacacaaatagagcctggtgtgtttataaaaaaataaatgttgaaaaaatgaagactgagtcagcctcatttttaggaaaacatgatttaaatgcattccggtctgctcattgtcaatcaaagagtagtttaaaaacaatagaaaacattcaaattaaacatgaaggtgagaaaattatttttgatatttgtgcaaaatcttttttacattcccaggtcagaataatggttggtacattggttgatattgctaaaggtaatttaaataaatcaattttagatattattaattctaaaaatagagaagttgctggtcaaacagcacctgcgcatggtttatatttaaaaaaaattgattattaat

SEQ ID NO: 292822 - DNA, 683 bp, Unknown
  Bacterial polypeptide expressing nucleotide sequence isolated from the Sargasso Sea
acaaacaaaaggcaaaactatacaaggatttattcaaaaaaaaatttcatatcttttaaatgaaaaaattacacttattggctcgggaagaacagatactggtgttcatgcaattgagcaatctgcacattttgatgtaactgaaaaaatccaaaatttaaataaatttttaaaatcaattaattattttttgaataaatacgaaatagccattttaaaaataaaaaaaaaaaatataaaatttcatgcacgtttttctgcaaaagagagaatttataaatatgttattttcaatcaattaagtaaaccaatccttcaaaataagcgaggatggtttgttattaaaaatctcgaattagagataatgaaaaaagcagcaaaaaagttaattggaactaatgatttttcaacttttagagcatctggatgtaatgcaaagagcccaataagatcaattaaatcaattaaaattaaaaagacaaaaaacaaaattgaattagagtttagatctcaatcatttttaaaacaacaagttagatcaatggttggttgtttaaaatatattggtgaaaaaaagtggacattaaaaaaatttacaagtgtaattaaatcaaaaaatagaaatttatgcgcaccaccagcaccagcagaaggattatttttgaaaaaagtcttatactaat

SEQ ID NO: 292823 - DNA, 562 bp, Unknown
  Bacterial polypeptide expressing nucleotide sequence isolated from the Sargasso Sea
atgtataattataaaattgttattgaatatgatggcactaattttgttggttggcagcaacaagaaaacggacaatctattcaaagcgctcttcaagatgcactattcaaactatcaaatgaaaaagtaacaatttttggagctggaagaacagatgcaggtgtgcatgcgtatggtcaagtagcttcttttattcttagcaaaaaaattgaaacagatgtaattagagatggattaaatcaacatttaagacctcatcctattgcactacaaaatgcagaattagttgatgatgactttcatgcaagattttcagcaaaaaaaagatggtatgaatataaaattattaatcgaagacctcctttaacgatcgatgtaaatcgtgcttggtgtgtttataaaagtttagatattgaaaaaataaaaagcgagtcatcttcttttttaggaaaacatgattttaatgcatttcgttctgcacattgccaatctaaaaatagcattaaaacaattgatagtgtttctattaaaaataaagacgagcaaattatcttgaagtaag

SEQ ID NO: 292824 - DNA, 433 bp, Unknown
  Bacterial polypeptide expressing nucleotide sequence isolated from the Sargasso Sea
aatgtataattataaaattattgttgagtatgatggtacgaactttgttggttggcaacagcaagcaaatggtcaatcaatacaagcaactcttcaagaggcagtatttaaactttcaggtgacaaagtaacaatttttggggctgggagaacagatgcaggtgttcacgcttatggtcaagtagcctcttttactgttaaaaaaaaaattgacacagatgtaattagagatggattaaatcagcatttaagacctcacccaatctcagttcaaaaggcagaattagttgatagtgaatttcacgcaagattttctgcaataaaaagatgttacgaatacagaataattaatagaagaccccccctaacgattgatataaatagagcatggtgtgtttataaaaaaataaatgttgcaaaaataaagaaggag

SEQ ID NO: 292825 - DNA, 746 bp, Unknown
  Bacterial polypeptide expressing nucleotide sequence isolated from the Sargasso Sea
aaacatgttcagatatcaaattctaatcgaatatgtcggatcttctttcataggttggcaggtacaaacaaaaggcaaaactatacaaggattaattcaaaaaaaaatttcatatcttttaaatgaaaaaattacacttattggttcaggaagaacagataccggtgttcatgcaattgagcaatctgcacattttgatgtcactgaaaaaatccaaaatttaaataaatttttaaaatcaattaattattttttaaataaatacgaaatagctattttaaaaataaaaagaaaaaatatgaaatttcatgcacgtttttctgcaaaagaaagaatttataaatatgttattttcaaccaattaagtaaaccgatccttcaaaataagcgaggatggtttgttattaaaaatctcgaattagagataatgaaaaaagcagcaaaaaatttaattggaactcatgatttttcaacttttagagcatctggatgtaatgcaaggagcccaataagatcaattaaatcagttaaaattaaaaagataaaaaacaaagttgaattagagtttagatctcaatcatttttaaaacaacaagttagatcaatggttggttgtttaaaatatattggtgaaaaaaagtggacattaaaaaaatttataagtgttattaaatcaaaaaatagaaatttatgcgcaccaccagcaccaccagaaggattatttttgaaaaaagtcttatactaat

SEQ ID NO: 292826 - DNA, 634 bp, Unknown
  Bacterial polypeptide expressing nucleotide sequence isolated from the Sargasso Sea
aaattattaaaagaaaaaattattttgtttggcgctggcagactagacaaaggagtgcatgcacttgaacaatctgctcattttgagtgtaaaaaaaaaattgaaaatttgagtaaatttgtcaaatctttaaatcattttctaaataaggaaatgatttcaatcattaaaattaagaaaaaaggcaatgattttcacgcaagattttctgcaagaatgagaatatataggtataaaattattaatcgtcccagtagaccggtaatagataaaaatagaggatggcacattatcaataaacttgatttaaagataatgaaaaaagctgcgaaaaaattagttggcactaaagatttttctacgttcagagcttcaagctgtagagctaaaagtccgatcaaaacaatgagatcagttaaaataaaatctagaaatagtaaaatagagatagaatttcaatctcaatcttttctacaacaacaagttagatcaatggttggttgtttaaaatatgtaggtgaaaaaaaatggactctaaaaaaattcaattttgttatgaaatcaaaaaaaaggattttgtgcgcaccaccagcaccacctgaaggtctttatttagcgagagttatttattaat

SEQ ID NO: 292827 - DNA, 787 bp, Unknown
  Bacterial polypeptide expressing nucleotide sequence isolated from the Sargasso Sea
aatgaggattgctcttcttgttgagtatgatgggaccaattattttggttttcaaaaacagaaacttaatcagactaaaaccattcaatatcatattgatcaatcaataaaaaaaattgcaaatcatgatatcaaaactgcatgcggaggtagaaccgatacgggtgttcatgcttgcaatcaggtaatacattttgatactagtagcaaaagatcagattttaactggctcaaaggaattaatacctatttaccgcctgatatttttgtaaagaatatatttcatgtagataatgacttccacgctaggtttagcgtcatttcaagaacatatagatatgtaatatataataacattttatattctccgttaaattcaagatatgctcttcattatcaaaatatgatagatgtcgaaaaaatcgagaaatcattcaagtattttatcggtgaaaatgattttagctcattcagaggttctggatgttcatcaccatcatcaataaaaaatatcaaatcaattacaataaaaaaaaataaggacaagatttatatagaaattactgcaaacagttttttatatcatatggtaagaaatatggtaggattctttattgatattggtattggtaaaatttctcttgtaaatgttaaaaaacttattcatgttaaagatagaagaaagcttagcaagactgtttctccatgtggactgtttttgacaagagtagattatccatcaaaatataaaattaaatgtgataatcaatatcgttttataatttaa

SEQ ID NO: 292828 - DNA, 767 bp, Unknown
  Bacterial polypeptide expressing nucleotide sequence isolated from the Sargasso Sea
tggttggctggcaaagcaaaaagaaggaatttctgttcaaggcagtttagaagaagctgctaaaaatatttttaatcaagaatttgaaattcaaggttccggtagaactgatgctggagttcatgccctaggacaagtagctcacataaatcttcctaaaagtcacagattaacctcaagacatccgttttatataatctctgctttcaactcatatttaaggaaatctaatattagagtagtttctgctaaacaagttaaatcagagtttaacgctaggttcagtgcaacaaaacgttattataagtatagaattttatgccgtgctgcaccacctggcattgaaaaaggaaaggtttggcattcaaggaaaaagttaaatattcgattaatggaagaaggaactaaatacctaattgggaaacacgattttacaagttttagaactataaactgtcaagccaaatcccctattagaacattagataaaatatcactttcaagtataggtgatgaaattataataaatgtatcagcaaaaagttttttacatagtcaagtaaggataattgttggaacaatttataatgtaggtgaggaaacattaaagcctaagaatataaaaagcattcttgaaggcaaagatagaaatcttgcagggcccactgctcctgcagaaggcctgtatcttgaaaaaatagaatatccaaataatttactcgatgacaactggccaataatttatgacagcaatcagtacaattgaa

SEQ ID NO: 292829 - DNA, 625 bp, Unknown
  Bacterial polypeptide expressing nucleotide sequence isolated from the Sargasso Sea
ctttcaggagaaaaagtaacaatttttggtgctggagaaacagatgcaggtgttcacgcttatggtcaagtagcctcttttactattcataaaaaaatggaaacaaatgtaattagagatggtttgaatcaacatttaagacctcaacctatttctatccaaaaggtagaactagttaaaaatgattttcatgcaagattttctgcaaaaaaaagatggtatcaatacaaaataattaatagaagacctcctctaacgattaatgcaaatagagcttggtgtgtttataaaaaaatagatgttgcacaaatgaaaagcgaatcatccttttttttaggaaaaaacgatttaaatgcatttcgttcttctcattgtcaatccaaaagtagtataaagacgattgatagcattcaaattaagaataatgatgatcaaattatttttcaaattagtgccaaatcttttttacactctcaggtaagaataatggttggtacattagttgatattgcaaaaggtaatattaataaatcaattatagatattattaattcaaaaaatagagaaattgcaggtcaaacagcacctgcacatggtttatatttaaaaaaaattgattattaat

SEQ ID NO: 292830 - DNA, 796 bp, Unknown
  Bacterial polypeptide expressing nucleotide sequence isolated from the Sargasso Sea
tttgaaaagggtagctttattagtccaatatgatggatctcattattcaggttggcaaaaacaaaagaatgcaactactgttcaagaaattttagacagtgctctcttaaaaattacaaatcacaaagtaaagacttttgcagcaggaaggactgatgctggggttcatgcatcaggccaagtagtacactttgatgctgattgcgttattccgggaaatagttattctgatgtcttaaatagtattttaccctcaactattaggatcttggaatcagttgaggttcaagatagttggcatgcatgctattcagcaacgtatagacattatcgatatgtcattaataacagtaaattccctaatttgttcatcaataattggtcatggcatagatatcaaaaagcattagatgaagttttaatgttaaacgcatccaagacaatggaaggagaacatgatttttttgcttttcagaaaagtggtagtaatagaacaaactctgttacaaaaataaaaaatattgatataaaaagagtagaagatttgattttagttgatattaaagctactgggtttttgtatggaatggtgcgtttaattattggtcaactagttttagttggagaaaaaaaaatatcgccagaaatttttacagacagatgggtaaacaaaaagaaaaatgatgttaaagaatctgctccagctaaggggttatgttttgtaaatgctgtttatgaaaaaaatgtttttaaaaaggttaataataatgattttttcccctttattcttaattaa

SEQ ID NO: 292831 - DNA, 554 bp, Unknown
  Bacterial polypeptide expressing nucleotide sequence isolated from the Sargasso Sea
aatgcccaaatacaaaataaagattgagtacaatggctgcgattatgtaggctggcagcgccaagataatggcccttctattcaggcggcaattgaaggagccgttttgggcttttgtagagaaaaagtggaggtggtagcagccggcagaaccgattctggtgttcatgcgttaggtatgatcgcacattttgaattgataaataatgtttatgaccctgctaccgtcagaaaagcacttaacttccatctcggcgcgcagcctataaaaattattgatacagagatcgcgccggatacctttcacgctcgcttttctgcgatagaacgacgttatttatacagaattttaaacaggcagtcgccacccgctttagatactgggagagtttggtacattcctcgcaaacttgatattgttaagatgaaccaagcagctgaattgctgctaggagaacatgactttagcagttttagagctaaagattgtcaagcaacctctcctgtcaaaacactgaatatgctaaaggtaagccaaagcaagacgaaataca

SEQ ID NO: 292832 - DNA, 706 bp, Unknown
  Bacterial polypeptide expressing nucleotide sequence isolated from the Sargasso Sea
cattgttgagcaagcgatatcaaaggtagctaattctaaaacggagattgtttgtgctggtcgaaccgatgccggagtgcatgctagaggtcagataattcattatgacaccgatgcaaaaaggacaaattatgaatggcaaactggcgttaatagtcatcttcctgatgatataaatataaattttgtaaaagaggtgacggaagatttccatgcaagattttcagctaccaatcgtgcctatcagtattttatattcaacagtagtaatagatcctcactactcagagatagattttggtggatacgagacacattagatgaatctttgatgcaagaaggggcaaaaattctagttggagagcatgattttaactcttttcgagcctcatcctgccaagcttcctcacctataagaacaatcaaaacactggatgttcaaagaaatgatcagtttcttattatctcaataaaagcaaatgctttcttacagaaaatggtgaggaatatagttggctcccttgtgcatattggtcttggggaaaaaacaaatgattggctcattgatgttcttgcggtaagagatagaaagagagccggtattacagcaccatcgcatggattatgcttaatcgaagtcgattatccaaaaaattatgaaattccaaaaattgataatcgtgatattttcatgcatatggtttag

SEQ ID NO: 292833 - DNA, 901 bp, Unknown
  Bacterial polypeptide expressing nucleotide sequence isolated from the Sargasso Sea
tttgagctccgaaccctcgtctgcaactcctgagtccccggtccttcgtcggatcgccctcagcctgcagtacgagggttctgccttttgcggatggcagcgacaacgcaatggccacagcgttcaggctcaactggaagcggccatcgagcagctggatccgcaccgaccgatccagaccttcgctgcggggagaaccgacgccggcgttcatgccgcggggcaggtggtgcatttcgactgtggtgacaggattcccccctccaaatgggctccagccctgaacggacggttgccgtccacaatccgggtgagggagtcggtgccgcggcccatggattggcacgcctgctactcggccacctaccggcgctatcgctacaccattcacaacggtcggcggcccaacctgttcctcgccccctggagttggcaccgctatcggctccggctggatgagtcccggatgcgggacgccctcaacggcatgctcgggctccatgacttcagcgcgttcatgcgggccggaagccggcgggcccacgcccgcaccacggttcaggaggtggagcttgtgcgccagggcgacatacttcgcgtcgagatccaggccagtgggttcctttacggcatggttcgcctgctgatggctcagctggtggccgtgggcgaacaccgtctgtccgtcggagatttcgagcagcgctggcgtcagcgacgacgccacgaggtgaaggaagccgctcctggccacgggctgtgcctgctcagggcggggtatgaggacgacatcttcaccagagcaggctggtacgattcccaaccgtggttttttcttgcggagagtgatcccccaccggatcctccgcctctgccggaagcaagcggatctgaactctga

SEQ ID NO: 292834 - DNA, 742 bp, Unknown
  Bacterial polypeptide expressing nucleotide sequence isolated from the Sargasso Sea
tatgttcagatatcaaattctaatagaatatgttggttcttcttttataggttggcaggtacaaacaaaaggcaaaactatacaaggattaattcaaaaaaaaatttcatatcttttaaatgaaaaaattacgcttattggctcgggaagaacagataccggtgttcatgcaattgagcaatctgcacactttgatatcactgacaaaatccaaaatttaaataaatttttaaaatcaataaattattttttaaataaatacgaaatagctattttaaaaataaaaaaaagaaatataaaatttcatgcacgtttttctgcgaaagaaagaatttataaatatgttattttcaatcaattgagtaaacctatccttcaaaataagcgaggatggtttgttattaaaaagctcgatttggagataatgaaaaaagcagcaaaaaagttaattggaactcgcgatttttcaacttttagagcatctggatgtaatgcaaagagcccaataagatcaattaaatcagttaaaattaaaaagacaaaaaacaaaattgaattagagtttagatctcaatcatttttaaagcaacaagttagatcaatggttggttgtttaaaatatattggtgaaaaaaagtggacattaaaaaaatttataagcgttattaaattaaaaaatagaaatttatgtgcaccgccagcaccagcggaaggattattcttgaaaaaagttttatactaa

SEQ ID NO: 292835 - DNA, 736 bp, Unknown
  Bacterial polypeptide expressing nucleotide sequence isolated from the Sargasso Sea
atgtataattataaaattattgttgaatatgatggtacgaattttgttggttggcaacagcaagaaaatggtaaatcaatacaagctgctctacaagaggcagcatttaaactttcaggagaaaaagtaacaatttttggagctgggagaacagatgcaggtgttcacgcctacggtcaagtagcctcttttactattaataaaaaaattgaaacagatgtaattagagatggattaaatcagcatttaaggcctcacctaatttcagttcaaaaggcagaattagttgatagtaaatttcacgcaagattttctgcaataaaaagatgctacgaatataaaataataaatagaagacccccactaactattgatacaaatagagcctggtgtgtttataaaaaaattaatgttgaaaaaataaagactgagtcatcttcttttttaggaaaacatgatttaaatgcatttcgttctgctcattgtcaatcaaagagcagtgtaaaaacaattgaagatattcatattaaacatcaaggtgagcaaattatttttaatatttgtgcaaaatcttttttacattctcaagtcagaataatggtaggtacattggtagatattgctaaaggcaatattaataaaacaattatagatattattaattcaaagaatagagaaattgcaggtcaaacagcaccagctcatggtttgtatttaaaaaaaattgattattaat

SEQ ID NO: 292836 - DNA, 569 bp, Unknown
  Bacterial polypeptide expressing nucleotide sequence isolated from the Sargasso Sea
aatggattctaggatagctttaggggttgagtatgatggaactaactatttcggctttcaaaagcaaaacactacaaaacaaaccgtacaaggctctctagaagaatcgatttcaaaggttgcagatcataaagtaaaaactttctgtagtggaagaacagatgcgggtgtgcatgcctttatgcaagtcatgcattttgatacaaaggccataagatcatctattgaatggaccagaggtatcaattcttaccttccaaaagatattagagttttatgggcaaaagaaatagatgagagttttcatgctaggttctctgctaccaaaagatcatatatttacaatattcttaatcattcgactccctcggcgctttgggcagataagtcgctatatgtacctattagattagatatacagtcaatgaaaaaaggctctaaatatctgataggagaacatgattttagctcctttagaggttcaggatgtcaatcaaagacacctattagaaacattcaagaaataaaaatctcaaggaatgatgattttgttacattggaaattacag

SEQ ID NO: 292837 - DNA, 742 bp, Unknown
  Bacterial polypeptide expressing nucleotide sequence isolated from the Sargasso Sea
catgttcagatatcaaattctaatagaatatgtgggaacttcttttataggatggcaagtacaaacaaaaggtaaaactatacaaggattaattcaaaaaaaaatctcatatcttttaaatgaaaaaattacacttattggttcaggaagaacagataccggtgttcatgcaattgagcaatctgcacattttgatgtcactgaaaaaatccaaaatttaaataaatttttaaaatcaattaattattttttaaataaatacgaaatagccattttaaaaataaaaagaaaaaatttgaaatttcatgcacgtttttctgcgaaagaaagaatttataaatatgttattttcaaccaattaagtaaaccaatccttcaaaataagcgaggatggtttgttattaaaaatctcgaattagagataatgaaaaaagcagcaaaaaagttaattggaactcatgatttttcaacttttagagcatctggatgtaattcaaaaagcccaataaggtctattaaatcagttaaaataaaaaagacaaaaaacaaaattgagttagagtttagatctcaatcatttttaaaacaacaagttagatcaatggttggttgtttaaaatatattggtgaagaaaagtggacattaaaaaaatttataagtgttattaaatccaaaaatagaaatttatgcgcaccgccagcacccccagaaggattatttttgaaaaaagtcttatactaa

SEQ ID NO: 292838 - DNA, 742 bp, Unknown
  Bacterial polypeptide expressing nucleotide sequence isolated from the Sargasso Sea
atgtatagatatcaaattttaatcgaatatgttggtaccccttttataggatggcaaatacaaaaaaagggaaaatcagttcaaaaaataattcaatcaatcttatcaaaactattgaatcaaaaaattattttatattcagcaggacgcacagatcgcgaagttcatgcaagcgagcaatcagctcattttgatgttaaaagtaaaattcaaaatactgataaaatgattaaatctctaaatttttttttaaataaaaaaaaaatttctataattaatattattaaaagaaataaaaattttcatgcaaggttttccgcaaaagaaagagtatataaatattttattattaatcgtttagctactcctgttatagaaaatgaaagggcatggcatataagaaaaaaactagatattaaattattaaaaaaaggagctaaaaaattagaaggaacacatgactttagcacaatgagagcaaaaaattgctatgctaaaagtcctataaaaaaaattaataaaataactataaaaaatataaataaaaaaattcaaattgaatttagatcaaaatcttttttaagaaatcaagttagatcaatggttggatgtttaaagtatttggcagaaaataaatgggacattaaaaaatttgaaaatgttttaaaatcgaaaaaaagaaaaaactgtgcgcctccagcaccagcttgcggattatatcttgaaaaaattatctattaat

SEQ ID NO: 292839 - DNA, 808 bp, Unknown
  Bacterial polypeptide expressing nucleotide sequence isolated from the Sargasso Sea
catgggtacctatgctttaggtgttgaatataacggcgaaaattttagcggttggcaaaagcagttagatcgcccaacgattcagggctctttagagaaggctttgagtcaagtggctgattctgagatccagctttcggctgctgggcgaacggacgctggggtacacgcgatgggccaagtcgctagttttcgaagtgcagttactagaagttcagaacagtggcgtcgaggcgtaaactctctcaccccgaattcaattaatgtggcctgggtaacgggggtcgaagacgattttcacgcaagattttcggcaacggctcgaaggtatctttatttatttatggaccgggtggaggatacacatgccaagcagttagcctggagtgtagcttctctgaatgccgatttgatgcactcgtcggcccaatttttggttggagaacatgattttacaactttcagaggttctggctgtcaagctgagacaccatacagacgaatcaaccactgtgtggtcaaaagaattggagatcttgtcgttgtagatattgaggcaaatgctttcttattgcatatggttagaaatatcgtttcatgcctcagccagattaaagaagatagccgtcccgattgtttgctggagttgcttagtttaagagatcggactcaaataggtatgactgctccctcatcaggcctctatctcttcgacgtccgatacccagactacgactttcctttgcctcgtttaccatctcttttgttaggcgcttctcgagaattttcgattagaaacgagaaataa

SEQ ID NO: 292840 - DNA, 457 bp, Unknown
  Bacterial polypeptide expressing nucleotide sequence isolated from the Sargasso Sea
atgaacaggttcaaaataaaaattgagtatgatggcaccccgtttgtcggatggcaaagacaagaaaatggacaatcagttcaagggtgtattgaaaaagcaataagtaatatatttgaggaaaacataactatttttggggctggtagaacagatgcaggtgtccacgcaatggggcaggtcgctcattttgatgttacagacaaattacttgaaccatatgtgattaagaatgcattaaacgatcatttgaggccatttcctatttccatattggaagtagagaaagcacataatgattttcatgcaagatttgatgcaactcagagaaaatacctttatagaatagtaaacagaaagtcaccactcactattgagaagggaagagcttggcaagtacataaagacattgatgttgatttgatgaaggaatgcattccttcaattgagggtcagc

SEQ ID NO: 292841 - DNA, 742 bp, Unknown
  Bacterial polypeptide expressing nucleotide sequence isolated from the Sargasso Sea
catgttcagatatcaaattctaattgaatatgttggatcttctttcataggttggcaagttcaaacaaaaggcaaaactatacaaggattaattcaaaaaaaaatttcatatcttttaaatgaaaaaataatacttattggttcgggaagaacagatactggtgttcatgcaattgagcaatctgcacattttgatgtcactgaaaaaatccaaaatttaaataaatttttaaaatcaattaattattttttaaataaatatgaaatagccattttaaaaataaaaagaaaaaatattagatttcatgcacgtttttctgcaaaagagagagtttataaatatgttattttcaatcaattaagtaaaccgatccttcaaaataagcgaggatggtttgttattaaaaatctcgaattagagataatgaaaaaagcagcaaaaaagttaactggaactcatgatttttcaacttttagagcatctggatgtaatgcaaagagtccaataagatcaattaaatcagttaaaattaaaaagacaaaaaacaaaattgaattagagtttagatctcaatcatttttaaaacaacaagttagatcaatggttggttgtttaaaatatattggtgaaaaaaaatggacattaaaaaaatttacaagcgtaattaaatcaaaaaatagaaatttatgtgcaccgccagcaccagcagaaggattatttttgaaaaaagttttatactaa

SEQ ID NO: 292842 - DNA, 736 bp, Unknown
  Bacterial polypeptide expressing nucleotide sequence isolated from the Sargasso Sea
aatgcctaattataagattactgttgagtatgatggcactaattttgttggttggcaacagcaagcaaatggagtttcagttcagtcatcattgcaagactctgtgtttaagctctcaggtgaaaaagttgttgtgtatggagcgggaagaacggatgcaggtgttcatgcttatgggcaggttgcttcttttgcaatttcaaaaaaaatctctaccgatgtaattagagatggcttaaatcaacatttacggcctctaatgatctcagttttaaaagcagagcaagtagataatgattttcatgcaagattttcagctaaaaaaagatggtatgtatataaaataattaacagaaggtctccattaacaatagatgcgaatcgtgcatggtgtgttcataaaattttagatacaaaaaaaatgcaaagtgaatctgcttcatttcttggtaaacacgacttaaatgcttttcgttctgcacattgccaatcaaaaagcagtatcagaactattgatgatataattatcaatattaaaaacgagattatatttattgaagttgtagcaaaatccttccttcattcgcaagtaagaattatggttggcaccttagtagatattgctaagggaaatataaatatatccatattagatattataaattctaagaacagagaagctgctggtcaaacagcacctgcaaatggcctatatttaaaaaaaattgattattaa

SEQ ID NO: 292843 - DNA, 470 bp, Unknown
  Bacterial polypeptide expressing nucleotide sequence isolated from the Sargasso Sea
tataaaaattaaaaaaaaaaatttgaaatttcatgcacgtttttctgcaaaagagagagtctataaatatgttattttcaatcaattaagtaaaccgatacttcaaaataaacgaggatggtttgttattaaaaatcttgagttagagataatgaaaaaagcagcaaaaaagttaattggaactcacgatttttcaacttttagagcatctggatgtaatgcaaagagcccaataagatcaattaaatcagttaaaattaaaaaaacaaaaaacaaaattgaattagagtttagatctcaatcatttttaaaacaacaagttagatcaatggttggttgtttaaaatatattggtgaaaaaaagtggacattaaaaaaatttgcaagtgtaattaaatcaaaaaatagaaatttatgcgcaccgccagcaccagcggaaggattatttttgaaaaaagttttatactaat

SEQ ID NO: 292844 - DNA, 769 bp, Unknown
  Bacterial polypeptide expressing nucleotide sequence isolated from the Sargasso Sea
ctgatttcctacgacggcaccaactacaacggctggcaggtccagccgaaccaacccaccatcgagggcactttagaaaatgccctgcttcgtctcaccggccaagttgtcaaagttcatggttccgggcgaaccgatgccggggtccacggtctgaaccagaccgcgagcttttctgtcgtttcagaattcaatcctgaaaaatggcgtatcgcactcaacggggttctgcctgacgatctggtggtcaagcatgtccagcaggttccctcggattttcatgcccgacactcatcggtcgggaagcgctatcgttatctcgtctgcaacctgccctaccgttctcctttcagccggaacaaaagctggtgggttcaaaaatccctgaacctgaaagccatccgtgaagcatcttcgtatttagttggcaaacatgatttttccgctttccgtgccgcagcctgcagttcacccaatcccaacaaggatctgcatgaaattttgtgtgacgtgaaaccgtggcttcatgctaacctgtgcttcgagttggaagcagattcctttctccaacacatggtaaggatcatggtcggaacattggtgcaggtgggaaccggaaaacttaagccggaacagatgaaaggaatcctggaaagccgggaccgcacgcaagccgggcttactgctccggcccatgggctctatgcccttgctgtgcgttatcccgaagacagtattgaatggccatatatattgatggattcgtaaa

SEQ ID NO: 292845 - DNA, 742 bp, Unknown
  Bacterial polypeptide expressing nucleotide sequence isolated from the Sargasso Sea
atgttcaattatcaaataaatgttgaatatttaggaaccaattacgttggatggcaaattcaaaaaaatgggatttctgttcaatcaatagttcaaaaagctctaagtaaagtattgaggtcaaaaattaacatagttggatcgggtcgaacagactccggtgttcatgcgaaggctcaaagtgcaaattttttttcaaaaaaagagataaaagataaatataaatttttaaactctgtaaatttttttctgaaaaataaatcagtgtcgataattaaaattaatagaaaaaatattaattttcattctcgatattccgtaaaaaaaaaaatttataaatatattattttcaatcgctcaaccccttcgccgatttacgaaaatagatcatggtttattaaaaaggaactaaaaataaataaaatgaaaaaaggaattaaatttttcttaggcacacacgatttctcatcaatgagagcagcatcttgttcagctcttaaccctacaaaaacaataacgaaagcagatataaaaaaaagaggtaaaaaaataattataattttcgagtcaaaatcttttttacaaaagcaagtaagatcaatggttgggtgcttgaaatatgttggagaaaataagtggaaaccagaaaaaataaaatcagtaataaagcaaaaaaaaagagaactttgtgctccaccagctccacctgatggattatatcttgaaaaagtactctattaat

SEQ ID NO: 292846 - DNA, 742 bp, Unknown
  Bacterial polypeptide expressing nucleotide sequence isolated from the Sargasso Sea
atgaatagataccaaatacttattgagtatgtagggacaaattttagaggatggcaaattcaaaaaaagggcccaacaattcaaggattaattcaagaaaaattatcaaaattattaaaagaaaaaattgttttacatggtcaaggaagaactgatgcaggggttcatgcatttgagcaatctgcacactttgattgcaaaaataaaataactgataaaattaaatttttaaaatccattaatcattttttaaatttaaaggacattgcaattaaaaatattaaaaaaagaaataataaatttcatgctagattttcagcaaaacaaagaatttataaatactttatttttaatcaaataagccaaccaataattgaaaaaaatagagcatggcatgttcgtaggcctttaaatttagaattaatgaaaaagggtgcaaaaaagttattaggaactaatgattattcaacttttagatcttcaagctgtcacgctaaaagtccaattaaaactattaaatcaattaaaattaaatcatcaaaaaataaaattgaatttcaatttagttctcaatcatttttacaacatcaggttagatctatggttggttgtttaaaatacttgggagaaactaaatgggatttgaaaacttttgaaaagagatttaagtcaaaaaaaagaacactgtgtgctcctccagcaccaccaagtggtttatttttatttagagttctttattaat

SEQ ID NO: 292847 - DNA, 636 bp, Unknown
  Bacterial polypeptide expressing nucleotide sequence isolated from the Sargasso Sea
aaaaaatcttaaaagaaaaaattattttaattggctcaggacggacagatactggggtacatgctattgaacaatcagctcattttgactgtaaaagtgaaataaaaaatttaagattatttttaaaatcaattaattatttcataaataaaaagaatatttctatattaagtataactaagaaaaattttaaatttcatgcaagattttcagctaaacaaagaatttataaatatttaatattaaatcgtattattaaaccatcaattgaaaaagaaagatgttggcatgtttcaaaaaaattaaatatagatttaatgaaaaaaggtgcagaaaaattgactggaactaaagatttttcaacttttagatcttctagttgtagtgcaaaaaatgcaataagaaccatgaaatcagttaagataaaaagaaaaaaagatttaatagaaattaaatttaaatctaaatcctttcttaaacaacaagttagatctatggttggttgtttaaaatatttaggagaaaataaatgggatttgaataaatttgagataattcttaaatccaaaaaaagaactttgtgtgcaccaccagcacctgcttgtgggttatttttagaaaaagttatctactaag

SEQ ID NO: 292848 - DNA, 739 bp, Unknown
  Bacterial polypeptide expressing nucleotide sequence isolated from the Sargasso Sea
atgactcgatacaaactggtcgtggaatatgacggcaccgactatgtcggctggcagcgccaggacaatggcccctcgatccaggcggtcctggaggacgctgttcgatctttttgcgccgaggaggtcgtggtgcacggcgccgggcgaacggatgccggtgttcatgcggccggccaggtggctcatgtggatatcgcgaaaccggtgagcggcgagacggtgcgcgacgcgatgaaccatttcctgctcgacgtgtcggtctcggttctgcaggccgaggcggtcgatgaggattttcatgcgcgctacgcggccgcggcccggcattactgctaccgtattctcaatcgccggtcgcagcccgcgctcgatgcggggcgcgtatggtgggtgcgggtggccctggatgccgacgcgatggccgacgcggcgcaggagcttctcgggcatcatgatttcacctcgtttcgcgcgaccctgtgccaggccaagtcgccggtgaaaaccctcgaccggctggatgtcacgcgccaaggcgaagaggtgatcatcgaggcttcggcgccgtcgttcttgcatcatcaggtgcgcaacattgttggcaccctgaagctggtgggcgagggcaagtggaaccgcgccgatgttcgcgatgcgcttgccgcgcgcgaccgcgcagccggtggtccgacggccccggccgaggggctctgcctcgtccgggtggagtactgag

SEQ ID NO: 292849 - DNA, 742 bp, Unknown
  Bacterial polypeptide expressing nucleotide sequence isolated from the Sargasso Sea
aatgtttcgttatcaaattttaatagagtatgtcggcacctctttcataggatggcaaattcaaaaaaaaggaaaaactatacaaggtgtaattcagaagaatatttcaaaacttataaaagaaaaaataaccgttaacggttctggaagaacagatacaggcgttcatgctattgaacaatcagcacattttgaatgcacaaatagaattcaagattttaaaaaatttttaaattcaattaattattttttaaataaacatgagattgctattttgaaaattaaaaagcgaaatctgaattttcatgcacgtttttcagcaaaagaaagagtctataaatatgttatttataatcaattcaccaaacctataattaaaaataaacgtggatggtttgtaataaaaaaacttgatctagatagtatgaaaaggggagcaaaaaatttagttggaaataaagatttttcaacatttagagcttctgggtgtaatgcaaaaagtccgattagattaatgaaatcgataaaaattaaaaaattaaaaaataaaattgaatttgaatttagatcacaatcatttttaaaacaacaagttagatcgatggttggatgtttaaagtatttaggtgaaaaaaaatggacactaaaagaatttgtaagtgttattcagtcaaaaaatcgtaaattatgtgcacctccagcacctgcagagggactatatttattaaaagttaattattaa

SEQ ID NO: 292850 - DNA, 742 bp, Unknown
  Bacterial polypeptide expressing nucleotide sequence isolated from the Sargasso Sea
atgcatagatatcaattaaagatagaatatgttgggtcaaaatattttggctggcaaattcaacaaaaaggtaaaacaattcaaaagactattcaatcagtattaaaaaaaatatttaaaaaaaaaattcaattatatggttctggacgaacagatacaggtgtacatgcaatagaacaatctgcacattttgaaactgaaaaaaaaatccacaatttaaagaaatttttagaaacaattaatttttttttaaataataaagatatatcaattttagaaattaataaaaaatcctcaaatttccatgctagattttctgcgaaagaaagagtttataaatacattatatataacagatcaagcaaactatctttgaacaatttaagaggttggcatattaaaaaaaaattagatattaatttaatgaaaattggtggtcaaaaactaactggtactaaaaattttggaacttatcgagcttctaattgcggatctaaaagtccaattaaaactttaaaatctgtaaaaataaaaataaaaagagaaaagattgaaatttattttaaatccaaatcttttttaaagcaacaagttagatctatggttggatgtttaaagtatttaggtgaaaaaaaatgggatttaaaaaaatttataaaagtaatgaattctaaaaaaagatctttatgtgccccacctgcaccacctcatggattatatttagaaaaagttatttattaat

SEQ ID NO: 292851 - DNA, 634 bp, Unknown
  Bacterial polypeptide expressing nucleotide sequence isolated from the Sargasso Sea
tggcgtccatgcgataaaccaagtcgttcattttgattccccggttaatagaggagaaaaagcatggtcgacgggcgttaacagccttctgccaccatcaattcgtgttatttgggctcaagatgtcgatagcgggtttcacgcaaggtttagtgctatggctcgcaattataaatacttagtttactgtcacaaaacagagcgtcccatgctctggaagaaagccgtgcgggtttcgcagaaattagatatttctgcgatgaacgaagctgctgcgtgtttaattggagagcatgacttttcggcatttagaggagcgggttgtcagtctaaatctccctacaggagtgttatagaagcaaattggacgacaagaggagcttttttaatttttagtatcaaagcgaatgcttttttacttcacatggttcgtaatattgtgggttcctctcttgatgtaggtaagggtattaaagaaagtcattggtttttagaactattagatggaggtgaacgttcaagcgccggagtgactgcgccctctgatggtttgtatctagtagacgttgattatccgaaagcttatggcattccgaaaggtatgacattgccactatttttttcggaaggatag

SEQ ID NO: 292852 - DNA, 742 bp, Unknown
  Bacterial polypeptide expressing nucleotide sequence isolated from the Sargasso Sea
atgtttagattccaaatcataatagagtacgatggtacaggttatgttggttggcaatctcaaaagaatggaaaatctgtacaaaaagaaattgaaaaaattttatcaaaaatattgaaaataaaaataaaagttattagtgcaggcagaacagatgccggagttcactcaacaaatcagtcagcacattttgatattaaaaataatatattaaacaaatatcaatttatttcatcaattaatcattttttaagcaaaaaaaatatttcaataaaaaaaattataaaaaaaaataataaatttcatgcaagattttctgcaaaggagagagaatataaatatataattcttaatcgtaacgcaccaccagtactcgataaaaataaagtttggcacttaagatctaagctcaatatgaatttattaaaaaaagctgcaaaaaaattaattggaacacataattttaatgcatttagatcatcaaactgtcaagccaattcacctgttagaactttaaaaaaattaaagataacaaaaaaaaatgaaaaaatattttttgttttacgctcaagatcttttctcaaaaatcaagttagatcaatcgttggttgtttaaaatatgttggtgaaaaaaaatgggatgttaaacatttagaaaaagttttaaaatcaaaaaatagaaaaaattgcgcaacacctgcacctgcccaaggattgtatctatctaaagttatttattaat

SEQ ID NO: 292853 - DNA, 742 bp, Unknown
  Bacterial polypeptide expressing nucleotide sequence isolated from the Sargasso Sea
aatgcatagataccagttaaggatagagtacgtaggtacaaagtatttaggttggcaaattcaaaaaaaaggtaaaacagttcaaaaaaccatacaaatagttttaaaaaaaatttttaataagaaaattcaattatttggatctggaagaacagatacaggagttcatgcaattgaacaatctgctcattttgatttagacaaaaaaatctccgatttgaacaaatttttagaaacaattaatttttttttaaaaaataaagacatatctatattaaaaataaataaaaaaaataataaatttcatgcaagattttccgcaaaagagagaatttataggtatgttatttttaataggtcaagtgggttatctttaaacaatttgagaggatggcacataaaaaaaaaattagatattaaattaatgaggattggtggcaaaatgcttttaggcactaaagattttgcaacttttagagcttctaattgtggagctaaaagttcgataaaaactcttaaatctgttaaaatacaagtcaaaggagaaaaaattgaaattcaattcaaatccaaatcctttttgaaacaacaggttagatcaatggttggttgtttaaagtatttaggtgaaaaaaaatggagtttggaaaaatttaagatagttatgaattcaagaaaaagatctttttgtgcaccacctgcacctcctcatgggttatatttagaaaaagttatttattga

SEQ ID NO: 292854 - DNA, 492 bp, Unknown
  Bacterial polypeptide expressing nucleotide sequence isolated from the Sargasso Sea
aatgaatagataccaaattttaattgaatatgttggcacaggatttattggttggcaaattcagccaaaaggaaaatcagtccaaaaattaattcaattgaaaatatcaaaactactgaaagaaaaaataaaattagtaggctcagggaggacagatacaggagttcatgcaatggaacagtctgctcactttgatacaaaaagtaaaattgaaaatttaaataaatttttaaaatcaattaatttttttttaaactctgaattagtttcaataaaaaaaataaaaaaaaaaaacctaacttttcatgcaagattctctgcaaaagagagagtttataaatatataatctttaatagacttagtgttccatcaattgaaaaaggcagaggctggcatatcagtaaaaagttggatttaaaattaatgaaaaagggttccaaaaaacttttaggaaagcatgatttttcaacgttcagagctttcagctgcaa

SEQ ID NO: 292855 - DNA, 901 bp, Unknown
  Bacterial polypeptide expressing nucleotide sequence isolated from the Sargasso Sea
ttgagctccgaaccctcgtctgcagcccctgagtccacgatcccccgccggatcgccctcagcctgcagtacgaaggttccgccttttgcggctggcagcgtcaacgcaacggcaacagtgtgcaggcccagctagaggcggcgatcgagcagctggatccataccgcccgatccagaccttcgccgcgggacgaaccgataccggcgtccatgctgctggccaggtggtgcatttcgactgtggggacaggatcccgcctgccaaatgggcaccggccctgaacggacggctgccatccacgatccgggtaagggagtcagtgctgcggcccaaggattggcatgcctgctattcggccacctaccggcgctatcgctacaccattcacaacgggcggcgacccaacctgttcctcgccccatggagctggcaccgctaccaactccgattggatgagtcccgcatgcgggatgccctcaacggcatgctgggtcttcacgacttcagtgctttcatgcgggctggaagtcgtcgggcccatgccagaaccaccgttcaggaggtggacttagtgcgccagggcgacatggtgcgggttgagatccaggccagtggtttcctttacggcatggttcgcctgctgatggctcagctggtggcggtgggcgagcaccgtctatccggccaggatttcgagcagcgctggcgtcaacgccggcgccacgaggtccgggaagcagctccaggccatgggctatgcctgctcagagctggttatgagcaagaaatcttcaccagagctggctggtacgattgccaaccgtggttttttctggcggagagtgatccaccaccggatcctccgcctctgccggaagcaagcggatctgaactctgaa

SEQ ID NO: 292856 - DNA, 787 bp, Unknown
  Bacterial polypeptide expressing nucleotide sequence isolated from the Sargasso Sea
gatggaaagtcgtaagtatatcgttgctctaggactggagtacgaaggaacaaattacttaggttttcaaaaacaaaaaagcagtaagctaactattcaagggctgcttgaagcaggtctaaaaaaggttgctaaccaaccgataaagactttttgtagtggtagaacagatagtggagtgcatgcattaatgcaggtaattcatttcgaaaccaactctttcagaagagaagatgaatgggttaggggagtcaactcctatttaccgcacgatataagactactttggtctaaagaagtagaagaaagttttcatgctagattttctgctacggataggtcttatagatttatcataagaaatagtgatacaccctcagcgttgtggtcaaagagatcactttatgtacccaagaagttagaccatattgccatgaggaaggcttgtaaatacctactgggagagcatgacttcacttcttttagaggctctggttgccaatcaaaaactgcaatcaggaatatgaaaaaaattgagataataaaaaacaaagatttaatcatgattgatttaaatgccaatgcatttttactacacatggtaagagtaatagttggcactttgataatggtaggaaaaaaagagataaaaccattagacttaaagaaaatacttgaatctaaagacagaaagttggccggaaaaacagttgaatcatccggtctatactatgttggtcctaggtatcctaaaaacttcaatattccaaaaccgaagatttcttaa

SEQ ID NO: 292857 - DNA, 730 bp, Unknown
  Bacterial polypeptide expressing nucleotide sequence isolated from the Sargasso Sea
tttgttacgatataaaataattatacaatatgatgggacttcctttaatggatggcagatacaaaagggacatcaaactattcaaggtgaattagaaaaagcattaaaaaattttatgtcaaaagagattgttgtatatggctcgggaagaactgattctggagttcatgccttaggtcaggttgcccattttgatttatcaaaaaaaatagacccaaacatcttattaagagcaataaatgcgaatttaaatcattgtattagaataataaaatgtgaattagtagatagcgattttcatgcacgtttttctgcaaaaaaaagacattattattacagggtaagaactgacccctttttgcttgatcaccactatactcaccatatttcaagcattgatattgagttattaaacaatgcttcaaaattaattataggtcaacatgatttcacctcattcagtaagtataacgaaaaaatagagaaccgtaaatgtattatctatgaatcgatatggaaagattataactctatattaaattatcatattgttgggaaccgttttttgcatcatatggtgcgttatttagtaggtacaatgcttgaaattggaaaaaataaatatagcttaaatgaatttaaaaatttattaatagaacctcgtgaaagggtaaaaatttataaagcccccgctaaggctttagttttgaaacaagttgattatgaataa

SEQ ID NO: 292858 - DNA, 742 bp, Unknown
  Bacterial polypeptide expressing nucleotide sequence isolated from the Sargasso Sea
atgaatagataccaaatacttattgagtatgtagggacaaattttagaggatggcaaattcaaaaaaaaggtccaacaattcaaggattaattcaagaaaaattatcaaagttattaaaacaaaagattatcttgtatggtcaaggaagaactgatgcaggtgttcatgcatttgagcaatctgcacattttgattgtaaaaacaaaataactgatacaattaaatttttgaaatctataaatcattttttaaatttaaaagacattgcaattaaaaatattaaaaaacgaaataataaatttcatgccagattttcagcaaaacaaagaatttataaatattttatttttaatcaattaagccaacccataatagaaaaaaatagagcatggcatgttcgaaggcctttaaatttgaaattaatgaaaaagggtgcaaaaaaattattaggaactaatgattactcaacttttagatcttcaaactgtaatgctaaaagtcctattaaaactattaaatcaataaaaattaaatcttcaaaaaataaaattgaatttaaatttagttctcaatcatttttacaacatcaggttagatctatggttggttgtttaaaatacttaggagaaactaagtgggatttgaaaacttttgaaaagatatttaagtcaaaaaaaagaacactgtgcgctcctccagcaccaccaggtggtttatttttatttagagttctttattaat

SEQ ID NO: 292859 - DNA, 742 bp, Unknown
  Bacterial polypeptide expressing nucleotide sequence isolated from the Sargasso Sea
aatggcgaggtatcaagttcttattgaatatgttggaacgagttttagaggttggcagattcaaaaaaaaggctctactattcaaggattaattcaacaacatttatcaaaacttttaaaagaaaaaataattctaaatggatctggcagaacagatgcaggtgtacatgctcatgctcagtcagctcactttgattgtcaaaaaaaaattttagatttaacaaaatttttaaaatcaattaatcattttcttaataataaaggtatagcaattactcaaattaaaaagagaagtgaaaaatttcattcacgattttctgccaaacaaagaatttatagatatataatttttaatcaaataagtgctcctgtaattgaaaatggaagagggtggcatgtgaggaaaattctagatgttgatttaatgaaaaaaggagcaaaaaaattattgggaacgaatgactactcaacctatagatcatcaagttgtcacgctaaaagtccaatcagaacaattaaatcaatcaaaataagaacattaaaaaataaaattgaaatagaatttaaatcacaatcatttttacaacagcaagtaagatcgatggtaggttgtctaaaatatttaggtgagaagaaatgggatctaaaaacttttgacaaagtatttaaatcaaaaaaaagagtactgtgtgctccaccagcaccacccgaagggctttatttatatagagttatttattaa

SEQ ID NO: 292860 - DNA, 153 bp, Unknown
  Bacterial polypeptide expressing nucleotide sequence isolated from the Sargasso Sea
agagctggatagcagaactgttagcggcaaaggacagaacgctggcagcggcaacggcgaaagcggaaggactgtatctggttgcagtagattacccggaccggttcgacctgccaaaaccgcctatgggcccgctatttctggcggactaat

SEQ ID NO: 292861 - DNA, 742 bp, Unknown
  Bacterial polypeptide expressing nucleotide sequence isolated from the Sargasso Sea
atgtatagataccaaatattgatagagtatgagggcacaaaatttattggatggcaaacacaaaaaaaaggaaattctgttcaaaaaactattgaaataatactatctaggttacttaaaacacaagttaaattgataggagctgggcgaactgatgctggggtgcatgcattagagcaatcagcacattttgaaactacaaaaattattaataataaaaaaaagttattaaattctctgaatcactttttaaaaaaaaagttaatttcaattatttcaataataaaaaaaaaaaatgattttcacgcaagatattcggctaaatttaggatttataaatacataatatttaatagagagagtaatccatcaattttcatgaatagaggatggcacattaaaaataaaatagatattcaaacaatgaaaaaaggagcaaagttattagagggaaaaaaagacttctctactttcagagcctctacatgctcagcaaaaagtccaattaaaaccatgagttatgtcaaagtaaaaaaaagtaaaaatttgatcgtgataaaattcaaatctaagtcttttttacaacaacaggtaagatctatggttggatgtttgaaagttttaggagaaaaaaagtggaatataaaaaaatttaaagctgttttagtttcaaagaaaagaaaattgtgtgctccaccagcaccaccgtatggattatttctggaaaaggttatctactaat

SEQ ID NO: 292862 - DNA, 698 bp, Unknown
  Bacterial polypeptide expressing nucleotide sequence isolated from the Sargasso Sea
tttgactaggtttgtaggcatttgtcagtacgacggaaccctattttcaggctttcagtttcaaaaaaatgctcgctctgttcaagatgaactcgaaaaagcattaaaaagctttactaatctatcttcaagagttaattgtgctggcaggactgataaaggcgtacatgcattaagtcaaatatttgatttttcagttcaagatcccagcagaaatataaattggatagccgcattcaatagttcccttccagatgatcttgttgtcactcatgttgaggaagcatattctaattttcatgcaagattctccgcatatgaaagatcgtatgtctatttgataaaggttggagaaatcagatctacttttcttagaaactacgtttatcatgtaagcaaaccaatagacctcaaactattaagtaaagaacttaaaggaattattgggacacatgattttagtgcttttagatcatctcaatgctcagcaaaagatcctgtgaaaaccatctcaaaagcaagtcttgaagaaagagataacttaatttgtattgaatttattgcaaatgcttttcttcataacatgatcagaatactagttggtacattaattgagatttcaacaaatgcagattcagaatatacaataaccgaaataataagttctaaaaatagagctatggcaggaaaaactgcac

SEQ ID NO: 292863 - DNA, 742 bp, Unknown
  Bacterial polypeptide expressing nucleotide sequence isolated from the Sargasso Sea
aatgtttacatatcaaataatagttgaataccttggaacaaattttgttggatggcaaattcaaaagaatggtctttcagttcaagaagcactagaaaaagttttatccaagtttttaaaagaaaaaataagagttataggatctggacgtactgatgctggagttcatgcaaaagaacaatcagctcactttaaaacaaaacataagataattaataaaaatatttttataaattccattaatttttttttaaaaaaaaaccctatttctgttctgagtgtaaaaaaaagatcaaacaaatttcatgcaagacatagcgcaaaagaaagaatctataagtactttgttattaataggcattcatctttagttctagaaaaaaataaagcctggcatattaaaaaaaacctagatgtaaaagttatgcgaaaaggagcagaaattttgaagggtactcacaatttttcaacatttagagcttcctcttgtcaagccaagtccccaattaagacattaaaaaaagttgcaataaaaaaaagtaaaaataaaattgttttaatttttcaatctgagtcttttttacagcaacaagttagatcaatggtaggatctttaaaatatcttggagaggggaagtggaacttaaatgaatttagaaaagcatttttatcaaaaaaaagaacaatgtgcgctccaccggcaccagctcacggtttatatttaactaaagtaatttattaa

SEQ ID NO: 292864 - DNA, 689 bp, Unknown
  Bacterial polypeptide expressing nucleotide sequence isolated from the Sargasso Sea
aatgaacaggtacaaaataaaaattgagtatgatggtactccgtttgtaggatggcaaagacaagaaaatggacaatcagttcaaggttgtattgaaaaagcaataaataatatatttgaggaaaacattactatctttggggctggtagaacagatgcaggtgttcacgcaatggggcaggttgctcattttgatgttacagacaaattatttgaaccatatgtaattaagaacgcattaaacgaccacttgaggccatttccaatttccatattagaagtagagaaagcagataatgattttcatgcaagatttgatgcaactcaaagaaaatacctttatagaatagtaaacagaaagtcaccactcactattgagaagggaagagcttggcaagtacataaagacattgacgttgatttgatgcaggaatgcatttcttcgattgagggtcagcacgactttacaacattccgttcagctcattgtcaatctgatagtccaataaaaactttagacagtctaaaaattagccaatcagaagaaaatatctattttggtttcactgcaaaatcatttctgcatcatcaagttagatcaattgttggtagtttaaagttagttggagaaaaaagttggtcacttggcgactttgaaaaagcgtttaactcaaaagatcgctctaaat

SEQ ID NO: 292865 - DNA, 703 bp, Unknown
  Bacterial polypeptide expressing nucleotide sequence isolated from the Sargasso Sea
tttaaaattacaaatcatgtcataaaaacttttgctgcaggaagaactgatgcgggggttcatgcatcaggtcaagtagtacactttgacgttgattttgtaataccaggaaatcgatattcagatatacttaatagtcttttaccttcaacaattagaattttggaatcggtcgaggttaaagatggttggcatgcatgctattcagcaatgtacagacattatcgatatgttcttaataacagtaaatttccaaatttattcatagataattggtcatggcataggtaccaaaaagtgcttgatgaaggtttaatgtcagatgcatcaaagagaatggaaggagaacatgatttttttgcttttcagaaaagtggaagcaacaggacaaactctattacaaagataaaagaaattgatattaaaagagtagaggatttgatcctagttgatattaaagcaactggttttctgtatggaatggttcgtttgattgttggtcaattagtattagttggagaaaacaaaatatctccagaactttttacagatagatgggttaatagaaagaaaaatgatgttaaagaatcagctccagcaaaggggttatgtttcataaatgctgtttatgaagaaaaagtttttataaagacaaataaagaggatttttttcccgtattcttaattaaaggtttttcttaag

SEQ ID NO: 292866 - DNA, 472 bp, Unknown
  Bacterial polypeptide expressing nucleotide sequence isolated from the Sargasso Sea
tataataaaggtagataaagttagcaatgattttcatgcgagattttcggcaaaattaagacattatgaatataaaatcataaatagacgtcaacctcttacattagaaaaagatttattctggagagtagggaagcctttgaatattgaaaatatgcaaaagggcgccaattatttaataggaacccatgattttacaacatttcgatcaataaattgtcaatctaaaacacctgtgaaatctctagactcaattaccattaataaagagggagaaaaaatatatttctttttttctgcaaaatcatatctgcataaccaaatccgttcaattgttggatcacttaaattggttggtgagggaaaatggaatccagaaaaaattaatgaaattttaaactctaaagaaagaaaagaatgtggtccaatagcgccgtctgaaggactatattttaaatctgttgattattaa

SEQ ID NO: 292867 - DNA, 244 bp, Unknown
  Bacterial polypeptide expressing nucleotide sequence isolated from the Sargasso Sea
ggtggtagatatcaaagcgaatgcctttgtacatcatatggtaaggaacattgtcggcagcctgatggaagtgggggccgggaaccagccagagagctggatagcagaacttctggcggcgaaagacaggaagctggccgccgcgacggcaaaagcagaagggttgtatctggtgtcggtggattatccggcccgctacgatctgccggtgatgccgatgggcccgctgtttctggcggactaa

SEQ ID NO: 292868 - DNA, 580 bp, Unknown
  Bacterial polypeptide expressing nucleotide sequence isolated from the Sargasso Sea
tgcgatcttgataaagagtgggaaccatttcggctttcggaagcattaaactttcatttgagaccgctacccgtagcagtaattgactgtgctttagtcgataaagattggcatgcgcgcttttctgctttggaacgaaaatatttatttcggctacttgtccgtcgggctccgtcgactcacgaggctggtttagtatggcaaatagggcactctcttgatttgtctaagatggtagaagcatctaaatacttacttggcaaacatgattttacaacatttcgttcgtctatttgtcaggctaaaagtcctataaagaccctagatgaaattaaaattgatcgtattgagggttggtctggagacgagttcaggtttcaattgagagcgagaagttttcttcaaaaccaggttcgaagttttgtcgggactttagagcgtgtaggcgcaggtagctgggacccagtcgatgttaaaaaagctttagaggctaaggaccgatcagcttgtggtccagtttcaccgccgcatggattatacctgaccgatgttatgtataaaccagatcctttcaaatagt

SEQ ID NO: 292869 - DNA, 754 bp, Unknown
  Bacterial polypeptide expressing nucleotide sequence isolated from the Sargasso Sea
gctgtatacggatgtgcaacgccaacgtgaagtaccaagtgttcaagaacatcttgaaaaggcactatcgacagtagccaaccaacccattgaagtgcaatgcgctggacgtaccgatgctggtgtacacgctactgggcaagtagttcactttaattgcgatgcgccacgctcagagcgcgcttggacactcggtgttaatgcgaacttaccaaattctgttgcggttacttgggcaaagaacgtcagtgatgactttcatgcacgtttttctgctacccatcgccgctatcgttacgtaattcataatgcgaaaatgcgtcctgctattctccattccggtgtaacccatattcaccgcgaattagacgagaaaaaaatgcatgttgccgcacaagccttgctaggcgagcaagactttacctcgttccgcgcagcgctttgccaaagtaaaacaccatttcgcaacgttactgatgtaagcgtatatcgccaagggcgatacgttattatcgatattcgcgccaatgcattcttgcatcatatggttcgcaatatcacgggcgcgcttgttgagattggggcaggggagcaagatgtaaattggatagctcacttgttaagtctgaaagacagaagtaaatctgcagccacggcgaagccaaatgggttgtacttggtcgacgtcacttaccctgacgagtatggtttacctaagccgcctttaggaccactattccttccagaagcctaa

SEQ ID NO: 292870 - DNA, 766 bp, Unknown
  Bacterial polypeptide expressing nucleotide sequence isolated from the Sargasso Sea
aatgcctagatataaaataactattgaatatgacggtaaaaattataatggatggcaagctcaaaaaggattgagaacagtacaaaaagcaattgaacaaagtatagaaaaattttgtggtaaaaaaatatctatttatggagcgggcagaacagatactggggttcatgcatcaggtcaagtagcacattttgatttagatatggattctattcaagaccaaaaagataaagttggtaaattaactatgggtgttaattattacttgtctagaaattttgatagtgaaattagtataattagttccgagcaagttaacgaaaattttcatgcaagattttcagccaaatataggagatataaatattcaatattaaataaaagaacaagctcgcctttaaataaaaataactcatggcgtgttccgcttccgctagatatgaaatcaatgataagcgcgtcaaaattgttaataggaaagcatgatttttcgtcatttagatctgctgaatgccaatctaattcttctatcaaaacaatagatgatatttccctaattcaaaataaagattttatttatataaaagtaaaagcaaaatcatttcttatgaaccaagtaagaataatttcaggaactttagttgaaataggattaaataaaaaatctgaagaagatattcttgtggccttaaaaaaatatagcaaaaaacatgttgggcctactgctcctgcacacggattagtattagaaaaaattatttattag

SEQ ID NO: 292871 - DNA, 736 bp, Unknown
  Bacterial polypeptide expressing nucleotide sequence isolated from the Sargasso Sea
acgcgaagtgccaagtgtgcaaggtcatctggaagctgcgttatccaaggttgccaatgcaactattgaattatcctgcgctggccgcactgacgctggcgtccatgcgacaggccaggtcgtgcatttcgatactgatgccaaccgtgatatgcgcgcctggatcatgggcgccaactccaatctaccagatggcatagccgtgcgctgggcaaaagaagtttcagatgattttcatgctcgtttttctgcaacagcccgacgttaccgttatgtcatttacaacaataaattcagaccagccattttgggcgcaggtttaagccattatcatcaggaattgaatattgaactgatgcagcaggctgctgtccatttgctgggtgaaaatgattttacgtcatttcgtgctatccagtgccagtcgcacagccccttccgtaatctgatgcatctgcatttaagtcgggtagggcagtttattgtactggatattaaggccaatgcttttttacaccatatggtgcgtaatattactggcagcttgttacaagtaggcatgggcttaaaagaaccagaatggattgcagagttgctggcggccaaagatagaactttagcagcagcaacggccaaagccgaaggcttgtatctggtggatgtggattaccctgaacactttggtatcccgaaaatgccactgggtccactgttcctgccagacagtttttgctaa

SEQ ID NO: 292872 - DNA, 641 bp, Unknown
  Bacterial polypeptide expressing nucleotide sequence isolated from the Sargasso Sea
cgcgtgtggccaagtggtgcacttcgacacccaggccgagcggtcgatgaaggcgtgggtgatgggggctaatatcaatttgccccatgatgtcagtgtcagctgggccaaggtcatgccggcgcattttcacgcccgtttcaaggccatcgcccgccgttaccgctacgtgatctacaacgatcagatccgcccggcgcacctcaatgaagaaatcacctggaaccaccgcccgctggatgccgagcgcatggccgaggccgcgcagcatttggtcggggtgcatgacttcagcgcgttccgtgccgggcagtgccaggccaagtcgccgatcaaggaagtccaccacctgcgggtgacgcgccacggcaagatgattgtgctggatatccgtgcaggtgccttcctgcatcacatggtgcgcaacatcgctggcgtgctgatgaccatcggcaccggtgagcgcccggtggagtgggccaaggaagtgctggatagccgcattcgccgcacgggcggggtcacggcgcatccgttcggcctttacctggtggatgtggagtaccgcgacgagttcgaattaccggaacgctttatcgggccgcacttcctcaccggtttcagcgaacttggcggctgac

SEQ ID NO: 292873 - DNA, 583 bp, Unknown
  Bacterial polypeptide expressing nucleotide sequence isolated from the Sargasso Sea
tttctaccccccacggtggccgtgcgatgggcgcaggagatgccggagggtttccacgcgcgattctccgcgcaccgccgcacgtattactacgcactgacctttggtccgacgcgggcaccgctgctcgaagacaaggcgggctacgtgatgcttccgccaggccaatcccttgacgttgaagccatgaacgaggcggcccaggtactggtcggcgagcacgatttctcgtccttccgcgcggccgaatgccaagccaagtcgcccgtcaaaacgatgtattcagtggaggtgcgaggcgagggcgaatgggtgttcgtgcgcattcgcggcagcgcgttcctgcaccacatggtgcgcaacatcatgggctgcctcgtggcgatcgggcgcggccgccagccggtgtcctggatgggcgatgtgctggccgcccgcagccgcgtggccgccgcgccaactttcatgcccgacggcctgtatctcgccgaggtcggctatcctgatgctttctcgttgccggcgtctccggcatcgtccagcctgtttcgcggcgtgttcgacgagcacgccggcctgtgaa

SEQ ID NO: 292874 - DNA, 282 bp, Unknown
  Bacterial polypeptide expressing nucleotide sequence isolated from the Sargasso Sea
gatgtctgaccagctacaaccgccggtgtataaaattgcgctgggcatcgagtatgacggcagcaaatattatggttggcagcgtcagaatgaagtccgcagtgtgcaggaaaagctggaaaaggcgctttcgcaggtcgccaatgagccgattaacgtcttttgcgccgggcgcaccgatgccggtgtgcacggcaccggacaggttgtgcattttgaaaccaccgcgctgcgtaaagatgcggcctggacattgggtgtaaatgcgaatttgcctggtga

SEQ ID NO: 292875 - DNA, 676 bp, Unknown
  Bacterial polypeptide expressing nucleotide sequence isolated from the Sargasso Sea
tggcaattctattcagcatgaacttgaggttgctgctgcaaaactaactacgcacaccacccgcattcaaggggctggtagaacagatgctggtgtacatgccacaggacaagcagctcatttagacgtgccctcaaattataccacacggtctgttatgatgggactaaacagctatcttgaggcctcttctatttctgttttatcggcagaaaaagtggatggtgcgttcaacgcccgttttgatgcgatagaaaggcgctatctttatcgaatattcactcgaaatgcgcgccctagtctagataaattccgtgtctggcatataaccaaaccgctggatatcgacgctatgacgcgtgctgcccagcatcttatcggcacccatgactttacgagtttcagagcttctcaatgccaggcaaaatcacctattagaaccatgcaatcaattgaaatagaaaaaattggcgatgaaattcatatcaccacaattgctagatcgtttctacacaaacaaatacgtaatattacaggtagcctagtagaagttggaaaaggcagatggcactcagataaaataaaggaaatacgcgaagccaaagacaggcgggcagcagggccagccgcacccccatatggtttatatctaacagatgtaatttacccaagatag

SEQ ID NO: 292876 - DNA, 646 bp, Unknown
  Bacterial polypeptide expressing nucleotide sequence isolated from the Sargasso Sea
gtgtacatgcgaccaacaggttgtgcattttgatacaagcgcttccaggcccagtaaggcctgggttatgggcggtaacgtgcatcttccaaaggatatttcgattgagtgggcggcagaggtagctgatgattttgatgctcgtcgttcagcgttggcccgacgttatgtctacatgatccagaattcgaaggtaagatctgctctcatgcaagactttttaagccatgagcggcgccccttagatgctgatgcgatgaatgtcgccgcacagtctttgttaggtgaaaatgatttcagttcgtttcgatcagctaattgtcagtcgcagtctccgatgcgcaaactaatgtctatttctgtcaaacgattaggggagatggtcatcattgatgtagtggcgaacgcatttttgcatcacatggtcaggaacatcgttggttcgttattggaggtgggtgctggtcaaaaacctataatctggataggtgaattgttgtatttagcggatcgctcagccgccgccaagactgcagctcctgagggtctctcactcgtgaatgtcttgtaccctgaaaagtatgatgttccacccaaagcttgtctgccacatgtttaccgtatattagacattgctggcttatga

SEQ ID NO: 292877 - DNA, 722 bp, Unknown
  Bacterial polypeptide expressing nucleotide sequence isolated from the Sargasso Sea
tgacggtacgccctttgtcggctggcagcgccaggtttccggcctgtcggtccagcaggtactggaagaagcggcggccaagcttaccggcgggaacattctggtacagggcgccgggcggacagattccggtgtccacgccaccggccaggtggcgcatctggatgttcccgacaaattcaatgccaaccgggtgatggaggcgctgaacgcgctgaccggcgatcacccagtaaccattcttgacgcgcgcgaggtggatgccgaggcgcatgcccgcttttccgcgaccgggcggcggtatttataccgcctgctgccgcggcgccaaccgcctgcgctcgaccatgaccgggtctggcattatcgtagcgcgctggaccccggcgcaatgcaggcggcagcggcgcagcttgtcggacggcatgatttcaccagtttccgtgccagccattgccaggcggacagtccggtgcgcacgctcgaccaattgcagatcgaaccgcaggacgaggaaatccacatccatgctggggcgcgctccttccttcaccatcaggtgcgcaacatcgtcggcacgctggtgctggtcggtgcaggaaaatggactgaagatgatgtggcaacggcgctcgccgcaaagcaccgttcggccgccgggccgaccgccccgccggaggggctgtatctgaccggggtgacttatccgacagggatctgaa

SEQ ID NO: 292878 - DNA, 742 bp, Unknown
  Bacterial polypeptide expressing nucleotide sequence isolated from the Sargasso Sea
aatgttaacgtaccaaattaagatagagtatttaggtacgaatttcgttggatggcaaattcaaaaaaaaggacttacagttcaaggagttttggaaaaggccatatctaagtatttaaaagaaaaagttaaagtaatcgggtcagggcgaactgatgctggggttcatgcaagtgagcaatcagcacattttaaaacaaataaaaaaattacagacaaaaatattttcataaactcaactaatttttttttaagcaagcaccctgttgctattctaagtataaaaaaacggccaaaagaatttcatgcaagatttagcgctaatcagagagtttataagtatattattgttaataggcgatcttctttggtcatggaaaggaataaagcctggcatatcaaaaaaaagctagatcttaaaataatgcaaaaaggtgcaaaaatattaacaggaacacataacttttcaactttcagggcttcatcttgccaagcaaagtctccaattaaaactcttaagcaagcaatagttaagaaaaaaaaaaataaaattattcttacttttgtatcaatatcatttttgcagcagcaagttagatcaatggtgggttctttaaaatatttgggggaaggaaagtggaaattaaaagatttaaaaaaagcattttattcaaaaaaaagatcaatgtgcgctccaccggctcccgcacatggactttatttgcacaaagtaaaatattaa

SEQ ID NO: 292879 - DNA, 403 bp, Unknown
  Bacterial polypeptide expressing nucleotide sequence isolated from the Sargasso Sea
aatgcgaattgcgttaggtattgaatacaacggtgtcggtttatttggctggcaaaggcaacgtgaagtgccaagtgtgcaaggtcatttggaagctgcgttatccaaggttgccaatacgactatcgaattatcctgtgctggccgcactgatgccggcgtgcatgccacagggcaggtggtgcattttgatactgacgctacccgcgatatgcgtgcctggattatgggcgcgaactccaatctgccagatggcatagccgtgcgctgggcaaaggaagtatcagatgattttcatgcccgtttttctgccacagcgcgtcgttaccggtatgtcatttacaacaataaattcaaggccgccattttgggtgctggtttagtcattatcatcaggaactga

SEQ ID NO: 292880 - DNA, 610 bp, Unknown
  Bacterial polypeptide expressing nucleotide sequence isolated from the Sargasso Sea
atgtcaaaaacccatagaatagctctaggtatagaatatattggtacaagtttcaatggtttccaaaaacaaaagggaacgagaaatacaattcaacaaaacatagagtcagctttatccaaggtagcagattatagggttaagacagtctgttctggaagaacagatgcgggtgtgcatgccttaggacaagtaatccatttcgattctcctgtgcatagagctaacgactcttggattaaggggacaaactctaatttaccacctgaaatacgagtcatatggagtaaagaagttagtgaagattttcatgcaagattttctgcaaaatcaaggcattacaaataccttataaggaatagtgatttgccttctgctttctataaagatagatcttattggataaatggtaatttaaaaattactaaaatgagaactgcctctagatatcttattggagaacatgattttaatgcttttagaaactctggttgccaatctaaaagttctcaaagaaatatgactaagattaagatagaaaaaaataatggattaatctctatagatctagaagccaatgctttcttgctcaatatgggtaagaattata

SEQ ID NO: 292881 - DNA, 796 bp, Unknown
  Bacterial polypeptide expressing nucleotide sequence isolated from the Sargasso Sea
atgcgagtagcacttggggttgaatataatggcgcacgttatagtggttggcagcgtcaatcgcacgtaaatagcgtacaacaagaagtagaaaaggcgctgtcgagtatctgtaaccacccagttgaaattgtgtgtgcagggcgaactgacgcaggagtgcatggaacaggccaagttgttcattttgaaaccaatgcatctcgtgaaatggtcgcgtttactatgggtatgaacactttgctacctaaagatattgctattcgatttgctcaacctgttgcagaagactttcatgcacgttttagtgcaaccgcaagaaggtatcgctacgttatttataactatccataccgtggagctgttatgaacgagggtgttactcatttccatcacaagctagatgaaaaggtaatgcaagaggcgtgtcagcatttaattggtgagcatgactttacatcattcagagcattacactgccaagctaataccgctaaacgtacaattcatcacttatctgttcagcgccaaggtgattacgttgtaattgatattaaggcgaatgcatttttgcatcatatggtgcgcaatataaccggttgcttaatggatattggcttacacaagcaccaacctgtatggctaaaagagctattagatttaaaagagcgtgcaaaagcgagtgcaacagctaaagccgctggtttgtatttagtcgatgttgattacccagagcagtttaatattcctaaaaccccactagggccattatttttacctgatgttgatatttagt

SEQ ID NO: 292882 - DNA, 651 bp, Unknown
  Bacterial polypeptide expressing nucleotide sequence isolated from the Sargasso Sea
aatggtccgttattgtttaaccatcgagtacgatggcaccaattacgtgggatggcaacgccaaattacgggatcatctatccagcaggaattagaggatgctgttaaagcgttttgcggagaaaactctttagttcagggggcgggccgcactgatgctggcgttcatgcactgggccaagtagctcacgttgacataaaacgtaaaaccgacggtaatactgtaagaaatgcattaaatgcacacctttggcctcaacccatttcgatattgaaggcggaagttgttcccaacggctttcatgcacggttctcagcacaagcacgttcctatgtctacgttattataaatagacgtgccccaatagcaattgaaaggcatcgagcgtggcatatttctagacctctaaaatcagcttcaatgcatgaagcagcacaaaggttaattgggaaacatgatttctcaacctttcgtgcaagccattgtcaggcaaaatcaccaataaaaacgttaacctctattgatgtgcgtcaagtcggtgaaagaatagagatcgttactaaagccccatcatttttataccatcaagtcagaaattttgtaggaaccttaaagttagtcggagaaggaaaatgggatgcagatgatgt

SEQ ID NO: 292883 - DNA, 787 bp, Unknown
  Bacterial polypeptide expressing nucleotide sequence isolated from the Sargasso Sea
gatgcggattgcattaggtattgaatatgacggcagtggctattttggttggcagcgtcaggccgaagtcgattcagtacaagggcagttagaacaagccttgtctaaggtggcaaacgagcccattagcttgttttgtgcaggaagaaccgatgctggtgttcatgcaacggggcaggtagtgcattttgataccaacgccgtacgtaacgaaggtgcctggaccttaggtgttaatgccaatttacccgataatattgccgtgcgctgggtaaaagaggtagatgagagcttccatgcccgcttttcggccacggctagacgttaccgctatgtgatttacaatcataatcttcgcccagggatcctacgccacggcgtcagccattatcatggtgatatcgacgttgataaaatgcatattgcggcgcaggcgctgctcggcgagcaggattttaccagttttcgtgctattcaatgtcaatctaaaaccccgtttcgcaatgtgcacagtgttaaagtgacgcgtcagggcatgtatgtgatcgtcgatatatctgccaacgcctttttgcaccatatggtgcgtaatattgtcggttcgctgctggagattgggcttggcaaccagccattgacttggatggcggatctgttgtcactaaaagatagaaatcaagccgcggcaacggctaaaccgaacggactttatcttgtggatgtgacatatccggagcaatatcaattgccaaagttagcgcttgggccattgtttatgttggattaa

SEQ ID NO: 292884 - DNA, 725 bp, Unknown
  Bacterial polypeptide expressing nucleotide sequence isolated from the Sargasso Sea
aatgaaaagattttttctaaaaattgagtatgacggaactttataccatggttggcaaaaacaaaaaaattgtaaaacaattcaaggagaaattgaatatgcattcaatcaattaactggtaaaaatgtaaacttaacaggctctggaagaacagacgctggtgtacatgcttattgtcaaattgcacatgttgatcttgaaaaagattggcttccagaaaaacttcaaggagctcttaattttttcctaaaaaaaattccaatttcaattttagaagtaaaaaaagttgataataattttcatgcgaggttttcagcaatacacagagtttatcagtataaaatttttattagaagagcacctctagtactacataataaaagatactggcatatatggaaaaatttagatacagaaaatatgattaaggcttcaaattttctattgggaacacatgattttacaacatttagatcttcaatatgtcaatcaaactcacctataaaaactttggataaaataagaattaaacataaaatcaaaaatcacaaaaaaattgtcgttttgcagtttaaagctagaagttttttacataatcaagttagaagcatagttggaagtttagttaatgtagggttaaaaaaatgggaacctcattatttaaaaactatcttggataaaaaagaccgaagaaaatgtggccccatcgcaccaccagagggac

SEQ ID NO: 292885 - DNA, 736 bp, Unknown
  Bacterial polypeptide expressing nucleotide sequence isolated from the Sargasso Sea
atgcataaatataaattaaaaatagaatatgatggatcaaatttcgtaggttggcaaaaacaaaataatggtatttcaattcaagaatctatagagcaagctatctttgaattaactggtgaaaaaacaatagtgtttggagctggacgaacagatgctggcgttcatgctttaggtcaggttgcacactttgatttaaaaaaaaattttaatatagataaagttcgtgatggtttaaatcatcatttaagacctaacccaatagcaatattaaaagttgaaaatgccagcgatagttttcatgctcgtttttcagctaaacaacgtacttatgaatatctaataactaatagacgggcaccattaacaattaaaaaaaataaatcatggtcaatttttaaaacaatagaattagaaaaaatgagatacgaagcaaatttttttattgggaaacatgatttacaagcttttagatccatagattgtcaatctaatacttccatcaaaactattgatgaaataaagatatctaagaataatgaaaatttgaatatatctatatctgctaaatcgtttttgcattctcaagtaagaataatggtgggtactctagtggaaataggtaaaggcaaaataacagaatctattactcagattataaaaagcaaggatagaactagagcaggagttacagcacctgcacatggcttatacctagtaaaagttaattattaaa

SEQ ID NO: 292886 - DNA, 769 bp, Unknown
  Bacterial polypeptide expressing nucleotide sequence isolated from the Sargasso Sea
tatgcccagatatgctttaaaaattgaatatgatggcgcaccttttgttgggtggcagcgtcagcaaagccaggtttctgtgcaaggttcaattgaaaaagccctttcaaatttagaaaataaagaacatacaatagctggtgctggacgcactgatgctggcgtgcatgcaaagtgccaagttgcacattgcgatcttgataaagagtgggaaccatttcggctttcggaagcattaaactttcatttgaaaccgctacccgtagcagtaattgactgtgctttagtcgataaagattggcatgcgcgcttttctgctttggaacgaaaatatttatttcggctacttgtccggcgggctccgtcgactcacgaggctggtttagtatggcaaattgggcactctcttgatttgtctaagatggtagaagcatctaaatacttacttggcaaacatgattttacaacatttcgttcgtctatgtgccaggctaaaagtcctataaagaccctagatgaaattaaaattgatcgtattgaaggttggtctggagacgagttcaggtttcaattgagagcgagaagttttcttcacaaccaggttcgcagttttgttggaactttagagcgcgtaggggcaggtagctggaacccagtcgacgttaaaaaagctttagaggctaaggatcgatcggcttgtggtccggtttcacctccgcatggattatacctgactgatgttgtgtacgaaccaaatccttttacatag

SEQ ID NO: 292887 - DNA, 733 bp, Unknown
  Bacterial polypeptide expressing nucleotide sequence isolated from the Sargasso Sea
tatgaaacgttataagttagtttgtcaatatgatggagccaacttttctggatggcaattacaaaatgataatcgcacagtacaaggtgagttagagaaagtactaacaaaattgaacaaaggtgaattggttcgtgttattggttctggtagaacagatgccggcgtacatgctcttgggcaagttgcacattttgatataagtacaaaactaaagattaatgatttaaaaaaagctattaatggtaatttacatgaagactgttatgtaaactttattgaattagttgatgaggaattccatgcacgtttttccgcttctcaaaggagttacatatatagttgtaggcagaatagatatttattagatagaaataaagtgtggaatactggcgaattagatattttgaagttaaacaatgcagccaaaatattaattggtgaacatgattttttatccttttcaaaaaaaaatcctaaaatgaatgatacaatatctataatttatcaatctgaatggaaagaaaatggtcaaatagtgaattatcatatttcaggtaacagatttttgcatcatatggtacgttatttagttggatcaatggtagcaattagtcaaggaaagtatagtatagagcaattaataaaagaattagataatcctaaatcagattcaaaacaatttaaagctcctgcttacggattagttctaaactatgtgtcatatgaataa

SEQ ID NO: 292888 - DNA, 757 bp, Unknown
  Bacterial polypeptide expressing nucleotide sequence isolated from the Sargasso Sea
tatgagattttttcttacaatcgagtatgatggatctgaatatattggctggcaaagacaaaactctggtttatctgttcaagaggttgttgaaaatagcatatataaaatcattcaaataaatttgaatatttatggatctggcagaacagacgctggcgtacacgctactggtcaagttgctcatgttgatatcataacaaaagaatttgaagaaaatagattgatggacgcaattaatgcttatttgttagaccataagataaaagttacagatgtaagaaaaactatagatgatgcacatgcacgattttccgcactaagcaggcaatatgaatatgttatattaaatcgttctgcaccacctgcaattgaggaaggtaaagtttggcatcagagaagaatacttaatattaaaaaaatgcaggaagcagctagttatttcgtagggacccacgattttacttcatttagagctacacagtgccaaagtaagagtccaataaaaactcttgatgaacttgcagttgtacaaaaagaaaataaaatattcattcgtgcaaaagctaaatcttttcttcaccaccaggtaagaaatattgttggaactttgcaacttgttggttctgaaaaatataaaccagaagatattaaattaatttttgaaaaaaaggatagaacgtcagctggtccaactgctccagcatgtgggcttacattagtaaagattgaatttcctcaagaaatttatttgtaa

SEQ ID NO: 292889 - DNA, 787 bp, Unknown
  Bacterial polypeptide expressing nucleotide sequence isolated from the Sargasso Sea
gatgcggattgcattaggtattgaatatgacggaagtggttatttcggttggcagcgtcaggccgaagtcgattcagtacaagggcaattagaacaagccttatctaaggtggcgaacgaacctatcagcttgttctgtgcggggcgaaccgatgccggcgttcatgcaacggggcaggtggtgcatttcgagactaatgccatacgtaacgaaggcgcgtggaccttaggagtgaatgccaatctgcccgataacattgccgttcgctgggcaaaagaggtggatgacagtttccatgcccgcttttcagccacggccagacgttaccgctatgtgatttacaatcataatttccgccccgggatcctacgtcacggcgtgagccattaccacggtgatatcgacgccgataaaatgcatgttgcggcgcaggcgctgctcggtgagcaggactttaccagttttcgcgccattcaatgccaatcgaaaaccccgtttcgcaatgtgcacagcgttaaagtgacgcgtcaaggtatgtatgtgattgtcgatatttctgctaacgctttcttgcaccatatggtgcgtaacattgtgggctccctgctggaaattggtctaggcaaccaaccattgacctggatggcggatttgctggctcttaaagatcgaaatcaagcagcggccaccgccaaacccaatgggctctatttagtcgatgtgacgtatcccgagcaatatcaactgcccaagttggctttagggccattgtttatgctggattaa

SEQ ID NO: 292890 - DNA, 814 bp, Unknown
  Bacterial polypeptide expressing nucleotide sequence isolated from the Sargasso Sea
atgcggatcgcgctcggcatccagtacgacggcgcggcgttctgcggctggcaggcgcagccccacggcaagaccgtgcaggatcggctcgagcacgcactggccgagttcgcgcgcgtgccgctgcatacgacggtggccggtcggaccgacacgggcgtgcacgggctcgggcaggtcgtgcacttcgataccgacctcgatcgcgaggttttctcgtgggtgcgcggcaccaatgcgttcctgccgccgaccgtcgcggtgcaatgggcgaagccgatgccggacacgttccacgcgcgtttctcggcgttcgagcgcacctattactacacgctgtacgtgcatcccgtgcgctcgccgatgctggcggggcgcgcgggctggatccatacgccgctcgacgacgacgcgatgcgcgccgccgccgcgcacctgatcggcgagcatgacttctcgtcgttccggtcgtcggaatgccagtcgaagacgccggtcaaacacctgtatcagatcgacgtgcggcgcgtgggccatttcatccatttccggttccgcgcgaacgcgttcctgcaccacatggtgcgcaacctgatgggctgcctcgtcgcggtcggtcgcggccgttatccggccgactggctcgctgacgtgctggccgggcgcgaccgcaagcttgcggcgcccacgttcatggccgacgggctgtacctcgcccacgtcggctacccggcggaattcgccgtaccgcccgcgcagctcggcagtgtgccgtggagcagcgtctgggccgatctggacccgcaatcatgac

SEQ ID NO: 292891 - DNA, 811 bp, Unknown
  Bacterial polypeptide expressing nucleotide sequence isolated from the Sargasso Sea
atgcgaattgccctaggtattgaatacgatggcagccggtatttcggctggcagcgtcagcgcgaagtgatcagcgtacaggaggagctggaaaaggccctcagccggatcgccaatcaccccgtctccatccagtgcgcagggcgcaccgatgccggtgtccacgccaccggccaggtgatccacttcgataccgatgcgaatcgcgccgaaggggcctggaccctgggtctcaactccaacctgccgccggacatcgccgtgcgctgggtcaagcaggtggacgaggggttccatgcccgcttcagcgccaccgcccgtcgctaccgctacgtcatctacaaccacaacttccggccggccatccttggcagcggcgtcagtcactactacgaaaccatcgatgccgatctgatgcaccaggcgggccagagcctgctcggagagcatgacttcagcaccttccgggccgtcgcctgccaatccaacaccccgtggcgcaatgtgacccacctctgtgtcagccgctccggcccctacatcgtgctcgacatcaaagccaacgccttcctgcaccacatggtgcgcaacatcaccggctccctgctgctggtggggcaggggctccagccggtggagtggattgccgaggtgctggcagcccgggatcgcaacctggcgggcccgactgccaaggcggggggactctatctggtggacgtggattacccggcggagctggggttgccgcggatgccgctgggcccgttgtggctgccggactcggcaccgggtacgaccagtttttagt

SEQ ID NO: 292892 - DNA, 670 bp, Unknown
  Bacterial polypeptide expressing nucleotide sequence isolated from the Sargasso Sea
caatcgatacaaggggcaatagaagactcgattaaaaatatatttgaggaaacagtgaccatttttggggctggaagaacagatgctggtgttcatgccatggggcaagtagcacattttgatatcaataacaaagagctagaaccgtttgtaattaaaaatgcgctaaatgatcatcttcgcccttttccaatagctatcttagaagtcgatgaagttgataataaatttcatgcccgtttcaacgcacgtcaaagaaaatatttatatcgaatagttaatcgcaaatctcccttaacaattgaaaagggtagagcatggcatgtgcataaagagatagatgtagaccttatgagaaaatgtatatcatcgattgaaggcaaacatgactttacaacgtttcgttctgctcattgccagtcagacagtcctataaagacaattgatagccttcaaattacaaaatcagaagaaaatatttatttcggattttctgcaaaatcatttttacatcaccaagtaaggtcaattgtaggaagtcttaaactggtcggtgaacaaagctggctggtaagtgattttcatgatgctctcaattctaaggaaagatcgaaatgtggtgcagttgctcccccagatggcctgtattttatggaggtaaaatattaaa

SEQ ID NO: 292893 - DNA, 739 bp, Unknown
  Bacterial polypeptide expressing nucleotide sequence isolated from the Sargasso Sea
atgcaaagatggaagataattatagaatataagggttgccaatttaatggttggcaaagtcaaaaggatttaacgggagttcaggatgcaattcagtctgcaatatttaaattctcaggtgaattaattaaagtatatggagccggcagaaccgattcaggcgttcatgctctcggccaagtggctcattttgatattgatagagcaacaaatgaagatgagataagggaggctttgaacaactatctaaggccagatttaatatctataataaaagtcgaaaaggttgatgatgattttcatgctagattctctgcaaaacttagacattacgaatataaaattgtgaatcgtcgtcaacctcttacactagaaaaagatctattttggagggtaggaagacctctaaaggaagaggatatgcaaaaaggagcaaattatttaattgggacccatgattttactacctttagatcaataaattgtcagtctaaatcacccttaaaatcattggattctattaaaattaaaagaaagaaagacaagatattcctcttcttctctgctaaatcttatttgcataaccagcttcgttcaatagttggatctttaaaattggttggtgaagggaaatggcatccagataagataaatcaaattcttaactctaaggaaagaaaagaatgtggcccaatagcgccacctgaagggttatattttaaatctgttgattactaag

SEQ ID NO: 292894 - DNA, 793 bp, Unknown
  Bacterial polypeptide expressing nucleotide sequence isolated from the Sargasso Sea
atggggcgaattgccttagggattgaatacgacggtgctgctgtatacggatggcaacgccagcgtgaagttccaagtgttcaggaacatcttgaaaaggcactatcgacagtagccaacgaacccattgaagtacaatgcgctggacgtaccgatgctggtgtacatgctactgggcaagtggttcactttaactgtgatgcaccacgctcagagcgcgcttggacactcggcgtaaatgcgaatctgcctaactctgttgctgttacctgggcaaagaacgtcagcgatgacttccatgcacgtttttctgctacccatcgccgctatcgttacgttattcataatgcgaaaatgcgcccagctattctccattccggtgttacccatatccaccgcgaattagatgagaaaaaaatgcatgttgccgcacaagccttgctaggcgagcaagactttacctcgttccgcgcagcgctttgccaaagtaaaacgccatttcgcaacgttactgatgtaagcgtatatcgccaagggcgatacgttataattgatattcgagccaatgctttcttgcatcatatggttcgcaatatcacgggcgcgcttgttgagattggggcaggggagcaagacgtaaattggatagctcacttgttaagcctgaaagacagaagtaaatctgcagccacggcgaagccaaatgggttgtacttggtcgacgtcacttaccctgacgagcacggtttacctaagccgcctttaggaccactattccttccagaagcctaat

SEQ ID NO: 292895 - DNA, 796 bp, Unknown
  Bacterial polypeptide expressing nucleotide sequence isolated from the Sargasso Sea
aatgcgaattgcgttaggtatcgaatacaacggtgtaggtttatttggctggcaaaggcaacgtgaagtgccaagtgtacaaggtcatctggaagctgcgttatccaaggttgccaatgcaactattgaattatcctgtgctggtcgcactgatgccggtgttcatgcaacaggccaggtcgtgcattttgatactgatgccaaccgtgacatgcgcgcctggatcatgggtgccaactccaatctgccggatggcattgcagtgcgctgggcaaaacaggtatcagatgattttcatgcccgtttttccgccacagcccgccgttatagatacgttatttacaataataaattcaggcctgccattctgggagcaggtttaagtcattatcatcaggaattaaatattgaactgatgcaacaagctgctgtccatctactgggtgaaaatgacttcacatcctttcgtgcaattcaatgccagtcacatagccccttccgtaatctgatgcatctgcatttaagtcgggtcgggcagtttattgtgctggatattaaagccaatgcttttttacaccatatggtgcgtaatatcacaggtagcttgctacaagtgggaatgggcttaaaagatccggattggattgcagacttgctggcagcgaaagatcggactttagccgctgcaacggccaaagcagaaggcttatatctggtggatgtggattaccccgaacactttggtattcctaaaatgcctcttgggccactgttcctgccagacagtttttgctaa

SEQ ID NO: 292896 - DNA, 415 bp, Unknown
  Bacterial polypeptide expressing nucleotide sequence isolated from the Sargasso Sea
atgaaggcgcgtattgggagtgtatcgcgaccagtccacaatgctgagcagattgagcttcctgcgcttgctaccggaaattcagaaagcattaattttgcgcgagaaaatcagccaggttttgcgcctttcatgcgaggcccatatcccggcatgtacgcaactcgcccttggacaattcggcaatatgcaggcttctctacggcaaaagattcaaacagcttttaccgccgcaatttggcggctggccagatgggcttgtcggtggctttcgatttgccaacacatcgtgggtatgactctgacaaccctttagttgccgatgatgttggactagctggtgtcgccattgactcaattgtcgatatggccctgttgttcgaccagatcccactggagcacatgagtgtttcta

SEQ ID NO: 292897 - DNA, 973 bp, Unknown
  Bacterial polypeptide expressing nucleotide sequence isolated from the Sargasso Sea
gctgtcgccggccatacccagtcgctgcacaccaattcgctcgacgaggcgctcggcctgccgaccgaccatgcagcgcggattgcgcgcaacacgcagatccacctgcagcacgaggcgaacatggcgcatgtcatcgacccgttcggcggctcctatcttctcgagcagctgacccaggggctggtggcgcgggccacggcccatatcgaggaagtcgaatcgcttggcggcatggccgccgccatcgaggccggcctgccgaagctgcggatcgaggaagcggcaaccgccgcccaggccgacatcgattccggccgccgccagattgttggcgtgaacagctatcagccggcaccgcgcaccgacggcaccgaggaagtccttgttcgccgcatcgacaacagcgaggtgcgtgcgcgccagatcaccggcctgaaaaaggtccgcgccgaacgtgaccagagccgggtgaccgcagctctcgacgcgctgtccgaagccgcatcaggcagcgcgaacctgatgccggccgccattgaggcggcgcgcgcgcgcgccactgtcggcgagatgtccgatgctcttagccgtgtctatggccgccacaaggccgagatcaagggtgtgcggggtatatggaaggcgcggatgaaagccgatgccgagctggaaatgcttcaggcgcgtgttgacgaatttattgcttccactggccgtgcgccgtgtcttctcgttgccaagctcggccaggacggccacgaccgcggccagaaggtgatcgcctcggcttttgccgatatcggttttgacgtcaccatcgggccgctttttgccagcccggacgaggtctatgacatggcgattgccgaagatgtagatgctgtcggcatttccactctggcggcggcgcatctcagccaggtgccggcattgcgcaagcgtctcgatgccggcaagggccgccatatcg

SEQ ID NO: 292898 - DNA, 861 bp, Unknown
  Bacterial polypeptide expressing nucleotide sequence isolated from the Sargasso Sea
ctcggtctgcctaagcgacgaatagaagaatcagcagcaattcgtcaggctaaggtagatagtggtgaggaagtcattgttggagtgaataaatacgttggggaggatgaacaaaacgtcgaagtcagagatgtagataactttaaagtacgtcttgagcaaattgaaagactagaaaatataaaaagttctagagatgaaaaaaaatgtagagctgcgcttaataatatgaaattagcggcaagagacggtaccggaaacatccttgcattagcaattgaggctgctagagagcgagccactgtaggagaaatgtcatacgctttagaggaagtttacactaggtattcaacaacaagtgaagttggtaaagggcaatatgttaagtccttcaaaaataagaaggagattgagcagacaatagaaattgtggacacctttaccagaatggaggggcggaagcctaagatgctcgtcgtgaaaatggggcaagatgggcatgacagaggagcaaaagtaattgcttcagcatttatcgattttgggtttgatgtaaaagtaggtcctttatttcagacaccatccgaggcagctgaggatgcactgaatggaaaatttgatatcatcgggatttcaacacaggcggcaggccataaaacactggctccgcaactaatcgaggagctagaaaagagagacggacaagatatacttgtaatctgtggcggcgttattccacatcaagatcacaaatttttgaaagacagtggggttagtgcaatatttggacccggtactaatattccaagagcagcaaatgagattattcagttattgttcaataaaaaaggtcgtaaccac

SEQ ID NO: 292899 - DNA, 825 bp, Unknown
  Bacterial polypeptide expressing nucleotide sequence isolated from the Sargasso Sea
ctatgaagcattatcagctgttcttggaggtactcaaagtcttcatacgaattcgtttgatgaggcaatagctttgccaacagaattttcagcaagaattgcaagaaacactcagcttatcttacaaaatgaaacgggtgttacaaatactgtagacccccttgcaggatcatactttatagaaaatcttactgatgaagtagctgcaaaagcatggaatataattcaagaagtagaagagcttggaggtatgactaaggcagtcaatgcaggtgtcccaaaattaaaaatcgaggagtctgcaactaagaagcaagcaaaaattgactctggcgacagagtagtagtaggagtaaataaatttcaaaaccctaaagagcctaaaatagatgtattagtaatagataacgaaaaagtacgtgaagatcagataaaaaaaataaataaacttaagaaatctagagaaaataaaaaacttgaaaaatcattaaaagaactgacggaagatgctaagaacggaaagaatcttctttattcagcagttaaagcaatcaggaatagggctacggttggcgaggtttcgaaagcattggagaatgtttttggacgccactatgcaacctctgtcggtgtttcaggagtatatggaaaatattttgaaggaaatgaggaatttatgcatgtaactgaaaaaattgaaaattttgaaaaatcctttggaagaagaccaagggttcttgtagttaaaatgggtcaagatggacatgataggggagctaaaattgttgctacttcttttgcagatattggatttgatattgacat

SEQ ID NO: 292900 - DNA, 874 bp, Unknown
  Bacterial polypeptide expressing nucleotide sequence isolated from the Sargasso Sea
ttggaggacacaaagtttgcacacaaattccttcgatgaagcaattgctttaccaacagacgagtctgcaagaattgctagaaatactcaattgattcttcaaaatgaaactggtgttacaaaaacggttgacccccttgcggggtcatattttgttgaaaacttaactgaggaattatcaaaaaaagcttgggatattattacagaaattgaagaattaggtgggatgaccaaagctgttaaagcagggattcccaaattaaaaattgaagagtctgcaactaagaagcaagctaaagtcgatagtggatcaagggttgtggttggtgtaaataaatttaaaaaccctcaagaaccttcagttgatgtgagagtaattgataataatcgcgttcgagatgatcaaataaagaaaatacaggcaataaaagagtcacgtgacgcaatagctgtagaaaaagcacttactaatttaactaatgctgctaaagatgaaacaaatcttcttattccttgtatagaagctattaaattaagagcaacggttggagaagtttcaaaagcattagagcaagtatatggaagacattttgcaaaaagcttaagtgtttcaggagtatatggtaaacattttgaaggtgatgaagaatttatgaaggttgagagtaaaattaaggaattcgaaaatgtaaatggtagaagaccacgagttctagtagttaaaatgggtcaagatggccacgataggggggcaaagattgtcgcaacctcatttgctgacatgggttttgatgttgatatgggcccactatttcaatcgcctaaagatgttgcaaaggatgctattgaaaatgatgtacatgcaattggagtg

SEQ ID NO: 292901 - DNA, 933 bp, Unknown
  Bacterial polypeptide expressing nucleotide sequence isolated from the Sargasso Sea
aacgggattatcagttgcatatgacatgcctactttaatgggatatgatcccgatcatccttggtccttaggagaagttggtaaatgcggcgtttcagtttcctcattagatgatatgagaagattgtttaaaaatataaacctttctgaaatttcagtgtctcaaaccataaatggaccagctgtaatattgttagctttttacattgctttagcccaggagcaaaatatacctctcagcaaattaagaggaacattgcaaaatgacatattgaaagaatttacagcccaaaaagaatggattttccctcctaagccatcaatgagaataattactgatatgatctctttttgtactagagagatgcccaattttaatacaatttccatttctggttatcatattagagaggctggctctacagcggctcaagaacttgcatttaccctcgctgatggttttgcctacattgaacatgctttagaagcagggttggacattgatagttttgctccaaggctttcattcttttttaactcccatttagatttttttgaagaaattgcaaaatttagagcttctagaagaatatgggccaataaactcaagtataaatattcggcaaaagacccaaggtctctaaaattaaaatttcatacccaaacagctggatgttccttaactgcccaacaacctgaaaacaatattgctaggactggttttcaagccttatctgcggtcttggggggaactcaatcattacatacaaactcaatggatgaaacactttctcttccaacggaaaaagctgctgaaattgctttaagaacccaacagctaattgctcatgaaacaggcgttactaatgttgtcgaccctctaggaggttcatggtatgttgaatcgttgaccgataaaatagaggaagaagc

SEQ ID NO: 292902 - DNA, 820 bp, Unknown
  Bacterial polypeptide expressing nucleotide sequence isolated from the Sargasso Sea
agtttctattgcatctattaaggatatggaatctttatttcatggtataaacctaggtgagatttctgtttcaatgacaattaatggtccagctatcatcctattagctttttatatagcagttgctgagaatcaaaatattcctttatcaaaattacgcggaacattacaaaatgatattttaaaagaattcatagctcaaaaagaatggatatttcctccagaaccttccatgagaataataaccgatatgatgactttttgtactgaaaatatgccaaattataatacaatatctatttcgggttatcatattcgtgaagctgggtcaacagcagctcaagaattagcatttactcttgcaaatggctttacatatatagattatgctattgatgcaggacttgatattgatgattttgctccacgtttatcattcttttttaattcacatcttgatttttttgaggaaatagctaagtttcgcgcagctcgtcgaatatgggcaaaaaaattaaagataaaatataatgctaaaaatgaacgttcttgcaaattaagatttcatactcaaacggcggggtgctcccttactgcgcagcaaccagaaaataatattgcaagaactggttttcaggcgatggcagctgttttagggggtacgcaatcactccatacgaattctatggatgaaactttagcgctaccatcagagaaagcagctgagattgcacttagaactcaacaattactcgcttttgaaactggtgttacaaatgtagttgatccactaggaggatcttggtttgttgagtcttta

SEQ ID NO: 292903 - DNA, 931 bp, Unknown
  Bacterial polypeptide expressing nucleotide sequence isolated from the Sargasso Sea
tagaaaaggacaaacaggaatttcaatggcatttgatttgccaactcaaattggtcatgatcctgatgcagcacaagcagaaggcgaagttggaaaagtaggggtatcaatatcatcgctaaaagatatggaaactgtattcaatggaattgaattgggcaaagtttccacttccatgacaattaatgcaactgcgtcaacattattggcatattatattgctgtagggcaatcacaaggattttcaagtaaacaattacgtggaactacacaaaatgatattctcaaagaatacattgcaagaaatacgtacatctatccacccgaaccatcaatgcgtattattggtgatatgattggatattgtgcaaaagaggttccacaatggtatcctgtctcaatttctggctatcacattagagaagcaggctcaactgctgtccaggaaattgcatttactattgcaaatgccattcaatacatagagacttgcctggcgcagggactaaaaattgatgactttgcacccagattatcatttttcttctgttgcacaattgaattctttgaagaaattgcaaagttcagagttgcaagaaaggtatatgcaaaaattctcaaagaaagattccatgcaaaaaatccaaaatcattacaattaaaatttcatactcaaacaagtggtgagtcactaactgcacaacaacctgacaataacattgtacgtgttgcaatgcaaaccatggctgcagttttgggtggaactcaatcactccatacaaattcaagagatgaagcacttgcattgccaactgaagagtctgcaaaaattgcacttagaactcaacaaattgttgcacatgaatctggaaattacagaaccgttgacccaatggccggttctcattatctggaagagttatgtgatgaa

SEQ ID NO: 292904 - DNA, 503 bp, Unknown
  Bacterial polypeptide expressing nucleotide sequence isolated from the Sargasso Sea
aatgaatacttttcctaagaaatcaattgaagactggatagctctagctgagaaagagcttaaagggaagaaagttgaagatttaaaatttaatacaccagaaggaatagatataaaacccttatacactctagatgatttaaaaggaattgaaggtcaattaagcatgcttccgggttttgggccatatgttaggggccctcgagctacaatgtatactaataaaccttggacaataagacaatatgcgggtttttcaactgctgaagaatctaacattttttataaacaatgtttaaaaaatggacaaacaggactatcagttgcttttgacttagctactcatcgtggatttgactctgatcatccgagagtagagggggatgtaggtaaaacaggtgtagcaatagatactgttgaagatatgaaaattttatttcaagatattccgcttgataagatgagtgtttcaatgacaatgaatggagcagttttaccggtat

SEQ ID NO: 292905 - DNA, 415 bp, Unknown
  Bacterial polypeptide expressing nucleotide sequence isolated from the Sargasso Sea
aaaaacacggaagaaagacctagagttttggttgttaagatggggcaagacggacatgatcgtggagcaaaaattgtggcaacttcttttgctgatttaggttttgatgtagatatgggtcctttatttcaaacgcccaaagatgttgctaaagatgctattgaaaatgatgtgcatgcaattggtgtttctacacttgcagcaggtcacaaaactttaattcctgagttgatggaaaatttaaaagatattgatccaagcagtaaaataattgtttttgtgggaggaattattccagaacaagattataaatttttgtttgataataatgtttctgcaatttttggaccaggttcaaatattatagaatctgcagaaaaagtgatagaattgatcattgaaaaaaataattagt

SEQ ID NO: 292906 - DNA, 275 bp, Unknown
  Bacterial polypeptide expressing nucleotide sequence isolated from the Sargasso Sea
catgagtgtttatgatccggatgccgctaacttatcggcgtggggcgcgctggttgaaaagcagagcaaagggctaaagccagacgactttacctggcacacccccgagggtatcccgctcaagaccctctacaccgcagaagatctaaagactctgccttacaccaacaccatgccaggcatggcgccctacatcagggggccacaggccactatgtatgcggggcgacgctggacgattcggcaatacgcgggtttctcaaccgcggaagcgt

SEQ ID NO: 292907 - DNA, 1056 bp, Unknown
  Bacterial polypeptide expressing nucleotide sequence isolated from the Sargasso Sea
cactaggcctacctactgagacctcagctagaatcgccagaaatactcaacttattttacaggaagaagcaggaataccaaatgttattgaccccttcggaggatcatattttatggagtcactttctaattcacttattcaggaatcaacaaagctacttaaaaaagtagaaaacctaggcggaatgacaaaagctgttgaatcaggaatgccaaaacaacagattgaagcctcctcggcaagaaggcaagccatgattgaccaagggaaggaaataattgttggaataaataaatataaagttggaaatactgaaccagttgaggtacgggaaattgataatactgcggtacgtgaagctcagattaaactgcttaaaaaaatcagaaaaaatcgtgatcagcaaaaggttgattctgaactaaatgcacttactgatgctgcaaatactggtgtagggaacctactagaactttcaataaatgctatgagggctcgtgcaactgtgggtgaggtttctttcgcgcttgaaaaagtctgggggcgttttaacgctcccattcaatcaatatctggagtttatgcaggagcatttccagatcagcagaaaattgctgacgtgcggaatgaaataaataaatttgctaaaaaagctgggcgccgtccaaggattatggttgcgaagattggacaggacggacatgaccgtggtgctaaagtaattgcaactgcatttgctgacatgggttttgatgttgacatagctcctctttttcaaacacctgaagaggtcgttaagcagtcaattgagaatgatgtacatgtgattggtatttcttcacttgcagctggacataaaaccttaattgagcaactgatgaaggttttacgccaagaaaattctgaagacattgcagttgttgctggcggcgtgattcctccaaaagattatgattttctaaaaagcttaggagtatgctgtatttttggtcccggcacaccaatacctgatgcagcacttgaagttctttcgtcactaaaaataactccctgaa

SEQ ID NO: 292908 - DNA, 1234 bp, Unknown
  Bacterial polypeptide expressing nucleotide sequence isolated from the Sargasso Sea
tatggcaacaaaaaagaaaacaaaacctgcaccaaaagagtatgtaactgactccagtattccgattaaaccattttaccaaaaatctacaaaaaagcgacctaaagaagaaccaggaaaattcccatttacacgaggaattcatcaaggaatgtatcgtgatagattttggacgatgcgtcagtatgctggctttggtgacgctgctcaaagtaacaaacgatacaagttcatgttggaaaaaggacaaaccggaatttctatggcatttgatttaccaactcaaattggtcatgatcctgatgctccacaagcagaaggtgaagtaggaaaagttggtgtatctatttcatcactcaaagacatgcaaactgtattcaacggaattgaattaggaaaagtttctacatctatgacaattaacgcaactgcatctacattacttgcatactacattgcagtaggacaatcccaaggattttcaagtaaacaactacgtggaacaacacaaaatgatatactaaaagaatacattgcaagaaatacctacatttatcctccagaaccttccatgagaataattggtgatatgattggatattgtgccactgaagttccacaatggtatcctgtttcaatttctggctatcatattagagaagctggttcaaatgcagtacaagaaattgcattcaccattgcaaatgctatacaatacatagaaacctgtcttgcccaaggactaaaaattgatgaatttgctccaagattatcatttttcttctgttgcacaattgaattctttgaagagattgcaaaattcagagttgcaagaaaggtttatgcaaaaatcctaaaagaaagattccacgcaaagaatgaaaaatcattacagttaaaattccatactcaaacaagtggtgaatcattaactgcacaacaacctgacaacaatattgttcgtgttgcaatgcaaacaatggctgccgttttaggaggaacacaatcacttcatacaaattctcgagatgaggcattagcacttccaaccgaagaatctgcaaaaattgcattaagaactcaacagattgttgcatctgaatctggtattacaaaaacagtagacccaatggcaggttcacattatttggaagaactatgtgatgagattgaagaacaaacctgggcatatcttaaaaaaattgataaaatgggtggttcactcaaagcaatt

SEQ ID NO: 292909 - DNA, 1373 bp, Unknown
  Bacterial polypeptide expressing nucleotide sequence isolated from the Sargasso Sea
tatggcagcaaaaaaagaaacaaaacccgcaccaaaagaatacgtaactgattcaaacattccaatcaagccattttatcaaaaatctgcaaaaaagaaaacaaaagaagaaccaggtaaattcccattcacaagaggaattcatcaaggaatgtatcgtgatagattctggactatgcgtcagtatgctggatttggtgatgcagcacaaagcaacaagcgttacaagttcatgttagaaaaaggacaaacaggaatctcaatggcttttgacttaccaactcaaattggtcatgatcctgatgcagcacaagcagaaggcgaagttggaaaagtaggagtatcaatatcatcactaaaagatatggaaactgtattcaatggaattgaattaggaaaagtttcaacatccatgacaattaatgcaactgcatcaacattattggcatattatatcgctgtaggacaatcacaaggattttcaagtaaacaattacgtggaaccacacaaaatgatattctcaaagaatacattgcaagaaatacgtacatctatcctccagaaccatcaatgcgtattattggtgatatgattggatattgtgcaaaagaggttccacaatggtatcctgtctcaatttctggctatcacattcgagaagcaggctcaactgctgttcaggaaattgcatttaccattgcaaatgccattcaatacatcgagacatgtctggcacagggactaaaaatcgatgactttgcaccaagattatcatttttcttctgttgtacaatcgaattctttgaagaaattgcaaagttcagagttgcaagaaaggtatatgcaaaaattctcaaagaacgattccatgcaaagaatcctaaatcattacaattaaaattccacacccaaacaagtggtgaatcattaactgcacaacaacctgacaataacattgtacgtgttgcaatgcaaacaatggctgctgttatgggtggaactcaatcacttcatactaattcaagagatgaagcacttgcattaccaactgaagactctgcaaaaattgcacttagaactcaacaaatcgttgcacatgaatctggaattactagaaccgtcgacccaatggcaggctctcattatctagaagaattatgtgatgaaattgaagaacaaacatgggcttatctcaaaaagattgacaagatgggaggatcactaaaagcaatcgagaaaggtttcttccaaggtgaaattagacaaaatgcatatcgtcttaaaaaagaggtagatgaggaatctcgaattttagtcggcgtcaacaaatttgtagatgcagaagaagcaaaacaaaaactactaagaatcg

SEQ ID NO: 292910 - DNA, 1660 bp, Unknown
  Bacterial polypeptide expressing nucleotide sequence isolated from the Sargasso Sea
tatgtccaagaaaaaaaaatcctatcaaaaagcaaagcaatcctggaaagagagctttgaaaattcaatatcaagaaattataattttgatacattgagtggaaaaaaattagaccctctttattttcctgaaaaacctagtgaagattatttagatcaattaggttttccaggtcagtttccatttactagaggggtccattcaagcatgtaccgtggaaaattatggacgaaaagacagttttcaggatttggtacagcaaaggagacaaataagcgctaccattcacttttagaaaaaggccaaacaggactttctgttgcttatgatatgccaacattaatgggttatgatcctgatcatccttggtcagagggagaggttggaaagtgcggtgtttctgtagcttcgatagatgatatggaagatttattcaaaggtattaatcttgaagaaatttccgtttcacaaacaattaatggaccagcaataattttgttagccttctatatcgccactgctgaaaaacaaggcgttgatatcaaacggcttcgaggcactcttcaaaatgatattttaaaagaatttattgcccaaaaagagtggatattcccaccagaaccttcaatgaaattaattactgatatgattgaatactgtaccgataaaatgccaaaatataataccatatcaatatctggttatcatattagagaagctggctcaacagcagcgcaagaattagcgtttacattggccgatgggtttacctatgttgagtatgcacttaaggctggtgtaaatatcgattcttttgctccgagattgtcattttttttcaattctcacctagatttttttgaagaaatagccaaattccgagcagcgcgaagaatttgggctaaacgtatgaaaaatcattatggcgcaaaagatccccaatcatggaaattgcgatttcatgcacaaaccgcaggatgctcattaactgctcagcagcctgaaaataatattgcccgaactgcgtttcagggtttagcagcggttcttggtggaacacagtctttgcataccaactctatggatgagacgctagccttgccttctgaaaaagcagctgaaatagcacttagaacacaacaattaattgcatttgaaacaggagtcgcaaacgttgctgatccattaggaggttcatggtttattgaaaatcttacagatgagctagaagaagaagctgaaaaatattttaaggaaattgataatatgggtggggttattccagcgattgaaaaagggtattttcaatatgagatatctcgatcagcttcatctcatcagaaaaaaatagataataaagaactaatacatgttggtgtaaacgagtttgagaaaattaacgaagagattgaaataccaattttagaaataggacaagaagtagaatcttatcaaaagaataaaataagacagttgagaaaaaatagaaatgatgaaatcacccaacaggcacttaaaaaaatacaaaaagcctgtaagaatggtgataatctgcttccatctataattgcagctgcaaaagcacatgcaactatgggtgaaatagtaataaaaataaaagatgaatttggtgaatggaatgaaacttcagtgttttaa

SEQ ID NO: 292911 - DNA, 1229 bp, Unknown
  Bacterial polypeptide expressing nucleotide sequence isolated from the Sargasso Sea
catggctgaaaaaaagaaagcaaaacctgcgccaaaacaatacgtgactgactctagcattccgataaaaccattttatcaaaaatctgcaaaaaagcgaccaaaagaagaacctggaaaatatccatttacacgaggaattcatcagggaatgtatcgtgaccgtttctggactatgcgacagtatgcaggatttggtgatgctgcacaaagtaacaaacgatacaagttcatgctagaaaaaggccaaactggaatttcaatggcatttgatttaccgacccaaattggtcatgatcctgatgctgcacaagcagaaggtgaagttggtaaagtaggtgtatcaatatcttcactaaaagacatgcaaactgtattcgatggaattgaattaggaaaggtttcaacttctatgacaattaacgcaactgcatctacattacttgcatattatattgcagtgggacaatcacaaggattttcaagtaaacagttacggggaactacacaaaatgacatcttaaaagaatacattgcacgaaatacctacatctatcctccagaaccatccatgcgtatcattggtgatatgattggatattgtgcaactgaggttccacagtggtatcctgtttccatatctggctatcatattagagaggcaggttcaaatgctgtccaagagattgcatttactattgcaaatgccatacaatacatagaaacatgtcttgatcaaggattgaaaattgatgaatttgcaccaagattgtcatttttcttctgttgtacaatcgaattcttcgaagaaatcgcaaagttcagagttgcaagaaaagtttatgcaaaaattctaaaagaacgattccatgcaaaaaatgaaaaatcattacaattaaaattccatacacaaacaagtggtgaatctctaactgcacaacaacctgacaataacattgtccgtgttgcaatgcaaacaatggctgcagtattgggaggtacacaatcacttcatactaattctagagacgaagctcttgcattaccaactgaagaatctgcaaagattgcacttcgaactcaacaaattgttgcatctgaatctggaataataaaaactgtggatccaatggctggctctcattatttagaagagctatgtgatgagattgaagagcagacatgggcctatctcaaaaaaattgacaagatgggaggttcactcaaag

SEQ ID NO: 292912 - DNA, 1627 bp, Unknown
  Bacterial polypeptide expressing nucleotide sequence isolated from the Sargasso Sea
atgaaaaaaattgattgggaaagtaaacataaggataagctaagagaaagaagaagtgaatttcaaactacgtccaatattaagatagaaagattctatactagccaggacatatcaaagaatatagatgagaagaattctcttcctggtgaatttccctttacaagaggtgttcaaccaacaatgtatagaggaagattctggactatgcgtcaatatgctggtttcggctctgctaaagaaactaatgaaagatttaaatatttactagacaaaggtcaaacaggtcttagtgttgcatttgatcttccaacccaaatggggtatgactctgatgcacctgtaagcaaaggcgaggtagggaaagttggggttgcaattgattcattgaaagatatagaaatcttatttgatggaatacccttagataaagtatcaacttctatgactataaatgctacggcatcaatgcttttagcgatgtatatcgttgctgcagagaaacaaggtgtttccgcagataagataatgggaacaactcagaatgatctattaaaagagtttattgccagaggtacatatgcttttccaccaaacccatctgttcaaataagtgttgatttaatggaatattgtaaggattatgtaccaaaatggaatccaataagtgtcagtggataccatataagagaagctggatcaactgcagttcaagaggtagcatttatgttagctgatgcaattgagtatcttgaaattgccaagaatagaaagcttgatatagatggaatttgtaaaagagtatctttcttttttgcagttcatggtaacttttttgaagaaatttctaagtatagggcggctagaaggatatgggctaatatattaagaaaagattttggtgttatggatgataatgcttgcaaatttaggactcattctcaaacaggcggcgttactcttacagctcagcaaccattaaacaatattgttagaacagctatgcaagctatggctgcggttttgggtggtacacaatcacttcatacaaattcctttgatgaagccttagggcttcctacagaagagtcggcaactatagcactgaggactcagcaaattattgcccatgaatgtgaagttgcaaatactattgatccatttgccggttcatactttatagagaacctcacagatcaaattgaagaaaaagtatatgaatatttaaatatcattaaagataagggcgggatggttaaatgtattgaggataattatattcaaagtgagattgagaacgctgcctatgattttcagattgaattagaaaaaaaagatagagtaattgttggtgtcaatgactttaaagcagatgaagaagaagtccctcctattcaaggtattgataaaaacttagaaaaaaatcagaatgaaagtttaaaagtattacgaaaccaaagagataatgaaaaagttgaaaattgtctaaacttattaactaaggctgcggaaaatagtgaaaatataatgccatatattttagacgcagtaagagaatattgtactattggtgagatgactcatgcacttgaacaagttcatggaagatataagggttcaatttaat

SEQ ID NO: 292913 - DNA, 1534 bp, Unknown
  Bacterial polypeptide expressing nucleotide sequence isolated from the Sargasso Sea
ccagataaaccagatagcaattacatggataatttaggatttccaggtcaattcccctttaccaggggcatacactctaacttatacagaggtaagctttggaccatgcgccaatttgcaggatttggaacaccggaagaaacaaaccgaagatttaaaaaattattaaagaaaggacaaactggcctctctgttgcttatgatatgccaacgctaatgggttacgatccagaccatgatttttctcaaggagaagttgggaaatgtggggtcagcgttttttccttatctgaaatggagagattatttgaaggaatagatctagaaaagatatctgtttctcaaactattaatggtcccgcaataatcttgttagctttttatattgcagctgcagataaaaaaggagtcagggcagaccaattaaaagggacattgcagaatgatatattaaaagagtttacagctcaaaaagaatggatattcccaccaaaatcatccatgcgaattattacagatatgttaaaatattgtacagaatcgatgccaaagtataatacgatatctattagtggttaccatattcgcgaagcaggttcaaccgctgcccaagagctagcatttacattagcagatggtttttcatacatagagcatggcataaaagctggattagatgttgatgactttgcaccaagactttcattttttttcaattcacatttagacttttttgaagagatcgcaaaatttagagcagcacgtcgtatatgggcaaaacacctaagatttaaatatggatctaaaaatcaaagatcatggaaattgcgttttcatacacaaactgctggatgtagcttgaccgcgcaacagccagagaataatatcgctaggacggggtttcaggctttggcaggtgtgcttggaggcactcaaagcttacacacaaactcaatggatgaaacactagcattgcctacagaaaaggctgcagagatagcattgcgtacacaacaattaattgcatacgaaactggtgtaacaaatgttgttgatcctctaggtggctcatggtatattgaaaaattaacggatgaaattgaattaaaggcagaagaatatttttctcaaatagaatctattggtggtgttatcccggcaattgaacaaggatttttccaaagagagatcgctaaatctgcggctgattatcaaagaaaagtagatgaagggaaaagaattgtagttggggtaaatgaatttattaaagaaaatgaagaaatagatattccaattttagagattggctctgaagctggcgatgaccagcttaaaaaactcttagaattaagaaataatagaaataatgaaaatgtaaagattagcattctaaaaataagagaagcttgtaataatggatctaatctgatgcaccctatcattgatgcagcgaaagaatatgcaaccttaggcgagattgtggatgtattaaaagctgaatttggagaatggcatgaaacagcagttttttaat

SEQ ID NO: 292914 - DNA, 545 bp, Unknown
  Bacterial polypeptide expressing nucleotide sequence isolated from the Sargasso Sea
aatggcaaaaaacgacaaagataaagaaaaattaaatatctggaaaaagagttttgaaaaagagaccaagaattctaatgctgaaaaagtatttttttctactgatgaggaaattgatattaagcctttatatactaaagatgaccttaaaaatctttcttttgtagatcctaattctttacctggaagcagcccttttactagaggtccaaaagcctcaatgtatacaaatagaccatggactattcgtcaatatgctggattttcaactgcagaggagtcaaatgctttttacaaaaaaaatctagaatcaggtcagaaaggtctttcagtagcttttgatcttcctacacatagaggttatgactcggatgaagaaattgttaagggcgatgttggaaaggctggagtagcaattgatactgtagaggacatgaaaattttgtttaaagacattcctttagatcaaatgtcagtttccatgacgatgaatggagcagttcttccaattttagcatcatttattgtggctggtgaagagcaac

SEQ ID NO: 292915 - DNA, 769 bp, Unknown
  Bacterial polypeptide expressing nucleotide sequence isolated from the Sargasso Sea
caagagttagctttcacaatagcagacggcttggaatatattagagctgcttctaaaaggggcttgttagttgatgattttgcaccaaggctatcttttttctttgcaattggaatgaatttctttttggaagctgctaaattaagagcggccaggtatttatggtccgaatggacaaaaaagttatttaattgtcaaaacccaaaatctcaaatgcttagaactcattgtcaaacttctggtgcaagtttgcaggagcaagatccatacaacaatattataagaactactattgaagcattggctgctactttaggtggtacacaatcattacatacaaactcatttgatgaggctataggattaccaacggaattttcagcaaaaatagcaagaaacacacaattaattcttcaacatgaaagtggtattactgacactgttgatccacttgctggtagttattttgttgaaaacatgactaaggagttaatagataaggcaaatgcacttattgaaaaaattgagggcatggggggtatgactgtagctgtaatggagggtttcccgaagtctcaaatagaaatatctgctactaaacgtcaggcaaaaattgactcaggtgaacaggtaattgttggagtaaataaatttaaatctgatcgacaagaccctattgaaattttagatatcgataatgacgcagttcgtgaagaacaaataaataaaaaaattgcgataaaaaaatctagaaatcctagtgatgtaa

SEQ ID NO: 292916 - DNA, 522 bp, Unknown
  Bacterial polypeptide expressing nucleotide sequence isolated from the Sargasso Sea
gatgaaaatttcaacttccaaaaaaaactcagatttcagagagtgggaagaaaaagtttgttcagaattaagggcttcaaatctttctggatttaactgtcagactccgggaggtattgaactcaaagctctttatactgcctcggatctagagaagttggaatgggttgacagtcttccgggtttattcccatttatccgaggccctaaggcttcaatgtatgcaggcaggccttggacaatccgacaatacgcaggtttttccaccgctgaagaatccaaccgtttttaccgagaaaatttaaaagcaggtcaaaaaggccttagcgtcgcttttgatctggccacgcatcgtggttatgactcggatcacccgcgtgtacggggggatgtgggcaaggcaggagttgccattgataccgtcgaggacatgaaactgctcttcgatggaataccactggaacaaatgtcggtatcgatgacaatgaatggagcagtccttcctgttttggcttcctacat

SEQ ID NO: 292917 - DNA, 700 bp, Unknown
  Bacterial polypeptide expressing nucleotide sequence isolated from the Sargasso Sea
atgacaaaaaataatagtttacaaagttggaaagaaaacgctcttaaagagctaaaaaaacaagatattgaggcaattatagtcgaaacgccagaaggcattaatattaaacctctttataccgaattggataataaagagataaaacatcttggttctaatccaggtgaagctccttatgtcaggggcccaaaagcaacaatgtatacaggaagaccttggacaataaggcagtatgcaggtttttctactgcttctgaatcgaacgaattttataaaaaaaacttagcttcggggcaaaaaggtctttctgtagctttcgatctagcaacacatagaggttatgattcagaccatgaaagagtttatggagatgttggtaaggctggagtcgcaatcgatagcgttgaggatatgaaaattctttttgatggtatacctcttgataaaatgtctgtatccatgactatgaatggggcagttcttcctgtattagcagggtatatagttgccgccgaagagcagggagttagtcttgaaaaattaagtggaactattcagaacgatattttgaaagaatttatggttaggaacacttatatctatccaccagagccctctatgagaattgtctcagatataattcattttacctcaaagcaaatgccaaaatttaactctatatctatttctggttatc

SEQ ID NO: 292918 - DNA, 688 bp, Unknown
  Bacterial polypeptide expressing nucleotide sequence isolated from the Sargasso Sea
atgaaagatcaagtttcgatcacaaatgaggcatttaaagaatgggaagagaaagctctttccgaactaaggggtaatgacctttctgagcgaaaatggcagactccggaaggtattgagctcaaagctctttatactgcctcggatctggagaagttggaatggattgacagtcttccgggtttattcccgtttatccgaggtcctaaggcttcaatgtatgcaggcaggccttggaccatacgccaatacgcaggtttttccaccgctgaagaatccaaccgtttttaccgagagaatttaaaagctggtcaaaaaggccttagcgtcgcttttgatcttgccacgcatcgtggttatgactcagatcacccccgagttagaggagatgtaggcaaggcaggagttgccatcgataccgttgaagacatgaaaatgctctttgacggaatccccttggatcaaatgtcggtatcgatgacgatgaatggagcggttctacctgttttggcttcctacattgttgctgcggaagaacaaggggttcaaaggtcacagatgagcgggaccatccagaatgacattctgaaggaattcatggtccgcaatacctacatctatcctcctgaacaatcgatgcggattgtaggggacataattgaattcaccagtcaggaaatgccccgct

SEQ ID NO: 292919 - DNA, 572 bp, Unknown
  Bacterial polypeptide expressing nucleotide sequence isolated from the Sargasso Sea
gatgaaaatttcaacttccaaaaaaaactcatatttcagagagtgggaagaaaaagtctgttcggaattaaaggcttcaaatctttctggatttaattggcagactccggaaggtattgaactcaaagctctttattctacctcggatctggaaaagttggaatgggttgacagccttccgggtttattcccttttatccgagggcccatggcatcaatgtatgcgggcaggccttggacaatccgacaatacgcaggtttttccaccgctaaagaatccaaccgtttttaccaagaaaatttaaaagctggccaaaaaggccttagtgtcgcttttgatcttgccacgcatcgtggttatgactcagatcacccccgagttcgaggagatgtgggcaaggcaggagttgccatcgataccgttgaagacatgaaaatgctctttgacggaatccccttgggtcaaatgtcggtatcgatgacgatgaatggagcggtccttcctgttttggcttcctacattgttgctgcggaggagcagggggttcaaaggtcagagatgagtgggacca

SEQ ID NO: 292920 - DNA, 826 bp, Unknown
  Bacterial polypeptide expressing nucleotide sequence isolated from the Sargasso Sea
aaaataaaaattaataaaaaaaaagaaaattgggaaaatctaattaaaaaggaagaaaatttaaaaataaattctagattatcagatagtattaaattaaatagcttatacactcttgctgatttagaggattttaaatttgctgaaagttttcctggtttattccctttcactcgtggaacttatggttctatgtatgttggacgtccctggacaatccgacaatatgcaggtttttccaccgctgaagaatccaaccgtttttaccaagaaaatttaaaagctggccaaaaaggccttagcgtcgcttttgatcttgccacgcatcgtggttatgactccgatcacccccgagttcgtggagatgtgggcaaggcgggagttgccatcgataccgttgaagacatgaaaatgctctttgaggggattcccttggatcaaatgtcggtatcgatgacgatgaatggagccgtccttcctgttttggcatcttacattgttgctgcggaggagcagggggttcaaaggtcacagatgagcgggaccatccagaatgacattcttaaggaatttatggtccgcaatacctacatctaccctccagagcaatcgatgcggatcgtaggggatatcattgaattcaccagtcaggaaatgccccgctacaactcggtcagcatcagcggatatcacattcaggaagcaggagcgaccacagttcaggaactggcatttactttgggagacggattggaatacgtccggatggcgttgaatcgtggaatgaatatcgattcatttgcgcccaagactttccttctttttt

SEQ ID NO: 292921 - DNA, 861 bp, Unknown
  Bacterial polypeptide expressing nucleotide sequence isolated from the Sargasso Sea
agagcagcaatgtcaaagggacttgatgttgatgattttgcgccgaggccctttttcttttttgcaatcggaacggacttttttatggagattgctaaactgagagccgcaagaactttgtgggcaaaaatcatgagagactttggagcaaaaaatgaaagatcactcattttaagaacacactgtcaaacatctggagtatctctaactgagaaagatccttataataatattataagaacatcctatgaggctttatctgctatacttggaggaacacaaagtttacacacaaactctttcgatgaggcaatcgcattaccgacagatgagtccgcaagaattgccagaaatactcaattgatacttcaaaatgaaactggtgttacaaaaacagtggatcctctagcggggtcatatttcattgaaagtttaactgacgaactatcaaaaaaagcttgggatattataaatgaaattgaagagttaggtggaatgacaaaggcagtaaaggcaggaattccaaaattaaaaattgaagaatctgctactaagaaacaagctaaagtcgatagtggatcaagggttgtggttggagtaaataaatttaaaaacccgaaagaaccagcagttgatgtaagagtaattgataataatcgtgttcgagatgatcaaattaagaaaatccaatcaataaaagactctcgagatacaaaagctgttgaaaaagcccttgaaaatataacaaatgctgccaaagatgaaaaaaatcttttaataccttgcattgaagcaattaaattaagagcaaccgttggagaagtatcgaaagctttagaacaagtatatggaagacatttt

SEQ ID NO: 292922 - DNA, 430 bp, Unknown
  Bacterial polypeptide expressing nucleotide sequence isolated from the Sargasso Sea
atgataccaaatttttcaaccactcccctatatgacgatactaaaactactggttctaacgcttcgggaaatgctcgggaagaagatttctaccacgatgtattagagacgccagaagggatagatataaagacgttatatgaagaggttgacacgaacgggctcgattttttggatacttggccgggcatgccaccttacgtgagaggcccctatccaaccatgtacaccacgaaaccctggactgtcagacaatacgctggttattctacggcagaggagtcgaacgcattttaccgccgaaatctagcagctgggcaaaagggcctgtcagttgcgtttgatttagcaacccatcgtggctatgactctgatcaccccagagttgccggtgacgtaggtatggccggcgtagcaattgactcgattt

SEQ ID NO: 292923 - DNA, 718 bp, Unknown
  Bacterial polypeptide expressing nucleotide sequence isolated from the Sargasso Sea
tccttcttttttgggatcggtatgaactatttcatggagattgccaaacttcgtgcggcacgtcgactctgggctgagatgatttcagagtttaaacccgaaaatccgaaatcaatgatgcttcgcacccattgccagacatcgggttggagtttgactgagcaggatcccttcaacaatattgtgagaaccacgattgaagcgatggcggcggtccaggggggaacacagtcgcttcatacgaatgcttatgacgaagccctgggacttcccacccggatttctgcccgggttgcgcgcaacactcaactcatcatgcaggaagaaaccgggatgacccgggtgattgatccatggggaggatcttatttcatggaatctctcaccgaatccctcgtggtagaaagtagaaaactcctggatgaggtcgaagagcttggtggaatgacacgtgccgtagaacagggatttcctaaacaacggatagaggaagctgccgccataagacaagcaaagatcgatcaaggtgaggaagtcattgtaggcgtcaataagtaccaaacggacgaatcagagcaaattgaagtcagggaagtagataacacggaagtacgaaataaccagattcaaaggttggagcagattcgaaaatcccgggataatacaaaagtccaagatgctcttaaaattttggaagacagggcttttactggaaaag

SEQ ID NO: 292924 - DNA, 625 bp, Unknown
  Bacterial polypeptide expressing nucleotide sequence isolated from the Sargasso Sea
aatgccactctcaaaatctacttctgcattgaaagactgggaaaaaaaagcctccttagaactggaggggaaacccacatcttcagtaaactggaacactctagaaaacattgaaataaaaccgctttatacctctgaagacttggaaaaattaggttacacagaaacactccctggtttttcccctttcaccagaggaccgcgtgccacaatgtattctggtcgtccctggacaatcaggcagtatgcaggattttcaaccgcggatgaatcaaacaaattttacaggaaaaaccttgcattgggacaaaagggtctcagtgtggcttttgatcttgcaacccataggggctacgattctgatcatcagcgggtgcttggagatgtcggaaaagcaggagtagcaatagattcggttgaagacatgaaaatcctattcgaccagataccacttgatcaaatgtctgtttccatgacaatgaatggtgcggtattgccgattttagcctcttatgtagttgctgcagaagagcaaggagttaagcaggaacagctcaaaggaaccatccaaaatgatattttgaaggaattcatggtacgcaacacctatattttcctccatcac

SEQ ID NO: 292925 - DNA, 604 bp, Unknown
  Bacterial polypeptide expressing nucleotide sequence isolated from the Sargasso Sea
atgaaaacaaaaaatagtgataattatacaaagtggcagaaaagctttgaacgagaaaccaagattgatctcaacgaggcgtcttctgaaacagatgaaggtattgaaataaagccagtttatacaaaagctgacattgagaatctttcatttgtagataatgactcactccctggtcagttgccatatacgaggggcccaaaagcttcaatgtatacaaatagaccttggacgataaggcagtatgctgggttttctacagcagaggagtcaaatgatttttataagaaaaatttgaaatctggtcaaaaaggtctttcagttgcatttgatctgccgactcatagaggttatgactctgatgatgatttagtaatgggggatgttggcaaggccggtgttgccattgatactgttgaagacatgaaaattctattcaatgacattccacttgatcagatgtctgtatcaatgacgatgaatggggcagtgcttcctgtcttatcctcattcattgttgccggggaagagcaaaatgttaataaaaatttactatctggaacaatacaaaatgacattttaaaagaattcatggtgagaaata

SEQ ID NO: 292926 - DNA, 961 bp, Unknown
  Bacterial polypeptide expressing nucleotide sequence isolated from the Sargasso Sea
gacggtatggagtatgtaagggcagctctatcaaaaggattggatatagatgattttgctcctcgactttctttcttctttgctattggaactgatttctttatggagattgcaaaacttagggcagcaagaacattatggtataaaataatgaaagattttggagcgaaaaatgaaaagtccatgattctcagaacacattgtcagacttcaggagtatctcttactgagaaagatccatataataatatcattaggacatcgtatgaggccctttctgcaattttaggaggaacacagagtttacacactaattcatttgatgaagctattgctcttcccactgatgaatctgctcgaatagcaagaaatacgcagcttattcttcaaaatgaaacaggagtaactaatactgtagatccattagcaggttcatattttattgaaagtcttacagatgagttatcaaaaaaagcttgggatattatagaggaaattgagtcgcttggtgggatgacaaaagcagtaaaagctggtgtgccaaaattaaaaattgaagagtctgctactaaaaaacaagctaaagttgatagtggttcaagagttgtagtaggggttaataagtttaaaaatccagaagagcccaaggttgatgtaagggtaattgacaataataaggtcagagatgatcaaataaaaaagatcaatgatattaaagcttctagagatcaaaaggcagtagatgagtcgctagcaaaattagtgacggcagctaaagaggatagtaatttgttagcgcgttcaattgatgctataaaaaacagagcaacagttggagaagtatcaaaagcattagagcaagtatacggaagacattttgcaacgtctttaagtgtctcaggagtgtatgggaaacattttgaaggtgatgtggattttatgaatgtagcaaaaaaagtaa

SEQ ID NO: 292927 - DNA, 620 bp, Unknown
  Bacterial polypeptide expressing nucleotide sequence isolated from the Sargasso Sea
gatgaaaatttcaacttccaaaaaaaactcagatttcagagagtgggaagaaaaagtctgttcagaattaaaggcttcaaatctttccagatttaattggcaaactccggaaggtattgaactcaaagctctttattctgcctcggatctggagaagttggaatggattgacagtcttccgggtttattcccatttatccgaggtcctcaggcttcaatgtatgcaggcaggccttggactataagacaatacgcaggtttttccaccgctgaagaatccaaccgtttttaccgagaaaatttaaaagcaggtcaaaaaggccttagcgttgcttttgatcttgccacgcatcgtggttatgactccgatcatctccgagttcgtggagatgtgggcaaggcaggagttgccatcgataccgttgaagacatgaaaatgctctttgacgggatccccttggatcaaatgtcggtatcgatgacgatgaatggggcggtccttcctgttttggcttcctacattgttgctgcggaagaacaaggggttcaaaggtcacagatgagcgggaccatccagaatgacattctgaaggaattcatggtcccgcatacctacattt

SEQ ID NO: 292928 - DNA, 888 bp, Unknown
  Bacterial polypeptide expressing nucleotide sequence isolated from the Sargasso Sea
gatgctcagaacacattgccaaacttcaggtgtaagtttgcaggaacaggatccctataacaacgtagtaagaacagcatatgaggcattagcggctgtgctaggtggaactcaaagtcttcatacgaatgccttagatgaggctattgctttacctaccgaattctcagcaaaaattgccagaaatacacaattgattcttcaggaagaacttggaattacaaatgtcgtcgatccacttgctggcagttattatgtcgaaactttaactaatgaactttgtgaaaaggcatgggagcagatccaggaaattgaaaaattaggaggtatgactaaagcagttgaacttggcttacctaagcgacgaatagaagaatctgcagcagttcgacaggctaaggtggatagtggtgaagaagttatcgttggagtgaataaatatgttggagatgaggaacaaaacgttgaagttcgagatgtcgacaatcttaaagttcgctttgagcagattgaaagactaaaaaaaataaaaaatagtagagatgaagagagatgcaaagctgcattagataagatgaaggtagcagcaagagacggcaccgagaatatactggcattggcaatcgatgctgccagagaacgtgccactgtaggagaaatgtcatacgctttagaggaagtgtatactaggtattcaactacgagtgaggttggaaaaggacaatatgccaaatccttcaaaaataaagaagagattgaacagacaatagatcttgtcgaaagttttactagaatggaggggcggaagcctaaaatgttagtcgtaaaaatggggcaagatgggcatgatcgaggagctaaagtaattgcttcagcgtttatcgattt

SEQ ID NO: 292929 - DNA, 768 bp, Unknown
  Bacterial polypeptide expressing nucleotide sequence isolated from the Sargasso Sea
tttgcccgcattaggatgcgctgatgcggcaatacaagcgcagctcgccggtagccaacccggtattgccccatttttgcgcgggccataccccagtatgtatgccacccgcccatggacaatcagacaatatgcaggcttttcaacagctgaagaatcgaatgccttttaccgcaaaaatttagcggcgggtcagatgggattatcggttgcattcgatttgccaacgcaccgggggtatgactcggataacccattggtggcggatgatgtcggtctggctggtgtggcgattgactcgattgccgatatggccgttctgttcgactcgattccgcttgaccaaatgaccgtatcaatgacgatgaatggcgctgttttaccagtgctggcgctgtttatcgtggccgccgaagaacagggcgtatctgctgaaaaattggctggtaccattcaaaatgacgtgctgaaagaatttatggtgcgcaacacctatatctacccaccatcgccctcaatgcgggttgtgtcggatattttcgcattttgcgccaaagagatgccgaaattcaattttatttcggtgtcaggctatcatatgcaagaagctggagcttcggctgatttggagcttgcctatacgctggccgatgggcttgcttatatccgtgcgggtgtcgatgcgggtttaaaggttgatgattttgcaccgcgcctgtcattcttctttggaattggcatgaatttttatatagaagttgccaaatt

SEQ ID NO: 292930 - DNA, 630 bp, Unknown
  Bacterial polypeptide expressing nucleotide sequence isolated from the Sargasso Sea
attggaagaaaacgcaattaatgaattaaaaaatccaaatgttgatgatatctacattaacacaccagaaggaattaatataaagccattatacacttcagcagataatgaaaatattagtcatcttgatagctatcctggtgaacctccatttttaagaggcccaaaagccacaatgtatacaggtagaccttggacaattcgtcaatatgctggcttttcaacagcttcagagtcgaataaattttataaaaaaaatctagcctctggacaaaaaggtttgtcagttgcttttgacctggcaactcacaggggctacgattcagatcatgagagggtatatggagatgtaggcaaagcaggtgttgccatagatagtgtagaggatatgaaaattctttttgatggtatccctcttgataaaatgtctgtatcaatgacaatgaatggagcagttcttcctgtgttagcaggttatatagttgcagctcaagaacaaggcgtaagtctaagagaacttagcggcactatacagaatgacatacttaaagaattcatggttaggaacacatatatatacccaccagaaccgtctatgagaattgtttccgatattattaattttacatc

SEQ ID NO: 292931 - DNA, 523 bp, Unknown
  Bacterial polypeptide expressing nucleotide sequence isolated from the Sargasso Sea
atgagtaaaatccctaatttctcaaaaattgaactcgatcagaatataggaataaacaatgaggaaatcgaaaaacttgcatctaccaattcagatcaagggcaggttgagccatgggaaacagctgagaaaatttcaattaataactgttacacccacaaagatttagaaagtttagattttctgaatgggtggccaggattggctccctttttgagaggccctcacgcgacaatgtataaaaccagaccttggacaattagacaatacggtggattctcgacagcagaagaatcaaatgctttttatcgaagaaatcttgaagatggtcaaagaggaatttctgttgcgtttgatcttgccactcaccgagggtatgacagcgaccatcctcgagtagcaggtgatgttggaatggcaggtgtggcaattgattccattttggacatgcaaaaactctttgatgggataccacttgacaaaatgagtgtctcaatgacgatgaacggtgctgttttaccaa

SEQ ID NO: 292932 - DNA, 531 bp, Unknown
  Bacterial polypeptide expressing nucleotide sequence isolated from the Sargasso Sea
aatgactgacaactacaaaactgacctggcaagctgggaagcacaggtaaaaaaagatctaaaaggcggctctcacgagcaactgatccggcatacgccagagggcatttcacttaagccgctatacacagcccaagatttagaacacattcagcacctaaacactctacctggtctgccgccgttcgtcagaggcccacgagctaccatgtatactgggcgaccctggacggtgcgccaatacgctggcttttccactgctgaagaatcaaatcagttttatcgtgaaaacctaaaagctggtcaaagagctctttctgttgcatttgatctagcgacacacaggggctacgactctgaccaccccagagtagttggggacgtcgggaaagcaggggtcgccatcgatacagtggaggatatgaagatactgttcgccgatatccctttatcccagatgagcgtctccatgaccatgaacggcgctgttctaccggtccttgcggcttatatagtagcagccgaggaaca

SEQ ID NO: 292933 - DNA, 508 bp, Unknown
  Bacterial polypeptide expressing nucleotide sequence isolated from the Sargasso Sea
gatgaataaaaagaattttgtcaatataaccctaaaggactttagtccaaaatctacccaaaaagaaaaaaatgtgttttttgagaccgatgaacaaataaaaattaaatctaattattattcaaaggatttttcaaaaataaaagtatctgagtcaatcgctggattaccaccttttgttcgtgggccttactcatctatgtataccaaaaaaccatggacaattagacaatatgcaggtttttctacagcaaaagaaagtaataaattttatagagaaaatttaaaagctggacaaaaaggcctttctgttgcttttgatttgccaacccatagaggttatgattctgataatcccagggtaattggagatgttgggaaagcgggggtagccattgacagtgttgatgatatgaaaatattattcgatgggattccattagacaaaatgagcgtttcaatgacaatgaacggagcggtattaccaattatggcattttatattgtt

SEQ ID NO: 292934 - DNA, 884 bp, Unknown
  Bacterial polypeptide expressing nucleotide sequence isolated from the Sargasso Sea
taccctggctgacggccttgaatatgtgaaagcggctacagaaaaaggactggatgtcgacaaattcgcaccccgcctgtcgtttttcttttgtattgggatgaatttcttcatggaagctgccaaattacgtgccgcgcggacattatgggcccgttggatggaaaagcttttcaacccaagtgatgaacgctctttgatgttgcgaacgcattgccaaacctcaggggccagtctggcagagcaggatccatataataatattatccgcaccacgattgaagcaatggccgcaaccttgggcggcacgcagtccctgcatacaaattcatttgatgaggcgattagcctgccgacagatttttcagctagaattgcacgcaatacacagctgattttgcagcatgaaaccggcataacagacactgttgacccccttgcggggtcttactatgtcgaaaatctgacagctgatctgatccaaaaagccaatgcacttattactgaaatccaggacatgggcggaatgacaaaggctgttcaggacggactgcccaagcgtgagatcgaaaaaatggcaactgcccgccaagctcgagttgattcagggcaggacgtcattgttggcgtcaataaatttaagctgagtgatgaagagcctattgatattcttgatatagataatgatgcagtgcgtgcacgacaaacagaacgcttgaatgaaatccgaaaaagacgagatgagaatgctgtctctaacgcgcttggcaagcttaaatcagctgccaaagatgaagataataatctcctagccgcaacgattgatgcgatgcgtgcacgcgcaagtgtgggcgaagtatcagatgctttagaagagatcttcg

SEQ ID NO: 292935 - DNA, 801 bp, Unknown
  Bacterial polypeptide expressing nucleotide sequence isolated from the Sargasso Sea
attaaaaagctttttaatccaaaagataaaaaatctttgatgctaagaactcactgtcaaacctcaggggtctcattgactgaaaaagatgcttataacaatattatcagaactacaatagaggcaatggcagctgtaatgggtggtacacaatcattgcatactaactcttttgatgaggcggttgctctacctactgaacattcttctagaattgcaagaaatactcaactgattcttcagcatgaaacaaatattagtaatgttattgatcctttagctggcagctactttatagaaaacttgactaatacagtaataatcaatgctggaaatcttattgataaggtactgaaaatgggaggtatgactaaagctatagaaaaaggatatccaaatgaactaattgaaaagtctgctttaataaagcaggcagaagtagacagcggtaaacaagttattgtaggagttaataagtacttaaatgaaaatgaaaaggattttgaaattcttaaaattgataattctttagtaataaaaaatcaactgcagactcttaataagattaagaaaagtagagataaaagtaaagttaccaaatctttagaaaatttaaaatatgcagcaaaaaataatgttaacaatttattagcattatcggtagaagcaatgaagaatagggcaaccgttggagaagtttcatatgccttagaagaggtatttggaagatttgaaggtaagcctgcaatttctaaaaatatttacgctagtcattttgacgaattagagaagttagaaatt

SEQ ID NO: 292936 - DNA, 685 bp, Unknown
  Bacterial polypeptide expressing nucleotide sequence isolated from the Sargasso Sea
atgaaaacaaaaaatagtgaaaattatataaagtggcagaaaagctttgagcgagaaaccaagaccgatctcaacaaggcgtcttatgaaacagatgaaggtattgaaataaagccagtttatacaaaagccgacattgaaaatctttcatttgtagataatgattcactccctggccaattaccatttacgaggggaccaaaagcctcaatgtacacaaatcgaccttggacgataaggcagtatgctggattttctacagctgaagaatcaaatgagttttataaaaaaaatctaaaatctggacaaaaaggtctttcagttgcttttgatctaccaacacatagaggttatgactctgatgatgatttagtaatgggcgatgttggtaaagctggagttgccattgatactgttgaagatatgaaaattctattcaatgatattccacttgatcagatgtctgtatcaatgacgatgaacggagcagtgctgccagtcttatcctcgttcgttgttgctggggaagagcaaaatgtgaataaaaatttactatccggtactatacaaaatgacattttaaaagaattcatggtgagaaatacttacatttatccgcctgatccatccatgaaaatcgttgctgacataattgaatttacatctaaggaaatgccaaaattta

SEQ ID NO: 292937 - DNA, 879 bp, Unknown
  Bacterial polypeptide expressing nucleotide sequence isolated from the Sargasso Sea
gttcgtggaccgaaagcaagtatgtacaaaggtagaccatggacaattagacagtattcaggattctcaactgcaaaagaatctaacgaattttataaaaaaaatctttctgcaggacaaaaaggtctttcagttgcttttgatcttgctactcatagaggttacgattctgatcatgaaagggttcaaggtgatgttggcaaggcaggtgtagctattgacactgtagaagatatgaaaattttgttcgatgatataccgcttgatagaatttccgtctctatgacaatgaatggagctgttttaccaatcttatcaagttacatagttgcagcagaagagcaaggggtaagtttaaagcaacttagcggtaccatccaaaatgatatattaaaggaattcatggttagaaatacttttatatatcctcctgaaccttctatgaggattgtctctgatattatttcatttacatcaaaaaccatgcctaaatttaattctatttctatatcaggttatcatatgcatgaagcaggagcaaatctagttcaagagctagctttcactatcgcagatggattggagtatgtaagagcagcaaaaaatagaggtttaaatgtagatgattttgcacctagaatctcttttttctttgcaattggaatgaatttttttatggaagcagcaaaattaagggcagcaagatatctttggtcaaattggatgaaaaagttatttaattgtaaaaataatcaatcacaaattcttagaactcactgtcagacatctggagctagtttacaggaacaagatccatataacaatatcataaggaccactatagaagctttagctgctgttttaggaggcactcaatct

SEQ ID NO: 292938 - DNA, 1132 bp, Unknown
  Bacterial polypeptide expressing nucleotide sequence isolated from the Sargasso Sea
attgaagcgctcggcgctacgcttggcggcacccagtctctgcataccaacgcctttgatgaggcgctcgggctacccaccgatttctccgcccgcatcgcacgtaatacacagatcatcattcaggaagagtcagagatctgccgcaccgtcgatccgctggccggatcgtattacgtcgagtcgctcaccgatcaaatcgtgaagcaggcgcgcacgatcatcaaacaaattgatgaggcaggcggcatggcgaaagcgatcgaagccgggctccctaaacggatgatcgaagaagcttccgcgcgcgagcagtcgctgatcgaccagggtaaacgcgttatcgtcggcgtgaacaaatacaagctggataaagaagacgaaacgtcggtactggagatcgacaacgtgaaggtgcgcaacgagcaaattgcctcgttgcagcatatccgtgcaactcgtgacacagatgccgtcaatgccgcactcgcggcgctgacccacgccgcgcagcataatgaaaatctgctggccgccgccgttaacgccgcccgcgttcgcgccacgctcggtgagatctccgacgcgctggaaaccgcttttgaccgctatctggttcccagccaatgcgtcaccggcgtgattgcgcaaagctatcaccagtccaacaaatccgccgatgagttcgacgccatcgttgcgcaaaccgaacagttcctcgcggaaaatggtcgccgaccgaggattctgatcgccaagatgggccaggatggtcacgatcgcggcgcgaaagtgatcgccagcgcctactccgatctcggcttcgatgtcgatctcagtccgatgttctccacaccagaagagatcgcccgtctggcggtagaaaacgatgtgcatgtaataggcgcatcgtcactggcggcgggtcataaaacgctgatcccggaactggttaccgcgctcaaaaaatgggggcgtgaagatatctgcgtggtagcaggaggcgttattccgccacaggattacgccttcctgcacgagcatggcgtggcagccatttatggccccggcacgccaatgctcgacagcgtccgcgatgtgctaacccgtatcagtcagcatcatgattaac

SEQ ID NO: 292939 - DNA, 1121 bp, Unknown
  Bacterial polypeptide expressing nucleotide sequence isolated from the Sargasso Sea
aatgcttaggacacattgccaaacttctggggcaagtttacaagagcaagatccttataataatattattagaactactattgaagcactagcagctactttagggggaacacagtctttacatacaaattcatttgatgaagcaataggtttacccactgaattttctgcaaaaatagctagaaacactcaattgatccttcaacatgaaacaggcattacagatacagtggatccacttgctggtagttattttgttgagaatatgacaaaagagttaattgataaatctaatgaacttattgaaaaaattgaagaaatgggaggtatgactgtagctgtcattaatggttttccaaaatcagaaatagaaatttctgcaacaaaacgtcaagcaaaaattgactctggagaacaagtaattgtaggagtaaacaaatataaatcagatgaaaaagaaaaggttgatgttttagatattgataataaagcggttcgtgaagagcaaattaaaaaattaaacgaaataaaaaaagttagaaattcaaaagaggtcgacaatgcattacaaaacttaaatgaagctgcaaaagaaaataaaggtaacttattagatttgacaattgttgctattaaagcaagggctacagttggtgaggtgtcttatgctctagaagaagtctatggtcgttatggagtaaagcaagatataatcaaagatgtatataagagtgcctataaaaataaagcagacttcaaaaaggtagatatagctctatctaattttaaagacatagcaggtgaaaatcccaaaatctttatggcaaagcttggacaagatggtcatgacagaggagcgaaagtaattgcatctgcttttacagatattggtttctcagttgaaattggtactttgtttcaaactcctaaggaggccgttgatctagctatagatttaggggtacacgtaattggtgtatcctctctagctgctggccataaaacattgatacctgaattaattgatgagcttagaaaaagacaagctgatgatattcttgtagtgtgtggtggtgtaatccctgctcaagattatcaatttttatatgatgctggggttg

SEQ ID NO: 292940 - DNA, 1653 bp, Unknown
  Bacterial polypeptide expressing nucleotide sequence isolated from the Sargasso Sea
gagctgttatacccatcatggcaatgtttgttgtagctgctgaagaacaaggtgttgagcagtcaaaactcaaaggcacgttacagaatgatatcctcaaagaattcatggtcagaaacacctatatttatcctcccaatgactcaatgagaatagttgctgatatcattgaatattgttctcacaatctgcctcaattcaataccgtttcaatttctggatatcacatgcttgaagcaggagccacttgcacacaagagcttgcttatacactggctgacggattggaatatgtaagatctgctatgaataaaggcctagatatcgatgactttgccccgagattatcattcttttttgggataggaatgaacttcttcatggaaatcgcaaaattaagggctgcgagatttctctggtctgagatgattgaaaaagagttttctccaaaaaatccaaagtctttgatgctcagaactcattgtcaaacatcaggtgtaagtctcaccagtcaggacccatacaacaatatagtcaggacaaccatagaggccatggcagcggttttgggtggaacgcaatcattgcacacaaattcatttgatgaggcattggctttaccaactcccttttctgctcaaattgcaagaaacacgcaattggttctaagagaagaatctggtttgacaaaagtggttgacccacttgctggctcttactatctagaatctcttactggttcaatgatcaatgaaaccaaaaagctcatacaagaggttgaggatcttggaggaatgacaaaggcaattcaagcaggggtgccaaaattaagaattgaagaatcagcagcaatcaggcaagcaagagtggataaaaaagaggatgtcattgttggtgtaaatgcttatcaaaacaaggatcaaaaagaagtcgatatactttcaatagataacgagggcgtcagagaccaacaaatcagcaagcttgaatcaattaaaaaagaaagaaatgaagaagcatgtcaaaatgcattggctgaactagaaaaatgtgcagctgatgatggtaacttgatggcatctgcgattgaagcagcaaaacatcgagcaacggttggtgaaatctcaatggcaatggagaaagtctttgggaggcatcaggcagtttctcaatcgattagtggtgtttatcgaaaagagtatgagggcgatgaagattttatgaatgttgaagataaagttaatgaatttgagaagtctcatggtagaaggcctagaattttagtggtcaaactgggtcaggatggacatgatcgaggagcaaaagtgattgctacagcctttgcagatatggggtttgatgttgacatcggcccactttttcagacacctgaggaagcagcgagagatgcaattgaaaatgatgttcatatcatcggagtatccacacaagctgctgggcataaaacattggttccaatactgatgaattctcttgcagaacaaggttcagaaaatatactggtcgtctgtggcggaatcattcctgaacaagacatagaagcacttaaagattgtggtgtcgctgcagtatttggtccaggaacgaatatcacaaaagcagcattgaatgtaattgatatgattctctaaa

SEQ ID NO: 292941 - DNA, 966 bp, Unknown
  Bacterial polypeptide expressing nucleotide sequence isolated from the Sargasso Sea
gacggattggaatacgtccggatggcgttgaatcgtggaatggatatcgattcatttgcgccaagactttccttcttttttgggattggcatgaactattttatggagattgccaaacttcgtgcggcacgtcgactctgggctgagatgatttcagaatttaaacctgaaaatccgaaatctatgatgcttcgcacccattgtcagacatcgggttggagtttgacagagcaggatcccttcaacaatattgtgagaaccacgatagaagcgatggcggcggtccagggtggaacacaatcgcttcatacgaatgcatatgacgaagccttgggacttcccactcggacatctgcccgggttgcccgcaacacccaactcatcatgcaggaagaaaccgggatgacccgggtgattgatccatggggaggatcctatttcatggaatctctcaccgaatccctcgtggtagaaagcagaaaactcctggatgaggtcgaagagcttggtggaatgacacgtgccgtagaacaaggatttcccaaacagcggatagaggaagctgcagctataagacaagcaaagatcgatcaaggtgaggaagtcattgtaggagtcaataaataccaaacggacgaatcagagcaaattgaagtcagggaagtagacaacacggaagtacgaaataatcagattcaaaggctggagcagattcgaaaatcaagggataatacaaaagttcaagatgctcttaaaattttggaagatagggctttaactggaaaaggaaatcttctggaagcaagcatcgaagcggtccgtgccagagcaacggttggagaaatatccgatgccttggaaaaacattggggccgttaccatgcaccaaacagtgcagtttctggagtttatgccaagagttattcaagtcatgacgaaattgaggaagtcaggcgaaaagttcaa

SEQ ID NO: 292942 - DNA, 732 bp, Unknown
  Bacterial polypeptide expressing nucleotide sequence isolated from the Sargasso Sea
aaattaaataaagaggatctatttattgatccagatggaatatctattaaacacatttacagtaaatctgatttagataatattaaacaccttgatttttttcctggaattcctccttatattagaggaccttatgcctcaatgtatacgcaaaggccatggacaataagacaatatgctggtttttctacagctaaagaatctaatcttttttataaaaaaaatctagccgctggacagaaagggctttctgttgcttttgacctagctactcatcgtggatatgactccgatcatgaaagggttgttggagatgttggaaaagctggagtagcaatagactctgttgaagacatgaagcaactttttaatggtattccattaaatgaaatgtctgtatcaatgacaatgaacggtgcagtaattccaatcatggctttttttattgttgctgctgaagaacaaggagttcatccagaactactttcagggaccattcaaaacgatatccttaaagagtttatggttaggaacacctatatatacccaccaaaaccttcgatgagaataattgccgatatttttaaatacacttctgaaaagatgccaaaatttaactctatctcaatttctggataccacatgcatgaagctggtgcaacccctgcaattgaattagcatacactttagcagatggtttagaatatgttagaaccggaattaatgcagga

SEQ ID NO: 292943 - DNA, 691 bp, Unknown
  Bacterial polypeptide expressing nucleotide sequence isolated from the Sargasso Sea
agaaactaagaaagactttagtgattcaaattcagagactgatgaaggaatagatattaagccagtatacactaaagatgacctagaaaacttttcatttgtcgagaataactctcttcctggccaatggccttatacaagaggtccaaaagcatcaatgtatacaaatagaccttggacgatcaggcagtatgcaggattttcaacggctgaagagtcgaatgaattttataaaaaaaatttagagtctggtcaaaagggtctatcagttgcttttgatttgcccacccatagaggatatgactcagatgatgatttggtaatgggggatgtgggtaaagctggtgtagcaattgatactgttgaagatatgaaaattctttttaataacattcctttagatcaaatgtctgtatcaatgactatgaacggggcagtattgccagtacttgcatcatttattgttgcgggagaagaacagggcgttgatagaagtttactatcaggaacaattcaaaacgacattctaaaagagtttatggtgagaaatacatacatatatcctcctgagccatcaatgaagattgttgccgatatcatagaatttacttcaaaggagatgcctaaatttaattctatttcaatttctggttatcatatgcaagaagcaggtgctgataatgttcttgaa

SEQ ID NO: 292944 - DNA, 934 bp, Unknown
  Bacterial polypeptide expressing nucleotide sequence isolated from the Sargasso Sea
ttcaccaaagtctcactcgctgaactcggcacgaatggcggcacatctgccgcgcggacactcgaaacgcccgagggcatctcactggcaacggcctattccgcggaagacacgaaagcgctcgacacgctggacgatttcccggggctcgcacctttcggccgtggcccttacccgaccatgtacacacagcggccttggacggttcggcaatatgcgggcttctcgacagccgaagactcaaacgccttctatcgccgcaatctggccgccgggcaaaagggactctccgtcgccttcgacctagcgactcatcgcggctatgacagcgaccatgtccgcgtctcaggcgatgtcggcatggccggcgtggcgatcgactccatctacgatatgcgcacgctcttttctggcattccgctcgatcagatgtcggtctcgatgacaatgaatggcgcggttctgccgatcatggcgctctacatcgtggcggccgaggaacagggcgtgccacctgagcagctcgcggggacaattcagaatgacattctgaaagagttcatggtgcggaacacctacatctatccgcccaaaccctcgatgcggatcatctccgacatcttcgcttacacctccgaaaagatgccgcgattcaattcgatttcgatctccggctatcacatgcaggaagctggcgcgacggcggatctcgaactcgcctacacgctcgccgatggcatcgaatacatccgcgctggcgttggcgccgggctcgacgtcgacaagtttgcgccccggctctctttcttctgggcgatcggcatgaacacgttcatggaagtcgcgaagatgcgcgccgcgcgcttgctttgggcgaatttggtgaaggcagaattcaatccgaaaaatgcaaaatcgctgtcgctgcgaacgc

SEQ ID NO: 292945 - DNA, 707 bp, Unknown
  Bacterial polypeptide expressing nucleotide sequence isolated from the Sargasso Sea
aatgactgataactataaatccgacctggaaggctggaaagcccaggtaaaaaaagatctgaaaggcggctctcacgagcaactgatccgccatacaccagagggaatttcgcttaagccgctatacacggtacaggatttagaaaacattcagcacctaaacacgctacctggtctgccaccgtttgtcagaggcccacgcgctaccatgtatgctgggcgaccttggaccgtgcgccagtacgctggcttctctaccgctgaagaatcaaatcagttttatcgtgaaaatctaaaggctgggcaaagagctctctctgttgcgtttgatctggcaacacacagaggctacgactccgaccacccccgggtcgttggtgacgttggaaaagcaggggtggctatcgatacagtagaagacatgaagatattatttgccgatatccctttatctcagatgagcgtctccatgaccatgaacggcgctgttctgcccgtcctcgcagcttacatagtagcggccgaggaacaaggggttgaaaaagcagcgctcacaggaaccatacaaaatgatattctcaaagaatttatggttcgaaacacctatatctacccgcctgacccgagcatgagaattgtagcagatataattcaatacgcttcccaaaacatgccccgtttttattccatctccatctcgggctatc

SEQ ID NO: 292946 - DNA, 995 bp, Unknown
  Bacterial polypeptide expressing nucleotide sequence isolated from the Sargasso Sea
gtttaatattgatgaatttgcccctagactgtcttttttttggtcaattggaatgaacttttttatggaaattgcaaagatgcgagctgcaagatacatgtggtctaaaattgtaaaagagtttaaaccaaaaaatgatagaagtttggctttaagaacccattgtcaaacatcaggtgtctcactgatggaacaagatgcttataataatattataagaacaactatcgaagcaatggctgcagtgatgggaggaacacaatcccttcatacaaatagtttcgacgaagcccttgctttaccaactaaattttctgcaagaatagcaagaaacacccagttaattatttctgaagaaactggcatttgcaatgtcattgatcctatggctggatcctactatgtcgaaagtttgacatcaagtatcgtcgaagaatcacaaaagcttattagtgaaattgatgaagttggtggaatggttaaagctattgaaatgggaataccaaagatgagaattgaagagagttcagctaaaaggcaggcaagagtagactctaatgaagaaacaattgttggagtaaataaatataaacctactgagaagcaagaaattaacattctctcaattgataatgaggaagttagaaaaagacaggtatctagattacagaaattaaagaactcacgagataacaaggttgttgaaagctttatagaaaaaattaaaaatgctgcaagtagtgatgaaaatcttttagaaatttgtatagaagcatcaaaaaatagatgtacagtcggcgaaatgacctcagcaatggaaagtgttttcggaagacacaatctttcaactaaaaccatttcaggagtctataaaaatactgtgaaaaatgatggcaagatagacatcattgatagcgaacttagtaaatttgttgacgagaaagggagaagaacgaggatgcttgttgtaaaatgggccaggatggacatgatcg

SEQ ID NO: 292947 - DNA, 773 bp, Unknown
  Bacterial polypeptide expressing nucleotide sequence isolated from the Sargasso Sea
gacggattggaatacgtccggatggcgttgaatcttggaatgaatatcgattcattttctccaagactttccttcttttttggaattggcatgaactatttcatggagattgccaaacttcgtgcggcacgtcgactctgggccgagatgatttcagaatttaaacctgaaaatccgaaatccatgatgcttcgcacccactgccagacatcaggttggagtttgacagagcaggatcccttcaacaacattgtgagaaccacgattgaagcgatggcggcggtccagggtggaacacagtcgcttcatacgaatgcttatgacgaagccctgggacttcccacccggacttctgcccgggttgcccgcaacacccaactcatcatgcaggaagaaaccgggatgacccgggtgattgatccatggggaggatcctattttatggaatctctcaccgaatccctcgtggtagaaagtagaaaactcctggataaggtcgaagagcttggtggaatgactcgtgccgtagaacagggatttcctaaacaacggatagaggaagctgcagctataagacaggcaaagatcgatcaaggtgaggaagtcattgtaggagtcaataagtaccaaacagacgaatcagagcaaattgaagtcagagaagtagacaacacagaagtacgaaataaccagattcaaaggttggagcagattcgaaaatctcgggataatacaaaagtccaggatgctcttaaaactttggaagacagggc

SEQ ID NO: 292948 - DNA, 831 bp, Unknown
  Bacterial polypeptide expressing nucleotide sequence isolated from the Sargasso Sea
gatctctgggtatcacatgcaggaagcaggcgctagcgccgcgcttgagctggcatacaccctatgcgatggtaaggaatatatccgtactgccattgcggccggtctgaatatcgatgaatttgctcccagactctcgtttttctggggtattggtatgaatttctacatggaaatcgccaagatgcgggccgctcgtttgctatgggcagaaattgtggacgagttctcacccgagaaccctaaaagctctatgttgcggacacattgtcagacatctggctggtcacttaccgagcaggatccttacaacaacattgtccgaacgacgattgaagcaatggctgctgtttttggtggcacacaaagcctgcacaccaacgcgcttgatgaagccattgcgttgccttcagactttgccgcccgcattgcacgcaacactcagctagtactccaagaggagactggcatcagccaggtcgttgacccctggggtggctcgtacatgatggagtcactgaccaatgagattgcggagaaagctcgagtactcatcgccgagattgaggatgccggcggtatggctcaggcgatcgaaacaggtctcccaaaacttcgtattgaagaagcggcggctaagaagcaagcgcgtatcgatcgcggggaagacgtcattgttggcgttaacaggtaccagataagcgaacaggatagcgttgatatcctcgaagtcgacaacgatgcggttcgtgattcacagatcgaaagactagatcgtatccggtcctcgcgtgatgctgcgtcggtggaagcctgtttgactgccttgtc

SEQ ID NO: 292949 - DNA, 829 bp, Unknown
  Bacterial polypeptide expressing nucleotide sequence isolated from the Sargasso Sea
atgaaaacaaaaaatagcgaaaattatacaaaatggcagaaaagctttgagcgagaaactaagattgatctcgatgaggcatcttctgaaacagatgaaggaattaaaataaaaccagtttatacaaaagctgatattgaaaatctctcatttgtagatagtgactcactccctggccaatttccatatacgagaggcccaagagcttcaatgtacacgaatagaccatggacgataaggcagtatgctggattttctacagctgaggagtcaaatgagttttttaagaaaaatttaaaatctggacaaaaaggtctttcagttgcttttgatctaccaacccatagaggttatgactctgacgatgatttagtaatgggcgatgttggtaaggctggtgttgctattgacactgttgaagacatgaaaattctatttaatgacattccacttaatcagatgtctgtatcaatgacaatgaatggagcagtacttcccgtcttgtcctcgtttgttgttgcaggggaagaacagaatgtaaataaaaatctactatctggaaccatacaaaatgacattttaaaagaatttatggtgagaaatacatatatttatcctcctgacccttccatgaaaatcgttgctgatataattgaatttacatctaaggaaatgccaaaatttaattcaatttcaatctcaggctatcatatgcaagaagctggtgcagataatgtacttgaacttgcatatacacttgctgacggtatagagtatgtaaggacagctctatcgaaaggattagatatagatgattttgctccccgac

SEQ ID NO: 292950 - DNA, 937 bp, Unknown
  Bacterial polypeptide expressing nucleotide sequence isolated from the Sargasso Sea
ttatgtcgagggaccaaaagcgagtatgtacaaaggtaggccatggacaataagacaatatgcagggttttcaactgcaaaagaatctaatgcattttataaaaaaaatctttctgcgggtcaaaaaggactttcagttgcttttgatcttgcaactcacagaggttacgattctgatcacgtgagagtgcaaggtgatgttggtaaggcaggcgtagcgattgacacagtagaagatatgaaaattttgttcgatgatataccgcttgatgaaatttctgtttcaatgacaatgaatggtgctgtcttaccaattttatcaagttatatagttgccgcagaagagcaaggggtaagtttagaaaaactcagcggtaccatccaaaatgatattttaaaggaattcatggttagaaatacatttatttaccctcctgaaccttcaatgaggattgtttcagatattatttcatttacctcaaaaaaaatgcctaaatttaattctatttctatatcaggctatcatatgcaagaagcaggagcaaatttagttcaagagttagcttttactattgcagatggtttggaatacgttagagctgccaaaaatagaggtttaaatgttgatgattttgctcctaggctttcttttttctttgcaattggcatgaatttttttatggaagcagcaaaattaagagctgctaggtatctttggtctaattggatgaaaaagttatttgattgtaaaaaaagtcaatctcaaattcttagaactcattgtcaaacatctggagctagtttgcaagaacaagacccttataacaatattataagaactactatagaagctttggctgctgtgttgggaggaactcaatctttgcatactaattcatttgatgaggctatagctttgcctactgactttcatcaa

SEQ ID NO: 292951 - DNA, 874 bp, Unknown
  Bacterial polypeptide expressing nucleotide sequence isolated from the Sargasso Sea
tttattgttgcgggagaagagcagggcgttgatagaagtttactatcaggaacaattcaaaacgacattttaaaagagtttatggtgagaaatacttacatatatcctcctgagccatcgatgaaaattgttgccgatattattgaatttacttcaaaagaaatgcctaagtttaattctatttcgatttcaggttatcatatgcaagaagctggcgctgataatgttcttgaattggcttatactttagctgacggaatggaatatgtaagagcagcaatgtcaaagggtcttgatgttgatgattttgcaccgaggctatctttcttttttgcaatcggaacggacttttttatggagattgctaaactaagagccgcaagaactctgtgggctaagatcatgaaagattttggagctaaaaatgaaagatctcttattttaagaacacactgtcaaacatctggcgtatctttaactgagaaagatccttataacaacattataagaacatcttacgaggccttatctgctatacttggaggaacacaaagtttgcacacaaattccttcgatgaagcaattgctttaccaacagatgagtctgcaagaattgctagaaatactcaattgattcttcaaaatgaaactggtgttacaaaaacggttgaccctcttgcagggtcatattttgttgaaaacttaactgaagaattgtcaaaaaaagcttgggatattatcacagaaattgaggaattaggtgggatgaccaaagctgttaaagcaggtattcctaaattaaaaattgaagagtcggcaaccaagaagcaagctaaagtcgatagtggatcaagggttgtggttggtgtaaaca

SEQ ID NO: 292952 - DNA, 868 bp, Unknown
  Bacterial polypeptide expressing nucleotide sequence isolated from the Sargasso Sea
catgcagcacataaaactttctgaatggaagcatttagccgaaaaagaattaagaggaaaaaagttagaatcccttaatgttgaaacagcagaggggatagatataaaacctttatatacgaagactgatcttgaagggctcgaacacttaaatagtattccaggtaaagagccgttcatgagaggaccaagagcaaccatgtacgctggtaggccgtggacaataagacagtacgctggtttttctacagctgcagagagtaataagttctatagaaaaaatcttgcctctgggcagaaagggatatcagttgcattcgatctcgccactcaccgcggatacgatagtgatcatccaagagtggaaggggatgtaggtaaagcaggtgtcgctattgacactgtagaagacatgaagatcttgtttgaggatatcccattggatcaaatgtccgtctcgatgacgatgaatggagcagttatacctataatggcaagctttatcgttgcaggagaggaacaaggggtgccaagagagaaattaacgggtaccattcagaatgacatactaaaagagtttatggtccgaaatacctatatttaccctcccgaaccctcaatgaaattgattgctgatataatagaatttacgagtaaagagatgccaaaattcaattccatatcaatatctggctaccatatgcaagaagctggagctaatttagtacaggaactggcatttactttagctgatgggaaagaatacgtacgagcggccttatctaagggtttaaatattgatgagtttgctggaaggctttcattcttttttgcgatcggtatgaatttctttatggaggtatcaaaa

SEQ ID NO: 292953 - DNA, 895 bp, Unknown
  Bacterial polypeptide expressing nucleotide sequence isolated from the Sargasso Sea
aaaatgccctcttttaactcaatatctattagtggttatcatatgcaagaggctggagctaaccaagttcaagaactagcttttactattgccgatggaatagaatacgttagggcagctttagataaaggattaaaagtagacgattttgctcctcgtctatcctttttctttgcaatagggatgaattttttcatggaaattgctaaattaagagctgctagatggttatgggctcatttaatgaagaagtattttaatcctaaagatgctaaatcaatgatgttgaggacccattgtcagacttctggagtttctttaactgagcaagatccttataataatatagttagaactactatagaggctatggcttctgtattaggaggaacccaatcattacatacaaatgcttttgatgaggcggttgctcttcccacggatttttcagcaaaaatagctagaaatacgcaattaattatacaagaagaaacaggtatagccaaaaccgttgatcctcttggagggtcttattacttagaagcactaactggaagattgatagcttctgcagataaattaataaatcaaatagaagaactaggtggaatgacaaaagcagtagaaaaagggataccaaaaagcatgatagaagaatctgctgccttaaaacaagctaatatagattcagctgaatcagtagtagtaggagttaatagatatcaatctaaaactgattccaaatttgatgttttaaaagttgataataaagaagtaaaagaactgcaaattagaaatttagaaaaacttaagtctaaaagaaataataatagattagaagattctcttttgaatttaactaatgctgcaaaaaataaaaatgcaaatcttctag

SEQ ID NO: 292954 - DNA, 913 bp, Unknown
  Bacterial polypeptide expressing nucleotide sequence isolated from the Sargasso Sea
ttccccgttcatcagaggacctcgtgcaacaatgtattccggacgaccctggacaatcaggcagtacgccggattttccactgcggaagaatcaaacaaatttttcagggataaccttgctgctggtcaaatgggtctaagtgtggcttttgatttagctacacatcgaggttatgattctgatcatcagcgtgtgcttggagatgttggaaaggcaggagtagctattgattcggtcgaggacatgaagatcctgttcgaccagattccacttgatcaaatgtctgtttccatgaccatgaacggtgcagtactcccgattttagcctcatatgtagttgcggctgaagaacaggggattaagcaggaacaactcagcggtacaatccagaacgatatccttaaggagttcatggtacgcaacacctacatttatcctccatcaccatcaatacgtatcgcaggcgatgttattgagtacgtcagcactcacatgcctcgttacaattcagtcagcatcagcggttaccaccttcaggaagcaggggccactgcggtgcaggaactagccttcagtcttgggaacggattggaatatgtgcgtacggcaatcaatcgcggaatgggcattgacagttttgcaccgcggctttccttctttttcggtatcgggatgaatttttacatggaaatcgcaaaattacgtgcagcacgatttttatggaacaagctgattcaggagtttaatcctcaaaaggctgagtcggcaatgcttcgcacccattgccagacatcaggatggagtcttacagaacaggatccatataacaacatcgtacgcactacaatcgaagcacttgcagctgtacttggtggaacacagtcactgcacacaaacgcctttgatgaagcg

SEQ ID NO: 292955 - DNA, 834 bp, Unknown
  Bacterial polypeptide expressing nucleotide sequence isolated from the Sargasso Sea
gcagggcgtctctcaagacaagctctccggaaccattcagaacgacattctgaaagagttcatggtgcgcaacacctacatctacccgcccaagccgtcgatgaagatcattggcgacatcatcgagtacacggccaagaacatgccgaagttcaactcgatctcgatcagcggctaccacatgcaggaagccggggccaaccaagcactggaactggccttcacactggccgacggcaaggaatacgtgaagaccgccatcgccaagggcatggatgtggacgaattcgccgggcgcctgagcttcttctgggccatcggcatgaacttctacctcgaagtcgccaagatgcgcgccgcgcgcctgctgtggtgccgcatcatgaaggccacaggcgccaagaaccccaagagcctgatgttgcgcacccactgccagaccagcggctggagcctcaccgagcaagacccctacaacaacgtggtgcgcaccaccattgaggccatggcggccgtgtttggcggcacgcaaagcctgcacaccaacagctttgacgaagcgattgcgctgcccaccgagttcagcgcccgcattgcgcgcaacacgcaactcatcatccaggaagagacccacatcaccaacgtgatcgacccctgggccggcagctacatgatggagaagctgacccaggacatggccgacgccgcctggaagatcatcgaagaggtcgaagccatgggcggcatgacgcaggccgtggacagcggctgggccaagctcaagatcgaggccgcggccgcggaaaagcaggcacgcatcgactcgggcaagga

SEQ ID NO: 292956 - DNA, 916 bp, Unknown
  Bacterial polypeptide expressing nucleotide sequence isolated from the Sargasso Sea
atgaaaatttcaactttcaaaaaaaactcagatttcagagagtgggaagaaaaagtctgttcagaattaaagacttcaaatcattccggattaaactggcagactccggaaggtattgaactcaaagctctttatactgcctcggatctggagaagttggaatgggatgacagccttccgggtttattcccttttattcgagggcccatggcatcaatgtattcaggcaggccttggacgatccgacaatacgctggtttttccaccgctgaagaatccaaccgtttttaccaagaaaatttaaaagcaggtcaaaaaggccttagcgtcgcttttgatcttgccacacatcgtggttatgactccgatcacccccgggtacgaggagatgtgggcaaggcaggagttgccatcgataccgttgaagacgtgaaaatgctctttgacgggatccctttggatcaaatatcggtatcgatgacaatgaatggagcggtccttcctgttttggcttcctacattgttgctgctgaagagcaaggggttcaaaggtcacagatgagtgggaccatccagaatgacattctgaaggaattcatggtccgcaatacctacatctatcctcctgaacaatcgatgcggattgtaggggacatcattgaattcacaagtcaggaaatgccccgttacaattcggtcagcatcagcggatatcacattcaggaagcgggagcgaccacggttcaggaactggcatttactttgggagacggattggaatatgtcaggatggcgttgaatcgtggaatgaacatcgattcatttgcgccaagactttccttcttttttgggattggcatgaaatattttatggagattgccaaacttcgtgcggcacgtcgactctgggccgaga

SEQ ID NO: 292957 - DNA, 778 bp, Unknown
  Bacterial polypeptide expressing nucleotide sequence isolated from the Sargasso Sea
aatgagtgtctcaatgactatgaatggggctgtacttcctattctagctggctatatagtcgcagctgaagagcaaggagttagcagagaaaagctctctggtacaattcaaaatgatattttaaaggaatttatggttcgcaatacttatatttatcctccaaaagaatcgatgagaattgtttctgatataatttcttatacatctaaaaacatgcctcttttcaattctatttccatctctggttatcacatgcaagaagctggcgctacattaactcaggagctcgcctatactttagctgatggattagaatatgttagagctgctttggcagcaggtttaaaaatagatgattttgctccaagattgtctttctttttttgcacaggaatgaatttttttatggaagtagctaaacttcgcgcagcaagatttatatgggcaaatttaattaagcaatttaaccctaaaaaccctaggtccctatctttaagaactcattgccaaacctcaggagtatcattaactagtcaagatcctcataacaatattattagaacagcttatgaggccttggcggctgcattaggaggaactcaaagtcttcacactaatgcctttgatgaagctcttgcacttccttcaaaattatcatcaagaatagcaagaaatactcagcttattctatctgaagaaacgggtgtaactgaggtgattgaccctctagctggttcttattatgtagaaagtcttaccaacgaagttatcaataaa

SEQ ID NO: 292958 - DNA, 904 bp, Unknown
  Bacterial polypeptide expressing nucleotide sequence isolated from the Sargasso Sea
aattctttacctgggaagtagcccgtttacaagaggtccaaaagcttcaatgtatacaaataggccatggactattcgtcaatatgccggtttctctactgcagaagagtcaaatactttctataaaaaaaacttagagtcaggtcagaaaggtctttcagtagctttcgatcttccaactcaccgaggttatgattctgatgatgaacttgtaaaaggtgatgttggaaaggctggtgtagcaattgatactgtagaagatatgaaaatattgtttaaagatattcctctagatcaaatgtcggtttcgatgacaatgaacggagctgttcttccaattcttgcgtcttttatagttgctggagaggaacaacatgttggaagagagttactttcaggaacaattcagaatgacatactcaaagaatttatggttagaaatacatatatttatcctcccgaaccatcaatgaaaattgttgcagatattattgaatttacatcacgtgaaatgcctaaatttaattcaatatctatatctggatatcatatgcaagaggctggtgcagataatgtattggaacttgcatacacccttgctgatggaattgaatatgtcagagcggctttatctaaaggtcttgatattgatgaatttgctccaagactatcttttttctttgcaattggtacagacttttttatggaaattgcaaagttaagagctgctagaactttatggtctaagatcatgaaagattttggagctaaaaaggaaaaatcactgattttacggactcattgtcaaacatctggagtttctttgactgaaaaggatccttacaataatatcgtgaggacctcatacaaagctctgtcagctattttggggggcactcaaagt

SEQ ID NO: 292959 - DNA, 856 bp, Unknown
  Bacterial polypeptide expressing nucleotide sequence isolated from the Sargasso Sea
gcaggtcaaaaaggccttagtgtcgcttttgatcttgccacacatcgtggttatgactccgatcactcccgagttcgaggagatgtcggaaaggcaggagttgccatcgataccgttgaagacatgaaaatgctctttgaagggatccccttagatcaaatgtcggtatcgatgacgatgaatggagcagttcttcctgttttggcttcctacattgttgctgcggaagagcagggggttcaaaggtcacagatgagcgggaccatccagaatgatatcttgaaggaattcatggtccgcaatacctacatctaccctccagaacaatcgatgcggattgtaggggacatcattgaattcactagtcaggaaatgccccgctacaattcggtcagcatcagcggatatcacattcaggaagcgggagcgaccacggttcaggaactggcatttactttgggagatggattggaatacgtccgtatggcgttgaatcgtggaatgaatattgatttatttgcgccaagactttccttcttttttgggattggcatgaactatttcatggagattgccaaacttcgtgcggcacgtcgactctgggccgagatgatttcagaatttaaacctgaaaatccgaaatccatgatgcttcgcacccattgccagacatcgggttggagtttgacagagcaagatccctttaacaacattgtgagaaccacaattgaagcgatggcggcggtccaggggggaacacagtcgcttcatacgaatgcttatgacgaagccctgggacttcccacccggacttctgcccgggttgcccgcaacacccaactcatcatgcaggaag

SEQ ID NO: 292960 - DNA, 920 bp, Unknown
  Bacterial polypeptide expressing nucleotide sequence isolated from the Sargasso Sea
tctgggtgaagagcaagggtgccctaaaagtaaattaacgggcacaattcagaatgacattcttaaagaatttatggttagaaataccttcatttttcctccaaaaccaagtatgagaattgttgcggatataattgaatatacctctaaagaaatgccaaagtttaattcaatttcaataagtggttatcacatgcaagaggcaggagcaaatcaagttcaagaattagcctacactttagccgatggtaaagagtatataaaaattgctttagaaagaggactaaaaatcgatgaatttgctccaagactttcatttttctggtcaataggcatgaacttttttatggaaattgccaaaatgcgggctgcaagatttatgtggtcagaaattgttaaaaaatttaacccagagcttgataaaagtcttgccttaagaactcattgtcaaacatctggagtatctttaaccgaacaagatgcatataataatattgtaagaacgacaatagaagcgatggctgctgtacttggaggaactcaatcattgcatacaaacagttttgatgaagcactagcattacctacacctttttcagcgaggattgcaaggaatacccaactaataatttctgaagaaacaggtataaccaaagttgtagatcctttagcaggttcatactatgttgaaagtttaacatctagcataatagaggaatctttaaaactgattaacgaaatagatgatgcaggtggaatggttaaagcaatagaattaggaattccaaaaatgcgtatagaagaaagttcagctaaaagacaagcaagagttgattctttagatgatacaattgttggagttaataaatataaacctcaagaaaaacaagatattaatattttggcagttgataatgaga

SEQ ID NO: 292961 - DNA, 724 bp, Unknown
  Bacterial polypeptide expressing nucleotide sequence isolated from the Sargasso Sea
agaaacaaaaattaaactaaatgaggcattttctgaaactgatgaaggaattgaaataaagccagtttatacaaaagctgacatcgaaaatctatcatttgttgataatgactcccttcctggccaattgccatatacaaggggcccaaaagcttcaatgtacactaatagaccttggacgataaggcaatatgctggattttctacagctgaggagtcaaatgagttttataagaaaaatttaaaatctggacaaaaaggtctttcggttgcttttgatttaccaactcatagaggttatgactctgacgatgatttagtaatgggtgatgttggtaaggccggtgttgctattgacactgttgaagacatgaaaattctatttaatgacattccacttgatcaaatgtctgtatcaatgacaatgaatggagcagttcttcctgtcttatcttcttttgtagttgcaggggaagaacagaatgtaaataaaaatctgctctctggaacaatacaaaatgatattttaaaagaatttatggttagaaatacatatatttatccccctgatccttctatgaaaatcgttgccgatattattgaatttacatctaaggaaatgccaaagtttaattcaatttcaatctcgggctatcatatgcaagaagctggtgcagataatgtccttgaacttgcatatacacttgctgacggcatggagtat

SEQ ID NO: 292962 - DNA, 775 bp, Unknown
  Bacterial polypeptide expressing nucleotide sequence isolated from the Sargasso Sea
gactattcgacaatatgctggtttttctactgcagaagaatcaaataatttttataaaaaaaatttagagtctggacagaaaggtctttcagtagcttttgatttgccaactcatagaggttacgattctgacgatgaacttgtgaaaggcgatgtgggaaaagctggcgttgcaattgatactgtagaagatatgaaaatattatttaatcagattccattagaccaaatgtctgtttctatgacaatgaatggagctgtccttcctatacttgcatcttttattgttgctggcgaggaacaaaaggtaggaagagaattactttcaggaacaatacaaaatgacatattaaaagaatttatggttagaaatacttatatctaccctccagagccttcaatgaaaattgttgcagatattattgagtttacttctcgtgaaatgccaaagttcaattcaatatctatatctggatatcacatgcaagaagctggagctgataacgtattagagcttgcctatactcttgcagatggcatggaatatgtaagagcagctctgtcaaaaggattagatattgatgaattcgctcctcgattatcttttttctttgcgataggaacagattttttcatggaaattgcaaaattaagagcagcaaggactttatgggcgaaaattatgaaagattttggagcaaaaaaagataagtcacttactttaagaactcattgtcaaacatcaggtgtgtctttgactgaaaaagatccttac

SEQ ID NO: 292963 - DNA, 415 bp, Unknown
  Bacterial polypeptide expressing nucleotide sequence isolated from the Sargasso Sea
caaaacgatatcttaaaggagtttatggtcagaaacacctatatttatcctcctcaaccttcaatgcgcgtgatttctgatatttttgcatacacggccgcggagatgccgcggttcaactctatcagcatatcgggttaccatatgcaggaagctggagcgacagctgatctagagttggcttatacgattgctgacggaatagagtatgttcgtgctgggatggaagctggattatcaattgatagtttcgcgccgcgcttatcattcttttgggggataggcatgaacttcttcatggaggttgctaagatgcgcgcggcacgcttaatttgggcgaaattgataaaaaaatatgaaccacaagataatcgctcactgtccctgcgaacgcattgtcagacaagtggctgga

SEQ ID NO: 292964 - DNA, 895 bp, Unknown
  Bacterial polypeptide expressing nucleotide sequence isolated from the Sargasso Sea
gcaactatgtatgcgggaaggccatggactataagacagtatgcaggtttttctacagctaaagaatcaaatgaattttataaaagaaatttagctgctgggcagatgggcctatctgtagcattcgatcttgcaacacataggggttacgatagtgatcatccaagagtttctggtgatgtaggcatgtctggagtagctattgattcagttgaagatatgaaattattatttgaccagataccattaaataaaatgtctgtatctatgactatgaatggagcagtattaccagtattagctaattttgtagttgctgcggaagagcagggagtgaaggaagaagaacttagaggcacgattcaaaatgatattttaaaagaatttatggttagaaatacatatatatatcctcctgcacattctatgcgtattgtatctgatataataagttatacggcaaaaaaaatgcctttattcaactctatctcaattagtggttatcatatgcaggaagctggagccaatcaagtgcaagaattagcatttactatagcagatgggttagaatatgttagagcagctattaataaaggtttaaaagttgatgattttgctcctagattatctttcttttttgctataggaatgaacttttttatggagattgcaaaattaagagcagcgagatggctttgggctagtttaatgaaaaaacattttaatccacaaaattcaaaatctttgatgcttagaacacattgtcaaacttcaggagtatctcttacagaacaagacccatataataatgtagtcagaacaacggtagaggcaatggcagccgtattaggcggtactcagtcgttgcatactaatgcattcgatgaggcagtag

SEQ ID NO: 292965 - DNA, 816 bp, Unknown
  Bacterial polypeptide expressing nucleotide sequence isolated from the Sargasso Sea
tatgaaaaataaatttaaagaaatagaaaatattgatctcaattacgaaaatgagagtagtccaaataattttaaggcaaaagaaaatatatttactactccagaaggtatcagtttgaaatctttctataccaaggatgatttaacaggttttgaccatcagaatacctatccaggaatagatccattcgttcgtggcccctacccaactatgtatgcaaataaaccttggaccattaggcaatatgctggtttttcaactgcggaggaatcaaatgctttttacaggagaaatcttgaagcaggtcaaatgggtttatctattgcttttgatttagctactcatagaggttatgactcagacaaccctctggtttcagatgatgttggaatggctggagttgcaatagactcaatattggatatgagaatcttattcaaagatattcctctagataaaatgtctgtatcaatgacaatgaacggtgcagtaattccgatcatggcgctttatattgtcgctgcagaggaacaaggtgtagaaccagatcagttaaaaggaacgatacaaaatgatgttcttaaagaatttatggttagaaacacatatatatatccaccaaaaccttctatgagaataatttctgatatttttgaatatacatcaaaaaatatgcctaaattcaattcaatttcaatttccggttatcatatgcaagaggcaggagcatcagctgatcttgagttagcttatactcttgcagatggtttagagtatataaaggcaggaataaacgctggattacatattgatgc

SEQ ID NO: 292966 - DNA, 1585 bp, Unknown
  Bacterial polypeptide expressing nucleotide sequence isolated from the Sargasso Sea
ataaatagctcgtctgttaactgggaaaccctggaaaacatcgaaataaagccactatacacctctgaagatctggaaaaactaggttactcagaaacacttcccggttttgctccgttcatcagaggacctcgtgcaacaatgtattccggaagaccatggacaatcaggcagtatgcaggattttccaccgcagaagaatcaaataaattttatagagaaaaccttgaagcgggtcaaatgggtctaagtgtggcttttgatcttgctactcatcgaggatatgattcggaccatcagcgtgtccttggtgatgttggtaaagccggagtagcaattgattcggttgaagacatgaagattctgtttgaccaaattccacttaacaaaatgtctgtttctatgactatgaacggtgcggtactacctattttagcatcttatatagttgcagctgaagagcagggggttaagcaagaacagctaagcggtaccatccagaacgatatcctcaaagagtttatggtccggaacacttacatttatcctccttcaccatctattcgcatcgcaggagatgttattgagtacgtaagtactaacatgcctagatacaattcagtcagcattagcggttatcatcttcaggaggcaggtgctacagcggtccaggaattggccttcagtctaggaaacggattagaatatgtgcgcactgcaatcaatagaggaatgagcattgacaattttgcgccacgcttgtccttcttttttggcatagggatgaattttttcatggaaattgccaaattacgagccgcacgatttttatggaacaagctgattcaggaattccaccctaaaaaagttgagtcagcaatgttacgtactcattgccaaacatcaggatggagcctaacagagcaagacccatataataacattgtacgaactacaatcgaagctcttgcagctgtgcttggagggacacagtcacttcacacaaatgcctttgatgaggctttagggctacctactgagacctctgccagagtagccagaaatactcagcttattttacaggaagaagcaggaatacctaaggtcattgatccttttggtggttcttattttatggaatcactcacagaatctttgattcgggagtcaacaaaactgcttaacaaaatcgaaaacctcggtggaatggcaaaagctgttgaatcgggaatgcccaaagaacagattgaaacttcagcagcacgcaggcaagcaatgattgaccaagggcaagaagtaattgttggtataaataaatacagagctgaaaatattgaacctttggaagtacgtgaaatcgataatactgctgtacgagaagcacaattaaaaaggcttaaacaaactaagaaaaatcgtgatcaacaaaaagttgattctattttgagtgcactcactgaagctgctaaaactggggaagagaatttacttgaactttcaataaatgcgatgagggctcgtgcaactgtaggtgaggtttcttcagcccttgaaaaagtctggggccgttacaacgcaccagttc

SEQ ID NO: 292967 - DNA, 1124 bp, Unknown
  Bacterial polypeptide expressing nucleotide sequence isolated from the Sargasso Sea
gatgaaaatttcaacttccaaaaaaaactcagatttcagagagtgggaagataaagtctactcagaattaaaggcttcaaatcattccggatttaacttgcagactccggaaggtattgaactcaaagctctttatactgcctcggatcttgagaagttggaatggattgacagccttccgggtttattcccttttatccgaggtcctatggcttcaatgtatgcaggcaggccttggacgattcgacaatacgcaggtttttccaccgctgaagaatccaaccatttttaccgagaaaatttaaaagctggccagaaagggcttagcgtcgcttttgatctagccacgcatcggggttatgactccgatcaccctcgagttcgaggagatgtgggcaaggcaggagttgccatcgataccgttgaagacatgaaaatgctctttgacgggatccccttggatcaaatgacagtatcaatgacaatgaatggagcggtccttcctgttttggcttcctacattgttgctgcggatgaacaaggtgttcaaaggtcaaagatgagtgggaccatccagaatgatattctgaaggaattcatggtccgcaatacttacatctatcctccagaacaatcaatgcggatcgtaggggacatcattgaattcatcagtcaggaaatgccccgctacaactcggtcagcatcagtggatatcacattcaggaagcgggagcgaccacggttcaggaattggcatttactttgggagacggattggaatacgtccgcatggcgttgaatcgtggaatgaatatcgattcatttgcgccaagactttccttcttttttgggattggcatgaactatttcatggaaattgccaaacttcgtgcggcacgtcgactctgggctgagatgatttcagaatttaaacctgaaaatccgaaatctatgatgcttcgcacccattgccagacatcgggttggagtttgacggagcaggatccatacaacaatattgtgagaaccacgattgaagcgatggcggctgtccaggggggaacacagtcgcttcatacgaatgcttatgacgaagccctggggacttcccacccccggactt

SEQ ID NO: 292968 - DNA, 1333 bp, Unknown
  Bacterial polypeptide expressing nucleotide sequence isolated from the Sargasso Sea
aatgactaataaatcaaataatggctttaatacttggcaaaaaagtttcgaaaaagaaactaagaaaaattttagtgatgcaatatcagagactgatgaaggaataaatattaagccagtatatactaaagaggacctggagaacttttcatttgttaaaaaacaatctcttcctggacaatggccatatacaagaggtccaaaggcatcaatgtacacaaatagaccttggacgataaggcagtatgctggattttcaactgctgaggaatccaatgaattttataaaaagaatttagaatctggtcaaaaaggcctttcagtcgcttttgatttaccaacacataggggatatgactcagatgatgatttggtaatgggtgatgtgggtaaagctggtgtagctatagatactgttgaggatatgaaaatactttttaataatattcctctagatcaaatgtcagtctcaatgactatgaatggtgcagtgctgccagtactcgcatcatttattgttgcaggtgaagaacagggtgttgatagaagtttgctatcaggaacaattcagaatgatatcttgaaagagtttatggtaagaaatacttacatatatcctcctgagccatcgatgaaaattgttgctgatattattgaatttacttcaagagaaatgcctaagtttaattctatttcgatttcaggttatcatatgcaagaagctggggcagataatgttcttgaattagcttatactttagctgacggaatggaatatgtaagagcagcgatgtcaaagggtctagatgttgatgattttgcaccgaggctctctttcttttttgcaatcggaacggatttctttatggagattgctaaacttagggctgcaagaactctgtgggctaagatcatgaaagactttggagctaaaaatgaaagatctcttattttaagaacacactgtcaaacatcgggcgtatctttaactgagaaagatccttataataatattataagaacatcttatgaggctttatctgctatacttggaggaacacaaagtttgcacacaaattccttcgatgaagcaattgctttaccaacagacgagtccgcaagaatcgctagaaatacccaattgatacttcaaaatgaaactggtgttacaaaaacggttgaccctcttgcagggtcatattttgttgaaaatttaactgaagaattatcaaaaaaagcttgggatattattacagaaattgaagaattaggtggaatgaccaaagctgttaaagcagggattcctaaattaaaaattgaagagtctgcaact

SEQ ID NO: 292969 - DNA, 2158 bp, Unknown
  Bacterial polypeptide expressing nucleotide sequence isolated from the Sargasso Sea
tatgaaaacaaaaaatagtgaaaattatacaaagtggcagaaaagctttgaacaagaaaccaagattgatctcaaagaggcttcttctgaaacagatgaaggtattgaaataaagccagtttatacaaaagctgacattgaaaatctttcatttgtagataatgactcactccctggtcagtttccatatacgagggggccaaaagcttcaatgtatacaaatagaccttggacgataaggcagtatgctgggttctctacagcagaggagtcaaatgatttttataagaaaaatttaaaatctggtcaaaaaggtctttcagttgcttttgatctgccgactcatagaggttatgactctgatgatgatttagtgatgggagatgttggcaaggctggtgttgccattgataccgttgaagacatgaaaattctattcaatgacattccacttgatcagatgtctgtatcaatgacgatgaatggggcagtacttcctgtcttatcctcattcattgttgccggggaagagcaaaatgttaataaaaatttactatctggcactatacaaaatgacattttaaaagaattcatggtgagaaatacatacatttatcctcctgatccatctatgaaaatcgttgctgacataattgaatttacatctaaggaaatgccaaagtttaattcaatttcaatctctggttatcatatgcaagaagcaggtgcagataatgtgcttgaacttgcttatacacttgctgacggcatggaatatgtaagggcagctctctcaaaagggttggatattgatgactttgctccacgtctttcattcttttttgcaatcggaactgatttcttcatggagattgcaaaactcagagcggctagaacattatggtataaaataatgaaagattttggagcaaaaaatgaaaagtccttaatactcagaacacactgtcagacttctggggtatcacttactgaaaaggatccatataataatatcataaggacatcttatgaggcactctctgctatactaggcggaactcagagtttgcacaccaattcgtttgacgaagcaattgctcttcccactgatgagtctgctcgaatagctcgaaatactcagcttattcttcaaaatgagaccggtgtaacgaatactgtagatccattagcaggatcatattttatagaaagtcttactgacgaattatcaaaaaaagcttgggaggttatagaagagatagagtcccttggagggatgacaaaagctgtaaaagcgggtgtgccaaaattaaaaattgaggagtcagccactaaaaaacaagcaaaagtagatagtgggtcaagagttgttgttggggtgaataagtttaaaaaccccaaagagccaaaggtagatgttagggtaattgataataatagagtgagagatgatcaaataaaaaaaataaatgacgtaaaagcctctagggatcaaaaggctgttgatgagtctctggctaaattagtgactgcagccaaagaggatagtaatttgttagcgcgttcaattgatgctataaaaaatagagcaacagtgggagaagtttcaaaagcgttagagcaagtatacggaagacattttgcaacatctttaagtgtctcgggggtatatggaaagcattttgagggcgatgaggattttatgaatgtaacaaaaaaagtaaatatttttgaagaggaaaatggtcgaagacctagagttttggtagttaagatgggtcaagatggtcatgatagaggagcaaagattgttgctacgtcatttgcagatatgggatttgatgttgatatgggtcctttatttcagtctccaaaagatgtagcaaaagatgcaatcgagaatgatgtgcacgcaataggtgtctcaacacttgcggcaggtcacaaaacacttgtaccagagctcatgaaaagccttaaagaaatagatcccaagtcaaaaataattgtttttgttggcggagttatacctgagcaagactacaattttttatatgaaaataatatttcagctatctttggtccaggttcaaatattattgaatcagcagaaaaggtcattgatttgatatcagataaaattcacgaacataattaa

SEQ ID NO: 292970 - DNA, 2122 bp, Unknown
  Bacterial polypeptide expressing nucleotide sequence isolated from the Sargasso Sea
atgtctgaacttaaagaaaaatggaaaaaaagagcccaatctgaacttaaaacagatgaaattgaaagtcttgattggcatacactcgaagggatagaggtcaaaccagtctattcctctgaggatctaatggaattagagcatctcgataccatgccgggaattgagccattcctgaggggtcccagagctacgatgtataccaaaagaccttggactgtcagacaatattctggtttttcaactgctgaagaatcaaatgcattttatagagaaaacatatcagctggacagactggtctttctgtggcgtttgatttagccacccatcgaggttatgactcagaccatcctagagttgctggtgatgttggtaaggctggtgtagcaattgataccgttgaagacatgaaaatgctttttgaccagatccctctcgagaaaatgtcagtctcgatgaccatgaatggtgcagtaatccctattatggcaatgtttgttgtcgctgctgaagaacaaggtgttgatcagtcaaatctaaacgggacattgcagaatgatattctcaaagaattcatggtgagaaatacatatatatatcctcccaaacattcaatgagaatagttgctgatatcattgagtactgctctcataatctacctcaattcaataccgtctctatctctggctatcacatgcttgaggctggagctacatgcacacaggaactcgcctatacacttgcagatggtctagagtatgtcaggtctgctatgaagaaaggtctggatattgacgattttgctccgagactgtcatttttctttggaataggcatgaacttcttcatggaaattgcaaaactgagagcggcacgattcctctggtctgagatgatcaaagaagaattttcgccaaagaatcctaaatctttgatgttaagaactcattgtcaaacgtcgggtgtcagtcttaccagtcaagacccttacaataatatagtcagaaccacgattgaggccatggctgcagttttgggtggcactcagtcgctgcatacaaattcttttgatgaggcattggcactgccaacacctttttctgcccaaattgcaagaaatacacagttgattctcagagaagaatcgggattgacaaaagttgtcgatccactagctgggtcttattaccttgaatcattaaccgactcaatgattcgtgaaacgaaaaagcttatagatgaagttgaagatcttggcggcatgacaaaggcaattcaagccggagtgccgaaactaagagtagaggaatctgctgccatcagacaagcaagagtggataaaaaagaagacgtcattgttggtgtgaatgcttataaaaacaaggatcaaaaagaagtcgacatactgtcaattgacaacgaaggagtcagggatcaacagattaaaaaattagaatcaataagaaaagaaagaaatgaggaagcatgtcaaaatgcattggctgaacttgaaaaatgtgccgctgaagatggtaacctaatggcattggcgattgaggctgcaaaacatcgagcaaccgttggggagatctcattggcaatggaaaatgttttcggaagacacaaagccgtttcacaatcaatcagtggagtttaccgaaaagagtatgagggcgatgaagactttatgaatgttgaaagcaaagtaaaagattttgaagaatcgcatggcagaagacctagaatattagtggtcaagttaggccaggatggacacgatcgtggtgcgaaggtgattgcaacagcctttgcagatatgggttttgatgttgatataggtcccctgtttcaaactcctgaagaagccgcaagggatgccattgaaaatgacgttcatatcattggtgtctcctctcaagcagccggacataaaacattggttccgatactcatgaattctcttgcagaacaaggttcagaaaatatacttgtcgtttgcggtggaattattcctgaacaagacattgaagcacttaaggattgtggtgttgcaacagtttttggcccaggaacgaatatcacaaaagcagctttagaagtaattgatatgattcaataga

SEQ ID NO: 292971 - DNA, 1321 bp, Unknown
  Bacterial polypeptide expressing nucleotide sequence isolated from the Sargasso Sea
atgtctaaacttaaagaaaaatggataacaactgccaaatctgaactgaaaacagatgaaattgaaagtcttgattggcatacgcttgagggcatagatgtaaaaccagtctattcctctgaggatctattggaactcgagcatctagatacgatgcctggaattgagccattcctaaggggtccaagagccactatgtatacaaaaagaccatggacagtcagacaatattctggattttcaactgcagaggaatcaaacaagttttatcgtgagaatatagcggctggacaaactgggttatctgttgcattcgatttagcaacacacagaggttatgactcggatcatccgagagtcacaggtgatgtaggtaaagccggtgtagcaattgataccgttgaagatatgaaaatgttgttcgatcaaataccgctggagaaaatgtctgtctcaatgaccatgaatggagctgttatacccatcatggcaatgtttgttgtagctgctgaagaacaaggtgttgagcagtcaaaactcaaaggcactttacagaatgatatcctcaaagaattcatggtcagaaacacctatatttatcctcccaatgactcaatgagaatagttgctgatatcattgaatattgttctcataatctacctcaattcaataccgtttcaatttctggatatcacatgcttgaagcaggagccacttgcacacaagagcttgcttatacactggctgacggattggaatatgtaagatctgctatgaataaaggactagatatcgatgactttgccccgagattatcattcttttttggtataggaatgaacttcttcatggaaatcgcaaaattaagggctgcgagattcctatggtctgagatgattgaaaaagaattttctccaaaaaatccaaagtctttgatgctcagaactcattgtcaaacatcaggtgtaagtctcaccagtcaggacccatacaacaatatagtcaggacaaccatagaggccatggcagcggttttgggtggaacgcaatcattgcatacaaattcatttgatgaggcattggctttaccaactcccttttctgctcaaattgcaagaaacacacaattggttctgagagaagaatctggcttgacaaaagtggttgacccacttgctggctcttactatctagaatctcttactggttcaatgatcaatgaaaccaaaaagctcatacaagaggttgaggatcttggaggaatgacaaaggcaattcaagcaggagtgccaaaattaagaattgaagaatcagcagcga

SEQ ID NO: 292972 - DNA, 1981 bp, Unknown
  Bacterial polypeptide expressing nucleotide sequence isolated from the Sargasso Sea
atgaaaaataaatttaaagaaatagaaaatattgatcttgattacgaagatgaaagtagtccgaataattttgaagcaaaagaaaatatatttactactcctgaaggcattaatttgaaatctttctataccaaagatgatataaaagcctttgatcatcaaaatacctacccaggaatagatccatttgttcgtggtccatacccaaccatgtacgcaaataaaccttggactattagacaatatgctggtttttcaacagcggaggaatctaatgctttttacaggagaaatcttgaagcaggtcaaatgggtttatctattgcttttgatttagctactcataggggatatgactctgataaccctattgtatcagatgatgttggaatggcaggtgttgcaatagactcaatattagatatgagaattttatttaaagatattcctttagataagatgtccgtatcaatgaccatgaatggtgcggtaattcctataatggctttatacatagttgctgccgaggagcaaggggttgaaccagatcaactcaaaggcacaatacaaaatgatgttttgaaagaatttatggttagaaatacatatatatatccgccaaaaccatcaatgagaataatttcagatatttttgaatatacctcaaaaaatatgccaaaatttaattcaatttcaatttctggttatcatatgcaagaagctggggcttctgcagatcttgaattagcctatactctagcagatggtttagaatatataaaagcaggtattaatgctggattagatattgatgcatttgcgccaagattatcattcttttgggcaataggaatggattattttatggaaatagcaaagcttagagctgcaagattgttatgggcaaacattgtaagagattttaatccatcagactcacgatcacttgcactaagaacacattgtcagacctcaggttattctttaacatctcaagaccctttcaataatattactagaacttgtatagaagcattatcagctgttcatgggcatactcagtcacttcacacaaatagctttgatgaagcaattgcactaccaacagatttttcagcacaaatagctagaaatacccaactatttatccaacacgaaacaggaacatcagatgttattgatccatggggaggatcattttttgtagaaaaacttactcatgaacttgctaaaaaagctttgaaacatatggaagaaattgaaagttacggtggtatgacagaagcacttgaaaaaggaataccaaaaatgcgtattgaggaatctgctactaaagcacaatcaaagatcgactcgggcgaaaacacagttgtaggagttaataaatttactttatctgctaatgaagaagaaaaaattgaatatttaaaagtagataattcaatggttaagaaaaatcagctcgataggttagctgagatcaaaaaatcaagaaataattctaaagtcaaaaaaatgcttaatgaattaactgatggtgcatctaaaaacggaaatgtactggagcttgcaataaatgcagcaagagaaggtgcaactgttggagaaatctcatcagcaatggaaaaggtatggaaaagacataaggctaagatcaacttggttaaagatatttatggtgaaaattttgaatcagaaacaataaatgtagttagaaaaaaagttaaagattttgagattcgtgaaaatagaaaaccatcagtctatattgttaaacttggtcaagatggtcatgacagaggtcaaaaagttgtaggaagcgctctcactgatatgggttttgatgtaaatgtggggcctttatttcaaacaccatctgaggctgctgaagaagcaattaaattaaatgttgatattattgctgcttcatctctagctgctggtcatcttacgctagttccaaaattaagagatgaacttg

SEQ ID NO: 292973 - DNA, 1276 bp, Unknown
  Bacterial polypeptide expressing nucleotide sequence isolated from the Sargasso Sea
aatgtctaaacttaaagaaaaatggataacaactgccaaatctgaactgaaaacagatgaaattgaaagtcttgattggcatacgcttgagggcatagatgtaaaaccagtctattcctctgaggatctattggaactcgagcatctagatacgatgcctggaattgagccattcctaaggggtccaagagccactatgtatacaaaaagaccatggacagtcagacaatattctggattttcaactgcagaggaatcaaacaagttttatcgtgagaatatagcggctggacaaactgggttatctgttgcattcgatttagcaacacacagaggttatgactcggatcatccgagagtcacaggtgatgtaggtaaagccggtgtagcaattgataccgttgaagatatgaaaatgttgttcgatcaaataccgctggagaaaatgtctgtctcaatgaccatgaatggagctgttatacccatcatggcaatgtttgttgtagctgctgaagaacaaggtgttgagcagtcaaaactcaaaggcacgttacagaatgatatcctcaaagaattcatggtcagaaacacctatatttatcctcccaatgactcaatgagaatagttgctgatatcattgaatattgttctcataatctacctcaattcaatactgtttcaatttctggatatcacatgcttgaagcaggtgccacttgcacacaagagcttgcttatacactggctgatggattggaatatgtaagatctgctatgaataaaggcctagatatcgatgactttgccccgagattatcattcttttttgggataggaatgaacttcttcatggaaatcgcaaaattaagggctgcaagatttctgtggtctgagatgattgaaaaagagttttctccaaaaaatccaaagtctttgatgctcagaactcattgtcaaacatcaggtgtaagtctcaccagtcaggacccatacaacaatatagtcaggacaaccatagaggccatggcagcggttttgggtggaacgcaatcattgcacacaaattcatttgatgaggcattggcattaccaactcccttttctgctcaaattgcaagaaacacgcaattggttctaagagaagaatctggtttgacaaaagtggttgacccacttgctggctcttactatctagaatctcttactggttcaatgatcaatgaaaccaaaaagctcatacaagaggttgaggatcttggaggaatgacaaaggca

SEQ ID NO: 292974 - DNA, 1519 bp, Unknown
  Bacterial polypeptide expressing nucleotide sequence isolated from the Sargasso Sea
aatgtctgtatcaatgactatgaatggcgctgtattaccagtacttgcatcatttatgttgcgggagaagaacagggcgttgatagaagtttactatcaggaacaatacaaaacgacattttaaaagagtttatggtgagaaatacatacatatatcctcctgagccatcaatgaagattgttgccgatataatagaatttacttcaaaggagatgcctaagtttaattctatttcaatttctggttatcatatgcaagaagcaggcgctgataatgttcttgaattagcttacactttagccgatggaatggaatatgtaagagctgcaatgtcaaaaggtcttgatgttgatgattttgcaccacggctctctttcttttttgcaatcggaacggacttttttatggagattgctaaacttagagccgcaagaacactgtgggcaaagatcatgaaagattttggagctaaaaatgaaagatctcttattttaagaacacactgtcaaacctctggtgtatccttaactgaaaaagatccttataataacatcataagaacatcttacgaggccttgtctgctatacttggaggaacacaaagtttacatacaaactccttcgatgaagcaattgctttaccaacagacgaatctgcaagaatagctagaaatactcaattgattcttcaaaatgaaactggcgtaacaaaaacggttgatcctcttgcggggtcttatttcgttgaaaacctaactgaagaattatcaaaaaaagcttgggatattattacagaaattgaagaattaggtggaatgactaaagctgtaaaagcaggtattcctaaattaaaaattgaagagtctgcaactaagaagcaagctaaagtcgatagtggatccagggttgtagttggagtaaataaatataaaaatccgaaagagccctcagttgatgttagagtaattgataataatcgcgttcgagaagatcaaataaataaaatccaggcaataaaagagtcacgtgacacaaaagctgtagaaaaagcactgactaatttaacaaatgctgccaaagacaaaacaaatcttcttataccttgtatagaagccattaaatcaagatcaacggttggagaagtttcaaaagcattagagcaagtatatggtagacattttgcaaaaagcttaagtgtttcaggagtatatggtaaacattttgaaggcgacaaagaatttatgaaggtagagagtaaaataaaggaatttgaaaatataaatggtagaagaccaagagttctagtagtgaaaatgggtcaggatggccatgatagaggggcaaagatagtcgcaacttcatttgctgacatgggttttgatgttgatatgggcccactatttcaatcgcctaaagatgttgcaaaagatgctgttgaaaatgatgttcatgcaattggagtttcaactttagcagcaggacataaaacacttgtgcctgaactaatgaaaggcttaa

SEQ ID NO: 292975 - DNA, 1531 bp, Unknown
  Bacterial polypeptide expressing nucleotide sequence isolated from the Sargasso Sea
ccaaaaccatcaatgagaataatttcagatatttttgaatatacctcaaaaaatatgccaaaatttaattcaatttcaatttctggttatcatatgcaagaagccggggcttctgcagatcttgaattagcctatactctagcagatggtttagaatatataaaagcaggtattaatgctggattagatattgatgcatttgcgccaagattatcattcttttgggcgataggaatggattattttatggaaatagcaaaacttagagctgcaagattgttatgggcaaacattgtaagagattttaatccatccgactcacgatcacttgcactaagaacacattgtcagacctcaggttattctttaacatctcaagatcctttcaataatattactagaacttgtatagaagcattatcagctgttcatgggcatactcagtcacttcacacaaatagctttgatgaagcaattgcactgccaacagatttttcagcacaaatagctagaaatacacaattatttatccaacacgaaacaggaacatcagatgttattgatccatggggaggatcattttttgtagaaaaacttactcatgaacttgctaaaaaagctttgaaacatatggaagaaattgaaagttacggcggtatgacagaagcacttgaaaaaggaataccaaaaatgcgtattgaggaatctgctactaaagtacaatcaaaaatcgactcaggcgaaaatacagttgtaggagttaacaaatttactttatctgctaatgaagaagaaaaaattgaatatttaaaagtggataattcaatggttaagaaaaatcagctcgataggttagctgagatcaaaaaatcaagaaataattctaaagtcaaaaaaatgcttaatgaattaactgatggtgcatctaaaaacggaaatgtactagaacttgcaataaatgcagcaagagaaggtgcaactgttggagaaatctcgtcagcaatggaaaaagtatggaaaagacataaggctaagatcaacttggttaaagatatttatggtgaaaattttgaatcagaaacaataaatgtagttagaaaaaaagttaaagattttgagattcgtgaaaacagaaaaccatcagtctatattgttaaacttggtcaagatggtcatgacagaggtcaaaaagttgtaggaagcgctctcactgatatgggttttgatgtaaatgtggggcctttatttcaaacaccatctgaggctgctgaagaagcaattaaattaaatgttgatattattgctgcttcatctttagctgctggtcatcttacattagttccaaaattaagagatgagcttgataacagaggacatgatgaaattcatgtaattgttggtggggttattccaaaagaggatttttctaccttaatagacataggggcctctgctatttttgctacaggaacaaatattattaattcagcaatggaaatgttacaaattattgaatcttctaactcttagt

SEQ ID NO: 292976 - DNA, 1275 bp, Unknown
  Bacterial polypeptide expressing nucleotide sequence isolated from the Sargasso Sea
gagattgcaaagctaagagctgctagaactttatggtctaagattatgaaagactttggagctaaaaatgagaagtcacttactttaagaactcattgtcaaacatctggtgtatcattaactgagaaagatccctataataatattgtaaggacttcgtatgaagctttatcagctattttgggcggcactcaaagtttacatacaaactctttcgatgaagcaatagctttgcccactgacgaatcggcaagaattgcaagaaatacacaattaatcttacaaaatgaaactggcgttactaagacagttgatccattagcaggatcattttttattgaaaaactgactgatgatatttcaaaaaaatcttgggaacttattcaagaaattgagtctttagggggcatgactaaggcagttaaagctggaataccaaaattaaaaattgaagagtcggctactaaaaaacaagctaaagttgatagtggagatcgtgtcgttgttggagtaaataagtttaagaatcctagagaacctagagttgatgttcgtgtaatagataacgataaagtgagggaagatcaaattaagaaaataaataaagttaaaaaaatgagagacaataaactagttagtgaatctctattacaattaactaatgctgcaaaagataataaaaatttattagaattcactattcaagcaattaaacacagggcgactattggagaagtttccaaagctctagaagaagtttttgggagacattttgcaactaatttgagcgtttcaggagtttatggtaagcattttgataagaacgaagattttaaaaatgtttctaaaagagttgatagctttgaaaaaaagcatggaaggcgaccaagggtcttggtagttaaaatgggacaagacggccatgatcgaggagctaaaattgtggctacatcttttgcagatttaggttttgatgtagatatggggcctttatttcaaacgcccaaagatgttgctaaagacgctattgaaaatgatgtgcatgcaattggagtatctacacttgctgcaggtcataaaaccctaatacctgagttgatggaaaatttaaaaaatattgattcaaaaagtaatatagttgtatttgttggaggaatcattccagaacaagattatgaatttttatataataataatatatctgcaatttttggaccaggttctaatattatagaatctgcagaaaaggtgatagaattaattatgaaaaaaata

SEQ ID NO: 292977 - DNA, 2131 bp, Unknown
  Bacterial polypeptide expressing nucleotide sequence isolated from the Sargasso Sea
atgcgcggcgagcggagcttcgccgatgaaagtcgcgactcggtgcgacacccgccccatgcggcaccgcttaaagcgctgtatacggagagcgatcttgaaggggtgtcgcatctcggcagtcggcccggtgaggcgcccttcgtgcgagggccccatgcgtcgatgtatacgcaaaagccgtggacgatccgtcaatacgcaggctatgcggacgcggccgattcgaatctcgcattccggacggcgcttgccgaaggggcgcagggtttatcggtcgccttcgatctgccgacgcatcggggctacgattcggacgatcctgccgcgacggccgatgtcggcatggctggagtcgcaatcgacagcgtcgaagacatgaagcgcctgtttcggcagattccgctcgaacgggtgtcggtctcgatgacgatgaacggcgctgtgctacccgtactggccgcattcatcgtggcagcgcaagaaagcggcgtgcgcacagaggccctgacgggtacgatccagaatgacatcctgaaggaatacatggtgcgcaatacctggatattcgcgccggagccgtccttacggatcgtcgcggacgtcttcgagtatctggccgaacgcgcgccgcgcttcaatgcaatgtccatctccggctatcactttcaggaagcaggcgcggacgcggtactcgaactcgcgctgacgctgtccaacgcgcgcacctacgtcgaggccctggtgaagcgtggcatgaatgtcgagcgcatcggcgaacggctgagtttcttttttggcgtcggcaccgaattctttgtggagatcgccaaacttcgcgccgctcgggttctatgggccggaataatgagcgaactgggagcacgtgaggctagagcgcaagctttgcgcatgcattgccagacctcgggatgctcgctcactgcgcagcatccacagaacaacatcgtccggacgacgatcgaggcgatggccgcggtgttcggcggcacccagtcgctgcataccaatgcgtacgatgaggcgctcgccctccctggcgcggatgcgtcgaggctcgcgcgtgacacgcagttgatcatgcagcatgagatgggcctgtgcgatgttatcgatccgtgggccggctcgtacatgatggagtcgcttaccggcgatattgtccggcgcgtgcgtgatctgatggcgcaaattgccgcgcatgggggcgtcgtcgaagcgatccgctcgggttgggtacagcagcgcattcacgaagcggcaacacgcacgcaggcgcggatcgatgccgggcagcatgtcgtcgtgggtgtaaaccgcttccgatcaccggatgcggatactccgtccaattgtctcgagatcgacggtcggcgagttcgtgccaggcaagttcggcagcttgcagaactgaaggcgcagcgcgacgatgttctggtctcgcgctcgctggcggcgctcgctaaaggtgcgcgtgacggcaccggcaacctgctggccctcactatcgagtgtgtccgcgcgcgcgcgacaatcggcgaatgcacgcgcgcgctggaggccgtctggccgcgctacagcacgcccagtcgttttagcagcggaatctacggcgaagcgcggatcgccgatgcggcatggcgtgacgcatgccatcgtgccagcgctcttgccgcgcgcctcggacgtctgcccagggtgctcatcgcaaaggtggggcaggacggccacgatcggggtgcaaagaccgtcgcggcggcgttggccgatgccggattctacgtgtcgctcggcgcgctgttccgctcgccgggagaggtggtcgacgacgccatcgcagcaaaggccgatgtcatcggcgtttcgtccctatcgggtgcgcatcttgaccttgttggcgaggtagtgcgcacgttgcgggtccggcgaccgagggcagcggttgtggttggcggcatcattccggacgagcacgtacgtttgctcaaacgcaatggcgtttttgcggtgctcggaccggggaccgcgatggagtcgattgtggcgagccttgtcgaagccgtcgaactcgcgtcggcctcggcatcggcctcggccgttgcgacgtgat

SEQ ID NO: 292978 - DNA, 1425 bp, Unknown
  Bacterial polypeptide expressing nucleotide sequence isolated from the Sargasso Sea
aatggataaaaaaaatgataataatgatcagctaactgattggaagaagaaatttgaggctgaaactaagacttcaagcactgatgatattataattaacactgatgaaggcattggaatcaaacctctgtatatagaggaagatataaaaaatctaaactttgttgatgttgaatccttaccaggttacgaaccttatacaagaggacctaaagcatcaatgtatgtaaataggccatggacgataagacagtatgcaggtttctcaaccgctgaggagtcaaataatttttatcgtaaaaatttagaagcaggacagaaaggtttgtcggttgcctttgatctaccaactcatagaggctatgattctgatgatgaaatagtaatgggagatgttggtaaagctggcgtagctattgactcagttgaggatatgaagattttatttgatggaatacctctagatcaaatgtcagtttcaatgactatgaacggtgcagttttgccaattcttgcgtcatttattgtagcaggcgaagaacaaggagttgctgtgaaagatttatcaggaacaattcaaaatgatattttaaaagaatttatggtgcggaatacttacatttatcccccagatccatcaatgagaatagttgctgacataattgaatatacgtctaaagaaatgcctaaatttaattctatttcaatttcaggatatcatatgcaagaggctggagcggataatgttcttgaactagcatacacacttgctgatgggatagagtatgtaagagcagctctgtccaaaggattagatattgatgattttgctccaagactctcatttttctttgcaataggaactgatttctttatggaaattgcaaaacttagagccgctagaactctatggtataaaattatgcgagattttggtgccaaaaatgaaaaatcattaacactaagaacgcactgtcagacctcaggtgtttctcttacagaaaaagatccttataataatattgttcgtacttcctacgaggctttgtcagcagttcttggaggcacgcagagtcttcacaccaattcatttgatgaagcaatagcgctacctacagaattttcagctaggattgctagaaatactcaattaattttgcagaatgaaactggagttacaaatactgtagatccacttgctggttcatattttattgagaaaataacagatgaagttgcatcaaaagcatgggaaataatacaagaagtagaagagcttggaggtatgacaaaagcagtgaatgcaggtataccaaaattgaagattgaagagtcggcaactaaaaaacaagcaaaaattgactctggtgatagagtggttgtaggtgtaaataaatttcaaaacccaaaagagcccaagattaa

SEQ ID NO: 292979 - DNA, 1525 bp, Unknown
  Bacterial polypeptide expressing nucleotide sequence isolated from the Sargasso Sea
aatgactaataaatcaaataatggctttaatacttggcaaaaaagtttcgaaaaagaaactaagaaaaattttagtgatgcaaaatcagagactgatgaaggaatagatattaaaccagtatacactaaagatgacctagaaaacttttcatttgtcgagaataattctcttcctggccaatggccttatacaagaggtccaaaggcatcaatgtacacaaatagaccttggacgataaggcagtatgctgggttttcaactgctgaggagtccaatgaattttataaaaagaatttagaatctggtcaaaaaggtctttcagttgcttttgatttgccaacacataggggatatgactcagatgatgatttggtaatgggtgatgtgggtaaagctggtgttgctatagatactgttgaggatatgaaaatactttttaataatattcctctagatcaaatgtcagtttcaatgactatgaacggcgcagtgttgccagtactcgcatcatttattgttgctggagaagaacagggtgttgataaaagtttgctatcaggaacaattcagaatgatatcttaaaagagtttatggtaagaaatacttatatatatcctcctgagccatcgatgaaaattgttgccgatattattgaatttacttcaaaagaaatgcctaaatttaattcaatttcgatttcaggttatcatatgcaagaagccggcgctgataatgttcttgaattagcttatactttagctgacggaatggaatatgtaagagcagcaatgtcaaagggtcttgatgttgatgattttgcaccgaggctctctttcttttttgcaatcggaacggacttttttatggagattgctaaattaagagctgcaagaactctgtgggctaagatcatgaaagattttggagctaaaaatgaaagatctcttattttaagaacacactgtcaaacatctggcgtatctttaactgagaaagatccttataataacattataagaacatcttatgaggccttatctgctatacttggaggaacacaaagtttgcacacaaattccttcgatgaagcaattgctttaccaacagacgagtctgcaagaattgctagaaatactcaattgattcttcaaaatgaaactggtgttacaaaaacagttgaccctcttgcagggtcatattttgttgaaaacttaactgaagaattatcaaaaaaagcttgggatattattacagaaattgaggaattaggtggaatgaccaaagctgttaaggcagggattcctaaactaaaaattgaagagtctgcaactaagaagcaagctaaagtcgatagcggatcaagggttgtggttggtgtaaataaatataaaaacccaaaagaaccttcagttgatgtgagagtaattgataataatcgcgttcgagatgatcaaataaagaaaatacatgcaataaaaagtcacgtaacacaaaagctgttgaaaaagcacttactaatttaa

SEQ ID NO: 292980 - DNA, 880 bp, Unknown
  Bacterial polypeptide expressing nucleotide sequence isolated from the Sargasso Sea
tatgggacaagataagtcaaaatggagcgaacttgccgataaagagttgcgagataaatcggcagcagatttaacttggaaaactctagagggcatagaagttaacccaatctatacccaagaagatttaaacaatcttaggcatttgggaactttacccggtcaggaaccatttacacgtggggtaaaagcaacaatgtatgctgggcgcccctggactatcaggcaatatgcaggattttccacggctgaggaatctaacaaattttatcgaaaggctttggaggctggacagcagggggtctcagtggcttttgatcttgctacccataggggttacgatagtgatcacccacgagttttgggtgacgttggcaaggctggtgttgctattgatagcgtagaggacatgaagatactttttgagggcattcctttggaaaaggtatcagtatccatgacaatgaatggcgcagttattcctgtgcttgcaaactttatcgtcactggtgaggaacaaggtgttgataaaagcttgctttcagggactattcagaacgatatattgaaggaatttatggtaagaaacacttacatatatccaccagaaccctctatgagaatagtagcagatattattgagtatacctctgctgaaatgccaaagttcaattcaatctcaatttccggttaccacatgcaagaggctggagcgaatttagttcaagaacttgcctacacattagccgatggaaaggaatatgttaaaacagcaattcagagaggaatggacgtagataaatttgctggtcgcttatcttttttctttgctattggaatgaatttttttatggaagcagccaagttacgggcagcgcgt

SEQ ID NO: 292981 - DNA, 1858 bp, Unknown
  Bacterial polypeptide expressing nucleotide sequence isolated from the Sargasso Sea
actggatggtaaaccaatctcttcagtaaactggaacactctagaagacattgaaataaaaccgctttacacctccgaagacctagaaaagctaagctactcagagacactccctggtttttcgcctttcatcagaggaccgcgtgccacgatgtattctggtcgtccctggacaatcaggcagtatgcaggattttcaaccgcggaggaatcaaacaaattttacagggaaaaccttgcatccggacagaaagggctcagtgtggcttttgatcttgcaacccataggggctacgattctgatcatcagcgggtgcttggagatgtcgggaaagcaggagtagcaatagattcggttgaagacatgaaaatcctattcgaccagataccacttgaccaaatgtctgtttccatgacaatgaacggtgcggtattaccaattttagcctcttatatagttgctgcagaagagcaaggggttcagcaggaacagctcaaaggaaccatccaaaatgatatcttgaaagaattcatagtacgcaacacctatatttatcctccatcaccatctattcgcatcttaggtgatattattgagtacacaagcactcacatgcctcgatacaattcagtcagcataagcggttaccatctacaagaagcaggagccactgccgtccaggaactagccttcagcctcggcaacggattggaatatgtgcgcacagctataaatcgcggaatgagaatcgacagttttgcaccacgtttatctttttttttcggtatagggatgaattttttcatggaaatcgccaaattacgtgcagcacgatttttatggaataaactgattcaggattttaaccctgaaaaagctgcgtctgcaatgctgcgcacccattgtcagacatcaggatggagccttacagaacaggatccctataacaacatagtgcgcaccacaattgaagcacttgcagctgtgctaggcggtacacagtcactgcacacaaacgcctttgatgaagcacttggtctgcctaccgagacatccgccagagtcgctagaaacactcagcttattttgcaggaagaagcaggaatcccaaatgttattgaccctttcggaggttcttatttcatggaatcacttactgaatctttaattcaggaatcaactaaactgcttaataaaatagaaaaacttggtggaatgacaaaagctgttgaatcaggaatgccaaaacagcaaattgaagcctcatcggctcgaaggcaagccatgattgaccaaggagaggaagtgattgtcggaattaataaatacaaagcaggtaatgctgaaccgatcgaggtacgtgaaattgacaacactgctgtgcgtgatgcacaaattaagagacttgaacaaacccgaaaaaatcgtgatcagcaaaaagttgataccgtactgagtgctattactaaagctgctgatactggtcaagagaaccttcttgggctctcaataaatgcaatgagggcgcgtgctactgttggtgaggtttcttcagcgcttgaaaaagtctggggacgatacaatgcacccattcaatcaatatctggagtttatgcaggtgcatttccggatcagcaggaaatttcagacgtgcgcaatgaaataaaggaatttgcgaaaaaagctggacgtcgtccaaggattatggttgccaaaattggtcaggacggtcatgatcgcggtgcaaaagtaattgcaacggcatttgctgacatgggttttgatgttgacattgctcctctttttcaaactccggaagaggtcgttaagcaggcaattgagaatgatgttcatgtg

SEQ ID NO: 292982 - DNA, 1284 bp, Unknown
  Bacterial polypeptide expressing nucleotide sequence isolated from the Sargasso Sea
tggcctcaagattgatgattttgcgccccgcctgagttttttctggggcatcggcatgaatttctatatggaaattgccaagatgcgcgcggcgaggttgttgtgggcggaaatcgtagatgcctttagcccgaccaaccctaaaagcggcatgttgcgcacccactgccagacgtcggggtggtcgctgaccgagcaggatccctacaacaacatcgtgcgcacgacgattgaggcgatggcggcggtgtttggtggcacccagtctctgcataccaatgccctcgacgaggcgattgcgctgccgtctgactttgccgccagaatcgcgaggaacacgcagctgatcctgcaggaagaaaccggcatcgggcaggtggtggatccctggggcggctcctacatgatggaaaccctcaccaatgacatggccgctaaggcccgcgaattaatcgccgagatcgacgagctgggcggcatggccaaggcgatcgagagcggcatacccaagctgcggattgaagaggcggcagcgaaaaagcaggcgcgcatcgatcggggcgaaaacgtgatcgttggtgtgaacaagtttcagatcgacgaacaggatgcggtggacattcttgagatcgataacgagcaggtgcgggactcacagctggctcgattggcgagtattcgtgagactcgagatgacgccgcggttgaggccgcattgaacgcgctgacccaagccgcagaggcgggtgagggaaatctgctggggctagcggttgaggcgacgcggtgtcgggcaacagtcggtgaaatttccgatgcccttgagacggtttatggacgcttcgtggccaatgcacagaccgtatcgggggtgtatggtgcggcgtatgcagaagatgccaactgggagggcatctccatggatattgagtcctttgtggagcagcacggtcgcaggcctcgtatgctggtcgccaagatggggcaggacggtcacgatcgtggcgccaaggtagtcgccaccgccttcgcggatgtcggtttcgacgtcgacctatcaccgatgttttccacccctgaagaagtggccaggcaggccatcgagaacgatgtgcatgttgtgggcgcctcgagcctcgctgcaggtcacaaaacactggtgcctcaactcattgaagcgctacgtgagcagggtgccgacgacgtgatcgtgatcgcgggcggtgtgattccgcagcaggattatgggttcctcgaggagaagggcgtggcgctgatttttgg

SEQ ID NO: 292983 - DNA, 1348 bp, Unknown
  Bacterial polypeptide expressing nucleotide sequence isolated from the Sargasso Sea
ttgggaaatataattaaaaaggaagaaaatttaaaactaaatactagtttatcagatggcattacatttaatagcttatacactcttgctgatttagaggattttaaatatgttgaaagttttcctggattattccctttcactcgtggaacttatggttctatgtatgttggacgtccctggacgatccgacaatacgcaggtttttccaccgctgaagaatccaaccgtttttaccgagagaatttaaaagctggccaaaaaggccttagtgtcgcttttgatcttgccacgcatcgtggttatgactccgatcacccccgggtacgaggagatgtaggcaaggcaggagttgccatcgataccgttgaagacatgaaaatgctctttgacgggattcccttggatcaaatgtcggtatcgatgacgatgaatggagcggtccttcctgttttggcttcctacattgttgctgcggaggagcaaggggttcaaaggtcacagatgagtgggaccatccagaatgacattttgaaggaattcatggtccgcaatacctacatctaccctccagagcaatctatgcggatcgtaggggacattattgaattcaccagtcaggaaatgccccgctacaattcggtcagcatcagcggatatcacattcaggaagcgggagcgaccacggttcaggaaatggcatttactttgggagacggattggaatacgtccggatggcgttgaatcgtggaatggatatcgattcatttgcgccaagactttccttcttttttgggattggcatgaactatttcgtggagattgccaaacttcgtgcggcacgtcgactctgggctgagatgatttcagagtttaaacctgaaaatccgaaatcaatgatgcttcgcacacactgccagacatcgggttggagtttgacagagcaggatcccttcaacaatattgtaagaactacacttgaagcgatggcggcggtccagggtggaacacagtcgcttcatacgaatgcttatgacgaagccctgggacttcccacccggacttctgcccgggttgcccgcaacacccaactcatcatgcaggaagaaaccgggatgaaccgggtgattgatccatggggaggatcctatttcatggaatctctcaccgaatcccttgtggtagagagcagaaaactcctggaagaggtcgaagagcttggtggaatgacaagtgccgtagagcagggatttcctaaacagcgtatagaggaagctgccgccataagacaagcaaagatcgatcaaggtgaagaagtcattgtaggagtcaacaattaccaaacag

SEQ ID NO: 292984 - DNA, 2125 bp, Unknown
  Bacterial polypeptide expressing nucleotide sequence isolated from the Sargasso Sea
agataaatcaaaatggagtgaacttgccaacaaagaattgcgagacaaatctgctgcagatttaacttggaaaacattagaaggcctaaacattaaccctttgtacacacaagaagatctgaacgatttggggcatcttgattctctgccaggcgaggagccgtttactcgtggcgtgaaggcaacaatgtatgctggtcgaccatggacggtcaggcaatatgcaggtttttcgactgctgaggaatcaaacaaattttaccgaaaagcactagatgctgggcaacaaggtgtttcagtagcatttgatctcgccactcaccgtggctacgacagtgatcaccccagagttttgggcgatgttggtaaggcaggcgtagctatagatagcgttgaggatatgaaaatactttttgatggtatacctttggataaggtatctgtctccatgacgatgaatggtgccgttatccctgtgcttgccaactttatagttactggtgaggaacaaggccatgataagtctttactttcgggaacaattcagaatgatattttaaaagagtttatggttagaaacacctatatctatccacctgaaccatccatgagattggtagcagatattatcgagtacacttcggatgaaatgcctaaatttaactcaatttcgatatctggttaccacatgcaagaggcaggagccaatttagttcaagagcttgcttacactctggccgatggtaaggaatatgttaaaacggcaattgatagaggaatggatgtagataaatttgccggccgtctatctttcttcttcgctattgggatgaattttttcatggaggcggctaaattacgcgcagctcgtcttttatggcaccgaattatggatgacttgggagcaaaaaaccctcgttcgaaaatgcttagaacccactgtcaaacatctggagtttctcttcaggagcaagatccatttaataatgtagtcaggacagcatatgaagcaatgtcagcagttctaggaggaactcagtctcttcacactaatgctttagacgaagcgattgcgttaccgacagagttttcagcgagaatagcaagaaatacacaattaattttacaagaagaaacaggtataacaaacgtggtggatcctcttgctggatcttactatgttgaaaagcttaccgccgatttggcagatgctgcttgggaattaatcgaagaagtggaccagatggggggaatgactaaagctgttgctagtggtatgccaaagttgcgcatagaagaaacggctgcgcaaaggcaggcggagattgatagaggcgaacaggtcattgttggcacaaataaatatcgattaagtcaagaagaagaaattgaaattctagatgttgataatttagctgttagagcagctcaaattaatcgtttgggcgttatcaggaaaaatagagatgaaggagcctgtttagctgcacttgaagagattacaaggcgagctgaacatggtggaaacttattggaggcggcagttgatgccgctcgctgcagggccacggttggggaaatctctacagcgatggaaaaaatatttgggcgtcacagtgcagaggtgaaaacattggctggaatttatggagctgcctatgaaggtgataaagatttcattgccattcagaaatcagttgaaaaatttgcaaaagaggaggggcgccgaccccgaatgttggttgtaaaaatgggtcaagatggacatgatcgaggtgccaaagttattgcaactgcatttgctgatattggttttgacgttgacgtggggccgctcttccaaacacccgaggaagcagcacaagatgcgatcgataatgacgttcatgtaattggcatttcatcacaagctgcgggtcacaagacactggccccaaagttaattgaaattctaaaatccagagaagcggaagatatccttgttatctgtgggggagttattcctcagcaagattatgtgtttctaaaagacgcaggcgtgaaggctatttttggacctggaacaaatattcctcatgctgctcaggaaattttggatttaataaaagcggcatcaaaaacataa

SEQ ID NO: 292985 - DNA, 1138 bp, Unknown
  Bacterial polypeptide expressing nucleotide sequence isolated from the Sargasso Sea
catgtcctccgtcaccatcgaacgcatcgaaacccgcctcgtcgacctgccgacgatccgcccgcacaagctgtcggtggccacgatgcacggccagacgctgatgctcgtgaaggtgttctgcagcgacggcgtgacgggtctcggcgaaggcacgacgatcgccgggatggcgtacggcccggaaagccccgaggcgatgaagctggcgatcgacacgtatctcgcgccggcgatcatcggcaaggacgcaacgcgcatccagacgctgatggcgttcctcggcaagctcgcgaaggtcaaccacttcgcgaagagcgcgctcgaaaccgcgctgctcgacgcgcacggcaagcggctcggcgtgccggtgagcgagctgctcggcggccgccgccgtgaccgtctcccggtcgcatggacgctcgcatcgggcgacacggccaccgacatcgccgaagccgagcggatgctcgacctgcgccgccacaacgtgttcaagctgaagatcggcgcgaaggcgcccgaggccgatatccgccacgtggccgcgatcaagcaggccgtcggcgatcgcgcgtcggtgcgagtcgacgtgaacatggcgtggagcgaaacgcaggccgcgcgcgcgattccggcgctggccgatgccggctgcgaactggtcgagcagccggtggcctcggccgcggcgctggcgcgcctgatgcgccgcttcccggtcgcgctgatggccgacgaaatcctgcagggccccgacagcgcgttcgacatcgcgaagcatcacggcgcggacgtgttcgcgatcaagatcgagcaaagcggcggcctgttcgccgcgcagcgcgtcgccgcgatcgcggatgcggccggcatcgagctgtacggcggcacgatgctcgaaggcgcgttcagcacggtggcgtccgcgcacctgttcgcgagtttcgcgaacctgcaatggggcaccgaactgttcgggccgctgctgatcaccgaagagatcctgacgcagccgctcgattacagcgacttcgaactgaccgtgccggacggccctggcctcggcatcgaactcgacgaggacaaggtcaggcgttttacccgcgacgggctgacgaaagtcgcgcgataa

SEQ ID NO: 292986 - DNA, 592 bp, Unknown
  Bacterial polypeptide expressing nucleotide sequence isolated from the Sargasso Sea
cgatttgggcccgtcatcgccatcaagcaggcgctgggcgactgcgccagcgtgctcgtcgatgtcaaccagggttgggacgagtcccaggccatccgcgcctgccgggtgctgggtgacaacggcatcgacctgatcgagcagcccatcgcgcgcatcaatcgcgacggccaggtgcgcctgaatcagcgcagtccggcgccgatcatggccgacgaatccatcgagagcgtggaagacgccttcagcctggccgccgacggcgcggccagcgtgttcgccctgaagatcgccaagaacggcggtccgcgcgccgtactgcgcactgcggccatcgccgaggcggcaggcatcgccctgtacggcggcaccatgctcgaaggcgccatcggcaccctggcctcggcccacgcctttctcaccctcaagcagctgacctggggcaccgagctgttcggcccgctgctgctgaccgaggagatcgtcagcgagccgccgctgtaccgcgatttcgccctgcaggtgccgcgtaccccgggcctgggcctgaccctggacgaagaacgcctggcgttcttcgcccgcaagtgaa

SEQ ID NO: 292987 - DNA, 1135 bp, Unknown
  Bacterial polypeptide expressing nucleotide sequence isolated from the Sargasso Sea
catgatagcaactgccgccaccatcgaacgcatcgagacgctgctcgtcgacgtgccaacgatccggccccacaaattgtcggtcgccacgatgaattgccagaccctcgtactggtgcgtgttcgatgcacggacggtatcgaaggcgtcggcgaggcgacgaccatcggcggtctcgcgtacggcgaggagagccccgaaagcatcaaggtcaacatcgacacctacttcgcgccgctgctgcagggcatggacgcgacccgcccgggcgccgcgctggcgcgcgcccgcaagctgttccagggcaaccgcttcgcgaagtgcgcgctcgagaccgcgctgttcgacgcgcaggcgcgccgcctcggtgtgccgctgtccgaactgttcggcggacgccggaccgatgcggtcgatgtcgcatggacgcttgcgagcggcgatacgcagcgcgacatcgcggaagccgaagcgatgctcgacgcgcgccgccaccgcgcgttcaagctgaagatcggctcgaatgccgtggccgacgacgtggcccacgtgatcgcgatcaagcgcgcgctcggcgaacgcggcgacgtgcgcgtcgacgtgaaccaggcatggagtgaaaccgacgcgatctgggccggcgcacgactcgccgaagccggcgtgagccttgtcgagcaaccgattgccgcgaccaaccgcgcggggctgaaacgcctcacgcaactggcgcaggtgccgatcatggccgacgaggcgctgcacggccccgtcgatgcattcgcgctcgcacaggatcgcgcggccgacgtgttcgcggtgaagatcgcgcagtcgggcggcctgcagggtgcggcgagcgtcgcgtcgatcgcggcggcggcaggcatcgaactgtacggcggcacgatgctcgagggcgcggccggcacgatggcgtccgcgcaattgttcagcacgttcgactcgctgaaatggggcaccgaactgttcggcccgctgctgctcaccgaggaaatcctcgtcgagccgctgcgctacgcggatttcaagctgcacctgccggccgcgcccggcctcggcatcaccttcgactgggcccgcatcgaacggatgcgacgcgacgcccgctga

SEQ ID NO: 292988 - DNA, 568 bp, Unknown
  Bacterial polypeptide expressing nucleotide sequence isolated from the Sargasso Sea
ttgcagcctactgtcatcacgtacaacgcttcgatcagcgcctgcgagaagggaggccagtggcggagcgccctggagctgctgtcgcagctccatgctgagtggctgcagcctaatgtcatcacgtacagtgcttcgatcagcgcctgcgagaagggaagccagtggcggagcgccctggagctgctgtcgcagctccgtgctgagtggctgcagccaaatgtcatcacgtgcagtgcttcgatcagcgcctgcgagaagggaggccagtggcggagcgccctggagctgctgccgcagctccgtgcagagtggatgcagcctactgtcatcacgtacaacgcttcgatcagcgcctgcgagaagggaggccagtgtcggagcgccctggagctgctgtcgcagctccgtgcagagtggctgcagcctactgtcatcacgtacagcgcttcgatcagcgcctgcgagaagggaggccagtggcggagggccctggagctgctgtcgaagctgggtttgcctggattgctgtcggggttgcccagacagctgctgggtctgctgtaga

SEQ ID NO: 292989 - DNA, 659 bp, Unknown
  Bacterial polypeptide expressing nucleotide sequence isolated from the Sargasso Sea
aagtatcaatcagtttgtgaatcaaattaattcagaattttcagagattgatgttttatataataatgcaggattaatttacagagattttgaactaactgaagaaggttacgaatcgatgattgctgtaaattactttggttcttttagattagctctgatgttattggagaatttacatagaagttctggaaggattgttcaagtcacaagcctttctatgtatctggcaaggacatttaatttaagcggtcttcactctaatgagtcattttctccaagcagtaggtacaattttacaaatctgctcagatcaatgtttgcaattgagttagagaataaacttaaaaaaacatcaatttcagtttctgctgctcacccaggtgttacaaagtcaagacagtcaagaccatacgaagttaaaaaaattaaaaagtctttttatacttatttctcaacaaacataaagacaggaatcgcaccaattattcaagcaattgaagatgaaaacatcacagcagatctagtttatgctccaaaactaataggcatttatggtgaaccaacacttatgcgtcataataaattagtttacaaccaagagctacgagataaactttggtcatatacagcaaatgaacttaatttagacatatgat

SEQ ID NO: 292990 - DNA, 994 bp, Unknown
  Bacterial polypeptide expressing nucleotide sequence isolated from the Sargasso Sea
attgatgcagtaaaaaaatctactgatgatgatggggctaaactctatgatttaattttaaaaagaacattggcctcacagatgaaatctgcaaaaataaatcaagttaccgcaacaattcttaatcaaaaatctgagtttcgcgccaatggtaaaactatacttttcccagggtatatggcagcttatgttgaaagtactgataaaagaagtggtgtagctgaagataaagaaactgttcttccaaaacttgaagccaatcaatcattagaatgcaattctctaaactttgatgaacattccacaaagccgccggctcgctttaccgaagcttcgcttgttaaggaattagaagaaaaagggattggaagaccatcaacatttgctaatattattgacaccattgtccgaagaacatatgtcaaccgggagcgaagtaaattaactccaacatttcttggattggctgtaacccaattattagaaaatcattttaattcattagtcgatgataaatttacagctacaatggaagatggattagatgcaatttcaaggggtgaattagaatcactcccatttatgaaagaattttattttggctctgatagccaaagcgggttggtaaatatgcttgatgataaagttgatattggcaaagcatgttctgtgcagcttgaggataaggaagattctattgaaatacgcgtcggccaatatgggccatttgtaaggcagggagaaaacagaaaatctgttcctcctgatatatacttaggagatttaaatgttgataaagcattggaaatccttaatcaagaaatcaatgaagatcgcgaaattggtttagatcctgattctaaagaaatggtattattaaaaaatgggccatatgggccatatgttcaattaggtgaaacaaataaaaggaaggcaatacctaaaggtacagaggtttcagaagttgatctagaatttgctcaaaaattacttg

SEQ ID NO: 292991 - DNA, 1021 bp, Unknown
  Bacterial polypeptide expressing nucleotide sequence isolated from the Sargasso Sea
actttgtgaaagagaacgagagatagatctatttattccaaaagaattttgggaagtaatcatagaaattgaagatgaaaatggaaataagatgactagtagtatttattctgacaatggtaaaaaaattgaaaaactatctatcgaaagtgaaatccaagccacatctattaaggatagattgctaaaaaaaaaatttttaattgaagatgtagcaaaaaaagaaaaaaaaagaagtccttatagccctttttcaaattcgcttttactccaagatgcatcatcaaagctaggatttagtccaaaatatacaaattctttggcacaacaacttaaagatggaataggtagtctaggcgcactaattacgtatcatagatcagactcaaataagatgaagaagagtgaagttgatagtttaagacaaattataagtaacgacattggggaaaattttctatcaaaagaagagattatatataaagaaaagtctaaatttgttcagcaaggtcatgaagcagttaccccaacccaacttcaaaaaaaacctgaagacgtaaaaaaagaattaaacgacgatcaatttaaactctacgatttaatatggaaaagaacagtagcctctcaaatgtctcaaagcaagaatcttgaaacgtcatattttattaaaggagaagaatttcttttaaaatcatcaggaagtatccaaatttttgaaggatttaaaaaaatttataattattcagagaaaaatgatgatctccaaaagcttccaaatttaaaagtaggagatatcgtaaacatatctaaaattgaaattaagcaaaaccacacaaaacctcccaatagatattccgaggcgggtttaatcaaaaagttagaagaactcggaataggaaggccttcaacatatgtttcaatttttactaagcttgaaagcaataactatatttcaataaagaataaatctttaattccaagttcgagaggtaaaattttatcaaaattcctagatgggttt

SEQ ID NO: 292992 - DNA, 1078 bp, Unknown
  Bacterial polypeptide expressing nucleotide sequence isolated from the Sargasso Sea
gaaggtgaggcaatatcgaaacatatatatgatattttggataaagtgaagttattaaaaggcaaaaatacctatagagttgcatttaatgaaattacagaaaatgctgttttaaatgctcttaaaaatccaagggaaatctccacagatctttggaatgcatatgtaactagaagaactctggactatttaatgggatatgatatttcagaattcttatggaagaaagtaagtagattggcaaggggcgggagagttcaaagcccagctcttaggctaatagttgaaaaagaaatagaaattagtaacttcaagccagtagaattttggactggttctattctagcctgtagtaataaagattgcatagatttagatcttgtttctatagatggtgaaaaaataaaaaaaggtaatataacaagtatcaaaaatgatagcgaggcgtcagcaatcaagaaagatttagttcaatataataaaattgaaattgatgatattaaaacatctgataggaaattaaaaccaagaccaccatttacaacggcatctctccagcaggcagcttattcaacccttggtttttcagttaagatgacatcaagtattgcgcaaagattatatcaaggcatgaccttaggagccgatgaaacagttggtttgatatcatatatgcgaacagattcaacaaatttatcaaaggattgtttggatgatattaataaatatctgagtgaaaaacatccaaaatacaaatctgaagagacaagaatatattcaaaaaaagttaagaatgctcaagaagctcatgaggctataagaccaacctctataagcaacacaccagataaaattaaaaaatatctagaggatgctgaatataagctatataacttaatctggaaaaggactgttgcgtcgcaaatgattgatgcaacttatcaacaagtagggattaattttttattagctgataagtatcaattcaaatatagcgggtcatttctcaaacacaatggattcaaagaaatatatgatctttctgagaatgatgaaaaagaaaagcttaataagagaa

SEQ ID NO: 292993 - DNA, 970 bp, Unknown
  Bacterial polypeptide expressing nucleotide sequence isolated from the Sargasso Sea
aaaaaccattaagcgctcaccaagagagccatttagaacatctgtactacaacaacaagcatccaacaggtttggttttacgccaaaaagaaccatgcaggtcgcgcaatcactctatgcgcgtgagggtggcggactaatcacctatattagaacagactcaattgaaatcgatgaaggaaaggtaccggccgtaaggtctcaggtagcgagcatgttcggtgaagactttgttcagcctagaaactataaaaacaagaaagaggctaagaatatccaagaggcccatggtgcaataacccctgttgacataagtcttgtcccggctgatgccaaaaagattttgaaagatgacgagttcaaactctatcagctaatctggcaaagaactgtcgcatcccaaatgaaggatgcaatctttgaaagaacatctatcgagtttgtgcctaccggagatgagagcttggcaacattttctttttctgaccaggaacttattttcagtggttatttagaagcgactcaagaagaagttacaaacaataagccgcctttgatcaatgagaatgatgcaattggatttaaggagcttgtaaaaacccagcattttactgatccgcctcctcgttataatgatgcgagcatgattaaggcgcttgaagaaaaaggtattggaaggccttcaacatatgctgacatactctctaagctgacagacagaaagtatatctggcttaaacaaaaaagatacgagccatcagatatgggtcgtcttgtgagcaattttttaaatgaacgcttcggtggatatatcagtgatgagtttacttcgaatatggagaacaatttggatgaaatctcaagtgggcagagaagcaagcaagatgttctgaatgccttttggtctccattaatagacactgttgacgaggtcagtgccgtggttacaagaaaagatgtaaacccacaa

SEQ ID NO: 292994 - DNA, 1015 bp, Unknown
  Bacterial polypeptide expressing nucleotide sequence isolated from the Sargasso Sea
gcaagtagcccaatcactatacgagtcaggtttgattacttacatgagaaccgacggggtaggaattagtgctgaaattataaatgaaataagaagcttaatttcttctgaatttggcgaagattatcttccagatagcccaaaaatttataaatcaaaagcagcgaatgcacaagaagctcacgaaccaataagaccgaccgatataagaaataaaccagaaaacaacaatggattaaatcaagatcaaatgaatctttattccttgatttggcagagaacagttgctagtcaactaaaaaactcaagatatctaagaaaaacaatcttaatagaagataatgatgagaagtttcttcttagaacaagcggaagagagctcatttttgacggttttgaaagggttttgaaagatgatacggattctgaagaatctcaaaagttaaagggaatctatgatgattcgccgctagatatatctgatgtaagaactgagcaaaaatttacttcccctcctagaagattttctgaagcatcgttaattaaaaatatggaagaggaaggtattggaagaccttcaacttatgcaaatactttaaaaaatcttagagacagaaaatatacttttggagcaaaaagcattaatccctctgatttaggtaggattttggtctcttatctatcaaaagcatatgagacattctttatagagatagattttacagcggaattggaaaaaagattggaccaggtatcttcaggtttaatgctttggacggatgtattagatgatttttttgcaaaacttttagaacacatatccagaattgaagaatatagaacaagagaggttttagatatgctgaatgagcaaatagggcatagggcttttccaaaaaatattaaaggtcaggttatagataattgccccaaatgctctaatgaaataagtattaaacatggcagatggggtttttttgttggatgtggagaatgtcaatggacaaagccagtg

SEQ ID NO: 292995 - DNA, 1079 bp, Unknown
  Bacterial polypeptide expressing nucleotide sequence isolated from the Sargasso Sea
ttttgatggttatacaaaaatatcttcacaaaatgccaagaaatcagacgaagaaaatcttccaagtttagaagaagggcaagttttaaaattggtcgaagtaaaaaatgagaaaaagtttacgaagcctcctgctcgattctccgaggcagcacttgtaaaggagcttgaaagcaaaggaataggaagaccatcaacatatgcagcaattatttctacaattcaggctagaggctatgtgaagcttgaaaataaaagattctttgtaaataaaattggcttgattgtttctgacagactgatggaaagtttcaatgaaatcatggattatgactttacagccaatttagaaaatgaacttgatgaaatagcttccggcaatcttgagtggaaatcagttctaaataagttttatcaaacatttcaagatgatcttaataatgcaggatcagctgaagatggaatgaagccaaacgaaccaactgaaacaaatattatttgtccctcttgcaacaagagtaatatgttaattagaaattcagcaaatggtgttttcttaggttgcgcaggctatttcaagtctggtgatgaacaatgtaagcatactatgaaccttataagtggtgatgaggcagtaagtgtcgatgatcaagaggaagcatcaaatctcttcattaaaaaacgatgtcatatttgtggaactagcatggataattacctaatagatgaaaataggaaaattcatgtgtgtgcaaataatcctgagtgctctggatttcttcttgaagaaggtcaatttaaaattagaggatacgatggaccaacccttgaatgtcataaatgtgggtccgatatgcaattgcaaactggaagatttggaaagtattttctttgtcaaaatgacaattgcagagcaactagacaattaatgaggaatggagagcccaaaccaattgttatggatccaataaatacaaacattgcatgtgagaaggtcgaagatatatttctcctcagagatagcttaaagggacttttcttggcagctagtcaatttccaaagaataggaaacaagggc

SEQ ID NO: 292996 - DNA, 955 bp, Unknown
  Bacterial polypeptide expressing nucleotide sequence isolated from the Sargasso Sea
gcgaaactagaaaaagatggcgaatacgatgcgaagctatcagtttttaaagaagagactattaaaaagttcacatttgattcaaccacactcgttgaagaggcgagcaaggctttggaggacagttgtaaaaaaggccttattgccaagtcgatcaccaaaaaacacattaagcgttcgccgagagagccttttagaacctctgtgcttcagcagcaagcatccaataggtttggctttacaccaaaaaggactatgcaaattgctcaatcgctctatgctcgtgagggcggtggtctaatcacatacattagaacggattcaattgaaattgatgagggaaagcttccttctgtaagagaccaggttgcttttatgtttggggatgattttgttcaaccaaggaattataaaaataaaaaagaggccaagaatgttcaggaagcgcacggtgcgataacccctgttgatataagccttattccaactgaggccaaaaaagttcttaaagatgatgagttcaagctctaccagctaatctggcaaagaacagttgcgtcccaaatgaaggacgcgctctttgaaagaacttctattgaatttgtgcctactggagatgaaggtctggcgacgttttctttttctgatcaagaacttatttttagtgggtatttggaggcaacccaagaagaggttacaaataataagccgcccttaatcaatgaaaatgattcaatagagttcaaggggctcataaaaacccaacatttcacagacccgcctcctcgttacaatgacgcaagcatgattaaggctcttgaagaaaaaggcattggaaggccctcaacatatgcagacatactctctaaactaacagatagaaagtatgtttggttaaaacaaaaaagatatgagccctccgatatgggtaggcttgtaagcaatttcctgaacg

SEQ ID NO: 292997 - DNA, 832 bp, Unknown
  Bacterial polypeptide expressing nucleotide sequence isolated from the Sargasso Sea
actcaaagtggatcctaaacaggcgaaacgagtcacttttgacgcgattactaaatctgacgtccaacgagctttcgaaaatcctcggggtattaacatgcctcgcgtcgaagcacagcaggcacggcgaattgttgatcgcattgttggatatcgcgtttccccaattctttggaaaaaggtcgcctccggattaagtgcgggccgtgtacaaagcgtggcttcaaggctcgttgtggaacgtgaaaaacagattcgcgactttactccagatgagtcttgggaacttacaggatatctctcttttgataccgatggtgctgaggctctgcagaccgtctgggacgacttcatgtcacagcgagacgatcgcaaccgaccaccaacaatcaagcaacgtaccgcctggctttctgatcaccgcagcctttccgccgaacttgttgaagttggtggaaagaccatgaagattgaggctgacaaaacctctaccgaagaactcgttaatcaagcagtgtcggctgctgaggcagctggactagtcgacatagatatccaacgagaggaaaacagtattggcaagggaagagcaaaaaatattgttcgtctaacaggaaaaccggactccaacacacgctatagcatcgactcaattgatgtgaaacgtacaaagtcgagaccctatccaccattcatcacaagcaccttacaacaagccgcaagtagccgactaagcatgtcaactgaccgaacaatgcgtgtcgctcagcaactctatgagggcatcgatctacccggagagggacgagtcggactgattacatacatgcga

SEQ ID NO: 292998 - DNA, 805 bp, Unknown
  Bacterial polypeptide expressing nucleotide sequence isolated from the Sargasso Sea
caagaccatcgtgcttttccttcccaagggatcaaggtcgaaagcctccatggggcatgtccgcgaccttcccacaaacgccagcgagattccggcatcgccaaaggggcagaaatgggccaacctcggtgtgaacaccgacgcggatttcgagccgctgtacgtggtcccgaaggacaagaagaagacggttcgcgaactcaaggacgccctcaagggtgctgatcagttgctgctggcgacggacgaagaccgggaaggcgaaagcatcagttggcacctcctccagctgctggcgccgaaggtaccggtgaagcgcatggtgtttcacgagatcaccaaggaggccatcggcaaggccctggatcagacccgcgacctggacatggagctggtccatgcccaggaaacccggcggattttggatcgccttgtggggtacaccctgtcccctctcctctggaaaaaggtggcctggggactctccgccgggcgggtgcagtccgttgcggttcggcttctggttcaacgggaacgggcccgccgcgcttttcgtagcggcagttactgggacctcaaggcccagctggcgcagtcgggcagtgcctttgaggccaagctgacccatgtgggtggccagcggatcgccaccggtaacgacttcgacgagagcaccggcgggctgaaggcgggcagtgccgtgcggctgctcagcgagagcgaggccaaggcgttggctgaatccgtgcgaaccagcgcctggactgtggatgcggtggaggagaagcccaccggcgcaagccgg

SEQ ID NO: 292999 - DNA, 985 bp, Unknown
  Bacterial polypeptide expressing nucleotide sequence isolated from the Sargasso Sea
gacggccgaaaagctcactggtcactcagaagaagaagttaaattatatgacttaatttggagacaatttattgcatgccaaatgcctgatgcaaaatatttatcaattaatgcaaaagttgttctcgatgattatgttttcagtgcaaaaggaagagaagtaatttttgatggttatacaaaaatatcttcacaaaatactaaaaaagcaaatgaagaaaatcttccaagtttagaagaagggcaagttttaaaattagtcgaagtaaagaatgagaaaaagtttactaaacctcccgctcgattctctgaggcagcacttgtaaaggagcttgaaagcaaaggaataggaagaccatctacgtatgcagcaattatttctacaattcaggctagaggttatgtgaagcttgaaaataaaagattctttgtaaataagattggcttgattgtttctgacagacttatagaaagcttcaatgaaatcatggattatgattttacagccaatttagaaaatgaacttgatgaaatagcttctggcaatcttgagtggaaatcagttttaaataagttttatcaaacatttcaagatgatcttaaaagtgcaggatcaggtgaagatggaatgaagccaaatgaaccaactgaaacaaacattatttgtccctcttgcaacaagagtaatatgttaataagaaattcagctaatggtgttttcttaggttgcgcaggctatttcaagtctggtgatgagcaatgtaagcatactatgaaccttataagtggtgatgaggccgtaagtgtcgatgatcaagaagaagcatcaaatctcttcattaaaaaacgatgtcatatatgtggaactagcatggataattacctaatagatgaaaataggaaaattcatgtatgtgctaataatcctgagtgctctggatttcttcttgaagaaggccaatttaaaattaggggatacgatgga

SEQ ID NO: 293000 - DNA, 788 bp, Unknown
  Bacterial polypeptide expressing nucleotide sequence isolated from the Sargasso Sea
aatgagtgcaaaacacctcgtcatcgtagagtctccggctaaggcacggagtatcggcaagtatctgggtagcgattatgtggtcaaggccacaatcggtcacgttatcgaccttccccctaaggagttgggcgttgatgtagagaatggtttcgagccgaagtacgtaaagattcgaggcaaggggaaagtgattgctgagctgaagagagcagcgaagggtaaggactcggtcatcctcgcgactgatagggatcgggaaggtgaaatgatcgctttccatgtcgctaaggaactcggctacgaaaagaatccggagcgttttacgagaataacctttggtgaggtgacaaaaaatgccgttcatcaggcacttgagcgtggtggtgatctagagcaaggccagattgatgcgcagcaaacgcgaaggatactggaccggttgattggttttaaagtcagcccgtttctgtggcgtccgattcgaccaggcctctcggcaggtcgtgttcaaagtgttgcgctccgaattatttgtgaccgcgaagatgagattagggcttttgttcaggatgaatattggtcgattacagcgagtttgctgaaggatgagcagccttttgaggcgaggctccatcacattgatgaaaaaacgatagacagtaagtcgaagttcaagatcggtgacgaggaacaggcgaggactgtcctcaatgctgtgcgggatctgcccttcgtcgtgacagaggtgcgcaggcgtgagcagaagaaaaaccccccggccccat

SEQ ID NO: 293001 - DNA, 780 bp, Unknown
  Bacterial polypeptide expressing nucleotide sequence isolated from the Sargasso Sea
ttttccttggttgttcttgttatcaaaatgaaggcaatgacaaatgtaaggaaacattaaatttaatttctggtgatgaagctgtcagtgttgacgactctgaagaagcagaaaatcttctcattaaaaagaggtgcccaaaatgtgataccagcatggataattatttaattgatgagtttagaaaattacatgtttgtggaaaaaatccagactgtaacggatacatagttgaggatggaaaattcaaaataaaaggatacgatggtcctaccttagagtgtcataaatgtggatctgaaatgcagttgaaaactggtagatttggaaagtattttgggtgtttaaatgataattgtggggcaacaagagcacttcaaagaaatggtgaacctaaaccaataacaatggagcccatagaaatacctgatctaaaatgcattaaatgtgaagatcattatttattgagggatagcatgaaaggcttatttttagcagctagccaatatccaaaaaacagagaaacaagagctcctaaagtttctgaaattaataaacttcataacgaaattattgaggcttgtagatttttacctaacaaggaaaaacatatgtatttattagaagcacccgaaaaagatgttgatggcaatccttatattattagatataacagaacagatgatgttcattatttagcatcagagaaagatggcaaaaaaacaaaatggacagccacatactctgatggagaatggattcaaaatctaaagtcctagt

SEQ ID NO: 293002 - DNA, 687 bp, Unknown
  Bacterial polypeptide expressing nucleotide sequence isolated from the Sargasso Sea
aaaatatatcaactgatgaatttattaatgaacaacattttacacaacctcctccaaggtattccgaagcaagcttggtaaaaaaacttgaagagctaggtattggaagaccttctacatatgcaagtattatttcagttatatccaatagaggatatgctgatattgttaataaacgtttttttccaacagatagaggtaaattactatcagctttcttagaaaaactttttacaaaatatgttgattatggatttactgctggattagaagagcagcttgatgatatcacatctggtaaagaggaatggatcaaggttcttgatagtttctggaaagacttcaacaacaacatttcaaatgtaaaagaaaagagaacaagagaagtgttggatcttttaaatgaaagtcttggagaactaatttttgaatctgatgaaaatggaaaaatcaatagaaaatgtaagttatgtaataatggagaattaagtttaaaaaatagctttagaggtggtgcttttataggttgttcaaattatcctgattgtaagttcacaagacctctttcaaaatctaaagcaaatgatcaaattgctttggcagaaccaaagttaattggtcaaaatgaaaatggtaaagatatttatttgaaaaatggaagatttggaccatatcttcacatatgaa

SEQ ID NO: 293003 - DNA, 105 bp, Unknown
  Bacterial polypeptide expressing nucleotide sequence isolated from the Sargasso Sea
aatgaacttagtaattgttgaaagtccagctaaagcaaaaacaataaataaatatttaggaaaagattatttagttttagcaagctatggccatataagagattt

SEQ ID NO: 293004 - DNA, 737 bp, Unknown
  Bacterial polypeptide expressing nucleotide sequence isolated from the Sargasso Sea
aaaatgtaaaaaaactttaaaattagtttctggtgatgaagctattagtgtggatgataatgaagaggtagaaaacctgcttataaaaagaagatgcccaatttgttcaacaagtatggacaactaccttattgatgaaaataaaaaaattcatgtttgtggaaaaaatccagattgcagcggttatgagattgaagagggtaatttcaaaataagaggctacgatggccccactcttgaatgtcataaatgtggatctgaaatgcagctaaaaactggaagatttggtaagtactttgcatgtcaaaatgataattgcggaacaacaagggcacttcaaagaaatggtgaacctaagcccattactatggagccaatagagcttcaagaattaaaatgtttaaaatgtgaagatcactatttgttgagagatagcatgaaaggacttttccttgcagcaagtcagtatccaaaaaatagggaaacacgcgcacctaaagtatctgaaataaaagacttagctaatgaaattcgagaggcttgtagatatttaccagataaaaataaacacgaatatcttctcacagcacctgagcatgattcagatggcaacccttatgtgattcgctataatcgtaatgaagacgttcactatgttgcatctgagaaagatggaaaaaagacaaaatggaccgctgcatattcaaatggcgagtggttagaaacaaaaaaatagt

SEQ ID NO: 293005 - DNA, 703 bp, Unknown
  Bacterial polypeptide expressing nucleotide sequence isolated from the Sargasso Sea
gaagcaagtttagttaaaaaacttgaagagctcgttattggaaggccatcgacttatgcaagcataatttcagttatcaacaatagaggttacgcagagataattaacaaaagattttttccttcagataggggaaaattattatcagcatttctagaaaaactattctcaaaatacgtagattatgactttactgcaaatttggaaaatcaattagatgaaattacaagcggaaaagagaattggataagtgttttagatagtttttggaaggatttttttattaatgtgaatggagttaaagaaaaaagaacaagagaagtattagatctcttaaatgaaagtttagggtcattagtttttgaagttaataaggatggtagtattaacagaaaatgtagcctatgtagcactggagaattaagcctaaaaaatagttttcgtggtggtgcttttgttggctgttcaaattatccagaatgtaaatttactagaccattatctaaatcaaaagctgctcaacaattgcatttagcagaacctaagttcattggtaaaaatgagaatggcaaagatatttacttaaaaaatggtaggtttggaccttatttacaatatgaaaagttagatactgaaaatgataaaaaatatatacaaaagaaaaagttaaaaaaagaagacagtaattttaagaatgtttcaa

SEQ ID NO: 293006 - DNA, 901 bp, Unknown
  Bacterial polypeptide expressing nucleotide sequence isolated from the Sargasso Sea
gatgttaaaaaaagtgaagtaaaatttgatgattatattgatgagcaacattacactcaaccaccaccaaggtattctgaagcaagcttggttaaaaaattggaggaattaggaattggaagaccttctacatatgctagcattatatcagttattgctaacagaggttatgcagatataaacaacaaaagatttttcccaacagatagaggtaaattactttctgcatttttagaaaaattattcacaaaatatgttgattatggttttactgcaaagttagaagatcaattagacgatataacttcgggaaaagaaaattgggtaaatgtcttagaaaacttttggaaagactttaattctaatgtttctggcgttaaagaaaaaagaactagagaggtgcttgatttattaaatgaaagtcttggatcactaatatttgaagttgataaggatggaaggattaatagaaaatgccaactctgtgaaacaggacaactgagcttaaaaaatagctttagaggtggtgcatttataggttgttcaaattatcctgagtgtaaatttaccagaccattatctaaatcaaaagcagcacagcaattaacattggctgaaccaaaattaatgggaaaaaatgataatggtaaagatatttacctaaaaaatggaagatttggtccttatttacaatttgaaaagaatgcaaaagatgaagtaataacgaaaaagaaaaaaagtaaatttaagaatcaagaaaataatttaaaaaatgtctcaatacctaaaggaattgaaattgataatatagacctagaaaaagctaagtacctatgttcactaccattaaatttaggtaaaaatcctgaaaataaaaaagatataactctaaacgtggaag

SEQ ID NO: 293007 - DNA, 903 bp, Unknown
  Bacterial polypeptide expressing nucleotide sequence isolated from the Sargasso Sea
gtttcaaataataagaaaacagtgattgatgatattaaaaaatttacgaaagatgctgatgttatttactttgcaaccgatccagatagagagggggaagccatatctaaacatttatatgacattttagataaagcaaaaatacttaaagaaaaagaaacacatagagtagtcttcaatgagattacaaaaaatgctgtgactgaagcactaaagaagccaagggcaatatcaacgagtttatgggatgcatacctagcaagaagaacgcttgactatctcatgggttatgacatttcagaatttttatggaaaaaggttagcagagacgctcgtgctggaagagtccagagtcctgcattaagactaatcgtagaacgagaaataaaaataaattccttcattcctgaagaattttggaatatcactgcaagtgtttcaaacagtcagagaactattgaaattgatttatctcagataaaaggcgaaaaagttaaaaaagacaatataaccattataaatgattccaaaaatgcaaatgagattaagtctatgattgaagcacatgacaaagtcagagtgtcaaatataaagcatggacaaaggaaaacaaaaccaagggcgcccttcacaacagcatctcttcaacaaactgcgtacactagtcttggattgtcagttaaacaaacctctgcaatagcccaaagattataccaaggtatggacataggaggtggacaacctgaagggcttattagttatatgaggacagactcgacaagtttatcaaaggatgcattagacgatatctcaacctacttgaataataatcaccaagggctcgcatctgatgaagttagggtatacaaaggtaaaacaaaaaatgcgcaagaggcacatgag

SEQ ID NO: 293008 - DNA, 733 bp, Unknown
  Bacterial polypeptide expressing nucleotide sequence isolated from the Sargasso Sea
cctgatggtggcctagcaaataaagaacgcatactaccagatttaaaaataaacgaaaaattattatgttcatcacttaattcggaaccgcataatacaaaaccaccagcaagatatagagaatcttctttagtaaaagcattggaagaaaatggtattggtaggccttcaacttttgcatctattttagcgaccatcgtaaaacgtgcatatgttgatagaaataacggaaagttaactccaacatttcttggacttgcagtcactcagttacttgaaaatcattttacaaatctcgtaagcaaagaatttacagcaaaaatggaagatggtcttgatgaggtttctagaggagaacaaaaagctgttccatttatgaataatttttatagtggaggaggtcgtttccttggattagaaaaaatgctcgaagaaaaagtagatattcctttagcctgcacaatacctataccaaaaaaaattaaagaaacaacagaaggtcgtataggaagatttggcccctaccttcgacgtggagatgatacaaggtcaattccagatgatatttatcttggagatttaacactaaataagatcgaagaaatatttagtcaagaagcaaaagaagatgaacctattggtaaagacccagaatctggagaatcaatttggttaaaaaaaggaccctatggatactacgtacaaattggtgacactaataaacgtaaaggaa

SEQ ID NO: 293009 - DNA, 931 bp, Unknown
  Bacterial polypeptide expressing nucleotide sequence isolated from the Sargasso Sea
ctttattacgatggagcaacatctttacacaagccgcctccaagatattctgaggccagtttggtaaaaaaacttgaagaacttggtattggtaggccttctacttatgcaagtattatttctacaatagctaatagaggatatgcagaaatattaaataaacgtttttttcctacagatagaggaaaattaatttcagcatttttagaaaaattattttcaaaatatgttgattataattttacagcaggtctagaagatcagcttgatgaaattacaacaggaaaagaaagttggattaaagttttggaattattttggaaagattttcataataatgtttctgaagtaaaagaaaaaagaactagagaggtcttagacctattaaatgaaagtttaggagatttagtttttgacaaagataaagatggaaatatagttagaaaatgtcaattatgtaattcaggaacattaagtttaaaaaatagttttagaggtggtgcatttattggttgttcaaattatcctgattgtaagtttacaagaccattatccaaagcaaaagctgctgcacaagcacaattagcagaaccaaaattcattggaaaacacgaaaatgggaatgatatttttcttaaaaatggaaggtttggaccctacttgcaatacgaaaaaattttagaagaagtggaagttgaaaaaaatacaaaaaaaaagaagaaaagtaaaaaacttaaatccgatgttaatgaacttttaaaaaatatttcaatacctaagggtttagatttggatagtattgatttggaaaaagctcaatttttgtgttctttaccaaaatcattaggaataaaccctgaacatcaaaaagaaattacactgaatacaggtcgatttggtccttatttaaaatgtgaaaataaatctgcaa

SEQ ID NO: 293010 - DNA, 679 bp, Unknown
  Bacterial polypeptide expressing nucleotide sequence isolated from the Sargasso Sea
atgatttttgttcaaccaagaaattataaaaacaaaaaagaggccaagaatattcaggaagcacatggtgcgataacgcctgttgacataagttttattccagatgaggccaaaaaagttctcaaagatgatgagctcaaactctaccaactaatctggcaaagaacggttgcgtcccaaatgaaagatgctctcttcgaaagaacctctattgaatttgtgcctactggagatgaaggcctggcgacgttttctttttctgatcaagaacttatttttagtgggtatttggaggctacccaagaagaggttacaaacaataagccccctttaattaacgaaaatgattctatagagttcaagggactcataaaaacccaacatttcacagatccgcctcctcgttacaatgacgcgagcatgattaaggctctcgaagaaaaaggcattggaaggccctcaacatatgcagacatactttctaagctcactgatagaaaatatgtgtggttgaagcaaaaaagatacgagccctctgatatgggcaggcttgtaagcaatttcctgaacgaacgctttggtggatatatcagtgatgagtttacctcgaatatggaaaataacttagatgaaatctccagtggaaaaaagagcaaagaagatgttctgaatgactttt

SEQ ID NO: 293011 - DNA, 848 bp, Unknown
  Bacterial polypeptide expressing nucleotide sequence isolated from the Sargasso Sea
tatgtacaaagtttatcaagaagcaaaagatgatgataaagatgaagaaaaagaaacaattcttccagtaatgaatgaagaagatattttaaatcttaaagaagttgaaaagactcaacattttacttctcctccaccacgttacactgaggcaagtttagttaaaaagcttgaagagcttggaattggaagaccttctacttatgcatctattatcaaagtgcttcaagatagagattatgttattttggataaaaaacgttttaatcctcatgatagaggtagaattgtttcaatatttttagaaaaatatttcaatcaatatgttgaatatgactttacagctgatttagaaaatcaattagatgaaatttcagatggaaaacttgattggaaagaagttatccgaaaattctgggaaacttttaaaaaaatttgtgatgaaacagttggtaaatcaaacagagaagtaattgatgtactagatgaagcattaggacctcatttctttccaccaaatggcactgatgaaagaagaaaatgcccaacatgtgaaaatggcagacttggaattaaagttggaaagtttggtggttttattggatgttcaaattatcctgattgtaaatacacagttcagtttaatcaattaaatgacaaagatggcacatcactaagtggtccaaaagaaattggtatttatcctgaaacaactgaaatgattacacttcgaaaaggtccttatggattttatatgcaggttggtgaaggaacaaaagaaaagaagccaaaaagagtttctattcctaaaaattttgaaccagatgaaataggtttaaatactgcaa

SEQ ID NO: 293012 - DNA, 827 bp, Unknown
  Bacterial polypeptide expressing nucleotide sequence isolated from the Sargasso Sea
cttcacagatccaccaccacgatactctgaagctagtttagtaaaaaagatggaggaattaggcataggaagaccctccacttatgctagcattatctcagtattatcaacgagaaattatgtcgaattaattaataaaaggtttaatccaactgatagaggtaagctaatttcagcttttttagagaaattattctctaaatacgtggattataatttcactgcagacttagaaaatcagctagatgaaatcacaagtggtaaaattgagtgggttcaagttttggataatttttggaaagatttttacaaaaatgttggaaaagttaaagaaaagagaaccagagaagtattagacttattaaatgaaagtttaggagctttaatttttgaaagagatgataaaaacgctatagatcgaaaatgtaagttatgttccaatggagagctaagtcttaagaatagttttagaggtggggcttttataggatgttcaaattatccagagtgcaaatttactagacctttatctaaagctaaagctgcagctcaatataacttagcagaacctaagctactgggtcaaaatgaaaaaggtaaagatatatatttaaagaatggtagatttggtccctacttgcaatatgaaaaagaaaaagaagaattagaaacaaaaaagaaaaaaggtagaaagaaaaaaaatgagaatgaacatctcaaaaatgtttccattccgaaaggtattgatgttgatagtgttgatttagacaaagcgaaatatttatgctctcttccaaaagtattagggcaacacccagataatgggc

SEQ ID NO: 293013 - DNA, 549 bp, Unknown
  Bacterial polypeptide expressing nucleotide sequence isolated from the Sargasso Sea
tatgttctttttaatcacagaatcacctgcaaaagctaaaaaaattcaaggttttctatcaaatcaatatactgtaaagtcttcttgcggacatattacagatctagagaagaagaaattatcaatcgatgttgagaataactttcaacctacgtacaaagttacatctgataaaaaagatgtagtgaaaatgttaaaagaaggttcaaaaggtaaagatgttatctttgctgctgatgatgatcgagaaggtgaagcaattgcttggcataccgcaaatgttctaggtgttgatattggaaaaaaaaatcgtattatctttcgagaaatatcaaaaaaagcaattctagcatcccttaagaaacctattaaagtaaatatggacgaggttaatgctcaacaagctagacgtattattgatcgtttaattggatttaaactttctccatgtctttggaaacatatccatacttcagaatcaggtttatcagcaggaagggttcaaagcgcattacttaatctattagaagaaagggaaaagatgattga

SEQ ID NO: 293014 - DNA, 795 bp, Unknown
  Bacterial polypeptide expressing nucleotide sequence isolated from the Sargasso Sea
tatgagccaaaaatctgtaattatagttgaatctccttcaaaggctaagactatttcaaaatatttggatgatcaatatgaagtagtagcttgtgttggacatgtaaaggatttacctagggggtcgttaggtgtagatgttgataataagtttcaaatggaattggttatactagatgataaaaaagaatttttcaaaaatttagcatcgaaagcaaaatccgctcctgaaattattctagcaacagatccagatagagaaggtgaagctattgctgcgcatatcgcatctgaagttcccgattcaaagatatcccgagtacaatttacagaaattaccaattttggtgttaagaatggtatgcaacataaagttgatattgatgaaaatcttgtggaagcacaacgaacacgtagaataatagatcggttagtcggctataaaatatctaaagtcctatggattactttacaaaagaatatgaattttgtaaaacaatcactttcagccggtcgcgttcaatctgcagctttaaaaataataattgatagggaaagaaaacgggcaaaatttaaaaaggtgacttattttggactttctgcccagttaaagactgataaaaatgaatcattaagtgcaaagttatttattatggattcaaaacgtattgcaaaaggacaggactttgaccaagaaagcggggaattaaaaaaagagggattaattgcattaagcagttctcaagcgaaagctcttcttaaagaactaaatccaggcccatggaactgttctaa

SEQ ID NO: 293015 - DNA, 151 bp, Unknown
  Bacterial polypeptide expressing nucleotide sequence isolated from the Sargasso Sea
tatgacaaaatcacttgtaattgtagaatcaccagccaaagccaggacaatatcaaagtatctgggttctgaatttattgtcgaatctagcgtgggtcatattagagatttacccaagaaggctacaccaagtggaaaaagaatctctatt

SEQ ID NO: 293016 - DNA, 640 bp, Unknown
  Bacterial polypeptide expressing nucleotide sequence isolated from the Sargasso Sea
aagcaatatattactggagaagaatttaaattgtatgaaattatttggcaaagggcagtatcttcacaaatggctagtgccatactagatcaagtagcaattgacattgttgatgaagatcaaaaaattactcttagagcaaatggctcaactatcaaatttcctggaatgtataaagtttatcaagaagcaaaagatgatgataaggatgaagaaaaagaaacgatactaccaatgatgagtgaaggtgaggcattagatttaaaagaggtcatcaaaaatcaacattttacaatgccacctcctcgctatacagaagcaagcttagttaaaaaattagaagagcttggaattggtagaccttcgacctatgcttccattataaaagtcttacaagatagagattatgtaattttagataagaaacgttttaatcctcatgacagagggcgtattgtatccatattccttgaaaaatattttaatcaatatgttgaatatgattttactgctgatcttgaaaatcaattggatgaaatttctgatggtaaattagattggaaagaagttttacgaaaattttgggaaacttttaagcaattatgtgatgataccgttggaaaatcaaatagagaagtaa

SEQ ID NO: 293017 - DNA, 884 bp, Unknown
  Bacterial polypeptide expressing nucleotide sequence isolated from the Sargasso Sea
cataaactctgataacggtttaaaccagtttaaatgttcaggatcaacaattaaatttgatggttttttaaaactttcaagaattgatgaaaatgaagatgaaaaaattcttccagaagtaaataaagaagaagttttggttgatgattttattgatgaacaacactatacacaaccacctcctcgatattccgaggctagtttggtaaaaaaacttgaagaattaggaataggaagaccctctacttatgcaagtattatctcagtaatatccaatagaggatatgccgatgtaattaacaagcgtttttttccaacagatagaggaaaattattatctgcatttttagaaaaattattctctaaatatgtcgactacggatttacagctggtttagaagatcagcttgatgatattacgactggtaaagaagaatggataaaagttcttgataatttttggaaagacttcaattcaaatgtgtcaaacgttaaggaaaaacgaactcgagaagtattagatttacttaatgaaagtcttggagaactaattttcgaagctgatgaaagtggaaaaattaatagaaattgtaagttatgtaacaatggtgaattgagtttgaaaaatagttttagaggaggcgcgtttataggttgttcaaattatccagaatgtaaatttaccagacctttatctaaatctaaagctaatgatcaatacgcattagcagagcctaaattaattggacaaaatgataatggtaaagatatttatttaaaaaatggaagatttggtccctatcttcaatatgaaatgattgatgaagaagtaccaactaaaaagaaaaaaaagaaaaaagaaaacgataatttaaagaatgtat

SEQ ID NO: 293018 - DNA, 1017 bp, Unknown
  Bacterial polypeptide expressing nucleotide sequence isolated from the Sargasso Sea
catttgtctcctgatcaagcaaaattatatgaattaatttacaagcgtactattgcatcacaaatgattcatgcaaccctagacaccgttgctgtagatctaagctgcggacctggaaatatgtttagagcaaacggatctacgattaaaaacccgggattcatggcggtttatctagaaggaaaagatgataatccaaacaagaaaaatgctactacagacgatacagaagatgattcatcaggaaattcttctaataataaaaaagaaaaaatactaccagagctgaatgtaggagaacatgttccattagataaaataatctgcgagcaacattttacagaacctcctcctaggttttctgaggcatctttaattaagaccctagaagaacacggaattggacgaccttctacttacgctgctattatttctactttacaaaatagagagtatgcaataatagaacaaaaaagattttacccaacagatataggtagattggtaaataaatttttaacagaatattttagtaaatacgtagactatgcttttaccgctaacctagaagacgaactagatgctatatcacgtggcgaaaaacaatgggttccagtgttagataatttttggaaaccttttataaaattaatagaaaaaaatgaagccgaagtttctcgtgaagatgtaaataaaccaattattttaggtgaagatgataaaggcaatacaataagtgcaagattaggtcgctatgggccatatgtacaaataggagaaaaagacgatgaaaacaatcctcctaaatacgcaagtcttagaaaaggccaaagcatccatgatataaccatagaagaggcactagagttatttaaactaccgagagctctaggtgagatgccatcaggtgatgccatatctgctaatataggccgatttggtccatacgtaaaatatggaactaaaagcttttgttctataaaaaaagattcaggcttagaccctcacactatttac

SEQ ID NO: 293019 - DNA, 853 bp, Unknown
  Bacterial polypeptide expressing nucleotide sequence isolated from the Sargasso Sea
ccttgatgcaaaatatttatcaattaatgcaaaagttgttcttgatgattatattttcagtgcaagaggaagagaagtaattttcgatggctatacaaaaatatcttcacaaaatgcaaaaaaagcagatgaagaaaatcttccaagtttagaagaaggacaagttttaaaattggtcaaagtaaagaatgagaaaaagtttacaaaacctcctgctcgattctccgaggcagcacttgttaaggagcttgaaagcaaaggaataggaagaccatcaacatatgcagcaattatttctacaattcaggccagaggttatgtgaagcttgaaaataaaagattctttgtaaataaaattggtttgattgtttctgacagacttatagaaagtttcaatgaaattatggattatgattttacagccaatttagaaaatgaacttgatgaaatagcgtctgggaatcttgagtggaaatcagttttaaataagttttatcagacattccaagatgatctaaagagtgcagcattgcctaaagatggcatgaagccaaatgaaccgactgaaacaaacattatttgtccctcctgcaacaagagtaatatgttaatcagaaattcagctaatggtgttttcttaggttgcgcaggctatttcaagtctggtgacgagcaatgtaagcacaccatgaatctcattagtggtgatgaagcgataagcgttgatgaccaagaggaggcctcaaatctttttatcaaaaaacggtgtcatatatgtggtactagcatggataattacttaatagatgaaaataggaaaattcatgtgtgtgccaataatcctgaatgttca

SEQ ID NO: 293020 - DNA, 820 bp, Unknown
  Bacterial polypeptide expressing nucleotide sequence isolated from the Sargasso Sea
gataacagtgtgcaatttacttcgagcggttctgtaattaaatttgatggttttttaaaaatttattcttttcaaaacgatgatgaagaaaaaaatttattacctgaagttaaagttggagaaaaattaaacttaggagaattaattgatgagcaacattttacatcgccccctccgagatattcagaagcaagtttagtaaaaaagatggaggaattaggtattggtagaccatctacctatgctagcataatatcagttttatcaactagaaattacacagaattattgaataaacgatttcatcctacggatagaggtaaattattgtcagcatttttggagaaattgttttctaaatatgtcgactataattttacagcggatttagaaaatcaacttgatgaaataactagtggtaaaactaattatctaaatgtattagaaactttttggaaagatttttataatgatgtgggctctgtcaaagatattagaactagagaagtattagatttacttaatgatagtttaggtgatttaatatttgataaaaatgaacaagatgaaatcgatagaaaatgtaaaatatgtgataatggagtattaagtctcaaaaatagctttagaggcggtgcttttataggttgttcaaattacccagaatgtaagtttacaaggccattatccaaagctaaagcatctcaacaatcatttttagctgaacctaaattaataggaaaaaacgatgacgggaaagaaatttttttaaagaatggaagatttggtccttacttacaatatcagttaaatgatgaag

SEQ ID NO: 293021 - DNA, 886 bp, Unknown
  Bacterial polypeptide expressing nucleotide sequence isolated from the Sargasso Sea
gatgtagacaagggatttaagccagtttggaaggtatcaaataataaaaagtctgtaattgatgacatcaaaaaatatacaaaggatgctgatgtaatatattttgcaactgacccggatagagagggtgaagcaatatcaaaacacttatatgatattttagaaaaagcaaaattcttaaaaggtaaagagacgcatcgagttgtattcaatgaaattacaaaaaatgctgttgtagatgctttaaaaaatccacgaacaatatctattagtcagtgggatgcatatttagctagaaggactcttgattacttaatgggctatgatatttcagaatttttatggaagaaggtgagtcgtgatgcaagagcgggaagagttcaaagtccagcattaagattaatcgttgagcgtgaaattaaaataaatgcatttgatccacaagagtactggaatttgtctgcaagcgtttcaaataatgatagaaacatagaaatagaattaatagaaattaatggagagaaaataaaaaaagataatattacaagtataaatgactctaaaagctctgaagagataaaatcaaaaatagaaaaatataaaaatgtaaaagtatcaaatataaaaaatggtcaaagaaaaaccaaacctaaggccccattcacaactgcatctttgcaacaaaccgcttatacaagtcttgggctttctgttaaacaaacctctgcaatagcacaaagactctatcaagggatggatatagggagtggtcaacccgttggtttgataagttatatgagaacagattcaacaaacttgtcaaaagatgctttatccgatatttcatcatatcttaaaaaaaatcacccaacgctagcagaggatc

SEQ ID NO: 293022 - DNA, 820 bp, Unknown
  Bacterial polypeptide expressing nucleotide sequence isolated from the Sargasso Sea
taagcgtttttatgctgaaaaaatgggtgaaatcgttaacgaccgtttgatggaaaactttgatgatctaatgagtttcgactttaccgctaacatggagcaacagcttgatgatatagcggaagggaacaaagattggaaagacgtacttaatctcttctacagcgatttctatggcaagttgcttaatgccgagaaagcccctgaagaaggcggcatgcgccttaatcaagctattcctgctggcattacgtgtgacaagtgcggacgtgaaatgaacgtgcgtacggcatctaccggtgtattccttggttgctctggttataacttaccgccaaaagaacgctgcaccaacaccatgaacctgactccaggtgatgaagtggtgaaggtagatgacgaagaagagttagaaaccgaagcgttgcgtgctaagaagcgttgtccgatatgcagtactgctatggacagttacttagtggacgaaacccgaaagttgcatgtatgtggtaatacaccaacctgtgacggtaccttagtggaaaccggtacgttcaagattaaaggttacgacggccccattatcgaatgtgataagtgcggcagtgacatggaacttaaaaacggtcgctttggtaaatacttcggttgtaccaatgaagaatgtaagaatactcgtaagttgttacgtaacggtgaggctgcgccacctaaagaagatccggtagatttaccagagcttccttgtgaaaaatcggatgcgcactttgtattacgtgatggtgcttcaggtattttcatggcggcgcataatttccct

SEQ ID NO: 293023 - DNA, 946 bp, Unknown
  Bacterial polypeptide expressing nucleotide sequence isolated from the Sargasso Sea
ttttactgatccaccaccaaggtatacagaagcaagtttagtaaaaaaacttgaggaattaggaataggaagaccctcaacttatgcaagcacattaagtgtgcttcaagatagaaattatgtttcgttagaaaaaaatagattttttgctgaggatagaggacagttagttacagcttttttagtcagcttcttcacaaaatatgttgagtatgattttactgcggaattagaagatagattagataaaatatcttctggagatgcaaagtggacagatgtattaaatgacttttggggtgatttcacaaatgctattgataatactaaggaattacgaataagagatgtattagactctcttaatgatattctcgcagatcatatttttgataaagaatcagaaaattcaagagaatgccccaaatgtaatcaaggaacactaagcctaaaagtaggaaagtttggagcttttgtaggttgttctctttacccagaatgtaaatttacaagagcaatagccaatacaaacgagaatgaaagtcaagaagacgactggccaaaagaaattggagaggatccaaatgacaataagaaaattactataagaaaagggccatatggtttttatatccaaaaaggcgatacagaaggtgatgaaaagccaaagagagtaggtattccaaaaaatgatgacccagggttattaactttagaaaaagcgatggagtatctatcactaccaagggaggtgggtaaacaccctgaaacatcgaaaaaaattagtgcaggaattggtagatttggagcatttataagacatgatggtgattacagatcccttcccaaagatgatgatgtactttcagttggtttaaatagggcagttagtcttctcgctgaacctaaaaaaagacgaggaccagaggttctaaaaaatttaggt

SEQ ID NO: 293024 - DNA, 936 bp, Unknown
  Bacterial polypeptide expressing nucleotide sequence isolated from the Sargasso Sea
tttatcttctcaatggagtctgctaccttttgatagaaacaccattactatctcttccgataataacgatacgatttgtaaagctagcgggtcagtccttaaatttgatggatttttgaaaatttataacaatcaagctaaagatgatgatgaaaatattttgccagtaatgtctaaaggaccaattaatatcgaggctttgttagatgaacagcattatacacaaccaccaccaagatattctgaagctagtttagttaaaaaacttgaagaattgggcattggaagaccatctacttacgcaagcattatttctacaatagctaacagaggatatgctgagatactcaataagcgtttttttcctacagacagaggcaaattaatttcggcttttttagaaaaattattttcaaaatatgttgattataatttcacagctggattagaagatcaactagatgagataacaactggaaaagaaagttggataaaggttttagagcttttttggaaagattttaataacaatgtttcagaagttaaagaaaaaagaactagagaagtattagatttacttaatgaaagtttgggaagtttagtttttgataaagataaaaatggaaatattgtaagaaaatgtcgattatgtaatgatggaactctaagtttaaaaaatagctttagaggtggtgctttcataggttgttcaaattatccagaatgtaaatttacaaggccattatctaaagcaaaggctgcagcacaagcacaattagccgaaccaaagtttattggaaaacacgaaaatggtaatgatatttatttgaaaaatggaagatttggtccctatcttcaatatgaaaaaatcgctaccgaaatagagaatgaaaaagctacaaagaagaagaaaaaaagtaaaaaaactaaatcaga

SEQ ID NO: 293025 - DNA, 868 bp, Unknown
  Bacterial polypeptide expressing nucleotide sequence isolated from the Sargasso Sea
taattatttacctgatagcccaagagtttataaatcaaaagcaaaaaacgctcaagaagctcatgaatgtataaggcctacaaatataaatctaacaccaaaagatgttaagcaatatattaccctagaagagttcaaactgtatgaaattatttggcaaagagcagtaagctctcaaatggcaagtgctatattagatcaagttgcagtagatattactaatgaggtaaaaaagattattttacgagcaaatggatcaacaattaaatttccagggatgtatagagtttatcaagaagcaaaagatgatgataaagatgaagaaaaagaaacaatccttccaataatgagtgagggtgaaactttaaatttgaaagaagttgaaaaaactcaacattttacttctcctcctcctcgttatactgaagcaagtttagttaaaaaacttgaagaacttggaataggtagaccttcaacttatgcatctattattaaagttcttcaagatagagattatgtagttttagataaaaaacgatttaatccgcacgatagaggacgcatagtttcaatatttttagagaaatattttaatcaatatgttgaatacgattttacagctgacttagaaaaccaactagatgagatttcagatggaaaacttgattggaaagaagttttaagaaaattctgggaaacttttaaacaaatatgtgatgaaacagtcggtaaatcaaatagagaagtaattgatgtgcttgatgaagcattaggaccgcatttctttccaccaaatggctcagatgaaaaaagaaaatgtccaacctgtgataatggcagactaggaattaaagttgaaagttggagg

SEQ ID NO: 293026 - DNA, 223 bp, Unknown
  Bacterial polypeptide expressing nucleotide sequence isolated from the Sargasso Sea
atggcaagtaaaaatttagtaattgttgagtcaccatctaaagcaaaaactataggtaaatacttaggcaacgaatttattgtgaaatcaagtgttggccatgtgagacgactgccaagaggagctaaagcaattgacaaagacaaatggacggttagttatgaaattgatccaaaaaaggaaaaggttgtaaaagacttaaaaaagtctgcaaagaacatag

SEQ ID NO: 293027 - DNA, 115 bp, Unknown
  Bacterial polypeptide expressing nucleotide sequence isolated from the Sargasso Sea
atgaatcttgtcatagtagagagtccagctaaagcaaaaaccataaacaaatacttagggaaagattataaagtattagcaagttatgggcatgttagagatcttccatcaaaaa

SEQ ID NO: 293028 - DNA, 739 bp, Unknown
  Bacterial polypeptide expressing nucleotide sequence isolated from the Sargasso Sea
atgaatgtattaatagttgagtcaccatctaaagcaaagtctatcaataaatatttaggctctaactttaaagttttagccagcgttggtcatgtacgcgatttatcagctaaaaatgatgctatagacactgaaaatgatttccaaatgaaatgggaaacaagcgatcgtggaaagaaagttattaaggaaataactgatgctgccaaaaaatcagagaatttatatctagctacggatccagaccgtgaaggtgaagctatagcttggcatgttgaaaaattactaagggatgatgcttcgctatctaaattaaatattcacagagtaacatttaatgagattacaaaaaatgcagtattagatagtcttaaagagcctcgaggaattgatgagaacttagtaaatgcctatctagcaagaagagcattagattttcttgttggctttactttatcccctgttctgtggagaaaacttccgggatctaagtcagctggaagagttcaatcagttgcattaaggattattagtgagagagaacttgaaatcgaaaaatttattcctcaagaatattggtctctcaagggtgaatttaataataaagaagataaaatcattaattcaagacttaccgtctataatggaaataaagttgataaacttgatataaaaaatgaaaatgaagcaactaagatttataattctattaaaaattcaaattttatagttggtaaca

SEQ ID NO: 293029 - DNA, 950 bp, Unknown
  Bacterial polypeptide expressing nucleotide sequence isolated from the Sargasso Sea
caagctaaacgatgagcaacactttacagatccgccaccacgatattctgaagctagtttagtgaaaaagatggaagaattaggcatagggagaccttccacttatgctagtattatttcagtattatcaacgagaaattatgttgaattaattaataaaaggtttaatccaactgacagaggtaagctaatttcagcctttttagagaaattgttttctaaatacgtggattataattttactgcagacttagaaaatcagctagatgaaatcactagtggcaaaattgagtgggttcaagttttagataatttttggaaagatttttatgaaaatgtggggaaagtaaaagaaaaaagaactagagaagtacttgatttattaaatgagagtttgggtgcacttatttttgagagagatgaaaaagactctatagatagaaaatgcaaactatgtgctgatggtgaattaagtctaaaaaatagttttagaggtggagcttttattggttgttcaaattatccagaatgtaaatttacaagacctttatcaaaagctaaagcagcagcacaatataatttagctgaacctaagttactaggtcaaaatgacaacggtaaagacatatttttaaaaaatggaagatttggtccttacttgcaatatgagaaagaaaaagatgaacaggagttgaagaagaaaaaaggaaggaagaaaaaaaacgaaaatgatcatctcaaaaatgtatcaataccgaaaggcatagacgttgatagcatagatttagataaggcaaaatatttatgctctcttccaaaagttttaggccaacatccagaaaatggtcaagatataactctaaattcaggtaggttcgggccatatttaaaatgcgaaaataaatctgcaagactggaaaacgtagaagaaattttttctatggtttaaa

SEQ ID NO: 293030 - DNA, 325 bp, Unknown
  Bacterial polypeptide expressing nucleotide sequence isolated from the Sargasso Sea
atgtatttagttgtggttgaaagtcctgcaaaagcaaaaactattaataaatatttaggtaaagattataaagttttagcaagttatggtcatgtcagagatcttccttctaaaaatggttctgtcgatccttcaaataattttaagatggaatgggaactcgatacattttcaaaaaaatacgtaaaagaaataactgatgctgcagctgaatctgaaaaaataatattggcaactgatccggatagagagggagaagcaattgcctggcatgttcgcgaaattcttgaaagtaaaaaacttttgaaaggtaaaaaagttgaga

SEQ ID NO: 293031 - DNA, 871 bp, Unknown
  Bacterial polypeptide expressing nucleotide sequence isolated from the Sargasso Sea
aggaagatgctgtgaaaaaattaaggacgaagcaaagaatgctgagcaagtgattcttgccacagacccggacagagaaggggaagccattgcttggcatgtggcagacattatttcaaatgctaaattcgaacaaccagatgttaagcgggctgttttttatgaaataagcgaaaaagcagtcaaggatgctgtcagcaatccaggtgaaatagctatggatctagttcaatcccaagaaaccagaagggcgcttgatcggcactttggttttactttgtcgccattgttgtggcgattatttcctagcaataatcactctgcgggaagggttcaaagccccgcattaaggatgattgtagagcgtgaaagagaaattgaggcctttgttccacaagagtactggaccatttcagcaaaactagaaaaagatggagaatatgacgccaaactatcggcttttaaacaagagcctgtaaaaaagttcacttttgactcaaccacacttgttgagaaggcaagcaaagacctggaagagcaatgcaaaaaaggtcttgtcgcgaagtcgatctctaaaaaaaccattaagcgctcaccaagagagccatttagaacatctgtgcttcaacaacaagcatccaacaggtttggttttacgccaaaaagaaccatgcaggtcgctcaatcactctatgcgcgtgagggtggcggactaatcacctatattagaacagactcaattgaaatcgatgaaggaaaggtgccagccgtaaggtctcaggtagcgagcatgttcggtgaagattttgtccaacctagaaactataaaaacaaaaaagaggccaagaatatccaagaggcccatggtgca

SEQ ID NO: 293032 - DNA, 107 bp, Unknown
  Bacterial polypeptide expressing nucleotide sequence isolated from the Sargasso Sea
aatgaatcttgtagttgtagaaagtcctgctaaagcaaaaactattaacaaatatcttggtaaggattatattgttttagctagttacggtcatattcgtgatttgc

SEQ ID NO: 293033 - DNA, 892 bp, Unknown
  Bacterial polypeptide expressing nucleotide sequence isolated from the Sargasso Sea
ggcgagcttaatttggaaagaagttttaaattcttattattcagctttccaagatgatctatcttccgcaatggatgaagaaaatggaatgtctcctaaccttcccactatgacaaatattaattgtccagaatgtaaaattaataaacttacaataagaaatgcaagcaatggtgtttttcttggatgtgcaggttacagcttgccagctgaaatgcaatgtaaaaaaacattaaaccttatttcgggtgatgaagcggtaagtattgatgatcaagaggaagcagagcatttagttactaaacgacgttgtccaaaatgcgatatgagtatggataactaccttttagatgaaaatcataagctgcatgtttgctctaataatcctgactgtgatggatttgaagttgaagagggggcgtttaaaatcaaagggtatgatggtccaaccttatcatgtcataagtgtggctccgagatgcaacttaaaacaggtagatttggtaaatattttggttgtatgaatgataattgtggcgctactagagcgcttcaacgaaatggtgagcctaaaccaatagtcatggagcctattgctacagaaattccttgtatcaaatttgaagatatatatttgttgagagatagcatgaagggactctttttagcggctagcaaatatccaaaaaatagagaaactcgagcgccatctgttgaggagttcaataaagctgtgactgaggagacattgatagatgcttgtaagtatcttgaggatcaagaaaaacacacacatttactatgtgctcctaagcatgatattgagggaaatccatatattattcgatataataaggcagaagacactcattatcttgcttcagaaaaagac

SEQ ID NO: 293034 - DNA, 916 bp, Unknown
  Bacterial polypeptide expressing nucleotide sequence isolated from the Sargasso Sea
acttatatgagaactgatagtgtaatactatctgaaactgcacaaaattcaattaagaatgctattgaaaaaaagtttggatctaattatcatcaatccagaaattttagtaataaaagtaagaatgctcaacaagcacatgaagctgttagacctacaaattttttaaataacattcaaaatcttgatgctgatcaatctaacctttatgacttaatttggagaagaagtgttgctagtcaaatgtcagatgctaaagttgataaaacaactgtaaaaattaaatcaaacaatcatgaaggtcttttccaatctgatggtgaagtgatcaaattcgatggttttttaaaactttacattgaatcaaaggacaaccaaaataatgacgattctcaaaataatgtactcccaaattttactgaaggagaaagaattgctaaggacaaaattctagttacgcagatattttctaaaccacctttcagattcactgaggcttcacttgtcaaaaaactagaggagcttggtataggtcgcccttctacatatgcacccactataacaactgttatgaacagaaagtatgttttcaaaggaactaataatgctcaaactagagagattgtacaatatattattgattctaatattaacagaaatgttaatcaggaaaattacggatctaacaagggaaaattagttcctagtgaagtagggcttttagtgaatgaattcctaacaaataatttcaaaaacattattgattataattttacagcatctgttgaaaatgaatttgactcaattgctaatggttctaaggattggaaatcaattattgataaattttataatccatttagtttggtaattgatgatgtgcaaaaaaatgcaaaaagagaaactgggaaagagt

SEQ ID NO: 293035 - DNA, 142 bp, Unknown
  Bacterial polypeptide expressing nucleotide sequence isolated from the Sargasso Sea
aatgaatcttgttatagtagaaagtcctgcaaaagccaaaactataaataaatacctaggaaaagattataaggtattagcaagttatggtcatgtaagagatctaccatctaaaaatggatctgttgatcctacaaataat

SEQ ID NO: 293036 - DNA, 841 bp, Unknown
  Bacterial polypeptide expressing nucleotide sequence isolated from the Sargasso Sea
atttctgaggatagctcaaatcaatttaaatggttctggatctacaattaaatttgatggttttttaaaattaacaagaatcgacgatgaggatgaaaaaattttaccagatgtaaaaaaagaaaaactttcaatacaagaatttattgacgaacaacatttcacacagccacctcctagatattcagaagcaagtttagttaaaaaacttgaagaattaggtattggaagaccatcgacttatgcaagtattatttcggttatatcaaacagaggttatgcggatgtattaaataaacgtttttttccaacagatagaggaaaattattatctgcctttttagaaaaactatttactaagtatgttgattatggttttacagcaggtttagaagaacaactcgacgatatcacttcaggcaaagaagaatggatcaaagtacttgataatttttggaaggatttcaataataatgtttcaaatgtaaaagagaaaagaacaagagaagttttagatcttttaaatgaaagtctaggagaactcgtttttgaatcagatgaaaatggtaaaattaatagaaaatgtaaattatgtgattctggtgagttgagtttaaaaaatagctttagaggtggtgcctttataggttgttcaaattatccggaatgtaaatttacaaggcccctgtcaaaggctaaagctaaagatcaaattgcactatccgaaccaaaattaataggtaaaaacgacaatggaaaagaaatttttttaaagagcggtagattcggtccatatctacaatttgaagtaaacgaaattgaaaatgcagttaagaataaa

SEQ ID NO: 293037 - DNA, 865 bp, Unknown
  Bacterial polypeptide expressing nucleotide sequence isolated from the Sargasso Sea
gctgactcacctcaacggctcgcggctgaaacagtttgatgtcggcagtgttgagcaggcggaggcggctgtcgctctactaccagacacatggcgtgtggatactgtcaagcgttcaaagcgctcgaccaaccctccacccccatacaataccgcctcgttgcagcaggacgcctcacgtactatgggcatctcaccaagccgtgttatgcggttagcgcaggcattgtatgaagggttaccgttaggaggaggggaggagaatgtcgctctcatcacttatatgcgtacagatggcatcgagatgagtagcgatggcattaatggcgcaaggagatacatatctaaagcgttcggctcggaggagaagtggctgccttcctcaccgcgcctgttcaaacggaagaagcggaatgcacaggaggcgcatgaggcggtacgccctgttgatctcatgcttacaccggcttcgctgatcggtaagattggtgggcaggagttgcggctgtatgagttgatatggaggagggctatagcctcacagatggcgtctgcaatacacgagcagttggcaattagtctggtgccggagggaggggaggggacggcacaggcacggacctcggggtcacggttgctctcacctgggtacaaagcgctgacgtcacagccgaggatcaaggcggcaaaggcggaggaggaggaggaggaagaggagggcgaggctgagggtggtggcgaggaggaggaggaggaggagggcggaagcaatggtctgaacccgctgcttgagggtttgggtgagggcgataccctcagcacactcgagcggctaccgtcacagaagttcacggagccgccacct

SEQ ID NO: 293038 - DNA, 880 bp, Unknown
  Bacterial polypeptide expressing nucleotide sequence isolated from the Sargasso Sea
atgtttggggatagctttgttcagcctaggaactataaaaataaaaaagcggccaagaatattcaggaagcgcacggtgcaataactcccgttgacataagccttattccagctgaggccaaaaaggttctcaaagatgatgagctcaaactctaccagctaatctggcaaagaacagttgcatctcaaatgaaggacgcactttttgagagaacctctattgaatttgtgcccactggagatgaaggcctggcgacgttttctttttctgatcaagaacttatttttagtggatatttggaggctacccaagaagaagttacaaacaataagcctcccttaatcaatgaaaatgattccatagagttcaaggggctaataaaaactcaacatttcacagacccacctcctcgctacaatgacgcgagcatgattaaggcgctcgaagaaaaaggtattggaaggccctcaacatatgcagacatactctctaaactaactgatagaaagtatgtttggttaaaacaaaaaagatatgagccctctgatatgggtaggcttgtaagcaatttcctgaacgaacgatttggtggatatatcagtgatgagtttacttcgaatatggaaaacaacttagatgaaatctctagcggaaaaaagagtaaggaagatgttctgaatgacttctggtctccgttgatagatacggtggatgaggtcagcgatgtggttacaagaaaagacgtaaacccacaaaggcctttaggtaatcacccagaaacaggccgtcctgtattcgctagaatgacaaaaaatggtcccgcagttcaagtgggcgacatggataaagacgaaaagcttgagtgggctgctataaaag

SEQ ID NO: 293039 - DNA, 676 bp, Unknown
  Bacterial polypeptide expressing nucleotide sequence isolated from the Sargasso Sea
tctgggcgatggttttactgtcttgccaaccataggtcacattagggaacttccaaaaaaagatgcgattgatccaaacaatggttattccatgaaatacatagtcagcccaggaaaggaagatgcggtaaaaaagatcaagagagatgcaaaaagtgcggaacaagtaatactcgcaacagatccagacagagagggagaagctattgcttggcatgttgctgacattatttcaaatgcaaaatttgaactgcctgatattaagcgagctgtattttatgaaataagcgaaaaagcggttaaagacgctgtgggcaaccctggcgagatagccatggatcttgttcagtcccaagaaaccagaagggctctggatagacactttgggttttctttatctcctttgttgtggcgactatttcctagcaacaatcactcagccggaagagttcaaagccctgcgctacggatgattgttgagcgtgaaagagaaattgaagtttttgttcctcaagaatactggaccatttcagcgaaactagaaaaagatggtgaatacgatgcgaagctatcagtttttaaagaagagcctgttaaaaagttcacatttgattcaaccgcactcgttgaagaggcgagcaaggctttggaggacagttgcaaaacaggccttgtt

SEQ ID NO: 293040 - DNA, 1031 bp, Unknown
  Bacterial polypeptide expressing nucleotide sequence isolated from the Sargasso Sea
aacaaatggaagataagaaaattgttttacgagcaaatggggtcaacaattaagtttcctggaatgtacaaagtttatcaagaagctaaagatgatgataaagatgaagagaaagaaacaattcttccagtaatgagtgaaggagaaagcttaattttaaaagaagttgaaaagacacaacattttacatccccgcctccccgttatactgaagccagcttagtaaagaaacttgaagaacttggtattggcagaccttctacttatgcctccattattaaggttctacaagatagagactacgttatcttagataaaaaacggtttaatcctcatgatagaggacgaatagtttcaatatttttagaaaaatattttaatcaatatgtagaatatgatttcactgctgatttggaaaatcagctcgatgaaatttcagacggtaaacaagattggaaagaagttctaagaaagttttgggaaacgtttaaacaactttgtgatgagactgttggtaaatcaaacagagaagtaattgatgttttggatgaagcattaggtccacatttctttccaccaaacggtgcagatgaaaaaaggaaatgtcccacttgtgacaatggaagactaggaattaaggttggaaagtttggaggatttattggttgctctaattatcctgattgcaaatatactgttcagtttaatcagttaaacgacaaagatggtgctgcacttagtggtccaaaagaaattggcatttatcctgaaacaggagaaatgattacccttagaaaaggtccttatggattttatatgcaagtaggtgaaggtacaaaagaaaagaaaccaaaaagagtttctattcccaaaaattttgaaccagatgaaataggcttaaatacggctatccaacttctagggctccctcgaaaattaggtttccatccagaaacaaataaaactgttagtgcaggtataggaatgtatgggccatacattctgcatgataaaaaatataaagctttaga

SEQ ID NO: 293041 - DNA, 574 bp, Unknown
  Bacterial polypeptide expressing nucleotide sequence isolated from the Sargasso Sea
tatgaatgtattaattgttgaatctccatcaaaagcaaaatctattaataaatatttaggttctgactttaaagttttggcgagtgtaggtcatgtaagagacttatcagcaaaaaatgatgctattgatactgaaaatgattttaaaatgaaatgggagacaagtgaccgaggtaaaaaagtaataaaagaaataacagatgccgcaaaaaaatcagataatttatatttagcaacagatccagaccgtgaaggtgaggcaatagcctggcatgttgaaaaattactaagagataattcatctttatcaaaattaaacattcacagagtgacatttaatgaaatcacaaaaaatgcagttctcgatagcttaaaagaaccacgatctattgatgaaaatttagtaaatgcttatcttgcaaggcgtgcattagattttttggttggttttacattatcacctgttctttggagaaaattaccaggttctaaatcagcaggtagagttcaatcagtagctttaagaattattagtgagagggagtttgaaattgaaaaatttgttcctcaagaa

SEQ ID NO: 293042 - DNA, 499 bp, Unknown
  Bacterial polypeptide expressing nucleotide sequence isolated from the Sargasso Sea
aatgaaaatttaaagattgataaaattttagatgaacaacattttactgaacctccgcctaggtattctgaggcaagcttggtaaaaaagttagaagaattgggtatagggagaccctcgacatacgcaagtataatttctgtattatcaacacgaaactatgtggatcttattaataagagattccatcccactgataggggaaaattattagctgcatttctagaaaaattattttcaaaatatgtagattataattttacagctgaacttgaagaccagctggatgaaattacttcagggaaagttaagtggattggagttttggaaaaattttggaaagattttaatgaaaatgttaaatctgttaaggaaaaaagaacaagagaagttctagatttgctaaatgaaagtttaggagaactaatttttgatacaactagtgatggaaaaataaatagaaaatgccagttatgtgatactggacaattaagtctaa

SEQ ID NO: 293043 - DNA, 886 bp, Unknown
  Bacterial polypeptide expressing nucleotide sequence isolated from the Sargasso Sea
agtattaaaatttgatgggtttttaaaagtttataaaaatcttaattcggatgatgatgacgagatactaccgggggtaaaaaaaggacctataaatattgaatcctttttagatgaacaacatttcacacaacctcctccaaggtattcagaagcaagcttggttaaaaaactagaagaacttggaattggacgaccttctacgtatgcaagtataatatctacaatttctaatcgtggatacgctgagataactaataagagattttttccaactgatcgtggaaaattaatttctgcctttttagaaaaattattttctaaatatgttgattataattttacagcaggattagaagatcaattagatgaaattacaactggaaaagaaagttggataaaagttttagaattattttggaaagattttaatagcaacgtatcagaggtgaaagaaaaaagaactagagaggttttagatttacttaatgaaagtttgggtgcgttaatatttgataaagataaaagtggtaatgttgtcagaaagtgcaaattgtgcaatacaggatcgttgagtttaaaaaatagttttaggggtggtgcatttataggttgctctaattatccagaatgtaaatttactagacctctatctaaagctaaggctgcagcacaggctcaattagctgaaccaaaatatttaggtaaacatgataatggaaatgatatatttctcaaaaatggaagatttggaccttatttgcaatacgaaaagattttagatcaaattgaagaagaaattagtaagaagaaaaaacggaaaactaaaaaagctaaaaccgatgtaaatgaactattaaaaaatgtatccattccgaaaggaatt

SEQ ID NO: 293044 - DNA, 909 bp, Unknown
  Bacterial polypeptide expressing nucleotide sequence isolated from the Sargasso Sea
tacagatataatcagaactccacaaagtgtaaaaaaatatctaagcacagatcaaaataaactttacgatcttatttggagtagagctttatcttctcaaatggagtctgctaagtttgatagaaacaccattactataacttcagaaaacaatgatactatttgtaaagctagtggatcagttcttaaatttgatggatttttgaaaatttataataatcaaagcaaagatgatgatgaaaatattttgccaactgtttctaaaggaccaattaatatcgaagcattaatagatgaacagcactatactcaaccaccaccaagatactctgaggctagcttagttaaaaaattagaagaattgggtatcggtagaccatctacttatgcaagtattatttctacaatagccaatagaggatatgctgaaatactcaataagcgtttttttcctacagatagaggtaaattgatttcagcttttttagaaaaattattttctaaatatgttgattataattttactgctggattggaagaccaactggatgagatcaccagtggaaaagagagctggataaaagttttagaacttttttggaaagattttaataacaatgtttctgaagttaaagaaaaaagaactagagaagttttggatttgcttaatgaaagtttgggaagtttagtttttgataaagataaagaaggaaatattgtaagaaaatgtcaattatgtagtgatggaactttaagtttaaaaaatagctttagaggtggcgctttcataggatgctcaaattatccagaatgtaaatttacaagaccattatctaaagcaaaagctgctgcacaagcacaattagccgagccaaagtttattggaaaacatgaaaatggtaatgatat

SEQ ID NO: 293045 - DNA, 700 bp, Unknown
  Bacterial polypeptide expressing nucleotide sequence isolated from the Sargasso Sea
tcctcgatattctgaagcaagcttagtaaaaaaacttgaagaattaggaattggaagaccttctacatatgcaagtattatttctgttatttcaaatagaggttatgcagatataattaataaacgtttttttccaacagatagaggaaaattattatctgctttcttagaaaaattattttctaaatacgttgactatggttttacagctggtttagaagatcaacttgatgatattacagctggtaaagaggagtggataaaagtacttgataatttttggaaagatttcaatacaaatgtatcaaatgttaaagaaaaaagaactcgtgaagttcttgatttattaaatgagagtcttggacagctaatttttgaagctgatgaaaatggcaaaattaatagaaaatgtaaattatgtgaaagtggagagttaagtttaaaaaatagttttagaggaggagcatttataggctgttctaattacccagaatgtaaatttaccagacctttatctaaatctaaagcaaatgatcagtttgctttagccgaacctaaattaattggtcaaaatgaaaatggtaaaaatatatatttaaaaaatggtagatttgggccttatctccaatatgaaatgattgaagaagaaatatcaataaaaaagaaaaaaaagaaaaaagaaaacgataatttaaaaaat

SEQ ID NO: 293046 - DNA, 946 bp, Unknown
  Bacterial polypeptide expressing nucleotide sequence isolated from the Sargasso Sea
tggagcttcaagaacaatgcagattgctcagcgtcttttccaaggtatcgaaataaacggtgaaacaactgggttgataacttacatgaggacagatagcactgacttatcaaaagaggccatagattcatatagagaatttataaaagataactttgatccagcgtaccttccaaaagaaattaggagtttcaaaagtaaaaaagcaaaaaatgctcaggaagctcatgaaggcattaggccaactgacgttttaagaaaaccagaagaaatgaagaagtatttagatgtagatggctttaaactttatgacttaatttggaaaagatcattggctagtcagatgaattcagcaacatttgaaaggactgcaatatcgatttcaagtgaagatgaatcattaaaacttagagcgaatggctcaatacagacatttgatggtttcttaaacatatatagtgaatttaacaaaaaatcagatgacactgatttagatgagaatgaggaaaataaggaccttcccaacattaagctggaagacaaaattgaaaatgttgatcctttaagtactcaacactttactctgcctcctcctagatattcagaggcaacattggttaaaaaacttgaggaacttggaattggaaggccatcaacctatgcaagtataatatcagttttaaaaatgagaaattatgttgaagtagagaagaatcgtttcatacctgaagacagagctattctcattacaggttttcttaagggctttttctcaaaatacgttgactatgaattcacagctgaaatggaagaatcacttgatgaaataacgtctggtcaaatagattggaaagaatttctagaaaaattttggaagaatttctcatcaaatataggagaagtaactgatttgagaattacaaatgttctggatcatctaaatgat

SEQ ID NO: 293047 - DNA, 912 bp, Unknown
  Bacterial polypeptide expressing nucleotide sequence isolated from the Sargasso Sea
tgatgaagatcaaaaaattactctaagggcaaatggttcaactatcaaattttctggaatgtataaagtttatcaagaagcaaaagatgatgacaaagatgaagaaaaagaaacgatattaccaatgatgaatgaaggtgagatattagatctaaatgaggtgataaaaaatcaacattttacaatgccccctcctcgctacacagaagcaagtttagttaaaaaattagaagagcttggaattggcagaccttccacctatgcctccattataaaagtcttgcaagatagagattatgtcattttagataaaaaacgttttaatcctcatgatagaggacgcattgtatctatattcctggaaaaatattttaatcaatatgttgaatatgattttactgctgatcttgaaaatcaattagatgaaatttctgatggtaaattagattggaaagaagttttacgaagattttgggaaacttttaaacaattatgtgatgataccgttggaaaatcaaatagagaagtaattgatgtactagatgatgctttaggagcacatttcttcccaccagaaggaaaggatgaaaccagaaaatgtcctacatgcgataatggaagacttgggataaaagtaggaaaatttggaggatttattggttgttcaaattatcctgattgtaaatatacattacaatttaatcaattaaatgacaaagacggaactgctttagctggccctaaagaaattggtgtttatccagaaacaaaagagatgatcacacttcgaaaaggtccttatggtttctatatgcaagtaggtgaaggtactccagaaaagaaaccaaaaagagtttctatacctaagaattttgaacctgaagaaattggtcttaatactgcaatacagct

SEQ ID NO: 293048 - DNA, 597 bp, Unknown
  Bacterial polypeptide expressing nucleotide sequence isolated from the Sargasso Sea
tatgaatgtattaattgttgagtcaccatctaaagcaaaatctattaacaaatatttaggttctgactttaaagttctggctagcgttggtcatgtaagagatctatcagctaaaaatgatgctatagacacagaaaatgacttcaaaatgaagtgggagacaagtgatagaggaaaaaaggttataaaagaaataactgacgctgctaaaaaatctgaaaatctctacttggctactgaccctgatcgtgagggagaagctatagcatggcatgttgaaaaacttttaagagataatgcttccctatcaaaactaaatattcaccgagtaacattcaatgaaatcactaaaaatgctgttcttgatagtttaaaatcaccaagagaaattgatgaaaatttagttaatgcttatttggctagacgtgctttagattttttagtgggctttacactatcccctgttctttggcgaaagttacctggatctaaatctgctggaagagttcaatcagttgctttgcgaattattagtgagcgagagttagaaatagaaaaatttaatcctgaggaatactggtctattcaaagtaattt

SEQ ID NO: 293049 - DNA, 646 bp, Unknown
  Bacterial polypeptide expressing nucleotide sequence isolated from the Sargasso Sea
gaaggagaggctattgcttggcatgttgagaaacttttaagagataataaggccttgtctaaattaaatattcaccgtgtgacttttaatgaaattactaaaaatgcagttttagaaagtcttaaagaacctcgtgaaatagatgagaatttggttaatgcttatttagctagacgagcattagattttttagttggctttactctctcaccagtactctggcgaaagttacctggctcaaagtctgcaggtagagttcaatctgtagcattaagaataattagtgaaagagaattagaaatagaaaaatttgatcctcaagagtattggtctatccagggtaattttttaaataaagataaaaaagacatcaatgctcgattaactttatttgatggaaataaaattgataaactggatataaaaaatgaaaagcaagctaataatatttatgaaacaattaaaaattcaaattttaaagttggtagtatttcaaaaaaagaagctagaagaaacccctatcctgcttttactacttcaacgatgcaaattgagtcaagtcgtaaattaggcctaagtgctagtcaaacaatgcgaactgcacaaagactttatgaaggtactgagattaatggagatacaacaa

SEQ ID NO: 293050 - DNA, 431 bp, Unknown
  Bacterial polypeptide expressing nucleotide sequence isolated from the Sargasso Sea
aagtttaaaatttcaagatgagaaaaaaaattcaattaccgcaagcatctatcaattagatagcgaaaaaattgaaaaatttacctttagaaaaaaagaagatattgaaaagggaatctctggattaaagaataaaaaatttaatattagtgatatttcatcaaaaattgttaatagaaatccatctggtccatttacaacttctacactacaacaagttgcttcaagtagattgggatttggtgcctctagaaccatgcaaattgcacaaaaactttatcaaggaattgaaattgagggagatacagttggtttaataacctacatgagaactgatggtacaaacttatcggctgatgctattagtgattttagaaattatattaaaaaaagttatgggaatgagtatatacctgaaaaagctaataatt

SEQ ID NO: 293051 - DNA, 730 bp, Unknown
  Bacterial polypeptide expressing nucleotide sequence isolated from the Sargasso Sea
agtaaaaaaactggaatcagaaggcattggacgtccatcaacttacgcaccaacaatttcaaccatacaggatcgtggctatgtagaattaactgatgaaaagaaactgaaaccgacttcaattggggaagttgttacagattttctggcagatcattttacgaaaatagtaaatcttggatttactgctgagattgagcgtaactttgatcgtattgctaagggagaagaagactgggtagaaatgatgacagatttttatgagccttttcacgaaaacgtagttgagaaagataaatcggttacacgcgctgaagtcctaaaacgcagggaattaggtactgatcctgaaagcgggaaaccagtaagtgtaagcgtagggaggtatggacctatggttcaaataggtactcgtgaagatgaagaaaaaccacgttttgcttcacttccgagcagtcttaatttgaatgatgtaactttggaagaggcactgcaatgttttgctctaccacgggtacttggggaatatgaaaatggggaggagattactgccaataacggacgttatggtccatatgttaaattgggcaaagattttttctcaattccaaaaggcgaaaaggcggaggacattgaattggttcgggcagtagaactcattcgagaaggacttgagagaaaaagtaaaagtatcattcatgattttgtagaaatacaggtattaaatggc

SEQ ID NO: 293052 - DNA, 802 bp, Unknown
  Bacterial polypeptide expressing nucleotide sequence isolated from the Sargasso Sea
gccagatgcagagtatttatcaacttcagcaaaaataaatctagaaggatatgaatttgttgctagaggtagagaggttgtttttgatggatttacaaaagtcatgccgccacgtaaagatgaagacgcaattttacctccacttgcagaaggagataccttaaatcttgttgatcttaaaaacgaaaagaagtttacaaaaccaccttccaggttttctgaagccgcacttgttaaagaacttgaaaaaagaggtattggcagaccatcaacttatgcaaacataatttctaccattcaagacaggggttatgtatcaattgagaacagaaggttctttgttaaaaaaataggaatgattgtttcagatagattaatggaaagcttcgatgacattatggattatggatttactgcaaactttgagacacaacttgatgatattgcgaatggaactaaggattggattacagtattaaactcatattatgaagcgttccaagatgatctaaaaaatgcctctgatccagaaatgggaatgagaggtaataaggcaacccctactaatattaattgtcctcaatgcggaacaaataaactaaatatcagaaatgcaagcaatggagtttttctcggatgtgcaggatacagattggaaggagatgaacaatgcaaaaaaacacttaacctaatttctggtgatgaagctataagtgttgatgatcaagaagaagcagaaaatttagttattaaaaaaagatgtcctctctgtgatactagcatggacaactatttaattgat

SEQ ID NO: 293053 - DNA, 866 bp, Unknown
  Bacterial polypeptide expressing nucleotide sequence isolated from the Sargasso Sea
tactgatcaaaacaaattatataatttgatttggagcagagctctttcttcgcaaatggaaactgctcaatttgacagaaatacaattattattactactgataataatgacaccgtatgcaaagcgagtggttcagttttaaaattcgatggttttttaaaagtttataacaatccaaataaagacgatgatgaaggtatattacctgaaatgtcaaaaggaccagttaatattgaatctttgttggatgaacagcactttactcaaccaccgccaagatattctgaggcaagcttagttaaaaaattagaagaattgggcattggaagaccatcaacatatgcaagtataatctcaactatagctaatagaggttatgcagaaatattaaataaaaggttttttcctacagatagaggaaagctaatttcagcttttttagagaaactattctcaaaatatgtagattataattttacagctggattggaagatcagcttgatgaaatcactactggaaaagaaagctggattaaagttttagagcttttttggaaggattttaataacaatgtatctgaagtaaaagaaaaaaggactagggaggttttagatttgcttaatgatagtttgggagatttggtttttgataaagacaatgaggggaatatagttagaaaatgtaagttatgtagttcaggaacactgagtttaaaaaacagttttagaggtggtgcttttattggttgttcaaattatcctgaatgcaagtttactcgccctttatctaaagcaaaagctgctgctcaagcgcaacttgctgaacctaaattcataggtaaacatgaaaatggaaacgacatat

SEQ ID NO: 293054 - DNA, 196 bp, Unknown
  Bacterial polypeptide expressing nucleotide sequence isolated from the Sargasso Sea
aatgaatcttgtaatagtagaaagtccggcaaaagcaaaaactataaacaaatatcttggaaaagattatattgttttagcaagttacggacatgttagagatcttccgtctaagaatggatctgttgatccagaaaatagttttaaaatggaatgggaactagatacattttctaaaaaatatgtaaaagaaata

SEQ ID NO: 293055 - DNA, 750 bp, Unknown
  Bacterial polypeptide expressing nucleotide sequence isolated from the Sargasso Sea
aaaatcattaattctagactaacagtttatgaagggaataaagtagataaacttgatattaaaaatgagagtgaagcgacaaaaatatttaatgatattaaaaattctactttcactgttggaagtatcacaaaaaaagaagctagaagaaatccctaccctgcttttactacatcgacaatgcaaattgagtctagtcgtaaactaggtcttagtgcgagtcaaacaatgagaacagctcaacgtttatacgaaggaacggatattaaaggagaaacaactggattaataacttatatgcgaacagacagtgtcgtcatgtcaaaagaagctattaaccaagttagaggttttgttactgataattatggtgcaaactatttaccagaagcaccaagagtttataaatctaaagctaaaaatgcccaagaagcacatgaatgcattagaccaacaaatatttacctaacaccaaaagatattaagcaatacattactttagaagaatacaagttatatgaaattatatggcaaagagcggtaagttcacaaatggcaagtgctgtattagatcaagtagcagttgatattacaaacgaagataaaaaaattgttttacgagcaaatggatcaacaattaagtttcctgggatgtacaaagtttatcaagaagctaaagatgatgacaaagatgaagaaaaagaaacaattcttccttccatgagtgaaggagagagtttaaatctcaaa

SEQ ID NO: 293056 - DNA, 815 bp, Unknown
  Bacterial polypeptide expressing nucleotide sequence isolated from the Sargasso Sea
agctagtcaaatgtctgacagtgtcactgagtcaacaagagtagagattgacgcagtgagtaccactacttatgagttacgatcgaatggatccaaattgatatttgacggatttaagagactgtacgaagaatctgcggattcagaagataataataaagattcaaaactattacctaacttgtcagaaaatatgatattgggctgtaaggaaataaatcctattcaacaccatacgcaagcacctccaatgtatacagaggcttcgttagtcaaagaaatggaagagaacggaataggtagacctagtacgtacgctcccacgataaacacaatattggatagaaattatgtagaaagagaacaatcaaggctcaaacctaccgtattgggtatgactgtatccgatgaattaattgattattttgggactacaaaacttcaaccaaaagaagattctttagagtatgtcgggactcataacgtagaagatggcactaaaatattagagttagatttcactgctgaaatggaaaatcatcttgatgatatagcgagtaacgaaaaggcatggatagatgtgttagagcagttttatcagcctttcataaggtcgttagatcatgctaccgaaaatatgcaatcccgaaaagttgaagaacctactgatgaagtttgtgaaaaatgtgaaaggcctatggttataaaaacgggtagatttggaagatttattgcttgcactggttttcctgattgtaaaaacgccaagcctattgtggaatctactggagtgtcatgcccagaatgtgaagatg

SEQ ID NO: 293057 - DNA, 839 bp, Unknown
  Bacterial polypeptide expressing nucleotide sequence isolated from the Sargasso Sea
tacaaaccgcctgcacgttataccgaggcaagtcttgttaaagctctagaagaaaatggaataggtagaccgtcaacatttgcatcgatcttagcaaccattgtgcgaagaaaatatgttaatcgaaaaagcggaaaactttctccaacctacctaggccttgcagtcactcaattattggaaaaccattttactaatctagtaagcaaagagtttacagttaagatggaagatggactggatgaagtctcacgaggtgagttggatgctgtaccttttatgacaaatttttataaaggtggaggccgttttgcaggattagaaaaaatgctagatgaaaaggtcgatatccctgcggcttgttcgatagcgttaccaaaagagatatcagataatacggagggtcgaattggaagatatggcccctacctgcgaagaggagatgatactcgatccatacccgatgacatttacatgggagatcttaatctagagacaattgaaaaaatatttgaagaagaaacaaaagaggatgagtcactaggggatgatcctagcacaggtgataaaatatggatcaaaaaaggaccctatggccactatgtgcaactgggagaaacaaaaacaagaaagggtataccaaagactttccaactatcagatgttaatcttgaatatgctcttaaattattatccttaccaagagaagtcgggaatcatcccgatacaaacgatgttataactgctgattatggaagatacggaccttacattaaatgcgggagacagaatgcgtccttgagaggtccagaaacgcccttagatataaccttagagaa

SEQ ID NO: 293058 - DNA, 304 bp, Unknown
  Bacterial polypeptide expressing nucleotide sequence isolated from the Sargasso Sea
aatggctgtagtagttgtagagtcgcccgccaaagcaaagaccataaataagtatttggggtccggctacgttgtgctcgcatcggtaggacatgtaagggatttggctagtaaagatggggcggtagaccctaaaagagatttttcaatgcgatgggaaatcgacagtaataagcaaaaaaacattaaggcaattgcggacgccctagttgaaacaaataaattaatccttgccacagatccagacagagagggggaggctatctcttggcacttgctggaagtgttacagaaaaagaaagct

SEQ ID NO: 293059 - DNA, 793 bp, Unknown
  Bacterial polypeptide expressing nucleotide sequence isolated from the Sargasso Sea
aaagatgaagaaaaagaaacaattctcccagttatgaatgaaggtcaaagtttaaatctaacaaaaattgaaaagacacaacattttacctcgcctcctcctcgatatactgaagcaagcttagtaaaaaaattagaagagttaggaattggtagaccatcaacttatgcttccattattaaagtcctgcaagatagagactatgtagttttagacaaaaaacgttttaatcctcatgatagaggtagaatagtttctatatttttagagaaatattttaatcaatatgtagaatatgattttacagctgatttagaaaatcaattagatgaaatttctgatggtaagctagaatggaaggaagttttaagaaaattttgggaaacatttaaaaaattatgtgatgaaacagttggtaagtctaatcgtgaagtgattgacgtacttgatgaggctttaggacctcatttttttccaccaaatggtacagatgaaaaaagaaaatgtccgacttgtgaaaatggaagacttggaattaaagttggaaaatttggagggtttattggttgttcaaattatcccgattgtaaatacacagttcaatttaatcaactaaatgacaaagatggtgctgctcttagtggtccaaaagaaattggcatatatcctgaaacaggtgaaatgattacattacgaaaaggtccttatggattttatatgcaaataggtgaaggtacaaaagaaaaaaaacctaaaagagtatctattcctaaaaattttgaacctagatgaa

SEQ ID NO: 293060 - DNA, 912 bp, Unknown
  Bacterial polypeptide expressing nucleotide sequence isolated from the Sargasso Sea
atcaaacgcgtttcagtgtcgattgaaaatggcaaaacacttttcaaagcgaatggaaaagtcattttattccctgggtatatggcggcttacgtagaaagctctgataaaagaaatccatcccatgatgaccaagaaactattttgccaccgctcaagcaaggcgaactattgaattgtgagaaactcttgcccaatgaacaccaaactaagccacccgcaagatttaccgaagcatctttggtcaaggagctggaatctaaaggaattggaaggccgtctacttgggctaatacgatcgatacaattgttcgaagaacctatgttatgcggaatcaaggcaagttgacccccacatttcttggcatggctgtaactcaattgctggaaaaccatttcaatagcttagttgatagccagttcacagctgaaatggaaaataggcttgacgctatttctcgcggggagctcgattcaatacctttcatgaaagatttctactttggcaataaagacaatataggtttagaaaaaatgttagatgatcaaattgatatcggaaaagcctgttcggtccaactgaccatcgatgaagagcctatcgaaattcgagtgggtatgtatggtccttttgttagaaaaggtgaggttcgaaaatcagtaccagagaatgtattccttggagacctgaacgttgacaaagcactagacatactgaaccaagaaataaatgaagaaaaagaactaggcactgataaggaaactggagaagttgtttttttgaaaaatggaccctatggaccctacgttcaattaggtgaatcaacaaaaaggaaggctatccccaaaggaactaaatctgaagagataaatttaaattttggacttagattgctagagcttccgcgaaca

SEQ ID NO: 293061 - DNA, 859 bp, Unknown
  Bacterial polypeptide expressing nucleotide sequence isolated from the Sargasso Sea
aggatttaaggctaacggatctacaattaaatttgaagggtttttaaaagtttataaatttgaagaaaaggatgaagatctgaaaaatattttacctgatgtaaaaactggagataaagttgacataaaagaacttattgatgatcaacattttacagatcctcctccaagatattctgaagctagtttggtaaaaaaaatggaagaattgggaataggaagaccatctacctatgcaagtataataacagttttgtctacacgaaattatgttgaattattaaataaaaggtttcatccaactgatagaggaaaattattatctgcttttctagaaaaattattcacaaagtatgttgattataatttcactgcagatttagaaaatcaattagatgaaattacaagtggaaaagttgagtggataaaggttttagatggtttttggaaagatttttattcaaatgtaggtcaggttaaagaaaaaagaacaagagaagttttagacttattgaatgatagtttaggtgatttagtatttgaaagagatgacaatgatagtatagacagaaagtgtaaagcttgtgataaaggtgaactaagccttaaaaatagctttagagggggcgcttttattggatgctctaattatccagaatgtaaatttacaagacctttatcaaaatcaaaagcatcacaacaagttaatttagctgaaccaaaactaattggtcaaaatgatttaggcaaagatatatttctcaaaaatggaagatttggaccttatttacaatttgagatcgatgttgatacatcagttgaaaataaaaagaagcgaagtaaaaagaaaaaagagaat

SEQ ID NO: 293062 - DNA, 739 bp, Unknown
  Bacterial polypeptide expressing nucleotide sequence isolated from the Sargasso Sea
aaatgtaaagaaacactcaatttagtgtctggtgacgaagcaattagtgttgatgatagtgaggaggctacaaaccttctaataaaaaaaagatgtccaaaatgtggaacaagcatggataattatcttattgatgaaaatcgtaaacttcatgtatgtggaaaaaatccagattgtgacggctatttgattgaagagggccaatttaaaataaaaggttatgacggcccaactcttgaatgtcataaatgtggttctgaaatgcagcttaaaaccggcaggtttggaaaatattttggttgtttgaatgataactgtggagccacaagagccttacaaagaaacggagaacccaaaccaatcacaatggagcctattgaactaaaaaatttaaaatgtattaaatgtgaagatcattatttattgcgtgatagcatgaagggtttatttttagctgcaagtcaatatccaaaaaatagagagacgagggcacctaaggttcatgagataaacaaacttaatcttgaaattaatgaggcatgtcgctttctaccaaacaaagataaacatacatatcttctcagtgcacctgaaaaagatatagatggtaatgagtatgtgattagatataacagaactgatgacattcattatgttgcttctgaaaaagatgggaagaaaactaaatggacggcagtattttctgatggtgaatggaaacaaaataaaaaagattagt

SEQ ID NO: 293063 - DNA, 833 bp, Unknown
  Bacterial polypeptide expressing nucleotide sequence isolated from the Sargasso Sea
cgtgcgcggcaagcaagccaccgtcaccgaggagagcaagcccaccacccaggcatcgcccctgctgtttgacctgaccagcctgcagcgcgaggccaatggcaagttcggcttttccgccaagaccacgctggccctggcgcaaagcctgtacgagcgccacaaggccctgacctacccgcgtaccgactcgcgcgcgctgcccgaggactacctgcccgtggccaagcagacgtttgagatgctggccgacagcggcatgcgccacctggcgccgcacgcgctcacggcgctgaacaacaactacatccgcccgtccaagcgcatcttcgacaatagcaaggtcagcgatcactttgccatcatccccaccacgcaggccccatcaggccttagcgaggctgagcaaaagctgtacgacctggtggtgcgccgcttcatggcggtgttcttccccagcgccgaatacaccgtcaccacgcgcatcagcaccgtggccccacacagcttcaagaccgaaggcaaggtgctggtcaagccgggctggctggccatctatggcaaggaagcagccgacgaagtggaaggcggcaaggatggcgacaagggccagaacctggtgccggtgaaacccggcgaaatggtcaacacgctggccgtggaccccaagggcctcaaaaccaagccgcccgcccgctactccgaagccacgctgctgggcgccatggaaagcgcgggcaagcagatcgacgacgacgagctgcgcgaagcgatgcatgaaaaaggcctgggcacgccagccacgcgcgcggccatcatcgaaggcctgctga

SEQ ID NO: 293064 - DNA, 883 bp, Unknown
  Bacterial polypeptide expressing nucleotide sequence isolated from the Sargasso Sea
aaaagctagttcatatcttcatttttctcctaaacaaaccatgagttatgctcaaaaattatatgaaaaaggatatattacgtatatgagaacggattgttgttgttttagcaatacatttttaaagcaaatactgccgtgtatagaagaaaaatattcgaaagaatatgttagttcctctttttgggggctttctacaaataaaaaatcaaaatctcaagaagcacacgagggtattagagtgactgatccaaaacgagataatataaatatagatgatcctaattgtaaaaagttgtattcatttatttacaaacatacttatcaatcttgtatgagcgattatattggagaaaaaacaatattttataccccttcacctatggaaagtgaaatgatttatgaagaagaaaaatcaatatttatgggatggaaaataataaacaaccaagaacagcaatctaaaacatttgtctctattgtctcttatttagaattgattaaaggttttacaatgaatcgtattacagcaacggaggtcccatgtgaaagcttacatcattatggtgaatccacacttatacaaattttggaaaaaaagaatattggtcgtccttctacttttgcaaacattttggattcgataaaagaaaaacaatatataaaaaaagggaatatcgaaggaattgaatatgaacgaaaaatattaacattacaagatggtgtaataaaaacaataaaggaaaagaagatgatgcatagtgaaaaaagtaaattaatattattagaattaggagatttagtagataaattctgttatgtttattttgaacctctctttaattatacttttacagaagaaatggagacaaaattagacaaa

SEQ ID NO: 293065 - DNA, 202 bp, Unknown
  Bacterial polypeptide expressing nucleotide sequence isolated from the Sargasso Sea
tatgcctaagaatttagtaatcgtagagtcaccagcaaaagctaaaacaattgaaaaatttttaggcggagattttaaggtagtctcaagtaacggtcatatttcagatttaccatcaagtgaattaggaattgatgttgaaaacaatttccaaccaaattatcaagtatctaaagagaaaaaggaaatagtcaaaaaataa

SEQ ID NO: 293066 - DNA, 100 bp, Unknown
  Bacterial polypeptide expressing nucleotide sequence isolated from the Sargasso Sea
atgaatcttgtcatagtagaaagccctgccaaggcaaaaactattaacaaatatttaggtaaaggctataaagttttagccagctatggtcatggttaga

SEQ ID NO: 293067 - DNA, 286 bp, Unknown
  Bacterial polypeptide expressing nucleotide sequence isolated from the Sargasso Sea
gacgctgcaaaagattcatctaaaattatattagcaaccgaccctgatcgtgagggtgaagctatagcttggcatgtgaaagagtatttaaatgagaaaaaacttttgaaagataaagaaatagaaagagtagtttttaatgaaattacaaaaaaagctgtaattcacggtattgaaaatccaagacaaattgaacctttgttagttgatgcttatatggcaagaagagctttggattatttagttggttttaacatttctccaatactatgggacaaaattacca

SEQ ID NO: 293068 - DNA, 614 bp, Unknown
  Bacterial polypeptide expressing nucleotide sequence isolated from the Sargasso Sea
aatgattgtggaatctcccactaaagttaaaagtatagagaaatttcttggtccagattttaaggtaatagcgtctgtgggccatgtaagagatcttgtttcctctgctagaaaggggatagatgtagatcaaggatttaaacccgtttggaaagtttcaaataataagaaaacagtaattgatgacattaaaaaatttacgaaagatgctgatgttatttactttgcgaccgatccggatagagagggggaagccatctccaaacatttatatgacattttagataaagctaaaatacttaaagaaaaagaaacacatagagtagtcttcaatgagattacaaagaatgctgtgactgaagcgctaaagaagccaaggtcaatatcaacgagtttatgggatgcatacctagcaagaagaactcttgactatctcatgggttatgacatttcagaatttttatggaaaaaggttagtagagacgctcgtgctgggagagtccagagtcctgcattgagactaatcgtagaacgagaaataaaaataaatgccttcattcctgaagattttggaatatcactgcaagtgtttcaaacagtcagagaaatattga

SEQ ID NO: 293069 - DNA, 961 bp, Unknown
  Bacterial polypeptide expressing nucleotide sequence isolated from the Sargasso Sea
tatcagttttaaagaagagactattaaaaagttcacatttgattcaaccgcactcgttgaagaggcgagcgaggctttggtggacagttgtaaagaaggtcttgttgccaagtcaatcaccaaaaaaaccattaagcgttcgccgagagagccttttagaacctctgtgcttcagcagcaagcatccaataggtttggttttacgccaaaaaggactatgcagatagctcaatcgctctatgctcgcgagggtggtggtctaatcacatatattagaacggattcaattgaaattgatgagggaaagcttccttctgtaagagaccaggttgcttttatgtttggggatgattttgttcaaccaaggaactataaaaataaaaaagaggccaagaatgttcaggaagcgcacggtgcgataacccctgttgatataagtcttattccaactgaggccaaaaaagttcttaaagatgatgagttcaaactctaccaactaatctggcaaagaacagttgcgtcccaaatgaaggacgcactctttgaaagaacttctattgaatttgtgcctactggagatgaaggcctggcgacgttttctttttctgatcaagaacttatttttagtgggtatttggaggcaacccaagaagaggttacaaacaataagcctccattaattaatgaaaatgattcaatagagttcaaggggctcataaaaacccaacatttcacagacccgcctcctcgttacaatgacgcgagcatgattaaggctctcgaagaaaaaggcattggaaggccctcaacatatgcagacatactatctaaactcacagatagaaagtatgtttggttgaagcaaaaaagatatgagccctctgatatgggtaggcttgtaagcaatttcctgaatgaacgctttggtggatatatcagcgatgagtttacctcaaatatg

SEQ ID NO: 293070 - DNA, 679 bp, Unknown
  Bacterial polypeptide expressing nucleotide sequence isolated from the Sargasso Sea
gaagtcgctgatgatgacgaattagagacagaagtgctgcgtcacaaaaagcgctgtgctaaatgcggtactgctatggatcattacctgattgatgagcatcgtaagctctatgtttgtggtaataatcctggttgtgacggttatttagttgaatccggtgtatttaaactcaaaggctatgacggcccactgattgaatgtgaaaagtgtggctcagatatgcagctcaaatcaggtcgatttggcaaatactttgggtgtaccaacgatgcctgtaaaaacacccgtaagctgttgaaaaatggtgaagctgcgccacctaaagaagatccggtgcatttgcctgaacttaaatgcgaaaagtcagatacctattttgtcctgcgtgatggcgctgcaggtttattccttgctgccgctacttttcctaaatcgagggagacaagggcgccattagtgtctgagctggctcgctttaaagatcgtatcatgccaaagtttcactatctggcagaggctccagcagcagatgctgctggaaatccgactattatccgctggagtcgtaagaccaagcagcagtatgtaatgacggaaaaagatggtaaagccacaggctggtccgcttggtatgaaaatggccgttgggttgtaacgaaagaaaaagcgaagtaat

SEQ ID NO: 293071 - DNA, 528 bp, Unknown
  Bacterial polypeptide expressing nucleotide sequence isolated from the Sargasso Sea
tatgggacaaaaatctaatagtttaattatagtagaatctccatctaaggctaaaactttaaaacgttttttaggagatgaatatgctattgaagcatctgttggccatgttagggatctacccaaaagcgaccttggtgttgatgtggataatggattttctgcaacatatgttccttcaaaagataaaacgaaagtaatttcacaattaaaatctattataaaaaaagcagatattttatatctagcaacggatcctgatagagagggggaggccattgcatggcatctaatggagctattaaaacccaaaatacctgttaaaagattagccttccatgaaataacaaaaacagctatccaagaatcatttgatcataccagagaaattgatcaagatttagtaagtgcccaagaagcaaggcgtattttagacaggctgtggggatatcttgtatccaagaaactatggtttaatgtgaagggtggtttatctgccggccgagttcaaagtccagcaataaaaat

SEQ ID NO: 293072 - DNA, 835 bp, Unknown
  Bacterial polypeptide expressing nucleotide sequence isolated from the Sargasso Sea
taataatgatacagtatgcaaagcaagtggatcagttcttaaatttgatggatttttaaagatatataataatcaaggcaaggatgatgatgaaaacattctaccgtctgtatctaaaggacttgtaaatattgagtccttaatagatgagcagcattttacacagcctcctccaagatattctgaggctagtttggtaaaaaaactagaggagttaggaataggaagaccatctacttatgcaagtataatttccacaatagcaaatagaggttatgcagagatattgaataaaagattttttcctactgatagaggaaaacttatttcggcttttcttgaaaaattgttctcaaaatacgtggattataactttaccgctggtttagaggatcaattggacgagattacaactggtaaagaaagctggataaaagttttggagctgttctggaaagacttcaataacaatgtagctgaagtaaaggaaaaaagaacaagagaggttttagatcttttaaatgatagtttaggagatttggtttttgataaagatgataaaggaaatattgtaagaaagtgtcaattatgtaattcaggtacactaagcctaaagaatagctttaggggtggtgcatttattggttgttcaaattaccctgaatgtaaatttactagacctctgtctaaagctaaagcagctgcacaagcacagttagcagaacccaaatttattggaaaacatgagaatggcaatgatatatatcttaaaaacggaagattcggtccatatttgcaatatgaaaaaattcctgaagatataaaagttgaaaaa

SEQ ID NO: 293073 - DNA, 771 bp, Unknown
  Bacterial polypeptide expressing nucleotide sequence isolated from the Sargasso Sea
aatgcagtcagctaagtttgatagaaatactattactataatatcagataataatgatacaatttgtaaagctagtgggtctgtacttaaatttgatggttttttaaaaatttataataatcaaagcaaagatgatgatgaaagcattttgccagctatgtccaagggacctgttaatattgaggctttattagatgaacaacattttacacaacctccaccaagatattctgaggcgagtttagtaaaaaaactagaggaattaggtattggaagaccctctacttacgcaagtattatctctacaatagccaacagaggatatgcagaaatattaaataaacgtttttttcctactgataggggtaaattaatttcagcttttttagaaaaattattttctaaatatgttgattacaattttactgccggattagaaaaccaacttgatgaaattacaacaggaaaagaaagttggatcaaagttttagaacttttttggaaggattttaataataatgtatctgaggtaaaagaaaaaagaacaagagaagttttggatcttttaaatgatagtttgggtgatttagtttttgataaggataatgaaggaaatatagttagaaaatgccaattatgtacttctggaacattaagtttaaagaatagtttcaggggtggtgcttttattggttgctcaaactaccccgaatgtaaatttacaagaccattatcaaaatcaaaagctgctgctcaagctcaattagctga

SEQ ID NO: 293074 - DNA, 214 bp, Unknown
  Bacterial polypeptide expressing nucleotide sequence isolated from the Sargasso Sea
atgaatcttgtcatagtagaaagtccagcaaaagcgaaaaccataaataaatatttgggtaaggattacaaagtattagctagctacggtcatgttagagatttaccttctaaaaatggctctgtagatcctgaaaataactttaaaatggagtgggagttagattcattctctaaaaaatatgttaaagaaataactgatgctgcggctgatt

SEQ ID NO: 293075 - DNA, 937 bp, Unknown
  Bacterial polypeptide expressing nucleotide sequence isolated from the Sargasso Sea
ctatggagctgaatatcttccagatagtcctaggatttataaatctaaagctaaaaatgctcaagaagctcatgaatgtataagaccaacaaatattaacttaaccccaaaagatattaagaagtatatcacaggagaagagtttaaattgtatgaaataatttggcaaagagcagtttcttcccaaatgtccagcgccatcttagatcaagtagcagttaatataatgactgaagatcaacaaattagtttaagagcaaatggctcaactataaaatttccagggatgtataaggtttatcaagaagcaaaagatgatgataaagatgaagaaaaagaaacaatacttcctgctatgaatgaaggggaagaattggatttaaaggaagtaaataaaaatcaacatttcacaatgccccctcctcgctatactgaagcaagtttagtaaaaaaattagaagaattaggaattggtagaccatcaacatatgcctcaattattaaagttttacaagatagagactatgtcgttttggataagaagagatttaatcctcatgatagaggtcggatcgtatctatatttttagaaaaatattttaatcaatatgtagaatatgattttactgcagatctagaaaatcaattggatgagatttcagacggtaaattagactggaaagaagttttaagtaaattctgggagacttttaaaaagctatgtgatgatactgtaggtaaatcaaatagagaagtaattgatgtgcttgatgaggctttaggtgctcatttttttcctccagaagggaaggatgagaatagaaaatgccctacttgtgagaatggtaggttaggcattaaggttgggaagtttgggggatttgttggttgctctaattaccctgattgtaaatatactggtcaattttatcaataa

SEQ ID NO: 293076 - DNA, 882 bp, Unknown
  Bacterial polypeptide expressing nucleotide sequence isolated from the Sargasso Sea
atttgatagaaagagcattactatagaatcagaaaataaaaaaattcattttaaagcaaatggttcaactataaaatttgagggctacttaaaagtatataaatttgaggaaaaagacgaagatttaaaaaatattttaccagaagttaaagttaaagataaagtttctataaaagaattaattgatgatcaacattttacagatcctccaccaagatattcagaggctagtcttgttaaaaaaatggaggaactaggtattggtcgaccatctacttatgctagtattatttcagttttatcaaccaggaattatgttgaattactaaataaaagatttcatccaactgatagaggaaaattactttctgcttttcttgaaaaactatttacaaaatatgttgactataattttactgcagatttagaaaatcaattagacgaaattacaagtggaaaggtcgattggattagtgttttagatggtttttggaaagatttttattcaaatgttggccaagttaaagaaaagagaacaagagaagttttggatatgttaaatgaaagcttgggtgatcttgtgtttgaaagagataataatgatgtaattgatagaaagtgtaaactttgtgatactggacaattaagtcttaaaaatagttttagaggcggtgcctttataggatgttctaattatcctgaatgtaaattcactagacccttatctaaatcaaaagcatcacagcaaattaatttggcagaaccaaagttaattgggaaaaatgatttaggtaaggatatatttttgaaaaacgggaggtttggaccgtatttacaatttgaaattgatcctttagaaacaaatcaaattaaaaagagaaa

SEQ ID NO: 293077 - DNA, 859 bp, Unknown
  Bacterial polypeptide expressing nucleotide sequence isolated from the Sargasso Sea
aacagatataaagagaacacctgatactctaaaaaaatatttaagcagtgatcagcagaaactatataatttaatttggtctagagctttatcttcacaaatggaggttgcccaatttgatagaaataccataacaataaagtcggaagatgctcaaactgtatgtaaagcaagtggatcagtgttgaaatttgatggttttttaaaagtttactcaaatacaagcaaagatgatgatgaagaaattctaccagaaatgtctaaagggccaataaatattgaagcattaatggatgaacaacatttcacacaaccacctcctagatattctgaagcaagtttagtcaaaaaattagaagaactgggaattggtagaccttctacttatgcaagtataatttctactatagctaatcgtggttatgcagaaatattaaataaaagattttttcctactgatcgtggcaaacttatctctgcatttttagaaaaattgttttctaaatatgttgattataactttaccgcaggtttggaagatcaattagatgaaattacaactggtaaagaaagctggataaaagttttggagatgttttggaaagattttaataataatgtttcagtggttaaggaaaaaagaactagagaagtgttagatcttttaaatgaaagtctaggagctttaatttttgacactgataaagatggaaaaattgttcgaaagtgtcaattatgtgatacgggttcactaagtcttaaaaatagttttaggggtggagcttttattggatgttcaaattatccaaagtgtaaattcactagaccattatctaaagcaaaagcagcagctcaatcg

SEQ ID NO: 293078 - DNA, 814 bp, Unknown
  Bacterial polypeptide expressing nucleotide sequence isolated from the Sargasso Sea
atgaatgttttaattgttgaatctccatcaaaagcaaagtctattaataaatatttaggctcagactttaaagttctagcaagtgttggacatgtcagagatttatcagcgaaaaatgatgctatagatactgaaaatgatttccaaatgaaatgggaaacaagtgatcgtggtaaaaaagttataaaagaaattactgatgctgctaagaaatctgaaaatttatatctagcaactgatccagatcgtgaaggtgaagcaattgcttggcatgttgaaaaacttcttagggataactcatcactttcaaaattaaatatccaccgtgttacatttaatgaaattacaaaaaatgctgttcttgatagccttaaagaaccaagaaaaatagataaaaatttagttaatgcttatcttgctagaagagctttagattttcttgtaggttttactctttctccagttttatggagaaaattaccaggttcaaaatcagcaggcagagttcaatctgttgcattacgcattattagtgaaagagagctcgaaatagaaaaatttgtcccccaagaatattggtcacttcaaggagagtttagaaataaagaagataaagctataaattcaaggcttacagtctatgatggaaataaaattgataaacttgatataaaaaatgatagcgaagcttcaaaaattttcaatgatgttaaaaattctacattcactgttggtaaaataactaaaaaagaagctagaagaaatccctaccctgcttttactacatcaacaatgcaaattgagtctagtcgta

SEQ ID NO: 293079 - DNA, 430 bp, Unknown
  Bacterial polypeptide expressing nucleotide sequence isolated from the Sargasso Sea
gacacagttggtttgattacatatatgagacagatgggcacgcaaattcgaaatgaagcaatcgattcttttagaaattttattactgataattatggaaaaaaatattaccccgaacacccaaataattatagaggcaaaaaagctaaaaatgcacaagaagcacacgaagcgattagaccaactgaaatttctagatctccaaatgatgtcaaaaaatatttaaattcggaccaacacaaactttatgagttaatatggaatagagctttatcttctcaaatgcaaagcgcagaatatgacagaaataccatcttaatttcttcaaaagatgatagcatgaaatttagagcaacaggttctgtgttaaaatttgatggttttttaaaattatataaagatatagacaaagatgataatgacaaaatat

SEQ ID NO: 293080 - DNA, 841 bp, Unknown
  Bacterial polypeptide expressing nucleotide sequence isolated from the Sargasso Sea
acttgaagagctaggaataggtaggccttcaacatatgctagcataatatcagtaatttcaaatagaggttatgctgaaataaacaataagagattttttccaaccgatagaggtaaattattgtcagcatttttagaaaaacttttttcaaagtacgttgattatgattttacagcaaaattagagaatcagttagacgatattacgtctggtaaagaaaattggattactgtattagaaaatttttggaaagattttaattcaaatgtatcaagcgtaaaagaaaagcgaactagagaggttttggatctattaaatgaaagtttaggttctttagtttttgaaatagataaagaaggaaaaattgatagaaagtgtaaattatgttcaaccggacaattaagtttaaaaaatagctttagaggaggagcttttataggttgctcaaattatccagaatgtaaatttacaagacctctatctaaatcaaaggccgctcaacagttcacactggctgaacctaagctaattggacagaacgataaaggtaaagaaatttatcttaaaaatggtagatttggaccttacttgcaatatgaaaaggaaccggaagaagaaattaaaagaaaaaaaagaaaaaaaaaaataaaagaaaatgaaaatatgaaaaatgtttctatacctaaaggtgttgaaatagactctatagatttagataaagcaaagtatttatgctcacttccaattattttaggtaaaaatccagaaaatgataaagatataacaataaatgtaggaagatttggtccttatttaaaatgtgaaagtaaatctgcaaag

SEQ ID NO: 293081 - DNA, 571 bp, Unknown
  Bacterial polypeptide expressing nucleotide sequence isolated from the Sargasso Sea
atgattgtggaatctcccactaaagttaaaagtatagagaaatttcttggtccagattttaaggtaatagcatctgtaggccatgtaagagatcttgtttcctctgccagaaaggggatagatgtagatcaaggatttaaacccgtttggaaagtttcaaataataagaaaacagtgattgatgatattaaaaaatttacgaaagatgctgatgttatttactttgcaaccgatccagatagagagggggaagccatatcgaaacatttatatgacattttagataaagcaaagatacttaaagaaaaagaaacacatagagtagtcttcaatgagattacaaaaaatgctgtgactgaagcactaaagaagccaagggcaatatcaacgagtttatgggatgcatacctagcaagaagaacgcttgactatctcatgggttatgacatttcagaatttttatggaaaaaggttagcagagacgctcgtgctggaagagtccagagtcctgcattaagactaatcgtagaacgagaaataaaaataaattccttcattcctgaagaatttt

SEQ ID NO: 293082 - DNA, 784 bp, Unknown
  Bacterial polypeptide expressing nucleotide sequence isolated from the Sargasso Sea
tatgaatgttttaattgttgaatcaccatctaaagcaaaatctattaataaatatttaggttctgactttaaagttttagctagtgttggtcatgttagagacttatctgctaaaaatgatgctattgatacagaaaatgacttcaaaatgaagtgggagacaagtgatcgaggaaaaaaaattataaaagaaataacagaagcagctaaaaaatcagataatttatatttagcaacagatcccgatcgtgaaggtgaagcaatagcttggcacgtagaaaaattactaagggataatgcctctctttcaaaattgaatattcacagggtaacatttaatgaaataacaaaaaatgcagttcttgatagtttgaaggaacctcgtgaaattgatgaaaatttagtcaatgcttatcttgcaagacgtgcattagattttttagttggttttaccttatcacctgttctttggagaaaattacctggttcaaaatcagctggtagagttcagtcagttgctttaagaattataagtgagagagagtttgaaattgaaaaatttgttcctcaagaatattggtcaattcaatgtgatcttattaataaagctaataatgtaattaattcacgtttaactttctacaatggtaaaaagatagataaacttgatattaaaagtgaggaagcagcaacaaaaatatatacaactatactaaactctaaatttaaagttgggaatattacaaagaaagaagcgaaaagaaatccttacgctgctttacaa

SEQ ID NO: 293083 - DNA, 828 bp, Unknown
  Bacterial polypeptide expressing nucleotide sequence isolated from the Sargasso Sea
acgattgagtctgaagacggtaaaaccatatgtaaatcaagtggatcggttttgaaatttgatggatttttaaaagtttattcaaatcaaagtaaagatgatgatcaaattttacctgagatgtcaaaaggacctattaatatagaagctattattgatgaacaacattttacccaacctcccccacgttactctgaggcaagtttggttaaaaaattagaagaattaggaattggaagaccttcaacttatgcaagtataatttcaacaatagcaaatagaggttatgcagaaatagttagtaaaagatttttcccaactgatagaggtaaattaatttctgcgtttttagaaaaattattttcaaagtatgtggattataactttacagctgggctagaggatcagctagatgaaataacttctggaaaagaaagttggttaaaagtcttagaaatgttttggaaagattttaatagtaatgtttcagaagtaaaagaaaaaagaactagagaggttttagatcttttaaatgaaagtttgggagcattgatatttgacactgataaagaaggaaacatagttagaaaatgccaattatgtgaaacaggttcccttagtttaaaaaatagttttagaggaggtgcgtttattgggtgttcaaattatcctgaatgtaaattcacaagaccattatcaaaagctaaagcagctgctcagtcacaattagcagaaccaaaatttctaggaaaacacgaaaatggaaatgatatttttttaaaaaatggcagatttggtccttatcttcagtatgagaaagttcttgaa

SEQ ID NO: 293084 - DNA, 826 bp, Unknown
  Bacterial polypeptide expressing nucleotide sequence isolated from the Sargasso Sea
aatgggtagaatcaagaaacgcataatgcccgaagatattataatcaacatcggcaagggcgcgaaggtcccggagcccttgtctgggcacagttggaaacaagtgatccacaacgacacagtcacttggctctgcggttggaacgacacgataaacaccaaggactggaagtacgtacaattcggcgccacctcatcgattaaggcggaatctgacattcaaaaatatgaaaaagctcgcaagcttaaactcgctgtggatgccattcgacgagactacttcacaaagatgaaatctggctcaatccttgagcagcagctagctgtcaccacttaccttgtcgacaagttagcacttcgcgcaggtggcgagaaggacgacgatctcgcagacactgtcggagtgtgcaccttgcgtgttggtcatatcgatttcttgcctccatcaactatcaaattcgattttctcggaaaagactccattcgatatcttcaggagcatgaagttgacccacttgtatttcacgcaatgcagcgattttgcaagggcaagaagaaggaccaagatatcttcgatcatatagatccgacaaaagtcaataagcaccttcaaaccttaatgcccggcctgacaattaaggtattccgcacttacaatgctagctacaccctgaacaagttgttgaaggaaactactccggctggaaatgccacagtgcccatgaaaaaggcagcatacgacgccgctaacaaggaagtagcggtactttgtaatcatcaaaagggcgtgtctaaggcgcacgacgcgcaaatggagaagttacgg

SEQ ID NO: 293085 - DNA, 882 bp, Unknown
  Bacterial polypeptide expressing nucleotide sequence isolated from the Sargasso Sea
attcttcctgctatgagtgaaggagagagtttaaatctcaaagaacttgaaaaaacacaacattttacctcccctcctcctcgttacaccgaagcaagcttagttaaaaaacttgaagaacttggtattggaagaccatctacttatgcttctattatcaaagttctacaagatagagattatgtaattttagataaaaaacgttttaatcctcatgatagaggaagaatagtatcgatatttttagagaaatatttcaatcaatatgtcgaatatgattttaccgctgatcttgaaaatcaacttgatgaaatttctgatggtaagcttgattggaaagaggttctaagaaaattttgggaaacatttaaacaactttgtgatgaaactgtaggcaaatcaaatagagaggtcattgatgtgttagatgaagccctaggtccgcatttctttccaccaaatggagcagatgaaaaaaggaaatgcccaacctgtgataatggtagactaggaattaaagttggaaagtttggaggatttattggttgctctaattatcctgattgcaaatatactgttcagtttaatcaattaaacgataaagatggcgctgctcttagcggaccaaaagaaatcggcatttatccagaaacaggtgaaatgattactcttcgaaaaggaccttatggattttatatgcaagttggtgaagggacaaaagaaaaaaaaccaaaaagagtttctattcctaaaaattttgagccggatgaaataggattaaacacagctattcaattacttggtttgccacgtaaattaggatttcatcctgaaacaaataaaacagttagtgctggtattggaatgtatggaccatatatt

SEQ ID NO: 293086 - DNA, 781 bp, Unknown
  Bacterial polypeptide expressing nucleotide sequence isolated from the Sargasso Sea
tttagaatttactgttgtagatgtcataaaaaaagaaaaaagcagaaacccttattctcctttttcaaattctctattgttacaagacgcctcatctaaacttgggtttagcccaaaatataccaacacaattgctcaacaacttaaagacggaatttctgaacttggcgccttaatcacttatcatagaacagactcaaatagaatgaagaaagaagaaataataaatcttcgagagataataaaaaaagaatttggaaatgaatttttgtctaatgaacaaatagattacaaagaaaaatcaaagtttgttcaacaaggacatgaggctgtaacacccactcagttgaaagtaaaaccagaggaggttaaaaataaacttaatcaggatcaattcaaattatacgaacttatctggaaaaggacaatagcatctcaaatggctcagagtaaaagtttagaaaccacttatattcttaacggtggaaactttgttcttaaatccaccggatcagtagaaatttttaaaggttttaaaaaaatatataattactcagataaaaatgatgaccagcaacctttaccaaatttggaaataggacacactatgaataaatcaaaagtcgacattaaacaaaatttcacaaaaccacctaataggttttcagaggctggtctgataaagaaattagaagagttaggaattgggagaccctcaacttatgtttctatttttactagactcgaaggaaactcatatatcacgataaaaaataaatct

SEQ ID NO: 293087 - DNA, 909 bp, Unknown
  Bacterial polypeptide expressing nucleotide sequence isolated from the Sargasso Sea
tcaaaagcaaagaatgctcaggaagctcatgaatgtataaggcctacaaatataaatctaacaccaaaagatattaaacaatatattactcttgaagagttcaaactgtatgaaattatttggcaaagagcagtaagctctcaaatggcaagtgctatattagatcaagtggcagtagatattacaaatgaggaaaaaaagattgttttacgagcaaatggttcaacaattaaatttccaggaatgtatagagtttatcaagaagcgaaagatgatgataaagatgaagaaaaagaaacaattcttccaataatgagcgagggtgaaattttaaatttgaaagaagttgaaaaaactcaacattttacttctcctcctcctcgttatactgaagcaagtttagttaaaaaacttgaagaacttggaataggcaggccctcaacttatgcatccattattaaagttcttcaagatagagattatgtagttttagataaaaaacgatttaatccccacgatagaggacgcatagtttcaatatttttagaaaaatattttaatcaatatgttgaatatgattttactgctgacttagaaaatcaactagatgagatttcagatggaaaacttgattggaaagaagttttaagaaaattctgggaaacttttaaacaaatatgtgatgaaacagtcggtaaatcaaatagagaagtaattgatgtgcttgatgaagcattaggaccacatttctttccaccaaatggcgcagatgaaaaaagaaaatgtccaacctgtgataatggaagactaggaattaaagttggaaagtttggaggctttattggatgttccaactatccagattgcaaatatacagttcaatttaatcagttaaatgataaagatgga

SEQ ID NO: 293088 - DNA, 856 bp, Unknown
  Bacterial polypeptide expressing nucleotide sequence isolated from the Sargasso Sea
ccaccgccacgttactctgaagctagtttagtaaaaaagatggaggagttaggcattggtagaccctccacttatgctagcattatttcagtattatcaactagaaattatgtggaattaattaataaaaggtttaatccaactgatagaggcaagctaatttcagcttttttagagaaattattctctaaatacgtagattataattttaccgcagacctagaaaatcaactagatgaaatcactagtggtaaaattgaatgggttcaagttttggataatttttggaaagatttttatgaaaatgttggaaaagttaaagaaaagagaactagagaagtattagacttgttaaatgagagtttaggggctttaatttttgaaagagatgataaagacgcgatcgatcgaaaatgtaagttatgttccaatggagagctaagtctaaagaatagttttagaggcggtgcttttataggctgttcaaattatccagagtgcaaatttactagacctttatctaaagctaaagctgcagctcaatataacttagcagaacctaaattactgggtcaaaacgagaaaggtaaagatatatatttaaagaatggtagatttggcccctacttgcaatatgaaaaagaaaaagatgaattagaaacaaaaaagaaaaaaggtagaaagaaaaaaaatgagaatgaacatcttcaaaatgtatcaattccaaaaggtatagatgttgacagtgtcgatttagataaagcaaaatatttatgctctcttcctaaagtattaggtcaacaccctgataatggtcaggatataacattaaattctggaagatttggtccttact

SEQ ID NO: 293089 - DNA, 534 bp, Unknown
  Bacterial polypeptide expressing nucleotide sequence isolated from the Sargasso Sea
aatgagcaaaaaaccattattaattgttgaatcaccaacaaaagtaaaaactatccaacaataccttggtaatgattatgatgttatttcctgtgttggacatgtaaaggatcttcccaggaataatttaggtattgatatagataatgactttaagattaaacttactgttctaccagaaaaaaagaagtttattacagaattaagaaaaaaatcaaaaaccgctgaaagggtgatgattgcaacagaccccgatagagaaggtgaggctattgcagcacatcttgctagtgaagttcctgaagaaaaattagagcgagtacaattcactgaaattacaaaagcaggaattgcagaaggaataaaaaatattcgtagtattgatcaagatcttgtgtcagctcaaacagcaagaagagtcatagatcgtttagttggatataaagtatcacctgtattatggggcaccctgcagagtaacatgaaaattgtttctactaatttatctgctggaagagtgcagtcagctgcagt

SEQ ID NO: 293090 - DNA, 547 bp, Unknown
  Bacterial polypeptide expressing nucleotide sequence isolated from the Sargasso Sea
gggttgtgatggttatctggttgaaaccggtgtgtttaagctcaaaggttatgacggcccgctgatcgaatgtgaaaagtgtggcagcgatatgcagctcaaatcaggccgttttggtaagtactttggttgtaccaatgacgcctgtaaaaacacccgtaagctgctgaaaaatggtgaagctgcgccgccaaaagaagatccggtgcatttgcctgagctcaaatgcgaaaagtcagatacctattttgtgttgcgtgatggtgccgccggtttattcctcgctgccgcgactttccctaaatccagggaaacacgagcgcctctggtgtctgaactggctcgctttaaagatcgtattatgccgaagttccactatctggcagaagctcctgcagctgatgcttctggtaatccgaccatcatccgctggagtcgcaaaacaaagcagcagtatgtgatgacggaaaaagaaggcaaagctacaggctggtctgcctggttcgaaaatggccgctgggtagtcaccaaagaaaaagagaagtga

SEQ ID NO: 293091 - DNA, 934 bp, Unknown
  Bacterial polypeptide expressing nucleotide sequence isolated from the Sargasso Sea
aactttcaagaaattgatgaaaatgaagatgaaaaaattcttccagatgtaaataaagaagaagttttgattgatgattttattgatgaacagcactacacacaaccacctcctcgatattctgaagcaagtttggtaaaaaaacttgaagaattaggaataggaagaccctctacatatgcaagtattatttcagtaatatccaatagaggatatgcggatgtaattaataagcgtttttttccaacagatagaggaaaattattatcagcatttttagaaaaattattctccaaatatgtcgactacgggtttacagctggtttagaggatcagcttgatgatattacgactggtaaagaagaatggataaaagtccttgataatttttggaaagacttcaatacaaatgtatcaaacgttaaggaaaaacgaactcgagaagtattagatttacttaatgaaagccttggagaactaatttttgaagctgatgaaaacggaaaaattaatagaagttgcaaattatgtaacaatggtgaattaagtttgaaaaatagttttagaggaggcgcatttataggttgttcaaattatccagcatgtaaatttaccagacctttatctaaatctaaagctaaagatcaatacgcattagcagaacctagattaattggacaaaatgataatggtaaagacatttatttaaaaaatggaagatttggtccctatcttcaatatgaaatgattgatgaagaagtgccaactaaaaagaaaaaaaagaaaaaagaaaacgataatttaaaaaatgtatctatacccaaaggaataaatatagatcaaattgatttgggaaaatctaaatatttatgttcgcttcctaaagttttagggcagcaccctgaaaatggaaaagatataacagtaaactcag

SEQ ID NO: 293092 - DNA, 742 bp, Unknown
  Bacterial polypeptide expressing nucleotide sequence isolated from the Sargasso Sea
catggtaataagaaattcttcgaatggtgtttttctgggatgttcaggttatcaaaattctggtgatgagaaatgcaaagaaacccttaatttgatttcaggcgatgaagcaataagcattgacgataatgaagaagtagaaaatttattaataaagaagagatgcccaaaatgtgaaacaagtatggataattatttgattgacgaaaacagaaagcttcatgtatgtggaaaaaatccagattgtgacggttatattgtagaagatggtcaatttagaataaaaggatatgacggtcctacacttgaatgtcataaatgtggatcagagatgcaacttaaaaccggtagatttggaaaatactttggatgtttaaatgataattgtggagctacaagagcacttcaaaggaatggtgaaccaaaacctatcacaatggagccaatagaaattaaagatctaaaatgcataaaatgcgaggatcattatttactaagagacagcatgaaaggtctgttccttgctgcaagccagtatccaaaaaatagagaaaccagagctcctaaggtttcagaaataaatagtctgcgtgaagaaattattgaagcatgtaggtttttaccagataaagaaaaacacttatatctattagatgctcctgagaccgacaaggatggcaatccatatgtaataagatataacagaacagaagatactcattatgttgcttcagaaaaagat

SEQ ID NO: 293093 - DNA, 872 bp, Unknown
  Bacterial polypeptide expressing nucleotide sequence isolated from the Sargasso Sea
aaaattcttaagcactgatcagttaaaattatatgatttaatttggtctagagctctttcttcgcaaatggaagctgcaaaatttgatagaaaaactataacaatagtttcggatgataataagaatcaatttaaatgctctggttctacaattaaatttgatggctttttaaaacttacaagaattgataatgatgaagatgaaaaaatcattcctaatgttagtaaagatgaagtgataactgataattttattgatgaacaacactttacacaaccaccaccacggtattctgaggctagtttagtaaaaaaacttgaagaattaggaattggcaggccttcgacttatgcaagtattatatcggtaatttcaaatagagggtacgcagatgtcgttaataaacgtttttttccaacagatagaggaaagttattatcagcatttttggaagcattattctcaaagtacgttgattatggatttacagcaggtctggaagagcaacttgatgatattacagcaggtaaagaagaatggattaaggttcttgataatttttggaaagatttcaataccaatgtttcaaatgtgaaagagaaaagaactagagaagtattagaccttttaaatgaaagtcttggtgaattaatttttgaggctgataaaagtggaaaaattaacagaaaatgtaaattatgcaacacaggtgaattaagtttaaaaaatagctttagaggtggtgcttttataggctgttcgaattatccagaatgtaaatttacaagacctttgtccaaatctaaatcaaatgatcaaatcgcattattagaaccaaaattaattggtcaaaatgatagtggcaaggata

SEQ ID NO: 293094 - DNA, 514 bp, Unknown
  Bacterial polypeptide expressing nucleotide sequence isolated from the Sargasso Sea
agcagagctttatcgtctcaaatgcaatcagctcaatttgatagaaatacaattacaattacatctgataacaaagaaactattttaaaaactactggatcagtaattaaatttgatggttatttaaaagtttacaaagatcctaaaaaggaagatggggaaagcattttacctaaaatgtcaaatggtcccgtaaatattgagaatcttatagatgaacaacattttactcaacctccgcctagatattcggaagcaagtttagtaaaaaaactggaagaattaggtattggaagaccttcaacatacgcaagtatcatttctgtaatatctactagaggctatgttgaaattttaaataaaagattccatcctacagatagaggaaaactaataacagcttttttagaaaaactattttctaaatatgtagactataattttactgctggattagaaaatcaattagacaaaatcacttcaggaaaagaaggatggattaaagttttagaaa

SEQ ID NO: 293095 - DNA, 823 bp, Unknown
  Bacterial polypeptide expressing nucleotide sequence isolated from the Sargasso Sea
aagttagaagaattaggaattggaagaccttcaacatatgcaagtataatttcagttatttcaaatagaggttatgcagacatagaaaacaaaagattttttccaactgatagggggaaattgctctccgcttttcttgaaaaattattctcaaaatatgtggattatgatttcactgcaaaattggaagatcaattagacgatataacagctggtaaagaaaattggattaaggttttggaagaattttggagagattttaatttgaatgtagcagacgttaaagaaaaacgtactagagaagtcttagatatgcttaacgaaagtttaggatcattaatctttgaagttgataaagatggaaaaataaatagaaaatgtaaactatgtgatagtggtcaattaagtttaaaaaatagttttcgaggtggtgcttttatcggatgttcaaattatccggattgtaagtttacaagacctctttcaaagtctaaagctgctcaacaattgacattagcagaaccaaaattaattggtcaaaatgatataggtaaagacatatatttaaaaaatggaagatttggcccctatcttcaatatgaaaaagaattaaatgacgttgaagaaactaaaaagaaaaagaaaaaattaaaaaaagaagacaataatatgaaaaacgtatctataccgaaaggaattgatatcaaaagtatagatttagatagagccaaatatttatgctcacttccaattagtcttggtaagaaccctgaaaatgataaagatattactgtaaatgttggtcgttatgggccttatttaa

SEQ ID NO: 293096 - DNA, 499 bp, Unknown
  Bacterial polypeptide expressing nucleotide sequence isolated from the Sargasso Sea
gcaagattttcagaggctgcattggttaaagaactcgaaaagaaaggcatcggaagaccatctacttatgcaaatattatttcaacaatacaagatcgaggatatgttgaaattcaaaatagacgattttttgtaaaaaaaattggaatgattgtcacagataggcttgtaagtagttttgatgacatcatggattacagcttcacagctaattttgaagatcagttagatagaattgcaagtggtgagctaaattggaaagaagttttaaattcttattattcagctttccaagatgatctttcttcagcaatggatgaagaaaatggaatgtctcctaatcttcccactatgacaaatattaattgtccagaatgcaaaattaataaacttacaataagaaatgcaagtaatggtgtctttctgggatgtgcaggctatagcttgccagctgaaatgcaatgcaaaaaaacattgaactcttatttcaggcgatgaa

SEQ ID NO: 293097 - DNA, 575 bp, Unknown
  Bacterial polypeptide expressing nucleotide sequence isolated from the Sargasso Sea
tatgaatgtattaattgttgaatcaccatcgaaggcaaagtcaattaataaatatttaggctctgacttcaaagttctagcaagtgtgggacatgttcgagatttatcagcaaaaaatgatgcaatagatactgaaaatgatttccaaatgaaatgggaaaccagtgatcgtggaaaaaaagtgataaaagaaataacagatgctgcaaaaaaatcggaaaatttatacctagcaactgacccagaccgtgaaggtgaagccatagcttggcatgtagaaaaactacttagagataattcatcactttcaaaattaaatattcaccgtgttacatttaatgaaattaccaaaaacgccgttcttaatagtcttaaagagccaagagaaatagatgaaaatttagttaatgcctatcttgcaagaagagctctagattttcttgttggttttacactttctccagtgctatggagaaaattaccaggatcaaaatcagcgggtagagttcaatctgttgccttaagaaataatagtgaaagagaacttgaaatagaaaaatttattccacaggaat

SEQ ID NO: 293098 - DNA, 882 bp, Unknown
  Bacterial polypeptide expressing nucleotide sequence isolated from the Sargasso Sea
ggaacttccaaaaaaggatgcgattgatccaaacaatggatattccatgaaatatatagttagcccaggaaaggaagacgctgtaaaaaagattaagagtgatgcaaaaagtgctgaacaagtaatactcgcaacagacccagatagagagggagaagctattgcttggcatgttgctgacattatttcaaaagcaaaatttgagcagccggatattaagcgagctattttttatgaaataagtgaaaaagcggttaaagctgccgtggtcaatcctggcgagatagccatggatcttgttcagtcccaagaaaccagaagggctttagatagacactttgggttttctttatctcctttgttatggcgactgtttcctagcaacaatcactcagccggaagagttcaaagccctgcgctaaggatgattgttgagcgtgaaagagaaattgaagcttttgttccacaagaatactggactatttcagcgaagctagaaaaagatggtgaatacgatgcgaagctatcagtttttaaagaagagactattaaaaagttcacatttgattcaaccgcactcgttgaagaggcgagcgaggctttggtggacagttgtaaagaaggtcttgttgccaagtcaatcaccaaaaaaaccattaagcgttcgccgagagagccttttagaacctctgtgcttcagcagcaagcatccaataggtttggttttacgccaaaaaggactatgcagatagctcaatcgctctatgctcgcgagggtggtggtctaatcacatatattagaacggattcaattgaaattgatgagggaaagcttccttctgtaagagaccaggttgcttttatgtttggggatgattttgt

SEQ ID NO: 293099 - DNA, 956 bp, Unknown
  Bacterial polypeptide expressing nucleotide sequence isolated from the Sargasso Sea
gctaatacagattttagagctagtggacaaattattgttttccctggctacatgaagatatacgttgaaggtaaagacaaccctgaagcagagcttgctaataaagaaaaaatattaccagagatatctgaagatgaaattttaatgtgtaaccatattagctctcaaagtcatcaaacaaaaccaccagctagatttactgaagcatctttagtaaaagaaatggaaaataatggcattggcagaccttctacttttgcttctattttagatactatcgtaagaagagggtatgtggaaaaaacaaaaagtaatctctcacctacttacttaggattagcaattactcaattgcttgagaatcacttttcgactctagtcgatagagattttacagctaagatggaaaatgaactggatgcaatatccagaggtgaattagagccaataccttttatgaatgatttttattttgggaatgacgctcatttaggcttagagaaaatgctagaaaaaaaagtagatataggaaaagcatgtacaataccgttacctatcggttacgatgataccgtagaagctagaatagggaaatttggtccttatcttcgtaaagaagaagataccagatcaattccacaagatatatacataggagatcttacagatgatattattgattcactttttaaagatcaaaggaaagatgctactctggggagagacccaaaaacaaaagaagatatattattaaagaaaggaccttacggccattatgtgcaactgggcgaatcgacaaagagaaaagcaattccaaaaggaactgatatagaatctgtagatctagatctggcagttaaattactttcattgccaagaacagttggtgagcacccagaaacaggtgtgtcaataactgctgattacggaaggtatggcccttatttaaaaatgga

SEQ ID NO: 293100 - DNA, 634 bp, Unknown
  Bacterial polypeptide expressing nucleotide sequence isolated from the Sargasso Sea
atgaatgttttaattgttgaatcgccatcaaaagcaaagtctattaataaatatttagggtcagactttaaagttcttgcaagtgttggacatgtccgagatttatcagcaaaaaatgatgctatagatactgaaaatgatttccaaatgaaatgggaaacaagtgatcgtggtaaaaaagttataaaagaaattactgatgctgctaaaaaatctgaaaatttatatctagcaactgatccagatcgagaaggtgaagcaattgcttggcatgttgaaaaacttcttagggataactcatcactttcaaaattaaatatccaccgcgttacatttaatgaaattacaaaaaatgctgttcttgatagccttaaagaaccaaggaaaatagataaaaacttagttaatgcctatcttgctagaagagctttagactttcttgtaggttttactctttctccagttttatggagaaaattaccaggctcaaaatcagcaggcagagttcaatctgttgcattacgcatcattagtgaaagagaactcgaaatagaaaagtttattcctcaagaatattggtcactccaaggagaatttagaaataaagaagataaaactattaattcaaggctta

SEQ ID NO: 293101 - DNA, 763 bp, Unknown
  Bacterial polypeptide expressing nucleotide sequence isolated from the Sargasso Sea
atgaatgttgtaattgtagagtctccatcgaaagctaaatcgataaataaatatcttggaagttctttcaaggtattggcaagtgttggacatgttcgagatctttctccaaaaaatgatgcaatagatactgaaaataatttcaatatgaaatggcaaactagcgatagaggaaaaaaagttattaaagatataactgatgtagcaaaaaattcagaaaatttatacttagcaactgaccctgatagagagggagaagccatagcttggcatgttgaaaatatgttaagagaaaacccgaaattaaataatgtaaatattgtaagaatatcatttaatgaaattactaaaaatgcagttttagaagctttaaaagaaccgagaaaaatagatgaaaatttagtaaatgcttatttagcaagaagagctcttgatttcttagttggatttaatttatctcctgttttatggagaaaattacctggaagtaaatctgctggtagagttcagtctgtagcattaaaaataattactaaaagagagcttgaaattgaaaaatttaatccagaagaatattggtcaataaaaggtatgtttagcttaaatgatggtcatgaatttgaagggcgattaattaagtataataatgaaaaaattgagaaattatcaataaaaaatgaaaaatctgcaaaagaaaaattagatttcatagaaaaaggttcttttcatgttagcaaaatagaaaaaaaagaaacaaaaagaa

SEQ ID NO: 293102 - DNA, 736 bp, Unknown
  Bacterial polypeptide expressing nucleotide sequence isolated from the Sargasso Sea
agctttatcttctcaaatggagtctgctaaatttgatagaaacactattactataatatcggataataatgatacagtttgtaaagctagtggttctgtccttaagtttgatggttttttaaaaatttataataatcctagtaaagatgatgatgaaaatattttgccagctatgaccaagggacctgttaatattgaggctttattagatgaacaacattttacacaacctccaccaagatattctgaggcgagtttagtaaaaaaactagaggaattaggtattggaagaccttctacttacgcaagtattatctctacaatagccaacagaggatatgcggaaatattaaataaacgtttttttcctactgatagaggtaaattaatttcagcttttttagaaaaattattttctaaatatgttgattataattttactgccggtttagaagaccaactagatgaaattacaacaggaaaagaaagttggattaaagtattagaacttttttggaaggattttaacaacaatgtatctgaagtgaaagaaaaaagaacaagagaagttttggatctattaaatgatagtttgggagctttagtttttgacaaggacaatgaaggaaatataattagaaaatgtcaattatgtagttctggaaaactaagtttaaagaatagttttaggggtggtgcttttattggttgctcaaactaccctgattgtaaattt

SEQ ID NO: 293103 - DNA, 439 bp, Unknown
  Bacterial polypeptide expressing nucleotide sequence isolated from the Sargasso Sea
ttggattatcttgttggttttaatatctcacctattttatggactaaacttcctggatcaaaatctgccggaagagttcagtcagttgctctcaaactaataactgagagagagcatgaaatcgagtcttttaaacctgaagagtattggactatcaatgctgattttaaaaactcaaaagataaaaatatattttcaaaattaaaccttattgatgataaaaaagttgagagatttagttttaaaaataaaaatgatattaataaggcaactgaaaatattaataaacatgaatattttgttaaagatgtaaattcaaaaatagttaaaagaaatccttctgcacctttcacaacatcaactcttcaacaaacttcttctggaaaatttgggttcggtgcatcaagaacaatgcaaatagcacaacgattatatcaag

SEQ ID NO: 293104 - DNA, 583 bp, Unknown
  Bacterial polypeptide expressing nucleotide sequence isolated from the Sargasso Sea
tatgaattcactagtcattgttgagtcaggagctaaagctaaaaagattaagggatatcttgaggctaattttaaacaagatatttggcaagttgaagcttgcttaggtcatattagagatcttcctgatgaagagactgcagttaatcctgaaaactggtctgaactaaaatggaaagaaactcctaaaggtaaaaagaccataaaggctcttaggaaagtttgcaaggatatagatactttatatttagcaactgaccctgatagagaaggagaagctattgcttggcatttacacagtgactttaaagaaaagaacttgatagagaatgtagatgttaaaagaataacttttacagagattacttcttctgccataaaggcagccattgaaaacccccggagtattgaccaagacctagtagatgcttatttaactagaagaattttagaccatttgattggattcaaagtttctcctttattgtggcgacacatttctagggcaaaatctgctggaagagtttcatctcctactttaagacttatttgtgaaaagaagatgagagagatgcgcatgtag

SEQ ID NO: 293105 - DNA, 223 bp, Unknown
  Bacterial polypeptide expressing nucleotide sequence isolated from the Sargasso Sea
atgtatctcgtagttgttgaaagtccagcaaaggcaaaaacaataaataaatatcttggtaaagactataaagttttagcaagttacggacatataagagatttgccatcgaaaaatggttctgtggatcccgacaataattttcaaatgctttgggaaattgattctttttcaaagaaatatttaaaagaaattacggatacagcggcggactcaaataaaa

SEQ ID NO: 293106 - DNA, 278 bp, Unknown
  Bacterial polypeptide expressing nucleotide sequence isolated from the Sargasso Sea
aaaactataaataaatatctaggtggaaattatacagttttggcaagctatggtcatataagagatcttccttctaaaaatgggtctgtagatcctgaagataaattcaaaatgatatgggaagttgatactttttctaaaaaatatttaaatgaaataattgatgcggcaaaaaaatcaaagaaaattattcttgcaactgatcctgatagagaaggtgaagctattgcatggcatgtaaaagaatacttggatgaaaaaaaacttctaaaagataa

SEQ ID NO: 293107 - DNA, 958 bp, Unknown
  Bacterial polypeptide expressing nucleotide sequence isolated from the Sargasso Sea
tataaattatatgatcttatttggagtagagctttatcttctcaaatgcaatcggcacaattcgatagaaacacaattacaattacatctgagaacaaagaaactattttaaaaacaactgggtcagtaataaaatttgacggttatttaaaaatttataaagatcctaaaaaagaggatggtgaaagaattttacctaaaatgtcgataggacctgttaatgttgaaagtcttgtagatgaacagcactttacacagccaccacctagatattccgaagcaagtttagtaaaaaagcttgaagaattaggcattggaagaccttctacgtacgcaagtatcatttctgttatatctactagaggttatgttgaaattttaaataaaagatttcatccaacagatagaggaaaattaataacggcttttttggaaaaactattttctaaatatgtagactataattttactgctggattagaaaatcaattagacgagatcacttctggaaaagaagggtggattaaagttttagagatgttttggaaggactttaaccaaaatgttactgaggttaaggaaaaaagaaccagagaagttttagatttattaaatgaaagcttgggagaattaatattcgatacaactaatgatggaaaaattgatagaaagtgctcagtatgtgacaatggagttcttagtttaaaaaatagctttagaggtggagctttcatcggttgttcgaactatcctaattgcaaatttacaagaccgctatcaaaagctaaagctgccgaacaaatagctttacctgaaccaaaatccattggtttaaatgaaaatggaaaagagatgtttttaaaaagtggtagattcggtccatatatacaatatgaaattactgatgattgtgaaaaaaaaataaaaaaaagaaaatcaaaaaaagataatgagaaaa

SEQ ID NO: 293108 - DNA, 1016 bp, Unknown
  Bacterial polypeptide expressing nucleotide sequence isolated from the Sargasso Sea
tttaatatcatcaaaagatgaaagtattaaatttagagcttcgggttcagtgcttaaatttgatggatttctaaaactttataaagatatagaaaataaagaagagaaagataaaatcttacccgaagttaaaaaagatgagattttaaaaattaataagatcatagatgaacaacattttactgaacctccaccaagatattctgaagctagtttggttaaaaaactggaagaattaggtataggaaggccatccacatacgcaagcataattacagtcttatcaacacgaaattatgtggatcttattaataaaagatttcatcctaccgatagaggaaaattattagctgcctttttagaaaaacttttttcaaagtatgtggattataattttacagctgatctcgaagatcaattagatgagattacttctgggaaaattaaatggattggagtgcttgaaaacttttggaaagattttaataaaaatgttcaagaggttaaagaaaaacgaacgagagaagttttggacttattgaatgagagtttgggagaattaatttttgatacaaccagcgatggaaaaatagatagaaaatgtccattatgtaagattggagagttgagcttaaaaaatagttttaggggaggagcttttataggatgtgctaattatcctgaatgtaaatttacaagacctttatctaaagcaaaagctgctgaacaaaatgcattaccggaacctaaatctcttggtgctaatgataaaggaaaagacatgtttttaaaaaatgggagatttggcccatatatacaatatgaactttctgatgaagaaaataacttgccaaagaaaaaaaaatcaaaaaaagaaaaagaaaaacctttaagaaatgtttctattcctaaaggtatttcgattgattctatagatttggatagagctaaatttttgtgttctttaccaaagattttgggacaacatccagatactggaaaagacattacttaaa

SEQ ID NO: 293109 - DNA, 610 bp, Unknown
  Bacterial polypeptide expressing nucleotide sequence isolated from the Sargasso Sea
aatgaaattgtatgatttaatctggtcacgtgccttatcttctcaaatgagcccagctgaatttgataggagttctatacaaatagcatcggatgatgaaaccataacttttaacgcaagtggatccataatgaagtttgatggatttttgaaagtttatagtcttccggaaaatgacgatgaagcaaaaaatatattacctgttgtgaaaattggagacaaagttaaaataaaagacattattgatgagcagcactttacgaaccctccgcctagatactctgaagctagtttagtcaaaaaacttgaagaattaggcataggaaggccttctacgtacgcgagtataatttcagtgttatctacaagaaattatgttgaattattaaacaaaagatttcacccaactgatagaggtaaattattatcagcctttcttgaaaaattgtttgcaagatatgtggattataattttacagctaatcttgaaaatcaattagatgaaataaccagtggaaaaacagactatattagagtgctagaagatttttggaaggatttctactctaatgttggttctgttaagacatcagaacacgtgaagttttag

SEQ ID NO: 293110 - DNA, 850 bp, Unknown
  Bacterial polypeptide expressing nucleotide sequence isolated from the Sargasso Sea
actggctgaagaggctagcaaggctttggaggacagttgtaaaaaaggccttgttgcgaagtcgatcaccaaaaaaaccattaagcgttcgccgagagagccttttagaacctctgtgcttcagcagcaagcatccaataggtttggctttacaccaaaaaggactatgcagatcgctcaatcgctctatgctcgtgagggtggtggtctaatcacatacattagaacggattcaattgaaattgatgagggaaaacttccatctgtaagagaccagattgcttttatgtttggagatggttttgttcaacctaggaactataaaaataaaaaagaggccaagaatattcaggaggcgcacggtgcgataactcccgttgacataagccttattccagctgaggccaaaaaggtcctcaaagatgatgagttcaaactctaccagctaatctggcaaagaacagttgcgtcccaaatgaaggatgcactttttgagagaacctctattgagtttgtgcccattggagaagagggcctagcgacgttttctttttctgatcaagaacttatttttagtgggtatttggaggctacccaagaagaagttacaaataacaaacctcccttaatcaatgaaaatgattcaatagagttcaagggactcataaaaacccaacatttcacagacccgcctcctcgttacaatgacgcgagcatgatcaaggctctggaagaaaaaggtattggtaggccctcaacatatgcagacatactctctaaactcacagatagaaagtatgtttggttaaagcaaaaagatatgagccctccgatatgggtaggcttgtaa

SEQ ID NO: 293111 - DNA, 880 bp, Unknown
  Bacterial polypeptide expressing nucleotide sequence isolated from the Sargasso Sea
aagatactctgaagcgagcttggtaaaaaaacttgaagaattaggtattggaagaccatctacttatgcaagtattatttctactattgccaacagaggatatgcagaaatattaaataaaagattctttcctacagatagaggtaaattaatttcagctttcttagaaaaactattttcaaaatatgttgattataattttactgcgggcttagaggatcaacttgatgagattacaactggaaaagaaagttggattaaagtattggagcttttttggaaagatttcaacaataatgtttcgaaggtaaaagaaaaaagaactagagaggtcttagatttacttaatgatagtttgggcgatcttatttttgataaagataatgagggaaatgtagtaagaaaatgccagttatgtggatctggaacacttagtttaaaaaatagctttagagggggtgcgtttataggctgttcaaactaccctgaatgtaaattcactagaccattgtctaaagctaaagctgctgctcaagcacaattagctgagccaaaattccttggaaaacatgaaaatggaaacgatatatatttgaaaaatggaagattcggcccttaccttcaatacgaaaagattctttcaaatgacgaagttgaaaagaatactaagaaaaagaaaaaaaataagaagcctaaaccagatgttaatgagctcttaagaaatgtttcaattcctaaaggattagaattgaaaagtattgacttagaaaaagcccaatttttatgttcgttaccaaaaaccttaggagtaaatcctgacaatcaaaaagaaattacattgaatacaggaaggtttggtccatatctcaaatgtgaaaat

SEQ ID NO: 293112 - DNA, 1264 bp, Unknown
  Bacterial polypeptide expressing nucleotide sequence isolated from the Sargasso Sea
aaatattttacctgaggttaaagttggtgacaaggtcacgataaaagaattaatagacgatcagcattttacagatccacccccaagatattcagaagctagtttggttaaaaaaatggaagaacttggaataggacgtccatcaacatacgcaagtataatatcggttttatcaactagaaattatgttgaattattaaataaaaggtttcaccctacagatcgtggaaaattattatcggcattccttgaaaaattatttactaaatatgttgattataattttactgctgatttagaaaaccaactagatgagattactagcggcaagattgattgggtcaaagttttagaaggtttttggaaagatttttattcaaatgttggacaggtcaaagaaaaaagaactagagaagttttagacttgcttaatgagagtttaggcgacctcgtttttgaaagagatgataacgatgctattgataggaaatgtaaggtttgtgatactggtgagttaagtcttaaaaatagttttagaggtggtgcatttatcggttgttctaattacccggaatgtaagtttactaggccattatctaaatcaaaagcatcacaacaagtgaatttatctgaacccaaattaattgggaaaaatgatttgggaaaagatatttttcttaaaaatggaagatttggaccttatttacaatttgagattgaaccaactgaactaaatgaaaataaaaataaaagaaaaaaatctaaaaagataaaagaaaatgaaaatttaaagaatgtttcaatacctaagggtttatcaattgaaaacgtagatttggataaagctaagtatttatgttctttaccaaaaataattggtaagcatcctgatttaaatgagaacataacaataaatattggaagatttggaccttatttaaaatgttcaaacaaatctgcacggattgaaagtgttgatgagttattttcaataggtctgaatagagcaataactcttatctctgaggcaaaaccaggtagaatgtcatcttcagaaattaaaaaccttggtgaacatccagaagataaaaagcctgtaagaataatgaaaggacaatatggtccatatattaaatacaagagtattaatgcaacaatacctgaagataaagatcctgccgaaataagtatggaagaagctttaattttaattgaaaagagaaaagaatatgataaatctaaaaaaagtaggagaaaaaaataa

SEQ ID NO: 293113 - DNA, 814 bp, Unknown
  Bacterial polypeptide expressing nucleotide sequence isolated from the Sargasso Sea
atgaatgttttaattgttgaatcgccatcaaaagcaaagtctattaataaatatttaggctcagactttaaagttctagcaagtgttggacatgtcagagatctatcagcaaaaaacgatgctatagatactgaaaatgatttccaaatgaaatgggaaacaagtgatcgtggtaaaaaagttataaaagaaattactgatgcagctaagaaatctgaaaatttataccttgcaactgatccagatagagaaggtgaagcaattgcttggcatgttgaaaaacttcttagagacaactcatcgctttcaaaattaaatatccaccgtgttacatttaatgaaattacaaaaaatgctgttcttgatagccttaaagaaccaagaaaaatagataaaaatttagttaatgcttatcttgctagaagagctttagattttcttgtaggttttactctttctccagttttatggagaaaattaccaggttcaaaatcagcaggcagagttcaatctgttgcattacgcatcattagtgaaagagaactcgaaatagaaaagtttatccctcaagaatattggtcacttcaaggagaatttagaaataaagaagataaaactattaattcaagacttacagtctatgatggaaataaaattgataaacttgatataaaaaatgatagcgaagctacaaaaattttcaaagatgttaaaagttctaaattcattgttggtaacataactaaaaaaaaagctagaagaaacccctaccccgcttttactacatcaacaatgcagattgagtctagtcgta

SEQ ID NO: 293114 - DNA, 1300 bp, Unknown
  Bacterial polypeptide expressing nucleotide sequence isolated from the Sargasso Sea
atatttcatgaaataaccaaaacagctatatgtaatgctgttaaaaacccaacaactattaatatgaatgtagtgcaagctcaacaatctagacaaatattggatataattgttgggtataaaatctctccagttttgtggaaaaatatttcttggaactctaagaagggtttaagcgcaggaagatgtcagacacctgcattaagattgatatatgataatcagatggaaataaatgaaaaccctggagaaaaatcttatgatactattggttattttacatcaaaaaatattgcttttaatttaaatcattcatttaaggaagagaaacaagtagaatcatttttagaattatctctccagcacaaacatatatatagttgttctcaaccaaagaagctatctaaatccccacctttgcctctaaccacgagcggtattcaacaacttgcaaataatgagctaagaatatcaccaaaagatacaatgagaatatgtcagaaattatatgaggctgggctaataacctatatgaggacagatagtaaaacttttagcaaaaaattcatagaatcagtaaaagaatatgtaaataaaacctgggatgaaagttatataaatacaaaagcagatgaattaagtattcgtaaaactaatactaaggaggtaacacaggacgcgcatgaggctattcgcccgacggatattaataaaaataaaataggcgcgccttttcatccaagagagcagaagctttacagtttaatttggaaaatatcgtgttctgcttgtatgagtaatgctattttaaatagtatatctgtagcaataacagcacccttaaagcatcaatataaatataatacacacatagtaacatttctaggttggaagatattggatccgccaaatgatacaagtgattcatataattattgtttaaatatatcaaaaaataaacagattaattacaacaaaatacaaattaatatgggattaaaaaaaattaaattacattataccgaagccaaacttgttaatctattggaagatcagggaatcggacgaccatctacattttcaagtattgtagagaaaattcaagaacgggaatatgtaaagcttatggatgttgaaggtaagaaaatcagctgcactaattatgaattaatagaaaaggatatatcaaagaaaatagaggaaaaagaatttggttctgagaaaaagaaattagtaatacaacctatgggaataattgtgttagaatttttaataaagtattacgatgaattatttagtt

SEQ ID NO: 293115 - DNA, 751 bp, Unknown
  Bacterial polypeptide expressing nucleotide sequence isolated from the Sargasso Sea
tatgaatgttttaattgttgaatcgccatcaaaagcaaagtctattaataaatatttaggctcagattttaaagttcttgcaagtgtcggacatgttcgagatttatcagcaaaaaatgatgctatagatactgaaaatgatttccaaatgaaatgggaaacaagtgatcgtggtaaaaaagttataaaagaaattactgatgctgctaagaaatctgaaaatttatatctagcaactgatccagatagagaaggtgaagcaattgcttggcatgttgaaaaacttcttagggacaactcatcactttcaaaattaaatatccaccgtgttacatttaatgaaattacaaaaaatgctgttcttgatagtcttaaagagccaaggaaaatagataaaaatttagttaatgcttatcttgctagaagagctttagattttcttgtaggttttactctttctccagttttatggagaaaattaccaggttcaaaatcagcaggcagagttcaatctgttgcattacgcatcattagtgaaagagaactcgaaatagaaaaatttatccctcaagaatattggtcacttcaaggagaatttagaaataaagaagataaaactattaattcaagacttacagtctatgacggaaataaaattgataaacttgatataaaaaatgatagcgaagctaccaaaattttcaatgatgttaaaaattctacattcactggtggaaaacatattaaaaaa

SEQ ID NO: 293116 - DNA, 676 bp, Unknown
  Bacterial polypeptide expressing nucleotide sequence isolated from the Sargasso Sea
tatgaaatcacttgtaattgttgagtcaggtgcaaaagcaaaaaaaataaaaggttatctggactctaattttccagataaagattggcaagttgaagcttgtgtaggtcatgttagagatctttcagacaaagaaaatgcggtagatcctggagattggagtaacctcaaatgggaattctcttcaaaaggaaagaaagtaatgaaggatcttcgtaaattctgcaaggagtctcaacttttatacttagcaacagaccctgatagagaaggggaagcaattgcctggcatttacttagtgattttgaaagcaaaaaactgatcaaagatgttgacgtaaagagagtaacttttaacgaaataacatcttcagcaataaaaaaagccattgagtcgccaagagagattgaccaagatttagtagatgcatatctaacaagaagaattttagaccacttaattggtttcaaagtttctcccttactttggaggcacatatcgagagcaaaatctgctggcagagttcaatctcccactttaaggctactttgcgagaaagaagatcaaagagatctgcatgtcccggaagaatattggccttttgaatcaagttttgattttttaggaacttcatttgatgcaaaattaaccccgaattttagaaagaaacgttaa

SEQ ID NO: 293117 - DNA, 232 bp, Unknown
  Bacterial polypeptide expressing nucleotide sequence isolated from the Sargasso Sea
atgggtaaatcattggttatcgttgagtctccggccaaggccaagaccattaaccaataccttgggaaggagtatgtggtccgatcgagtgttggccacgttcgtgatttgcccgtgagcgggtcaaaaaagaaagttgatcccaagaagcgtgctgagcaagcggccaagacccgcaaaatgtcgcctgcccagaaggcgcggtaccgaaagcagaaggcccgcagagatc

SEQ ID NO: 293118 - DNA, 1183 bp, Unknown
  Bacterial polypeptide expressing nucleotide sequence isolated from the Sargasso Sea
aatgaatagattatttatcgcggaaaaacccagtgtcgcgagggcgatagccgaagtgctaggagtcacacgcaaaggcaatgggtatattgaatgtggcgaagatacggttacatggtgtttcggccacatgcttgaacaagccgaacccgattactacaccccagctgacgcacccgcacgggacggcaaaaaaatctggcgcgtagaagatctgcctattatccctcaagattggattcttcaccccaaagcggatgcaaagacgcaattagagcaaattggggtattaataaaaagagcgcaagtcattgtaaatgcaggagatccagacagggaggggcaaaatctaattgatgaaactctaatataccatgcgaatagtagtcctgttttgcgttactggtcaagcggtatcgaccaagtatcagtagaacgagccttaaactcactgtttgataatgctgataaaaagactttcggggatgcttccattggtcgccaaagagcggattggttaattgggatgaaccttagccgggctttcactctacgagcggagcgcgggggttcccgggcattaatcacggttggccgagtgcaaaccccagtgttatcgatggtcgttaatcgtgaccgcgaaattgaaaactttacgccaatcccatttcacacattacgcgctaccttacaaagcagtgatggagaatttaacgccaagtggaaagctaaagaagatcaagccggactcgatagcgaagggcgattaacgaatacagaaatagcggacgcgctggtaacaagcatgacgggcgcagcagcatcgataacagaggcgaaatcaacggcaaaaaaggctcaccacccgttgacttactcgttatcaaacctgactgtaaccgccagtaaaaaatatggttattccgcgcaaaacgtccttgatacatgccaagctttatatgagaaacacaagctgaccacttatccgcggacggattgcggttacttgcctgaatcgcaatttaccgatgtaccgggcatcttggaatcactgaaaaaggttaaccctgagctgatccctatcattgataaagccgatccaaagctgaaatccaaaacatgggacgacagcaagttaaccgcgcaccacggcattatcccaactcacgaagtgcaaacaaaa

SEQ ID NO: 293119 - DNA, 580 bp, Unknown
  Bacterial polypeptide expressing nucleotide sequence isolated from the Sargasso Sea
gaagctattaatcaagttcgaagttttgtaactgacaattatggtgaaaattatttacctgatagtcctagagtttataaatctaaagctaagaacgctcaagaagctcatgagtgtattagaccaacaaatatttatcttacaccaaaagacataaaacaatacattaccctagaagaattcaagttatatgaaattatttggcaaagagctgtaagttcacaaatggcaagtgccgtattagatcaagtagcaatcgatataacaaatgaagataaaaaaattgttttaagagccaatggttctacgattaagtttccaggaatgtacaaagtataccaagaagcaaaagatgatgacaaagatgaagaaaaagaaactattctccctataatgaatgaaggtgagagtttaaatctaaaagaagttgaaaaaacacaacattttacctctcctccacctcgttatactgaggcaagtttagtaaaaaaactagaagagctagggattggaagaccatcgacttatgcttctataattaaagttctacaagataggagactatgttattttagataaa

SEQ ID NO: 293120 - DNA, 1005 bp, Unknown
  Bacterial polypeptide expressing nucleotide sequence isolated from the Sargasso Sea
tatgaattcattagtcattgttgaatccggagctaaggctgaaaaaattaaaagctttctaaataaaagttttcctgatcaaaattggtcagtagaggcgtgtgtaggacatgtcagggaccttgctgaaaaagaagatgcagtagacccaaacgattggaaaaatctaaaatgggaattttcaagcaagggaaaaaaagtaatgaaggagcttagaaagctttgtaaggagtctgatactatatatttggcaactgaccctgatagagaaggagaagcaattgcttggcatatacttaatgattttgaggaaaagggattattagaaggaaaaaaagtatataggataacctttaatgaaattacgcctgctgcagttgagagttctgttaagaaccctagagatacggtggattttaatttggttgatgcttacctagctagaagaatacttgatcatcttataggctttaaggtatcacctcttctttggaggcatgtctcaagagctaaatcagctggtagagttcaatctcctactttaaaaataatctgtgaaaaagagaatcaaagggatcatcatatacctgaagaatattggcctttcttggctacatttgattatcaaggatcttccttcgaagcttcattaaataaaatctcagatataaatataaaaaaaggattaaaggatgaagaagaggttaaccggaccaaaatagatttagatgcatctaactttcttctaacaaaaatagaaaccaaacttcaaacaagcaatcctcagcctccttttaggacttcttctatgattgcctctgctaacagccaatttggcatgtctgctaaacaaacaacacaggcagctcagagcctctttcttgctggacacattacttatcctagaacagacaatatatctatagcgggttcagaaatagatgatcaagaccaatatcctggatcgcctttagaggaaattagaaactatatattggttaattt

SEQ ID NO: 293121 - DNA, 823 bp, Unknown
  Bacterial polypeptide expressing nucleotide sequence isolated from the Sargasso Sea
ggaatgtacagagtttataaagaagcaaaagatgatgacaaggatgaagaaaaggaaacgatcctcccaataatgaatgaaggtgaggcattagatttaaaggatgtaataaaaaatcaacatttcacaatgcctcctcctcgctatacagaagcaagtttagttaaaaaattagaagaacttggcattggtagaccttcaacctatgcttccattataaaagttttacaagatagagattatgttattttagataagaaacgttttaatccgcatgatagaggacgaattgtatctatatttcttgaaaaatattttaatcaatatgtagaatacgattttactgctgatcttgaaaatcaattagatgaaatttctgatggtaaattagattggaaggatgttttacgaaaattttgggaaacttttaaacaattatgtgatgataccgttggtaaatcaaatagagaagtaattgatgtactcgatgatgctctaggagcgcatttctttcccccagaaggaaaagatgaaagtagaaaatgtccaacatgtgataatggtagacttggagtaaaagttggaaaatttggaggttttattggttgttctaattatcctgattgtaaatatacagtccaatttaatcaattgaatgacaaagatggcgcaactttaagtggtcctaaagaaattggtatttatccagaaacaaatgaaatgattacacttcgaaaaggtccttatggtttctatatgcaggtaggtgaaggtactccagaaaaaaaaccaaaaagagtttccataccccaagaattttgaa

SEQ ID NO: 293122 - DNA, 787 bp, Unknown
  Bacterial polypeptide expressing nucleotide sequence isolated from the Sargasso Sea
atgagttctaatattgtaattgttgagtcaccagcaaaagccaaaacaatagaaaagtatctgggtaaagattttaaagttatatctactgtaggtcatttaagaaaccttccatcaaaaaatggcgttgatgtttctaataattatcaaatgaagtacgagtacattgaaagagatcacaacaagcctaaacaaatagttagggaaattaaaaaaaatctcaaaggagcggaaaggctatatctagctactgatcaagaccgtgaaggagaagttattgcatggcatttaactgatattttagaagaagaaaaagcgttagatggaattgaaatcttaagaatagtttttagtgaaattacaaaaaaagcaatattagattctatagataagccaagaaaattatctcttgatttaatacatgcacaatttgcaagaagaagtattgactatctatttggcatgaatatctcaccgttattatggggaattggtatcagaaaaggatcagctggaagagttcaaagcccagctttaaaaatgatagtcgagcgcgaagaggaaataagaaaatttattccaatagaatattggtctattcaagctcagcttttaaaagacaaacaagggtttatttcatcattagtgaatattaaaaatgaaaaacttgataagttttttataaaaaataaagaacaagctgaagatattaaaaataatattatcgatttagctaataaagaattggctgtaagtaagatcacaaaaaaacaaaagaaaaggcaac

SEQ ID NO: 293123 - DNA, 121 bp, Unknown
  Bacterial polypeptide expressing nucleotide sequence isolated from the Sargasso Sea
atgtctaagaatttagtaatagttgaatcgccggctaaagctcgtactgtgggccgttttctaggaaagagctatgtggctaaagcctcaatgggccatattagagatttgcctaaaaaaa

SEQ ID NO: 293124 - DNA, 775 bp, Unknown
  Bacterial polypeptide expressing nucleotide sequence isolated from the Sargasso Sea
gcagctagaaaatatatatctgaaaactttacaaaagaccatttaccaaaagatccaaatttatatggagataataaaaatgcacaagcagcacatgaagctattaggccttctggagatatttttactgaaccaaaagaattactcggaaaatataaagaagatagcgatgaatataaactttattctttaatttttaatataactgtcgcctctcaaatgacagatgccaagggagtaacaaaaagcatagaaatagaagtacaagatgaggcttttgggccaattattcttggaatttctggaacaacatggacttttggaggttatagagatttaattaaagatttaagtgaaaaatctcaagaattaccagaccttactgaaggtgatttgataaatataataaattccaaatcagaagaaaaatttactacgccaccaaatagatattcttctacttcattgattaacaagcttgaagagctaggaataggcaggccatcaacatatgtttcaatcattgaaagtattacttctgtctttattaattctgaatctagtttaaagccaagaattcttgctattgcaatgattaataattttatgaaaccttattttgatttatacatagattatgaattttcaaaactaatggaagatgaattagacaaaatacttgaaagtaagaatccagaagaggcaaaagttaaatttttagaagattcttacaccaaaataaaaaaacatattgaaggatacgaaaatgcctgat

SEQ ID NO: 293125 - DNA, 982 bp, Unknown
  Bacterial polypeptide expressing nucleotide sequence isolated from the Sargasso Sea
atgaacaacattttacacaaccaccaccaaggtttttcagaggctagtttagttaaaaaacttgaagaattagggattggtcgaccctctacgtacgcaagtattatctctgtaatttcaaatagaggttatgctgatatattaaataaaagattttttcctactgatagaggaaagttgctatctgcttttttagagaagctattttctaaatatgttgattacggatttacagcaggtttagaagatcagcttgataatattacatctggcaaggaagagtggattaaagtccttgataacttttggaaagattttaatcttaacgtagcaaatgttaaagaaaaaagaactagagaagtattggatttgttaaacgaaagcctcggtactttaatttttgagtctgatgaaaatggtaaagttcaaagaaaatgtaaattatgtagtactggagagttaagtttaaagaatagttttcggggtggtgcttttattggttgctcaaattatccagagtgtaaatttactagaccattgtctaaatctaaagcaaatgatcaatatgcattagcagaaccaaaatttattggtaaaaatgataatgagaaagatatttatttaaaaaatggaagatttggtccttatcttcaatatgaaattgaagctgatcagatgtcaattaaaaagaaaaaaaagaaaaaggaaaatgaaaattttaaaaatgtatctatacctaaaggtataaatattgatcaaattgatttagaaaaagcaaaatatttatgttcactaccaaaagttataggccagcatccagaaaatggtaaagatattacaattaactcaggaagatttggtccatatttaaaatgtgaaaataaatcagcaagacttgaaaatgtagatgaattattcacaataggtttaaacagagccattacattaattgcagaagcaaaaccaggcagaatatcatcat

SEQ ID NO: 293126 - DNA, 650 bp, Unknown
  Bacterial polypeptide expressing nucleotide sequence isolated from the Sargasso Sea
tattaaccaagttcgaggttttgttattgataattatggcgcaaactatttacctgaagttccgagagtttataaatcaaaagctaaaaatgcgcaagaggcacatgaatgtattagaccaacaaatatttacctaacaccaaaagatattaagcaatacattaccttagaagaatacaagttatatgaaattatttggcaaagagctgtaagttcacaaatggcaagtgctgtattagatcaagtagctgttgatattacaaacgaagataaaaaaattgttttacgcgcaaatggatcaacaattaagtttcctggaatgtacaaagtttatcaagaagctaaagatgatgataaagatgaagaaaaagaaacaattcttcctgccatgagtgaaggagagagtttaaatttaaaagaagttgaaaagacacaacattttacctcccctcctcctcgttacaccgaagcaagcttagttaaaaaacttgaagaacttggtattggcagaccatctacttatgcttctattattaaggttctacaagatagagattatgttattttagataaaaaacgttttaatcctcatgatagaggacgaatagtatcaatatttttagaaaaatatttcaatcaaatatgttgaa

SEQ ID NO: 293127 - DNA, 841 bp, Unknown
  Bacterial polypeptide expressing nucleotide sequence isolated from the Sargasso Sea
atgaatgtagttattgtagagtcgccttcaaaggcaaaatcaatcaacaaatatcttggagattcattcaaggttttagctagcgtgggacacgttagagatctttctgctaaaaatgatgcaatcgataccgaaaatgattttcaaatgaaatgggaaactagtgatagagggaaaaaagtaataaaagaaataaccgatgtagcaaaaaaatcagaaaatttatatttagctaccgatcccgatcgtgaaggagaagctattgcatggcatgttgaaaaactattaagagacaattcctcactatcgaaattaaatattcaccgagtaacgtttaatgaaattacaaagaatgcagttttagatagtttgaaaaaaccaagagagattgatgaaaacttggtaaatgcttatttagctaggagagctctagattttcttgttggctttacattatctcctgtgctgtggcgaaaacttccaggctcaaaatcagcaggcagggtccaatcagttgctttaaagattattagtgaaagagagcttgaaattgaaaaatttattcctcaagaatattggtcacttcaagggaagtttactaataaagaagagaaaataattaattcaagacttactgtctatgaaggaaacaaagttgataaactagatataaaagatgaagcccaagcaacaaaaatttataacaacattataaattcaaattttaccgttggaaatattacaaaaaaagaagcaaaaagaaatccctaccctgcttttacaacttcaacaatgcaaattgaatcaagtagaaaattaggtttaagtgcaaaccaaacaa

SEQ ID NO: 293128 - DNA, 1126 bp, Unknown
  Bacterial polypeptide expressing nucleotide sequence isolated from the Sargasso Sea
agatagcattactgatcttcgtaaaatgataaataatgagtatggtgatagttattgtcctgaaaatttaaaaatttataaatcgaaagtagcaaatgctcaggaagctcatgaagctattcgccctactgatgtaaagagaatgccaaaaacaattaaagcatatttagatgatgattgttataaattatatgatttgatttggaaaagaactgtatcatctcaaatggcttctgcaattataaacaaaactattatagatgttgaaagtatcaataaaaccgatattcaaaactttgttagtctaagagcaaatggttcggtaattaaatttgatggatttcttaaaatttataatgagggagttgatgaaaaaaactcttctgaaatggatgataatataattccacaagtaaatattaatgagaaattaatagcagaaaaaaatacatctgagcagcattttacacaaccacaacccagatacactgatgcaagtataataaaaaaattagaagaattaggaattggcagaccttcaacatacgcaagtattttagagaaattgcaggatagaggctatgtattcaaagatggatcaagatatgttgctgatgacattggtaggatagtaacaagtttcttagaaaattactttgaaaaatatgtagaatactcatttacagctgatcttgaaaagaaattagaccttgtatcagaaggaaagcttgattggaaaattttattaaaagagttttgggagcaatttaaagttgcaatagacaatacatctgaaattcaaagaacagatgttattcaaaaaattgatttagcattagaaaaccacttttttaacctaaatgatgaaggaaaagtcgatagggtctgcccaacttgttcaaatggttccttatcacttaaagtgggaaaatttggatcatttatcgcttgctcaaattatccagaatgcaaatatactagaaaactatctgaaaatgacggtgatgaattaaatgggagctctggatttgatggagaaaagtcttttgggtttgatccagttacaaatgatgaagtatatttgaaaaaaaggaccttatggcatttatttgcaacttggaaatga

SEQ ID NO: 293129 - DNA, 1291 bp, Unknown
  Bacterial polypeptide expressing nucleotide sequence isolated from the Sargasso Sea
agatgatgatgaaaatattttaccaactgtatctaaaggaccaatcaatattgaggcactaatagatgaacaacattatacacaaccaccaccaagatattctgaagccagtttagttaaaaagcttgaagagcttggtatagggaggccttctacttatgcaagtatcatttctactattgcaaatcgaggctacgcagagatattgaataaaagattttttcctacagatagaggtaaattaatttcagcctttttagaaaaattattctcaaaatatgtagattataactttacagcaggattagaagatcaacttgatgagatcactactggaaaagaaagttggattaaagttttgaaacttttttggaaagacttcaataataatatttcagaggtcaaagaaaagagaactagagaggtgttggatttacttaatgatagtctgggtgaattaatttttgataaggataatgagggtaacgtagtaagaaaatgccaattatgtagttctggaacacttagtttaaaaaatagcttcagaggtggcgcttttatagggtgttcaaattatccagaatgtaaatttacacgacccttatccaaagcaaaagctgctgctcaggcacaattagctgaaccaaaatttataggaaaacataaaaatggaaatgatatatatttgaaaaatggtagattcggcccctaccttcaatacgagaaaatccagtctgatatagaagttgaaaaaattagtaagaaaaagaaaaaaactaaaaaattaaagtcagatgtaaatgaacttttaaagaatgtttcaataccaaaaggattagaattagagagtattaatttggaaaaagctcaatttttatgttcgctacctaaatctttaggaataaatccagataatcaaaaagagattacattaaatgtcggaagatttggtccttacttaaaatgtgaaaataaatcagcaagaatagaaaatgtagaggaaatattttccataggtttaaatagagcaataatattaatagcagaagccaaacctggtcgaatatcatcttcgatgataaaagatttgggagaacatcctgaggataaaaaacctgttagagtcatgaagggtcagtatggaccttatataaaatataaatcaatcaatgcaacaatccctgaagaaaaagatcctactgaattaacaatggaagaagctttaatattgattgagaaaagaaaagaatacgataagagtaaaaaatcaaaaggtaagaaaaaaaaatga

SEQ ID NO: 293130 - DNA, 1574 bp, Unknown
  Bacterial polypeptide expressing nucleotide sequence isolated from the Sargasso Sea
ctatattagaacagactcaattgaaatcgatgaaggaaaggtgccggctgtaagatctcaggtagcgagcatgttcggtgaagactttgtccaacccagaaactataaaaataaaaaagaggccaagaatatccaagaggcacatggtgcaataacccctgttgatataagtcttgtcccagctgatgccaaaaagattttgaaagatgatgagttcaaactctatcagctaatctggcagagaactgtcgcatcccaaatgaaggatgcaatctttgaaagaacatctatcgagtttgtgcctaccggcgatgagagcttggcaacattttctttttctgaccaggaacttattttcagtggttatttagaagcgactcaagaagaagttacaaacaataagccgcctttgatcaatgagaatgatgcaattggatttaaggagcttgtaaaaacccagcattttactgatccgcctcctcgttataatgacgcgagcatgattaaggcgcttgaagaaaaaggcattggaaggccgtcaacatatgctgacatactctccaagctgacagacagaaagtatatctggcttaaacaaaaaagatacgagccatcagatatgggtcgtcttgtgagcaattttttaaatgaacgcttcggtggatatatcagtgatgagtttacttcgaatatggagaacaatttggatgaaatctcaagtgggcaaagaagcaagcaagatgttctaaatgccttttggtctccattaatagacactgttgacgaggtcagtggcgtggttacaagaaaagatgtaaacccacaaagaccgctgggtagccacccagaaacaggtcgtccagtattcgcaagaatgacaaaaaacggtcctgcggttcaggtgggtgatatggaaaaagatgagaagcttgagtgggcagctataaaagaggggcagtcacttttttcaatcaacctcgaaacagcttgtgagcttttaaacaagccaagcgagaatattcttggctaccacccagagaccaacgagcctgtaatcgttagagaagcaagatacggtccgaccgtgcagcttggctcaaaagaggatggcaacaaaccaagatatgtgggcctacttaaaacagacacgatagaagagatgacctttgaaagggctttggattacttgagccttccaaaagagctaggtgttgaccctgaatctggagaaaaaattcttgtcaccattggtccctatggtccctatttcaaacgtgggtccaagaactttagaggaagaaaaggcctagatcctttttctgttgatcttgaagaagctctctcgagcatatcgagctcaaaaggatctggagcgctaaaaacatttgatgacagccctgttaaaattgtagatgggagatggggcgcctatgtcacagatggcaaaaaaaatgcctctataccaaaagacaaggaccctgagagcctggaactacaggactgtctcgagctattagaaaaggctcctgccaaaaaaagaggtaagagaaaatcaaagaaaaaaaccaagtagt

SEQ ID NO: 293131 - DNA, 211 bp, Unknown
  Bacterial polypeptide expressing nucleotide sequence isolated from the Sargasso Sea
atgagtaaattagtgatagtagaatcgcctgcaaaggcaaaaacgatccagaaatatctgggcgatggttatactgtcttaccaaccattggtcatattagggaacttccaaaaaaggatgcgattgatccaaagaatggttattccatgaaatatatagttagcccaggaaaggaagacgcagtaaaaaagattaagagtgatgcaaaaa

SEQ ID NO: 293132 - DNA, 1092 bp, Unknown
  Bacterial polypeptide expressing nucleotide sequence isolated from the Sargasso Sea
tcgtgagatttgatggatttcttaaagtgtatcaagttcaagaaactgacgaagatgcaaaaaatattttgcctgaagtcaaagtcggagaagaaattagtatacttaagctaagtgatgaacagcactttacagatccaccaccacgatactctgaagctagtttagtgaaaaagatggaggaattaggaatagggagaccctccacctatgctagcattatctcagtattatcaactagaaattacgtcgaattgattaataaaagatttaatccaactgacagaggtaagctaatttcagcctttttagagaaattgttttctaaatacgtagattataattttactgcagacttagaaaatcagctagatgaaatcactagtggtaaaatcgaatggattcaagttttagataatttttggagagatttctacgaaaatgttggaaaagtaaaagaaaaaagaacaagagaagtattagacttgttaaacgaaagtttaggagctttaatatttgagagaaataatgatggtaacattgatagaagttgcaaattatataacaaaacatgtgtttctggtgaaggaacattaagtttaaaaaatagttttagaggaggagcttttataggatgttcaaattatccagaatgtaaatttactagacctttatctaaagctaaagctgcagctcaatataatttagcagagcctaaattactgggtcaaaatgaaaaaggtaaagatatatatttaaaaaatggtagatttggcccctacttacaatatgaaaaagaaaaagacgaattagaaaaaaaaaagaaaaaaggtagaaagaaaaaaaatgagaatgaacatcttcaaaatgtgtcaattccaaaaggtatagatgttgacagtattgatttagataaagcaaagtatttatgctctcttcctaaagtattaggacaacaccctgataatggtcaggatataacattaaattctggaagatttggtccttaccttaatgtgaaaataaatctgcacggctttgaaatattgaagatcttttttctatcggaaatcatcgggggcatacattaat

SEQ ID NO: 293133 - DNA, 847 bp, Unknown
  Bacterial polypeptide expressing nucleotide sequence isolated from the Sargasso Sea
tatgagatcactagtaattgttgagtctggtgccaaagcaaaaaaaataaaaggctatcttgattccaactttcccgatattgagtggaaggttgaagcttgtgtgggacacgtgagagaccttgcggataatgagaatgctgttgatccatatgattggaataacctcaaatgggaattttcttcaaaaggcaaaaaggtcatgagggatttaagaaaattatgtaaagaatctaatcttttgtaccttgcaactgaccctgacagagaaggagaagctattgcttggcacttgttgagtgactttgagaataaaaaactgactaaagatatcgatgtaaagagagtcactttcaatgagataacttcctcagcaataaagaaagctatcgagtcgccgagggaaatagatcaagatctagtagacgcatatttgacgagaagaatcttagatcatttgattggtttcaaagtttcacctctgttgtggagacatgtatcaagagcaaaatctgcagggagagttcaatctccaaccttaagaattctttgcgaaaaggaagatgagagagatttgcatattccagaagaatattggcctttcgaatcgagttttgattttttaggcactgcatttgaggcaaagttaactcaaatttcggaacgaagcatcaataaagaacctctaaaagatgagggggaagttaaaaatttgattgatggattaggaactgcgagtttcaagttaagaaatatcgagtctaaagcccagtcaagcagtccaaaaccaccgtttagaacttctacattacagatgtcagctgcgagtagcttaggcttacagcag

SEQ ID NO: 293134 - DNA, 1266 bp, Unknown
  Bacterial polypeptide expressing nucleotide sequence isolated from the Sargasso Sea
aatgctacctgctaaattgaaacaaacatctgtaattatttcaaatactgatacagatttcagagcaagcggacaaattatagtttttcctggttatatgaaaatttatgttgaaggaaaagataatcctgatgcagaactagcaaacaaagaaaagctattaccagcaattgttgtaagtgaagaattaatttgtagtgaaattgtatctcaaattcataaaacaaaaccacctgcaagatttactgaagcatctctagttaaggagatggaaatgaatggcataggtaggccctcaacctttgcatctatactcgatacgattgtaagaagaggctatgttgagaaaacaaaaagtaacctatcacctacttatttaggtttagcaattacccaactgcttgaaaaccatttttcaacgttagttgataaagactttactgcaaaaatggaaaatgaattagatgcaatttctagaggagaattagaaccaataccttttatggaaaatttttattttgggaataaaaaacatttaggtcttgaaaaaatgcttgaagagaaagtagatataggtaaagcgtgtacaatccctctaccaataggatatgatgatattgttgaagctaggataggtaaatttggtccttaccttcgcaaggaagaagacactaggtctatccctcaaaacatatttgttggtgacctaacggatgatattattgattcactttttaaagatcagcgtgaagatgaagttttgggaaaagatccggaatcgaaagaagatattttattaaaaaaaggaccgtatggtcattacgttcaattgggagagactacaaaacgtaaagcaattccaaaaggaactgaaattgactctgttgatctcgaacttgcaataaaattaatttctttaccaagagtagttggtaagcatccagatactggagtagatattactgcagattatggaagatatgggccttatctcaaaatggataaatcaaatgctagactaattggtcctgcgactccattgactgtaacagtagatgaagcagtagaattattgagtaaatcaaaaaaaggatcgagcgaattaaaaacacttggtaaacatccagatactggtgaagaattagtattaaaggaaggtcgttatggcccatatatatcagatgggaaattaaatgctgctttaagatcaggtaatgaccccaatgctattacacttgatgaggcagtagaattaatcaatttaaa

SEQ ID NO: 293135 - DNA, 1143 bp, Unknown
  Bacterial polypeptide expressing nucleotide sequence isolated from the Sargasso Sea
attttactcaacctcctccgagatatagtgacgcaagtttaataaaaaaaatggaagaattgggtataggcagaccttcaacatatgcatctattttaagaactttggttgatagagaatatgtacaaaaagaaaaaaatcgatttatacctcatgaaagaggaagaatagtaacagcttttttaaacaacttttttggtaagtatattgaatatgacttttctgcggagttagaaaaacaattggatattgtttcagatggaaaacttgactataaaatatttctaagagaattttgggataattttaaaattcatttggataagatgcatgacttaaatagagaaaaaataacaaaagctattgaaaatgaattaagtgaattattttttccgaataataaaaataataaaaaaagcaatgaattcagtaaaaaatgtccaaattgccctgatggaaaccttggcttgagtattggtaaatatggagcatatatatcatgctctaattacccagaatgtagatataatagacaaacagcaaataatgaaaatgatgatgaaaatgataacaataatttgtttcaacctgaaaatgatggaatacttggcgtagataatgaaacaggtttaaatgttattattaaaaaaggtccatatggtctttatctgcagttgggagaaaataaaaaacctaaaagaactagtataccaaaacttatagatccaaaatctattgatttagataaggctctaaaactattatcattgccaagaaatattggtttacatcctgaaacctcaaaagagattattgctggaattggaagatatggtccatacattaaatatgatattaattttattagcctgccagcagatgaaaccgttattaacataggtataaaccatgctgtaattttaataagtgaaaatagtcaaaaacttggtaaagttctgggtaaacatccgatggataatgttgaagtattagctaaatctgggagatttggaccatatgtagaacatggtaaaaacagagcaacattaccaaaaactcttaacttgagttcagttaccctagaagatgcaatagagttaattaacaaaaagttacttaagtctaaaaaaaataaaaaataat

SEQ ID NO: 293136 - DNA, 517 bp, Unknown
  Bacterial polypeptide expressing nucleotide sequence isolated from the Sargasso Sea
atgtcaaaaaatgaaaaactattaattattgtagagtctccatcaaagaccaaaacaatatcaaaatatgtagataatgcatcagttattgctagcgtaggtcatttcaaagatcttccaaaaaaagatatggggatagatattgataataattttgctatgcaaatagaaagcatgccagataagaaaaagtttctatctcaattaaaaaaagaggtgaaaatagccgatcgcattttaattgccactgacccagatcgtgaaggtgaagcaattgcagccgatattgcttctgaaatcagaggagatatcgaaagagttgaatttactgaaataacaaaacaagctgtgttagaagcagttaataattctcgaaaaataaattatgatttggtagatgctcaacgtgccagaagagctattgaccgtattgttggtttttcattttctccagtactttggaaaacattaagatctttaaaaaataaaggactatcagctggtcgtgtacaatcag

SEQ ID NO: 293137 - DNA, 1090 bp, Unknown
  Bacterial polypeptide expressing nucleotide sequence isolated from the Sargasso Sea
aggacgaggaaaggccgggtgctaaacagggaactggcagagctggtacaacgcaaaaccagccatcaacccgctgtgtgggagcaggtgcagcaacaaccgaaaaaacagtacgcgcctttaccttttagcttgtcggctttgcaaattgatgcagcaaaactttatggcatgacagcgcagcaagtgctggatacctgtcagcaattgtatgaacgtcatcaattgattacttacccacgttcggattgccggcatttgccagagcagcaattttgtcagtctgctgctgtctgccgcgctatagtagccaatagtccggagcttgcagagatgcaacagcaagccagtatcagcctgcgcagcaaagcatgggatgacagcaaaattaccgctcaccacgctattattcctaccgataaagcgctgaaatcagcaagcctgaatagctttgaagctaaattgtattggctgatagcgcggcagtttttatggcagtttttcccgccatactgctatcttgagcagcatgcgctgattaaaattgccggaggtttgtttaaagctcaggccaggctggagcagtctttgggctggaaagctttttataaaaccagccagaaggaggagcaagatgaggattctgacgaacaacaaagtttgccgcctttaactaaaggccagcaattgcagtcgggccaatcggaattactgtcgaagcaaactcagcctcccgcttattttactgatgctactttattggccgctatgaccgggataagccgttttgtcaccgacccggaattaaaacggatcttaaaagaaaccgcaggtttaggcactgaagccacccgggccggtattctggagctgttatttaaacgtggttatttgcagcgacagggcaaacaaatccgagccagtcaattggggcgggtttttatacaaagtttgccacaacgtattacggcaccggatttaaccgccttatgggaagctcaactggaacaaatttgccaccagcaacaggactatccagagtttatggcgcagctgcagccagaaattatccggctggtacaacaggcgc

SEQ ID NO: 293138 - DNA, 1057 bp, Unknown
  Bacterial polypeptide expressing nucleotide sequence isolated from the Sargasso Sea
aaaaggcattggaagaccgtcaacatatgcatcaattatatctgttttgcaggacagaaattatgtaagactagataaaaggtatttctatccagaagataaaggtagattagttacatcttttttagaaagtttctttagacaatatgttggttatgacttcacagcccaattagaagaaaatcttgataaagtttcaaatggtgaaatgaattggaaagattttttaaataatttctggggagagtttaactcatgttcagagaaagctttagaattaagaacaagagatattttggatcaactgaatgaaagtttaggaaatcatatctttaaagatgataaaggagaaattaatagaaagtgtcccaaatgtgaagaaggtatactaagccttaaaacaagtagaaatggcgcatttataggttgttctgcatatcctgattgtaaatacacaagaacatttggatcaaatagcaatgttgaaccaagaattataggtgttcatcctgaaacaaataaagagattaatctattaataggcagatatggtccttatctagaaatacaagcggatgatccagatgcaaaacccaaaagatcaacaatccctaaaaccatagatccagatgaggtaaatttagaattagcattaaatcttttatcacttcctaaaattattggaatacatccagaagatggcaacgaaataaaagctgggttaggtagatttggtccttatgtcgttcatgaaggtatatttgcgagtttaacaaatgttgaggaattattttcaattggattaaacagagctattgatttaattgaagagaaaaaagcaaaccctggaagaggtagagcaagtaaaacaattaaagagcttggaaaacatcctaaagatgaaaaagatattgtcttaatggagggaagatacggtccttttgtaaaacatggaaaagtaaatgcgtctataccaaaagatatcaatttagatgatgtaaatctagagttagctgtagaattgataaaaaaccgaaaaaagaaaaaaaagaaataa

SEQ ID NO: 293139 - DNA, 1906 bp, Unknown
  Bacterial polypeptide expressing nucleotide sequence isolated from the Sargasso Sea
gctgcccgccgccgaaacgatcgtcgcggcctgccgcggccagattggcacggtgacggaagaatcgaagccgtccacgcaactgtcgccggcgctcttcgacctgaccagcttgcagcgggaggccaacggccgcttcggattctctgccaagaacacgctcggtcttgcccaggcgctgtacgaaaagcacaaggtgctgacctatccccggaccgacgcgcgcgcgttgccggaagactatatggatacggtcaagcagacgctcggcatgctcaaggagagcaacaactatctgccgtttgccaagcaggtgctggacaagggctgggtgaagccgaacaagcgcatcttcgacaactcgaagatcagcgaccacttcgcaatcatccccacgctgcaggcgccgaagaatctgtccgaaccggaacagaagctctacgacctggtggtgaagcgcttcctgtcggtattcttcccggctgccgaattccgtgtgacgacccggatcacggaagtggtcggccatcacttcaagactgaaggcaaggtgctggttgagccgggctggttgcagatctacggtcgcgaaatcggcggtgaagacgcaaacctggtcccggtgcagaaagacgagaaggtcaagacggacaagatcgccgcccagcaactggtgacgaaaccacccgcacgctacaacgaagcaacgctgctgtcggccatggaaggcgcgggcaagctcgttgaagacgacgaattgcgcgaagccatggcggccaaggggctcggtacgccggccacgcgcgccgccattatcgaagggctgctcggcgaaaagtatctggtccgcgaaggccgcgatctgatcccgaccgccaaggctttccagttgatgaccctgctgcgcggtctcggtgtgaaagaactgactgcgccggaattgaccggcgagtgggaatacaaactctcgcaaatggagcggggcaacctgccgcgcgacgcgttcatgcaggaaatcgcccgcatgacgcagaccatcgtcaagcgcgcgaaggaatacgattcggacacgatcccgggcgattatgcgacgttgcagacgccgtgtccgaattgcggcggccaggtgaaggaaaactaccggcgcttcgcgtgctcgaaatgcgagttctcaatctccaagattccgggcggtcgtcagttcgaaattccggaagttgaagagcttttgcagaacaagacaatcggaccgctgtcgggcttccgcagcaagatgggccgtccgttctccgcgatcctgaagctctcgctcgacgacgagatcaagaactacaagctcgaattcgacttcggtcaggattcgggtggtgaggacggtgaaccgcctgacttctccgatcaacagccggtcggcgcatgtccgaagtgcaaaggtcgcgtgttcgaacacggcatgagctatgtctgcgagaactcggtcgccaatccgaagacttgtgacttccgctcgggcaaggtcattctgcagcaggaaatcgcccgcgagcagatggctaaattgctcgaagaaggacgcactgatctgctgacgaacttcaagtcgtcgcgtaccggtcgtaacttcaaggcgtttctcgtcaagcagaacgacggcaagatcggcttcgagttcgagaagaaagagccttcggccaaaacggctgcgaagaccgcagcggccaaggcagcagcgaaggcggcgcccgagtcggacgacgaagatgcatcggtcgcagtgaaggctgtgcctgccaccaagaaggttgcggcgaagaaggcgcccgccaccaaggccgctgctacgaagaccgcagcggccaaaaaagcacccgcgaagaaaacggcagcgcgcaaaaccgggtcgtaa

SEQ ID NO: 293140 - DNA, 1423 bp, Unknown
  Bacterial polypeptide expressing nucleotide sequence isolated from the Sargasso Sea
tattaccctagaagaattcaagttatatgaaattatttggcaaagagctgtaagttcacaaatggcaagtgccatattagatcaagtagcaatcgatattacaaataaagataaaaaaattgtattaagagccaatggttctacgattaagtttccaggaatgtacaaagtgtatcaagaagcaaaagatgatgacaaagatgaagaaaaggaaaccattctccctataatgaatgaaggtgagattttaaatctcaaagaagttgaaaaaacacaacattttacctctcctccacctcgttattctgaggcaagtttagtaaaaaaactagaagaactaggaattggaaggccatcgacttatgcttctataattaaagttctacaagatagggaatatgttattttagataaaaaacgttttaatcctcatgatagaggacgcatagtttccatatttttagagaaatattttaatcaatatgttgaatatgactttacagctgatttagaaaaccaattagatgaaatttcagatggtaaacttaattggaaagaagttattcgaaaattctgggaaacattcaaacaactttgtgacgaaacagttggcaaatcaaatagagaggtaatagatgtattagatgaagcattaggacctcatttttttccaccaaacggcactgatgaaaaaagaaaatgcccaacttgtgagaatggaaggcttggaattaaagttgggaagtttggaggttttattggttgctctaattatccagattgtaaatatacagtacagtttaatcaattaaatgacaaagatggcacatcactaagtggccccaaagaaattggtatttatcctgaaacaggagaaatgattacattacgaaaaggtccatatggattttatatgcaaattggtgaaggaacaaaagaaaaaaaacccaaaagagtttctattcctaaaaattttgaaccaaatgaaattggtttaaatacagctattcaattaatgggactgcctcgtaaattaggattccatccagaaacaaacaaaactgttagtgctggtattggtatgtatggaccatatattttacatgacaaaaaatataaagctcttgaaaaaacagataacatattagatattgagcttgaaagagcaattgaactaatcgcaaaacctacacaaagaggtaatgctacattaaaaacatttggcgaacatccaacagaaaagaaaaacataacagctcatgatggaaaatttggaccttacgtaaaatgtggaaaaatcaatgcatctattcttggtgaccaaactatcgatagcttaaaactagaagatgcaattagattaattgatgaaagaaaaaccaaaatgggttcaaaaaaaaagaaaaaaaaagttaaaaattga

SEQ ID NO: 293141 - DNA, 931 bp, Unknown
  Bacterial polypeptide expressing nucleotide sequence isolated from the Sargasso Sea
agatgctgttgtggcttttagagattatatcaaaaaagaaatcggtaatgaatattgccctgaaagtgccttaaattattctggtaaaaaagcaaaaaatgcacaagaggcacatgaagcaataagacccaccgatgttatcagaactcctcaaagtgtaaaaaagtatctaagcacagatcaaaataaactttatgatttaatatggagtagagctttatcttctcaaatgcaatctgctaaatttgatagaaatactataacgattaaatcaaataatagcgatacagtatgcaaagcaagtggatcagttctcaaatttgatggatttttaaagatatataataatcaaggtaaggatgatgatgaaaatattttaccctctgtgtctaaaggacttgtaaatattgagtccttaatagatgaacaacattttacacaacctcctccaagatattctgaggctagcttagtaaaaaaactagaggaattaggcataggaagaccatctacttacgcaagtataatttctacgatagcaaatagaggttacgcagagatattgaataaaagattttttcctactgatagaggaaaacttatttcagcttttcttgaagaattattctcaaaatatgtggattataactttactgcaggattagaggatcaattagacgagattacaactggtaaagaaagctggataaaagttttggagctgttctggaaagacttcaataacaatgtgactgaagtaaaggaaaaaagaactagagaggtcttagatctattaaatgatagtttaggagatttagtttttgataaggatgataaaggaaatattgtaagaaagtgtcaattatgtaattcagggacactaagcttaaaaaatagcttcaggggtggtgcgtttattggttgttcaaat

SEQ ID NO: 293142 - DNA, 205 bp, Unknown
  Bacterial polypeptide expressing nucleotide sequence isolated from the Sargasso Sea
atgtcaaaatctttagtaatagttgagtcaccggcaaaggctaagaccatatcaaaatatcttggttcagaatatattgttcaatcaagtgttggtcatatacgagatttaccaaaaaaaggtactggtattacaaagagatcttcaatacctaaaaatattagtcctgaggaaaaagcaagactaaaagcagtaaacgatagaa

SEQ ID NO: 293143 - DNA, 877 bp, Unknown
  Bacterial polypeptide expressing nucleotide sequence isolated from the Sargasso Sea
gcacacgaagctataagacctacagacattgaaagaaaccctgatagtttaaagaaatatttgagcactgatcaatttaaattatataatttaatatggtctagagctttatcatcacaaatggaatctgctaaatttgatagaaaaactataatgatagaatctaaagacaaatcaaatatattcaaagcatcgggatcggttattaagtttgatgggtttttaaagctttataaaatagaaaatgatgatgaaaatgaaaaaattcttcctgatgtgtcaaaaggtttagttaacatagataactttatagatgaacaacattttacacaacatcctcctagatattctgaggctagtcttgtaaaaaaattagaggagctaggaataggccgtccctctacttatgctagtataatttctgtaatttcaaatagaggctatgctgatattgttaataaaagattttttcctactgatagaggtaaattattatctgcttttttagaaaaattatttaccaaatatgtagactatggatttacagcaaatctggaaaatcaattagatgatataacaagtggcaaagaagattgggtaaaagttcttgagcagttttggtctgatttcaataaaaatgttagcagtgttaaagacaaaagaacacgtgaagttttagatttgctgaatgaaagtttgggtgaattaatttttgaagtcgataataatggtaaaatagaccgtaagtgtaaattgtgtgataagggagagttaagtttaaagaatagctttagaggtggagcttttatagggtgttctagttacccagaatgtaaattcacaagacctctatctaaatcaaaggctgcgaacaata

SEQ ID NO: 293144 - DNA, 924 bp, Unknown
  Bacterial polypeptide expressing nucleotide sequence isolated from the Sargasso Sea
tctgtagctcttagattattaactgaaagagaacatgaaatagaaatttttaaaccggaagaattttggacacttaatttaaatttcttaacaaaggaaaatttaaatataaatacatctattactcaattagatggcaaaaaaattgaaaaattcacttttaaaaataaagatgatattaataacgcattagatttaatcaaaaataaaaaatataatattactgatataacctctaaaatttacacaagaaacccgtcaggtccttttactacttctacattacaacaaacatcatctagtaaacttggttttggagcatctaggacaatgcaaatcgcccaaagattatatcaaggtattgacattgatggcgaaactgttggattaattacttatatgcgtacagatggtacaaatatatctaaggatgctgtaactacttttagaaattttattactcaaaattatggtgaaacatatttaccccccttacctttaaattattcaggtaaaaaggcaaaaaatgcacaagaagcacatgaagctatcaggccaacagaaatcactcgagtccctgaagaaatgaaaaaatatttaagtatagatcaatacaaactttacaatttaatatggtcaagatctttatcctcacaaatggagtcagcaaaatttgatagaaaaacaataacaataacatccgaagataataaaaatatatgcaaagctagtggttcaactttaaattttgacggttttttaaaggtttcaagattagaagaaaatagcggtgatgaaaatatattgccagatgttgataaaggtaatgtagagtttaaagaccatacagatgaacaacatttcactcagccaccaccaagatattcagaagcaagtcttggtaaaaagttagaagaaattagg

SEQ ID NO: 293145 - DNA, 247 bp, Unknown
  Bacterial polypeptide expressing nucleotide sequence isolated from the Sargasso Sea
atgtcaaaatcacttgtaattgtagagtcacctgcaaaggcaaagacgatatcaaaatatcttggtaaagaatatattgttaaatcaagtgtaggtcatattagagatctgccaaagggaaaatcaaaagctaaaagacaaaattcaataccaaaagatgctagccctgaagaaaaagctagattaaaaatagagcaagaaagaagaaggataattaggagaatgggtgtaaattccctgattgatt

SEQ ID NO: 293146 - DNA, 922 bp, Unknown
  Bacterial polypeptide expressing nucleotide sequence isolated from the Sargasso Sea
atgagtaaattagtgatagtagaatcgcctgcaaaggcaaaaacgatccagaaatatctgggcgatggttatactgtcttaccaaccattggtcatattagggaacttccaaaaaaggatgcgattgatccaaagaatggttattccatgaaatatatagttagcccaggaaaggaagacgcagtaaaaaagattaagagtgatgcaaaaagtgctgaacaagtaatactcgcaacagacccagacagagagggagaagctattgcttggcatgttgctgacattattacaaaagcaaaatttgagcagccggatattaagcgagctattttttatgaaataagtgaaaaagcagttaaagccgccgtgggcaatcctggcgagatagccatggatcttgttcagtcccaagaaaccagaagggccttagatagacactttgggttttctttatcccctttgttatggcgactgtttcctagcaacaatcactcagctggaagagttcaaagtcctgcgctaaggatgattgttgagcgtgaaagagaaattgaagcttttgttccgcaagaatactggaccatttcagcgaaactagaaaaagatggtgaatacgatgcgaagctatcagtttttaaagaagagactattaaaaagttcacatttgattcaaccacactcgttgaagaggcgagcaaggctttggaggacagttgtaaaaaaggccttattgccaagtcgatcaccaaaaaacacattaagcgttcgccgagagagccttttagaacctctgtgcttcagcagcaagcatccaataggtttggctttacaccaaaaaggactatgcaaattgctcaatcgctctatactcgtgagggcggtggtctaatcacatacattagaacggattcaattgaaattg

SEQ ID NO: 293147 - DNA, 961 bp, Unknown
  Bacterial polypeptide expressing nucleotide sequence isolated from the Sargasso Sea
cagatgcagcaaaaaaattctgaaaatttatatcttgcaactgatcccgaccgtgagggtgaagctatcgcatggcatgttgaaaaacttcttagaaataattcatcactttcaaaattaaatattcaccgtgttacatttaatgaaattactaaaaatgctgttcttgatagtcttaaagagccaagagaaatagatgaaaatctagttaatgcctatcttgcaaggagagcgttagattttcttgtcggttttacactttctccagtgctatggagaaaattaccaggctcaaaatcagcaggtagagttcaatctgttgccttaagaataataagtgaaagagaacttgagatagaaaaatttattccacaggaatattggtctttacaaggcgagtttagaaataaagaagataaaataattaattccagacttacagtttatgatggaaataaagtagataaacttgatattaaaaatgaaagtgaagcgacaaaaatttttaatgatattaaaaattctactttcactgttggaaatattataaaaaaagaagctaaaagaaatccctacccagcttttactacatctacaatgcaaattgagtctagtcgtaaacttggtcttagtgcaagtcaaacaatgcgaacagctcaacgcctttatgaaggaacagatattaaaggagaaacaactggcttaataacttatatgcgaacagacagtgtagtcatgtcaaaagaagctattaaacaagttcgagcttttgttactgataattatggagcaaactatttaccagaagcaccaagagtttataaatcgaaggctaaaaatgcccaagaagcgcatgaatgtattagaccaacaaatatttacctaacaccaaaagatattaagcaatacattactttagaagaatacaagctatatgaaattattggcaaagagcggtaag

SEQ ID NO: 293148 - DNA, 964 bp, Unknown
  Bacterial polypeptide expressing nucleotide sequence isolated from the Sargasso Sea
tctacgcttcaacaagaagcgtcaagaaaacttcgtttttctgctagaaaaaccatgcgagcagctcaaggtctctacgagcaaggattcattacatatatgcgtacggactctacagctttatctgatgaaggaatgaaagcatcaaggtcagaaatattggatcgttttggtaaagagtatcttccagaaaaagggaatatttattcaacaaaggtgaaaaatgctcaagaggcgcatgaggcaattcgtccatcagggattaagtttaaatctattgatgcattaaaaaaatctaccgatgatgatggggctaaactttatgatttaattttaaaaagaacattggcctcacaaatgaaatctgcaaaaataaatcaagttaccgcaacaattcttaatcaaaaatctgagtttcgcgccaatggtaaaactatacttttcccagggtatatggcagcttatgttgaaagcactgataaaagaagtggtgtagctgaagataaagaaactgttcttccaaaacttgaagccaatcaatcattagaatgcaattctctaaactttgatgaacattccacaaagccgccggctcgctttaccgaagcttcgcttgttaaggaattagaagaaaaagggattggaagaccatcaacatttgctaatattattgacaccattgtccgaagaacatatgtcaaccgggagcgaagtaaattaactccaacatttcttggattggctgtaacccaattattagaaaatcattttaattcattggtcgatgataaatttacagctacaatggaagatggattagatgcaatttcaaggggtgaattagaatcactcccatttatgaaagaattttattttggctctgatagccaaagcgggttggtaaatatgcttgatgataaagttgatattggcaaagcgtgttctgtgcagcttgaggataagg

SEQ ID NO: 293149 - DNA, 799 bp, Unknown
  Bacterial polypeptide expressing nucleotide sequence isolated from the Sargasso Sea
cagcaggccgtgttcaatcaggttgctctaagactagtgactgaacgtgaacacgagattgaactttttaaaccacaagaattttggacaatttcatgtgactttaaaaaccacgacaaaattataaaatctaaactttcaatttttaataacgaaaagattgaaaagttttcttttaagaaaaaagctgagtcagaaaatgcattaaaagtgataaaatctaaatcttatcaaataacagatgtttcatctaaagtttataaaagaaacccattggcaccttttacaacatcaactttacaacaaactgcgtcaggtaaatttggatttggtgcatcaagaactatgcaaatcgctcaaagactttaccaaggaattgatatcgagggggaagctgttggacttataacatatatgagaacagatggaactcagatttctaaagatgcaattgaagattttagaaactttattaacaaaatccatgggaaagaatatcttccggaaaatcctaatagttacattggaaaaaaagctaaaaatgctcaagaggcacacgaggctataagacctaccgacattactaaaaagccaagtgatatgaaaaagtatttaagcactgaccagtcaaaactatatgaattaatttggaatagagctctttcatctcaaatgacaccagcagaattcgatagaaaaagtatcctaatagagtctcctgataaaaaaattggatttaaagctaatggatcaacaattaaatttgaagggtttttaaaagtttataaatttgaagaaa

SEQ ID NO: 293150 - DNA, 745 bp, Unknown
  Bacterial polypeptide expressing nucleotide sequence isolated from the Sargasso Sea
aatttacaacctgattgcccgtcagtatctgatgcaattttgcgcagatgcggtattcaggaagtgcgttattgagctggatattgccaaaggcaagtttgtcgctaaagcgcgttttctggcggaagccggatggcgcacgctgcttggcaataaagagcgcgacgaagataatgacgggacgccgctgccggtggtggcaaaagatgacgaactgctgtgcgaaaaaggcgaagtggttgaacgtcagactcaaccaccacgtcactttaccgatgccacgctgctgtcagcgatgaccgggattgcgcgattcgtgcaggataaagatctgaaaaagatcctgcgcgcaacggatggtttaggtacggaagcgacgcgcgccggtattatcgaactgctgtttaagcgcgggttcctggtgaaaaaagggcggtatattcattcgaccgacgcaggaaaagcgctgttccactcgttgccagaaatggcgacgcgcccggacatgaccgcgcactgggaatctatactgacccaaatcagcgaaacgcaatgtcgctatcaggatttcatgcagccgctggtggggacgctgtatcagcttatcgatcaggcgcgcagcacaccggtacgacgctttcgtggaattgctgcacctggcggcagtggtggcgataagaaaaagggtgcgccgcgtaaacgtccggcgaaaaaaagcccgccatctgaagaggcgggtctgtaa

SEQ ID NO: 293151 - DNA, 781 bp, Unknown
  Bacterial polypeptide expressing nucleotide sequence isolated from the Sargasso Sea
caagaagctcacgaagcaatcaggccagttgacctctccctgaaacctaaggatgtaaaattacatttgagttcagatcaatttagactttatagtttaatatggcaaagaacaatatcttcccaaatggcatctgctgatatagctaaaacaactttaaaaatagaggctgggtttgaaaaagaatatttattcatttctcaaggacatcgagtagtgttcccaggatttctaatagcttattctagagaagactcaaatcaagaaaattctatagttggaaaagacttaattcttcctagtttaaaacaaaatcaaaaacttgaaacaaagaatccaaaaaaaccattaaaaatggagcaactttacactaagcctccacctagatattcagaagcttcattagttaaaaaattagaatcagaaggaatcggaagaccctctacttatgctcctacaatttccactattcaagagcggggatatgttgaaataactcctgaaaaaaaattaaaacccacttcaataggcgaagtggttacggattttctaacaaatcatttttcggaaattattaatctgggatttacagcaaaaatagagaggaattttgaccgaattgcccaaggagaagaagattgggttgacatgatgagcaaattctacaaaccatttaatgaaagagtcgaggaaaaagatgagtctgtttctagagcagaagtacttaaacgaagaatttttgacgaaccagaccctaaaagtggtaagcaggtaagtgtaa

SEQ ID NO: 293152 - DNA, 915 bp, Unknown
  Bacterial polypeptide expressing nucleotide sequence isolated from the Sargasso Sea
ttatgggagaaaattaccaggttcaaaatctgcaggcagagttcaatcagttgctttacgtatcattagtgaaagagaacttgaaatagaaaaatttatccctcaagaatattggtcacttcaaggagaatttagaaataaagaagataaaactattaattcaaggcttacagtctatgacggaaataaaattgataaacttgatataaaaaatgatagcgaagctacaaaaattttcaatgatgttaaaaattctacattcactgttggtaacataactaaaaaagaagctagaagaaatccctaccctgcttttactacatcaacaatgcaaattgagtctagtcgtaagcttggtcttagtgcaagtcaaacaatgcgaacagcacaaagattgtacgaaggaactgatataaaaggagaaacaactggattaataacttatatgcgaacagatagtgtaatcatgtcaaatgaagctattaatcaagttcgaagttttgtaactgaaaattatggtgcaaattatttaccggatagtcctagagtttataaatctaaagctaagaacgctcaagaagctcatgagtgtattagaccaacaaatatttatcttacaccaaaagacataaagcaatacattactctagaagaattaaaattatatgaaattatttggcaaagagctgtaagttcacaaatggcaagtgccgtattagatcaagtagcaatcgatatttcaaatgaagataaaaaaattgtattaagagccaatggttctacgattaagtttccaggaatgtacagagtgtatcaagaagcaaaagatgatgacaaagatgaagaaaaagaaacaattctccctataatggatgaaggtgagagtttaaatctcaaagaagtgaaaaaacacaa

SEQ ID NO: 293153 - DNA, 907 bp, Unknown
  Bacterial polypeptide expressing nucleotide sequence isolated from the Sargasso Sea
ttgctcaaaagctttacccaaggagttgatattgaaggagaaactataggtttgataacatatatgagaacagatggtactaatttatccaaagatgctgttgtggcttttagagattatatcaaaaaagaaatcggtaatgaatatttacctgaaagtgctttaaattactctggcaaaaaggcaaaaaatgcacaagaggcacatgaagcaataagacccacggatattatcaggactccccaaagtgtaaaaaagtatctgagcagtgatcaaaataaactttatgatttaatatggagtagagctttatcttctcaaatgcaatctgctaaatttgatagaaatactataacgattacatcaaataataatgatacagtatgcaaagcaagtggatcagttcttaaatttgatggatttttaaaaatatataataatcaaggcaaggatgatgatgaaaacattttaccatctgtgtctaaaggacttgtaaatattgagtccttaatagatgagcagcattttacacagcctcctccaagatattctgaggctagtttggtaaaaaaactagaggagttaggaataggaagaccctctacttacgcaagtataatttctacaatagcaaatagaggttatgcagagatactgaataaaagattttttcccactgatagaggaaaacttatttcggcttttcttgaaaaattgttctcaaaatacgtggattataactttaccgctggtttagaggatcaattagacgagattacaactggtaaagaaagctggataaaagttttggaattgttctggaaagacttcaataacaatgtggctgaagtaaaggaaaaaagaacaagagaggtcttagatcttttaaatgatagtttaggagatt

SEQ ID NO: 293154 - DNA, 986 bp, Unknown
  Bacterial polypeptide expressing nucleotide sequence isolated from the Sargasso Sea
taagcaattaactattttaaaaaagctaatcaaacaggcatcaacgttagttcatgctggcgatcccgaccgtgaagggcagttacttgtagatgaagtgatagaacaagccaaaataagcaaagctaaaaagcaaggtattcagcgtctacttataagcgatttaaacttagctgcagttaaaaaagcgcttggtagtatgcactctaatcgggactttattccactaagtgtatcagcacttgcacgttctcgagctgattggctttttggtatgaacctcactcgggcttatactttagcgggacaaaaagcagggtttggtaatgtactctcagttgggcgcgtacaaacgccaattttgggcttagtggtaaatcgtgacactgagatagctaattttatatcaaaaccattttatgaggtgctagctagtttagttactcctgagaagcaggtatttaaagcaaagtgggtaccgagtaaagcttgcgaaccttatcaagatgaagaggggcgagtgctaaataaagcattggccgaaaacgtggcttcgcgtataactaatcaaacaggagaggtgacagcgcttgaacaaaaacaaaaaaagcaaagtgcacctctaccttataatctatcagcactgcaaatagatgcagcaaaggcatttggtatggctgcccaacaggtgcttgatatttgccaaacactttatgaacgccataaattaattacttatcctcgctcagataatcgatatttgcctaaggaacatcatttagatgcaccttcaattttaaaagcaattgcaactaatgacggtcaaaaagtggagttagtaaatggtgcaaatgataagcagcgcagtaagtgctttaatgactcaaaagtagctgcgcatcacgctatagtacctacggcaaagcaattaaagtcagctagcttagccaaggatgaagcaaaaagtgtatcagcttatttgtaga

SEQ ID NO: 293155 - DNA, 190 bp, Unknown
  Bacterial polypeptide expressing nucleotide sequence isolated from the Sargasso Sea
atgaatctagtcatagttgaaagccctgctaaagcaaaaacaattaataaatatttaggtgataattataccgttttagctagctatggtcatattagagatcttccttcgaaaaatggatcagttgatcctgatcaaaattttaaaatgaaatgggaagttgatagcttttcaaaaaaaatatcttaaa

SEQ ID NO: 293156 - DNA, 877 bp, Unknown
  Bacterial polypeptide expressing nucleotide sequence isolated from the Sargasso Sea
tgtcaagagagtggtctttagtgagatcacaaagaatgcggtaaaaaatggaattgccaatccaagagatattgacactgatcttgtagacgcctatttagctcgaagagcactggattatctatttggctttaatttgtcaccagttttgtggagaaagttaccgggagctaaatcagcaggaagagttcaatcagttgccttaagattgatatgtgaacgtgaacttgcaattgaatctttcgaacctgatgagtattggaaaattaaaggcaatgtaaaatttgaggatggttttaatatagacgcaaatttactttctgtaggaggcaaaaaagtagaaaaatttagctttaagtctgaagatgacgcaaaaaaaattgtaaatttattctcggataataaatttgaaataatagatattacaaaaaaaccagcatcgaggaatccggaaccacctttttctacgtcaacacttcaacaaaccgcatcgagtatttatggttttggcgcttctcgaacaatgcaaattgcacaaaaattatttcaaggtattgaaattagtggtgaaacagttggtttaataacttatatgcgtactgatagtactgatatatctaaagaagccattgaaacgtatagaaactatttgaaaaaaaattttgagaacgggtattgccctaatgaagtaagaacttacaaatcaaaaaaagctaaaaacgctcaagaagctcacgagggaattcgacctacagatattgaattaacacctgatcaggtttcaaaatatttagatacagatagcttaaaattatactcgttgatatggaaaagggcacttgcaagtcaaatgagttctgctgtattgaaagaacag

SEQ ID NO: 293157 - DNA, 701 bp, Unknown
  Bacterial polypeptide expressing nucleotide sequence isolated from the Sargasso Sea
tatgatcctctatattgctgaaaaaccaagccttgggcgtgcaattgccgatgtgctgcctaaaccccacaaaaaaggtgacgggtttattgaagacgcccagggcaactgcgtgtcttggtgtgtgggacacttgctcgaacaggccgagcccgatgcctataatcccgagtttaaatcgtggaaatttgagcatttacccatagtacccgagaagtggcagcttaaacctaaggccgcgacccgcagccaactcacagtgcttaaaaagctggtgaaacaggccgatacgctagtgaacgctggcgatcccgaccgcgaagggcagttattggttgatgaagtgatcgcctatttgggtgtgactggcgataaattacagcaaacgcagcgactccttattagcgacttaaacccacaggcggtgaaacgtgccctgtcgcagttacgcagtaaccgtgagtttattcctttgtcgacctcggcgcttgcccgaagccgcgccgattggctctatggcatgaatatgacgcgggcctacaccatccaagggaaaaaggtcggctatcagggcgtactatcagtcggtcgagtacagacaccactgcttgggcttatcgtgcgccgcgatgaggaaatcgcgaacttccaatctaagcctttttatgaggttctggctcacttagtgacggacaaagatc

SEQ ID NO: 293158 - DNA, 895 bp, Unknown
  Bacterial polypeptide expressing nucleotide sequence isolated from the Sargasso Sea
tatataaatgaaaaatatggaaaagaatatttacctaaagaaccattaaactactcaggtaaaaaagcaaaaaatgctcaagaagcacatgaagcaataagaccaactgatattaagagaagtccaaatgatttaaaaaaatatttaagtactgaccaacaaaaattatataatttaatatggtcaagagctttgtcatcacaaatggaacaagcaaaatttgatagaaaaactataattattgaatctaatgactcaaaaaatatttttaaatcaactggatcagttgttaaattcgatggattcttgaaagtctataaagcagaaaacatagatgatgatgataaaattttaccaaatgttagtaaaggtccaataaatattgaaaactttgtagatgaacagcattttacacaacctccgcctagatactctgaagcaagtttggtaaaaaaattagaagaattaggtattggaaggccttcaacttatgcaagtattatttctgttattgcaaatagaggttatgcggaaataattaataaaagattttttcccacggatagaggtaagttaatttcagcttttctagagaaattattttctaaatatgttgattatgattttactgcaaaccttgaaaatcagcttgatgatataacttctggtaaagaagattggttaaaagttttagaacaattttggatagattttaatgaaaatgtaattaatgttaaagaaaagagaactagagaggttttagatcttttaaacgaaagtcttggaaaccttatatttgatacagataaagaaggtaatattgatagaaattgcaaaaacagtaaaaatggcactttaagtttaaaaaatagctttagaggtggagcatttatcg

SEQ ID NO: 293159 - DNA, 269 bp, Unknown
  Bacterial polypeptide expressing nucleotide sequence isolated from the Sargasso Sea
tatgaatttggtcattgttgaaagtcctgctaaagctaaaactattaacaaatacttaggtgatgattataaagttttagcaagttatggtcacataagagacttgccttctaaaaatggttctgttgatccagatcaagattttaaaatggaatgggaagttgatagtttttcaaaaaaatacttaaaagaaattactgatgcagcaaaagactcatctaaaattatattagctactgaccctgatcgtgaaggtgaagctattgctt

SEQ ID NO: 293160 - DNA, 811 bp, Unknown
  Bacterial polypeptide expressing nucleotide sequence isolated from the Sargasso Sea
tttactacatctacacttcagcaagaagcttcaaggaaactagggtttggagtaacaagaacaatgtcaactgctcaaaaactatatgaggcagggcttataacttatatgagaactgatagtgtaactatttcaaatgatgcaaagacatcaattgttcaaaagattgagagtaagtatggtgaagactatgtaaatactaggaactacaaaaataaaaacaagtcagctcaagaagcgcatgaagcagtaagacctactgatattaatgttgaggaaataacttctgattatgatcagcaaagattatatcaattaatttggaagagaacaatttcttctcaaatgtcagatgctcaaattgaaagaacagttgtaaacataaattcagaagcttacagtcaattttttgttgcgaagggagaggtaataaagtttgatggttttctcagagtgtacaatgaaggaacagatgatgaaattgaagaagagaaaggtgttttaccagtacttactattgacgagaatcttaatttgttatctatttcttcaagggagtctttctcaagaccaccttcgagatatactgaggcttctttagtaaagaaacttgaagaattaggaattggaagacctgccacatatgccacaactatttcaacaattcaaaatagaggatatattgctaaaggagttaatgaaggaactgatcgtagctataactttattgagtttagtcaaagtggtattaaagagacacaattaaaagaaaaaacaggttcaaacaaagggaaaactagttcctactgat

SEQ ID NO: 293161 - DNA, 871 bp, Unknown
  Bacterial polypeptide expressing nucleotide sequence isolated from the Sargasso Sea
agactttatcagggtattgatatagagggagaaacaattggtttaattacttacatgagaacagatggaacaaatatttctaatgaagcattaaatgtgttcagaaattatatagagaacaactatggaaaagattatttgcctaacgaagcaaacaattattctggtaaaaaagcaaaaaatgcgcaagaggcgcatgaagctatcagaccaactgatataagtaaatctccagatcaattaaaaaaatatttgagtactgatcaacataaattatataacctgatatggtcgagggccctatcatcgcaaatgcaaactgctaagtttgatagaaaaactattttaatagagtctgaagactccaaaaatattttaaaagcttcaggttcagtaattaaatttgatggttttttaaaattatataaaaatgaaaacgatgaagacaatgaaaaaattcttccaaatgtaaataaaggtcctgttaatattgaaagttttatcgatgaacaacactttactcaaccaccaccaagatattctgaagctactcttgttaaaaaacttgaagaacttggtataggtagaccgtcaacatacgcaagcataatatctgtaatagctaatagaggttatgcggatattgtaaataaaaggttctttccaacagataggggaaagttaatttcagcattccttgaaaaattattcactaaatacgttgattatagttttacagcaaaactagaaaatcaactagatgaaataacagcagggaatgaagattgggttaaggttctcgaggagttctgggtagactttaataagaatgtttcaaatgtgaaagaaaaaagaacaagagaagttttag

SEQ ID NO: 293162 - DNA, 967 bp, Unknown
  Bacterial polypeptide expressing nucleotide sequence isolated from the Sargasso Sea
attaaatattggggacaaatatttaccaaatgaaattagaagttactctggaaaaaaagcaaaaaatgctcaggaagcccatgaagctgttagaccaacagatataaaaagatcgcctaacgacttgaggtctatactagatagagaccaaatgaaattgtatgaactcatatggaatagaacagttgcatctcaaatgcagagtgctgagtttgaacgtacagttgtagatatagccgacgagtcaaaaaaaaatatctttagagcaaatggctctattgaaaaatttgacggatttttaaaagtttataaagaaatcaaagatgacgatagtaaagataataatgatgaagaaaataaattgccaaaattattatctaatgaaaatttaaagataaatgaaataattaatgaacaacattttacccaaccaccacctcggtattctgaagcaagtctagttaaaaaattagaagaattaggaataggtagaccatctacctatgcaagtatcatatcagtcctatcaactagaaattatgtagagcttactaataaaaaatttataccaactgacagaggaaaattaataacagcatttttagataaactatttaataaatacgttgattataattttactgcaggattagaagatagtcttgatgatattacatcaggaaaaatacaatgggttgatgttttgacaaagttttggaatgacttcaatagtaatgtaaatgaagtaaaagaattaagaacaagagaaatccttgatatgatgaatgactctcttggagacattatttttgataaaaaagataatggcgaacaaaatagagtttgttcttgtggtgatggagaacttagtttgaaaattggaaggttcggagcttttatatggttgctcaaaaatatccggattggtaaatttactagaccattatcaagaataaaagcagcgaac

SEQ ID NO: 293163 - DNA, 915 bp, Unknown
  Bacterial polypeptide expressing nucleotide sequence isolated from the Sargasso Sea
gaagaatacctaacggaaaaaccacgaatctattcagggaaagaaaatgctcaagaggctcatgaggcaataagaccaacaagcgcaagcttaactccagaaaagctcaccggtcactcagaagaagaagttaaattatatgacttaatttggagacagtttattgcttgccaaatgcctgatgcaaaatatttatcaattaatgcaaaagttgctctagatgattatgttttcagtgcaagaggaagagaagtaatttttgatggttatacaaaaatatcttcacaaaatgccaaaaaagcagatgaagaaaatcttccaagtttagaagaaggacaaactttaaaattggtcgaagtgaagaatgagaaaaagtttactaagcctccagcgcgattctctgaggcggcacttgtaaaggagcttgaaagcaaagggataggaagaccgtctacgtatgcagcaattatttctacaattcaggctagaggctatgtaaagcttgagaataaaagattctttgtgaataaaattggcttgattgtttctgacagactgatggaaagtttcaatgaaatcatggattatgactttacagccaatttagaaaatgaacttgatgaaatagcttccggcaatcttgagtggaaatcagttctaaataagttttatcaaacatttcaagatgatcttaataatgcaggatcagctgaagatggaatgaagccaaacgaaccaactgaaacaaatattatttgtccctcttgcaacaagagtaatatgttaattagaaattcagctaatggtgttttcttaggttgcgcaggctatttcaagtctggtgatgaacaatgtaagcgtactatgaaccttataagtggtgatgaggcagtaagtgtcgatgatcaagaggaa

SEQ ID NO: 293164 - DNA, 193 bp, Unknown
  Bacterial polypeptide expressing nucleotide sequence isolated from the Sargasso Sea
tatgaatttagtgattgtagaaagtcctgctaaagctaaaactatcaacaaatatttgggtgatgattataaagttttagcaagctatggtcatataagagaccttccttccaaaaatggttctgttgatccagatcaggattttaaaatggagtgggaagttgatagcttttcaaaaaagtatcttaaagag

SEQ ID NO: 293165 - DNA, 265 bp, Unknown
  Bacterial polypeptide expressing nucleotide sequence isolated from the Sargasso Sea
catgaatctagtagtcgttgaaagtcctgcaaaagctaaaactataaataaatacttgggtaaagattatatagttttggcaagttatggtcatatacgagacttaccttctaaaaacggatctgtggatcctgaaaagaattttgaaatgcaatgggagctagatgcattttcaaaaaaatacttaaaagaaattactgatgcagctaaagaaagcgataaaataatattagcaacagatcctgatagagagggagaggcaata

SEQ ID NO: 293166 - DNA, 799 bp, Unknown
  Bacterial polypeptide expressing nucleotide sequence isolated from the Sargasso Sea
gttgagtcacctgcaaaggcaaaaacgattgaaggctatttgggttctgattataaagtaatagcttcattaggtcatattagagaccttccatcaagtgaaggatcagtaaagcccgatgaagatttcaagatgatttgggaattaggtgataaaggaaaaaaacaagcaaaaacactgaatgaagctgttaaaaattctgaaagtcttatattagctacagatcctgacagagaaggagaggcaatagcctggcatgttttagaggttcttcaagaaaaaggtagtttagctgataaaaagatttcaagagttacctttaacgcaattacaaaaaaagaaattaatgaggcaattaataatccaagagaaatcgatacagaaatggtgcaggcttacttagcaagaagggctttggactatcttgttggatttacattatctcctgttttatggaggaaacttcctggtgctcgttcagcgggacgtgttcaatctgtagcattaagattaatatgtgaaagggaaatagagattgagtcttttattcctcaagaatattggtctattaatggtcatttctcatacgaggataacgatccttttgaagcaaaactaactcattttgataataaaaaattagagaaatttgatattaataatgaggataggtctgaagaaattaaaatagctattcaagaagcaaattttaaaataaccgatataaaagaaaaaaatgtatcaagaaaaccgtcgccaccctttattacatctacattacaaatggaagcctcaagaa

SEQ ID NO: 293167 - DNA, 543 bp, Unknown
  Bacterial polypeptide expressing nucleotide sequence isolated from the Sargasso Sea
tatgagtaaattagtgatagtagaatcgcccgcaaaggcaaaaacgatccagaaatatctgggcgatggttttactgtcttgccaaccattggtcatattagggaacttccaaaaaaggatgcgattgacccaaacaatgggtattccatgaaatatatagttagcccaggaaaggaagacgcagtaaaaaagattaagagcgatgcaaaaagtgctgaacaagtaatactcgcaacagacccagatagagagggagaagctattgcttggcatgttgccgacattatttcaaaagcaaaatttgagcagccggatattaagcgtgctgttttttatgaaataagcgaaaaagcggttaaagccgctgtgggcaatcctggcgagatagccatggaccttgttcagtcccaagaaaccagaagggctctagatagacactttgggttttctttatctcctttattatggcgactgtttcctagcaacaaccactcagccggaagagttcaaagtcctgcgctaaggatgattgttgagcgtga

SEQ ID NO: 293168 - DNA, 873 bp, Unknown
  Bacterial polypeptide expressing nucleotide sequence isolated from the Sargasso Sea
gcaaaaaatgctcaggaagctcatgaagctgttagaccaactgatataaaaagaactcctaacgacttgaggtctatactagatagagaccaaataaaattgtacgaacttatatggaatagaacagtcgcatctcaaatgcagagcgctgagtttgaacgtacagttgtcgatatagcggacgagacaaaaaaaaacatctttagagcaaatggttctgttgaaaaatttgatggatttttaaaagtttataaagaaatcaaagatgacgatagcaaagataataatgatgaagaaaataaattgccaaaattattatctaatgaaaatttaaagataaatgaaataattaatgaacaacattttacccaaccaccacctcgatattctgaagcaagtctggttaaaaaattagaagaattaggaataggtagaccatctacctatgcaagcattatatcagtgctatcaactaggaattatgtagagcttactaataaaaaatttataccaactgacaggggaaaattaataacagcatttttagataaattatttaataaatatgttgattataattttactgcaggattagaagatagtcttgatgatattacatcaggaaaaatacaatgggttgatgttttgacaaagttttggaacgacttcaacagtaatgtaaatgaagtaaaagaattaagaacaagagaaatcttggatatgatgaatgactctcttggagatattattttcgataaaaaagataacggtgaacaaaatagagtgtgtacttgtggtgatggagaacttagtttaaaaattggaagatttggagcctttattggttgctcaaaatatccagagattgtaaat

SEQ ID NO: 293169 - DNA, 912 bp, Unknown
  Bacterial polypeptide expressing nucleotide sequence isolated from the Sargasso Sea
gttcagtcagtagctttgagacttataaccgaaagagaacatgagatagaactttttaaacctgaagaattttggtctattgctagtaactttcaatatgatgataaacttataaaatctaaattatctatttttgcaggagaaaaagtagaaaagttttcctttaagaaaaaaaatgaatcagaaaaagcattaaatgaaataacaaaacaatcatataaaataaccgatgtatcttcaaaagtttacaggagaaatccgcttgcgccatttacaacatctaccttgcaacaaaccgcatcaggaaaatttggttttggagcttcgagaacaatgcaaattgcacaaagactttaccaaggtatagatattcaaggagacacggttggtctaattacatatatgagaacagatggaactcaaatttcgaatgaagctatttctgattttagaaattttataaataaagaacatggaaaagaatatcttccagagaatcctaataattttacaggaaaaaaagcaaagaatgctcaagaggcccatgaagcgattagaccaactgatgttagtagaaaaccctctgatatgaaaaaatatttaagtaccgatcaatccaaactttatgaattaatttggaatagagcattatcatcacaaatgaatccggctgaatttgatcgaaaaagtataactatagagtccgaaaataaaaaaattaatttcaaagctaacggctcaacaattaaatttgaaggatatttaaaagtatacaaatttgaagataaagatgatgatctgaaaaatattttacctgaagttaaggtaggtgacaaagtatctattaaagaactaatagacgatcaacattttacagaccctccccctagatattctgaagctagtctagta

SEQ ID NO: 293170 - DNA, 868 bp, Unknown
  Bacterial polypeptide expressing nucleotide sequence isolated from the Sargasso Sea
ttgtctgagggcgataaaattgaaaaagaaacaattcatcttgaccaaaaatataccaagccgccatctagattctctgaggcagcattagttagagagttagaaaagaaaggaattggaaggccttccacatatgcaaatataatttctactatccaggataggggatatgttgaaattcaaaataaaaggttctttgttaagaaaattggtcatatcgttgctgagaggttactagagagttttgaaaatattatggattatgatttcacggctaattttgaaaatgaccttgataaggttgctaatggagaagctgaatggaaaaatgttttagatactttttataaatcatttcaaaaagatctcattacagcttcagatgaaaataccgggatgaggccgggtaacattccgactgaaaccgatctcttatgcccagactgcaatgaaaataatttagtaataaggaactcttcaaatggtgtttttcttggctgctctgggtataaaaatttaggtgatgataaatgtaaaaaaactttaaatctgatttctggagacgaggctgtaagtatcgatgacactgaagaggcagaaaatttaattatcaaagaacgatgtaatatttgttcaacaagtatggataattatttgatagatgagaacagaaaattgcatgtatgcgctcttagtcccgactgcaaggggtataaagtagaagagggtgctttcaagattaagggttatgatggcccaacattggaatgccataagtgcggttccgaaatgcaattaaaaacaggtagatttggaaaatatttcgcatgtttaaatgataattgtggaactactagagcgcttcaaa

SEQ ID NO: 293171 - DNA, 733 bp, Unknown
  Bacterial polypeptide expressing nucleotide sequence isolated from the Sargasso Sea
catattagagatcttccttctaaaaatggttcggtagatccagataaagattttaaaatggaatgggaaattgatagtttttctaaaaaatatttaaaagaaattactgatgctgcaaaagaatcgtctaaaattatattagctactgatccagatcgtgaaggtgaagctattgcttggcacgtaaaagaatatttaaatgaaaaaaaacttttaaaagataaagaaattgaacgtgttgtttttaacgaaataacaaaaaaagctgtaatacaaggtattaaaaatccaagacaaatagaaccattgcttgtagacgcttatatggcaagaagagctctagactatctagttggttttaatatttcacctatactttggactaaattaccaggatcaaaatctgctggtagagttcaatctgtagctcttaaactaattacagaaagagaacatgaaattgagtcatttaaaccagaagaattctggactttaagtattaaatttactgataaaaaaaatcaaaatattactgctagtataagtcaattaaataataataaggtcgaaaaattttcatttagaaataaaaatgaaataaatacagcaatatcaagtattaaagaaaaaaaatttagtataactgatatttcaagcaaagtagtaaatcgtaatccctcaggaccatttactacatctactcttcaacaaaccgcttccagtagattgggtt

SEQ ID NO: 293172 - DNA, 747 bp, Unknown
  Bacterial polypeptide expressing nucleotide sequence isolated from the Sargasso Sea
aatcaatgctagaaaaagtttagtaagaaggatgggtgttgatcctgataatggatgggatgctgattggcaaataatacctgagaaagaaaaggtgctgaaggctttaaaaaaagctgcaaagaatgttgataatatatatttagcaacagatttagatagagaaggcgaagcaattgcttggcaccttaaagaagctttaggacctcaaaaatacaattactcaagagtgagatttaatcaaattacaaaagacgcaattattgagtctttctctgatccaaaagaaatagaccttaatctggttaaagcatacagagctagaagatttttagataaagttattggttttgaattatctccattgctttggaaaaaaattgcacgaggcttatcagcaggaagagttcaatcggttgctttaagacttttagacgaaagagaaagatcaatccaagaatttattcctgaggagtattgggaaatttcgttttcagccactactaataatgacgaaacaattacatttaatcttgcaacaaaaaaaacagatccattactctcaaaagaaaaagttgaaacaataaaacaacaaatagaatcatgcaatttatcaataaatgagatttctaagaagccggtaaaagtcaaaccaaaggctccttttattacatcaacactccaacaatctgctagcacaagattaggtttcaacgtaaaaagaaccatgcgagttgctcaaaaact

SEQ ID NO: 293173 - DNA, 115 bp, Unknown
  Bacterial polypeptide expressing nucleotide sequence isolated from the Sargasso Sea
tatgaatctggtcatagttgaaagtcctgctaaagctaaaacaataaataaatatttaggtagtaattacactgttttagcaagttatggtcacataagagacttgccatcaaaa

SEQ ID NO: 293174 - DNA, 940 bp, Unknown
  Bacterial polypeptide expressing nucleotide sequence isolated from the Sargasso Sea
aaaagaataacagatgcagcaaaaaaatctgaaaatttatatctagccactgaccccgaccgtgaaggtgaagccatagcttggcatgtagaaaaactacttagagataattcatcactttcaaaattaaatattcaccgtgttacatttaatgaaattacaaaaaatgcagttcttgatagtcttaaagagccaagagaaatagatgaaaatttagtaaatgcttatcttgcaagaagagcgttagattttctagttggttttacactttctccagtgctatggagaaagttaccaggttcaaaatcagcgggtagagttcaatctgttgctttacgcattataagcgaaagagagcttgaaatagaaaaatttattccacaggaatattggtctttacaaggcgagtttagaaataaagaagataaaatcattaattcaagacttacagtttatgatgggaataaagtagataaacttgatattaaaaatgagggtgaagcgacaaaaatttttaatgatattaaaaattctactttcactgttggaaatattacaaaaaaagaagctagaagaaatccctaccctgcttttactacatctacaatgcaaattgaatctagtcgtaaacttggtcttagtgcgagtcaaacaatgcgaacagctcaacgtctttatgaaggaacagacattaaaggagaaacaactggcttaataacttatatgcgaacagacagtgttgtcatgtcaaaagaagctattaaccaagttcgaggttttgtaactgataattatggcgcaaactatttaccagaagcgccaagagtttataaatcgaaggcgaaaaatgcccaagaagcacatgaatgtattagaccaacaaatatttacctaacacccaaagatattaagcaatacattactttagaagaaatataac

SEQ ID NO: 293175 - DNA, 559 bp, Unknown
  Bacterial polypeptide expressing nucleotide sequence isolated from the Sargasso Sea
gccgcaaaagattcatctaaaattatattagctaccgaccctgatcgtgaaggtgaagctatagcttggcatgtaaaagagtatttaaatgaaaaaaaacttttgaaagataaagaaattgaacgagttgtatttaatgaaataaccaaaaaagctgttatacaaggaattgaaaacccaagacaaatagagccattactagttgatgcatacatggcaagaagagctttggactacttggttggttttaatatatctccaatactctggacaaaactaccgggttcaaaatctgcaggaagagttcagtctgtagcattaaagttaattacagaaagagaacatgcaattgaatcttttaaacctgaagaattttggactttaagtgttaaatttgctgataatataaatcaaaatttcactgcaagtataagtcaacttgacaacaataaaattgaaaaattttcatttagaaacaaagaagagataaataaagccatatctagcattaataaaaaaaaatttaatataaatgatatttctagcaaaatagtaaatc

SEQ ID NO: 293176 - DNA, 958 bp, Unknown
  Bacterial polypeptide expressing nucleotide sequence isolated from the Sargasso Sea
ggcgcagcgactctacgaaggcgcgggcacgggtgaaggtttgatcacgtacatgcgcaccgatggcacgtacgtcgccccgcacgctatccagacgctccgaacgacggcgacagaggtgttcggggaggagtacgttccggagtctccgagatatttcaaaaagaagcagaaaaacgcgcaagaggcgcacgaggcgattcgaccaacgaacgcgggtcgtcttcccgcgcaggtcgcgcgtcaattgggacccggaagcgatgaggcgcgattgtacggactcatctgggcgcgaacgatggcgtcacagatgtccccggcgctcaccgatcgaatcgcggcggagattgaatccgccgagggcgatttgaagctcaaggcgaacggacaccggttgaaatttccgggctacctcgcggcgtatcgcgcgtccagaccggacgcgccaccgccgtcagacgatgcgtggttacccgtcttggacgggggcgaaggactgcgcgtcgtcccgggtcgagacgacgacgaatccacggggtgcgaggcgacggagcacaagacgtcgccgccgccgcgatacaccgacggctccatcgtcaaggcactcgaggagcgaggcatcgggagaccgagcacgtacgcgccgattctcaaagtgttggcgcagcgcgagtacgtggtgaagcagggcgcggcgctcgtgccgacgacgcgagggcgattggtgtcggcgtttctcaccaattatttcgagacgtacgtcgattacggcttcaccgccgacttggaggaaaaactcgacgaaatcacgagcgaacaggtgcagtggaaacctctgctcgaggagtggtgggtgccattcaaggataagatttcctcgctctccaaccttcgcgtgagcgaggtcatagatgcgcttgacgaaaagctcggacaacatttattcggcgaggcg

SEQ ID NO: 293177 - DNA, 874 bp, Unknown
  Bacterial polypeptide expressing nucleotide sequence isolated from the Sargasso Sea
aatggcggcaattacaagaagattcttagataagttttttggatataaaatttcgccgataaccactagaagaacaatttttggaaaatcagcaggaagagtgcaatccccgacattaggaattttgtgtgcaagagaaaaagaaattgatctttttgtacctgaagaattttgggacttaattatagaattaagtgatgttaatggaaatataattcaatgtgatcttgtgaaagatggtgaaaaaaaatttggcaagcaaactgtaaaaagccaatctgaagctaatatattaaaagaaagaatattaaatctttctttctcaatagatgaggttgttaaaaaagaaaaaaatagaaacccttactctcctttctcaaactctctgttattacaggatgcttcgtccagattagggtttagtcccaagtatactaataccctcgcacaacaactcaaagatggtatatcaaatttaggggcactaataacatatcatagatcagattctaacaagatgaaaaaagaagaagtacaaaaacttagaactcttattagggatcaactcggaaataattacctttcaactaatgagattgaccacaaagaaaaatcaaaatttgttcaacaaggtcatgaagcagttactccaacacaattaacaatgaaacctgaagatgttaaaagtgttttggatgctgaccaacataggttgtatgagttaatttggaaaagaacagtagcttctcaaatgtcacagagtaagagtttggaaaccacatatcttataaatggtggcggcatttcattaaaagcaacaggatccattcaaatttttgacggattcaaaaaagtttacaattattctgagaaa

SEQ ID NO: 293178 - DNA, 897 bp, Unknown
  Bacterial polypeptide expressing nucleotide sequence isolated from the Sargasso Sea
attgaaaaaatatctaagtacagatcaatataaattgtataatttaatttggtcaagatccctctcctcacaaatggaatctgcaaaatttgacagaaaaactattactatctcatctgatgatgaaaaaaatatatttaagacaagtggctctactttaaaatttgatggttttttaaaagtttcaaaattagatggaaataaagatgaggaggaaaatattttaccagatgtaagaaaaggagaagtatcctataaagattttagtgatgaacaacactttacacaacctcctccaagatattctgaagctagtcttgttaaaaaacttgaagaattaggaattggtagaccatctacatatgcaagtatcatctctgttatttcaaacagaggatatgctgatatagaaaataaaagattctttccaacagatagaggaaaactgctatccgcgtttttagaaaaattattttcaaaatatgtggattatgattttactgcgaaattagaaaatcaattagatgacataacctctggtaaagagaattggattaaagttttagaggaattttggagagattttaatttaaatgtaacagatgttaaggaaaaacgaacaagagaagttctagacttacttaatgaaagtcttggatcattaatttttgaagtagataaagatggaaatataaatagaaaatgtaagctttgtgatagtggccaattaagcttaaaaaatagtttcagaggtggtgcatttattggatgctcaaattatccagattgtaaatttaccagacctctatctaaatctaaggctgcacagcaattaatattagcagagccaaagctaattggtcaaaatgatctgggtaaagatatatatttaaaaaa

SEQ ID NO: 293179 - DNA, 888 bp, Unknown
  Bacterial polypeptide expressing nucleotide sequence isolated from the Sargasso Sea
aaggcaattgcaaatattaagattaaaaaatttaatataactgatatttcttctaaagttgttagtagaaatccctcagggccatttactacttcaactcttcagcaagttgcgtctagtagattaggttttggtgcatctagaacaatgcaaatagcgcaaaaactttatcaaggaattgaaattgaaggagatacagttgggttaattacttatatgagaactgatggtactaatttatcagctgatgcagtttcagattttagaaattttattaaaaaaaaatatggaaacgaatatttgccagaaaatccaaataattactcaggaaaaaaagcaaaaaatgctcaagaagctcatgaagcaataagaccgactgatatcaatagaaatccagattctgtaaaaaaatatttaagttctgaccaacaaaaattatatagtttaatttggtctagagccctatcatctcaaatggaaacagcaaaatttgatagaaatacaataactatagaatctgaagacaacaaaaccatatgtaaatcaagcggatctgttttgaaatttgatggatttttaaaaatttattcaaatcaaaataaagatgatgatgaacaaattttacctgagatgtcaaaaggaccaattaatatagaagctcttattgatgaacagcatttcacccaacctcccccacgttactcagaagcaagtttagttagaaaattagaagagttaggcattggaagaccgtcaacttatgcaagtataatttcaacaatagcaaatagaggttatgcagaaatagttaataaaagattttttccaacaaacagaggtaaattaatttctgcatttttagaaaaactatttcaagatatgtggatt

SEQ ID NO: 293180 - DNA, 841 bp, Unknown
  Bacterial polypeptide expressing nucleotide sequence isolated from the Sargasso Sea
ggaaaaaatcctttgaagaatgaaatggaagtaaatcaagtcgatagtgagttgaaaggtggcggctttattttaaaaacaattgattctaagtctcaaaccagcaatcccaagcctccattcagaacttcaactctgcaaatgtcagctgctactagtctgggttttactgcggatagaacaatgcaatctgcacaaaaactctacgaaggtggtctcattacatatttaaggacagatggtatttctatcagtacatcacctaatactggagagcctttttctgaggaaaatccaggtcctccgccattgcaggagattagaaattttattagctctcattttgaaaagtcatatctttctaaagagacgagggtttacaaatccaaagttcaaaactcacaagaggctcatgaagcaataagaccaacggatgtatctaagcagcctgatcaacttaatttaacgggagatgaagaaaaactgtactcactcatctggaatagaacagttgcttcacagatggagagttcaaaatatgaacgcaagactctagttataacttctatggatggtaagtatgagtttaaagcttcctccagaaaaaacatttttcaaggtttcgagatactgactggtacagatgaaaagaaagaaacttttttcccaagcgacttggatgaaggaatggctttagagctgatatctaatacttacgagcaaaaatttacttctcctccaaatagatattcggaagcgtccttaattaaaaagatggaggaggaaggaattggcaggccgtcaacatatgcaaccattgtgaaagggcttagaacaaaaa

SEQ ID NO: 293181 - DNA, 799 bp, Unknown
  Bacterial polypeptide expressing nucleotide sequence isolated from the Sargasso Sea
cccgaagaagactacaagccgaactacgaggtgccgacggataagaagaaggtgatccgcgaactgaagaaggatatcgagaaggacactacggtctacctcgcgacggatgaagaccgagagggcgaatcgatttcttggcaccctatctcagccctcaagtttaagaatcaaaaaatccatcgcatcgtgtttcacgagataacgaagcgtgcaatcgaagaggctcttgcgaacccgcgcgagctagaccagtcacttgtcgatgcacagcaggctcgacgtattctcgatcgagcggtgggttacaagctttcaccgctgctttggcggaagatcaaaggtggtctttcggctgggcgtgtgcagagcgtcgcggttcgtattctcgtcgacagagagcgagagattcgcgccttcaaaccagcggagttctggaagatcaaagcggacttcagcgacccgaagtttcaggccgatctgatgcgggttgaggggaagcaaaagaagatttcgaacgaggcggcagccaggaagatcgacggtagcgcaaaggcttcgaccttcgatgttaaggaagtcgtcgagcgagagggtgttcgaaagcccgttgcgccttttataacatcgaccctgcagcaggaggcatcacgaaagctttcgttctccgtcgcgcagacgatgcggatcgctcagcaactctacgaggggaatttcgaaatccccggctacgagggtggtctgatcacctatatgcgtacggactccgtcaacttgtcggacgaagctctcacgcagg

SEQ ID NO: 293182 - DNA, 936 bp, Unknown
  Bacterial polypeptide expressing nucleotide sequence isolated from the Sargasso Sea
aaaaatgctcaagaggcacatgaagcaatcagaccaaccaatatagaaagaaaaccttctgatatcaaaaaatatgtcaatgcagatcaattcaaactctacgaactaatatggagtcgagctctttcatctcaaatgactcccgcagagtttgatagaaatacaattgtaatctcatctgaaaataacaaaataaattttagagctagtggatctttagttaaatttgatggttttctaaggatttaccaagttcaagaaactgatgaagattctaagaatatattgccagaggtaaaagttggtgaggaaataaatattcttaaattaattgacgaacaacattttactgacccaccaccaagatattctgaagcaagtttagtcaaaaaaatggaagaattgggaataggcagaccctcaacatatgcaagcattatatcagtattatcaaccagaaattacgtagagttaatgaacaaaagatttcatccaacagataggggaaaacttatttctgcatttctagaaaaattattctctaaatacgtagattataactttacagctgatcttgaaaatcaacttgatgaaattaccagtggaaagattgaatgggtgcaggtcttaaataatttttggaaagatttttatgaaaatgtaggaaaagtaaaagaaaaaagaactcgagaagttttagatctattaaatgaaagtctaggagcacttatatttgatagagattcaaatgactcgatagatagaaaatgcaaattatgttctaatggtgaattaagtcttaagaatagctttagaggtggagcatttattggttgttctaattatccagagtgtaaattcactagacctttgtcaaaagcgaaagcagctgcgcaatatagtttagcagaaccaaaattattaggacaaaatgat

SEQ ID NO: 293183 - DNA, 784 bp, Unknown
  Bacterial polypeptide expressing nucleotide sequence isolated from the Sargasso Sea
ccgccagggcgccgacgacatcttcctggcgaccgacccggaccgcgagggcgaggccatcagctggcacatcgccgagatcctgaaggaacgcgggctgctgaaggacaagtcgatgcagcgcgtggtcttcaccgagatcaccccgcgcgcgatcaaggaggcgatggcgcagccgcgcgccatcgccgacaacctggtcgacgcccagcaggcgcggcgcgcgctggactacctggtcggcttcaacctctccccggtgctgtggcgcaaggtgcagcgcggcctgtccgccggccgcgtgcagagcccggcgctgcgcatgatcgtcgagcgcgaagaggagatcgaggcgttcaaggcgcgcgagtactggtcgatccaggccgactgcgcgcatccgacccagcatttctcggccaagctgatcaagctggacgggcagaagttcgagcagttcaccatcactgacggcgacaccgccgaggccgcgcgcctgcgcatccagcaggccgcgcagggccgcctgcacgtcaccgacgtcgccagcaaggagcgcaagcgccgcccggcgccgccgttcaccacctccaccctgcagcaggaagcctcgcgcaagctcggcttcaccacgcgcaagaccatgcaggtggcgcagaagctgtacgaaggcgtggcgatcggcgaggaaggcaccgtcggcctgatctcctacatgcataccgactcggtgaacctgtcgcaggacgcgctggtcgagatccgcgacgtgatcgcccgcgac

SEQ ID NO: 293184 - DNA, 889 bp, Unknown
  Bacterial polypeptide expressing nucleotide sequence isolated from the Sargasso Sea
aagggacttatcagctaaaaatgatgctatagatactgagaacaacttccaaatgaaatgggaaacaagtgatagaggaaagaaagttattaaagaaattacagaagcggcaaaaaaatctgaaaatttatatctagcaacagacccggatcgtgaaggagaagctattgcctggcatgttgaaaaactacttcgtgataactctgcactgtcaaaactaaatatacaccgagtcacttttaatgaaataacaaaaaatgcagttcttgatagtctcaaacagccaagagaaattgatgataatttagttaatgcttatttggcaaggagagctctagattttcttgttggatttactttatctcctgttctttggagaaaacttcctggttcaaagtcagctggcagggttcaatctgttgctctaaaaataattagtgaaagagagctagaaatagaaaaatttattccccaagaatattggtctcttcagggagaatttagaaataaagaagataaagtgattaattccagactaataatctacaaaggaaataaaattgataaactcgacataaaaaatgaatctgaagcaacaaaaattttcaatgatgttaagatttcaagatttagtgttggtaatattacaaaaaaagagtcgaaaagaaatccttaccctgcttttacaacttcaacaatgcaaattgaatctagtagaaaacttggtcttagtgcaaaccaaacaatgcgtacagctcaaaaattatacgaaggcactgaaataaacggagaaactactgggcttattacatatatgagaactgatagtgttgtaatgtctaatgaagctatcagtcaaattcgaaatttcgtaactaataattatgga

SEQ ID NO: 293185 - DNA, 751 bp, Unknown
  Bacterial polypeptide expressing nucleotide sequence isolated from the Sargasso Sea
gaacatcaaattgagcaatttaaaccggatgaattttggaccttaaatgtaaattttaaaacaacaaaaggagatatcttgaattcaaatattgtattacttgataattccaaagtagaaaaattctcttttaaaaataaagaggatataaataaagcaatagaattaattaaaaaaaacaaatataaaatttcagatattagctctaaaatatatacaagaaatcctcttggaccttttactacatctacacttcagcaaactgcgtctggtaaattaggttttggagcctctagaacaatgcaaattgcccaaagactatatcaaggaatagatattgaaggtgataccgttggcttaataacttacatgagaacagatggtacaaatatatcaaaagacgcaattactgaatttagaaaatttataacaaaatcttatggaaatgattatctaccaaaagatccaaataattattctggtaaaaaagctaaaaatgcccaagaagctcatgaagctataaggcctaccgatatcactagaactccggaatcaatgaaaaaattcttaggctcagatcaaattaaactttatgatttaatttggtcaagagctctatcttcgcaaatggaagtcgctaaatttgatcgaaaaacaatctcaatagtttcagataatggattaaatcaattcaaaagctcaggttctacaattaaatttgatggatttttaaaacttacaagaattgaag

SEQ ID NO: 293186 - DNA, 178 bp, Unknown
  Bacterial polypeptide expressing nucleotide sequence isolated from the Sargasso Sea
atgaatcttgtcatagttgaaagtcctgcaaaagctaaaacaattaacaaatatttgggtggtgattatactgttttagcaagttatggacatattagagaccttccatcaaaaaatggatcagtagatcctgaggataaatttaaaatgatatgggaagttgatagtttttcaaaaa

SEQ ID NO: 293187 - DNA, 796 bp, Unknown
  Bacterial polypeptide expressing nucleotide sequence isolated from the Sargasso Sea
aaaaaaaatacaatccttttttagaggagatgttatagttaagtctagttttggtcatataaatgatttagatacaactaaattagaaaaaatgatatcaaatggatttgaacctatatataagaatacaaaaaataaagttatacaatctttaaaatcagttaaatgtaatcgtattatattagcagcagacgatgaccgagaaggagacgcgattgcatggcacactggaaatttattcgaattagattacactcaaaataatcgtattaaattcaatgaaatatccaaaagagcaatacaaaatgcactagataatccaggaaaattagacttgaattcagtaaatgctcaaaaagcacgccaatttatagatttaatgattggatataaattatccccactattatggcaacacataaaaacggataaaaaaggattatccgcgggtagagttcaaagttgtttattatatatattacaacaacatcaagagactataaaaaatcacaaaccagaatattcttataaaatgaattcagaattaaaccacgatgatataaacttaaattcagaatttcaatttgaaaagaaagaaataacagatgatacaatcaaagaaataatgaattatataatcaatgaaagggattgtatagtgactaatcgtgaaaaaaccgaagttaaacaatattcacaacccccattaattacatcaactttacaacaaagtgcacaatctgaacttggatttccagtaaaaatgacaatgaatattgctcaaaaattatatgag

SEQ ID NO: 293188 - DNA, 985 bp, Unknown
  Bacterial polypeptide expressing nucleotide sequence isolated from the Sargasso Sea
aaaaaaagccgtcacacatggtatgaaaatccaagacagatagagccattattagttgatgcatatatggccagaagagcattagattatttggtgggatttaatatatcaccaatactttggactaaattacctggttcaaaatcagcaggcagagttcaatctgttgcactaaaattgattactgaaagagaacatgaaattgaattattcaaacctgaagagttttggactttaaatgttaattttcaggataaaaacaaaagcaaaattacagcaagtatttctcaacttgatggagaaaaaattgaaaaattttcatttaaaaataaagaggaaattgaaaaggcaatttcaaatattaagattaaaaaatttaacataactgatatttcctcaaaagttgttagtagaaatccttcaggaccctttactacttcaacacttcagcaagttgcttctagtagactgggttttggtgcatcaagaacaatgcaaatagcacaaaaactttatcaaggaatagaaattgagggagatacagttggattaattacttatatgagaactgatggaactaatttatcagctgatgctgtctctaattttagaaattttattaaaaaagaatatggaaatgaatacttgccagaaaatccaaataattactcaggaaaaaaagcaaaaaatgctcaggaagcgcatgaagcaataagaccaactgatattaatagaaatccagattctgttaaaaagtatttaagttctgaccagcaaaaattatattctttaatttggtctagagctctgtcgtctcaaatggaaacagcaaaatttgatagaaatactataacgattgagtctgaagacggtgaaacaatatgtaaatcaagcggatcagttttgaaatttgatggatttttaaaagtttattcaaatcaaagcaaagatgatgatgagcaaattttacctgagagtcaaaagg

SEQ ID NO: 293189 - DNA, 874 bp, Unknown
  Bacterial polypeptide expressing nucleotide sequence isolated from the Sargasso Sea
aatgaagttagtagtagttgaatcgcctgctaaagcccaaactattaacaggtatcttggaaaagactataaagttttggcctcaataggacatataagagatttaccttcaaaaaatggtgctgtttctcctgaagaaaatttcaaaatgcaatgggacttatcaaaagaaaaagaaaaagttgttaaggaaataattaaagacctaaaaaaatcaaactctttaattttagcaacagatccagatagagaaggggaagcaattagctggcatataaaggaaatattgaaagaaaaacaactggttgatgacgtaaaaattgaacgagtggttttcaatgaaattactaaaaactcaattttgaatgcaatgaaaaatccacgtgaaattaattttgaattagttgaagcatatttagcaagacgagctttagaccatttaattgggtttagtatttctccaattttatggagaaaactacctgggtctaaatctgcaggaagagttcaatctgtagcattaagattaatttgtgaaagagaactagaaattgaaaaatttattactaaagaatactggactatttctgcaatttttttaaaccctaatgatgaaaaattttctgcaaaattaattatttttgataacaataaattaaaaaaatttgatataattaatgaagagagtgcaaaaaatataatagataaagttaataagtcgacttttcaaattgaaaaaattgaaaaaaagagagtgaaaaggaatcctatacctccctttaccacttcatccttacaacaagaagcatctagaaaacttggttttagtgcatacaagtcaatgagaattgctcagaagcttacgaaggaataa

SEQ ID NO: 293190 - DNA, 172 bp, Unknown
  Bacterial polypeptide expressing nucleotide sequence isolated from the Sargasso Sea
tatgtcaaaatcacttgtaattgtagagtcccctgcaaaggcaaagacgatatcaaaatatcttggtaacgaatatattgttaaatcaagtgtaggtcatatcagagatttaccaaagggaaaatcaaaagctaagagaacaaatttcatcccaaaagatgctagtcctgaa

SEQ ID NO: 293191 - DNA, 250 bp, Unknown
  Bacterial polypeptide expressing nucleotide sequence isolated from the Sargasso Sea
tatgaatcttgtaattgttgaaagtcccgcaaaagctaaaactataaataaatatctaggttcagattacacggttttggcaagttatggtcatattagagacctgccttcaaaaaatggttcagttgatccagaaaattcttttaaaatgatctgggaaatagacagtttctcaaaaaaatatttaaaagaaatcacagatactgctagaaactcacaaaaaattatccttgctactgaccctgatcga

SEQ ID NO: 293192 - DNA, 876 bp, Unknown
  Bacterial polypeptide expressing nucleotide sequence isolated from the Sargasso Sea
tatggtcaagatcattatcctcacaaatggagtcagcaaaatttgataggaaaactataacaattatgtctgaagataataaaaatatatgtaaagccagtggttcaacattaaaatttgatggctttttaaaggtttcaagattagaagaaaataaagaggatgaaaacatattaccagaggttgttaaaagtgaagtggagtttaaagattttacggatgaacaacatttcactcaaccaccaccaagatattcagaagcaagtcttgttaaaaaattagaagaattaggaattggaagaccttcaacatatgcaagtattatatcagtaatttcaaatagaggttatgctgatatagagaacaagagattttttccaacagacagaggtaaattgctttctgcttttcttgaaaaattattttctaaatatgttgattatgattttactgctaagttagaagatcaattagacgatattacagccggcaaagaaaattggattaaggtcttagaggaattttggagagattttaatttaaatgtaacagatgttaaagaaaaacgaactagggaagttttagacatgctcaacgagagtttaggctcattaatatttgaagtcgataaagatggaaaaattaatagaaaatgtaaattatgtgatagtggtcaattaagtttaaaaaatagttttcgtggtggtgcttttattggatgttcaaattatccagattgtaaatttacacgacctctttcaaagtctaaagcagcccaacaattgactttagcagagccaaaattaattggtcaaaatgatataggtaaagacatatatttaaaaaatggaagatttggtccctatcttcaataga

SEQ ID NO: 293193 - DNA, 826 bp, Unknown
  Bacterial polypeptide expressing nucleotide sequence isolated from the Sargasso Sea
gatgcacaagtatttgagtacttcagtatccgctgagtcgggtgcttatgaattaagagttcgaggtcgagtcatgcagttcgatggatttactcgtgtgctccctcctgtgtctagaaaaaaggacgaggatgaagtacttcctgatttccaggtgggacaaaatctggccttattagatgtgcagacagtgcagcattttacaaagccggtcgcccgatttggagaagcgagtttggtcaaggagttggaaaaacttggtataggcagaccgtcgacctattcaagtattatttcgacgattcaagatagaggctatgttcgtctagaaagtaaacgtttttacgccgaaaaaataggcgaagtggtaaccgatagactttgcgagaattttggagatcttctcgactacggttttacagcaactatggaagaggaactagacaaagttgctaaaggagagcgggtgtggaatcaattgctggataatttttaccaagatttcagtagtaatttggacactgctaaagatcctgacaaaggaatgcggcttaacgaaccggccaatattgactatgactgtcccgcctgctcgcgccagatgcaggtcagaaatggctcaacaggtgtttttttgggctgctctgggtatgcactgaagccgaaggaacgctgtaagcaaacgattaatttgatccgtggagaagaagtagtagatgtcgatgatgaagaaggtgaatcaaaacttctgatggagcgtcgaaagtgtcctaaatgcggatcaattatgctgagccacttgatcgacgaaaataaaaagcttcat

SEQ ID NO: 293194 - DNA, 853 bp, Unknown
  Bacterial polypeptide expressing nucleotide sequence isolated from the Sargasso Sea
gcacttgcttcccaaatgactgcagcggaaatagcgcgtacgacaataaatattgaggctggaaaggaaaaagaatatttgtttgaaggacagggacagcgtgttgttttttcaggattcctgcagatttactccgaaacaagcgatgagcagtcagatactctcagcgaaaaagatgttatcctgcctaaagtagaacagggacagatgcttgcacttaaagatcagcaaaaaccagtatctctagaacaaatgtttaccaaacctccgcctaggtacacagaagcatccttagtaaaaaaactggaatcagaaggtattggacgtccatccacttacgcgccaacaatatcaaccatacaagatcgcggctatgttgaattaactgatgaaaagaaattgaaaccgacttcaattggggaagttgttacagattttctggcagatcattttacaaaaatagtaaatctgggatttactgctgagattgagcgtaactttgatcgtatagccaagggagatgaagactgggtagaaatgatgacagatttttatgagccttttcacgagaacgtagttgagaaagataaatcggtttcacgtgctgaggttctgaaacgtagggaacttggcactgaccctgaaagcggtaaaccggtaagtgtaagcattggaagatacggacctatggttcaaataggtactcgtgaagatgaagaaaaacctagatttgcttcgcttcccagcagtattaatttgaatgatgtaagtcttgaagaggcattggaatgttttgctctccctcgtgtactgggcgaatatgaaaacggtgaggagatttctgccaataacg

SEQ ID NO: 293195 - DNA, 757 bp, Unknown
  Bacterial polypeptide expressing nucleotide sequence isolated from the Sargasso Sea
atttgggaggtggatagtttttcaaaaaaatatttaaaagaaattacagatgctgcaaaaaaatcagaaaaaataattttggctacagatcctgatcgagaaggagaagctatagcatggcatgttaaagaatatttagatgagaaaaaacttttaaaggacaaaaaaatcgaaagagtagtcttcaatgagataactaaaaaagcagtaactaatggaatagataatcctaggaatatagaatcaaatttagttgacgcttacatggcaagaagagcgcttgattatcttgtaggatttaatatctctcctattctttggactaaactgcctggttcaaagtctgcaggacgtgtgcaatctgttgcattaagattattgacagaaagagaacacgaaatagaacagtttaaacctgaggaattttggacactaaatgtaaagtttaaaacttctagtggtgatattttaaactcaaatattattatgcttaataacaacaaagttgagaaattcacttttaaaaataaagaagatattaacaatgcaactgatataataaaaaaattaaaatataaaatttcggatataagttctaaaatttatacaagaaatccacttggaccttttactacatcaactttgcaacaaacagcatcaagtaaattaggctttggcgcttctaggacaatgcaaattgcacaaaggttatatcaaggtatagatgttgagggtgatacggtcggattaattacat

SEQ ID NO: 293196 - DNA, 815 bp, Unknown
  Bacterial polypeptide expressing nucleotide sequence isolated from the Sargasso Sea
aagatcctttaaaaaagctagttactgggggattaaagcttccctaataaaagataatattactttcgaaactaaattattcagtttaaaaggtcaaagaatttctaacggttccgatttcgacgaacaaaccggtaaattaaaagaaggaaacaaatctttaataattggagaagaacaagtaaatgatttattgaagactttttcctcagaggattggttagtctcaaaaatcgaaaaaaagccatccactcgtaagccagttcctccatttacaactagcacattacaacaagaagcaaataggaagcttcgtttgtctgcaagagaaactatgagatgtgcacaaggtctatatgagagaggttttataacatatatgagaactgattcagttcatctctccgaacaagccacaagagctgctagagaatgtgtcagttctatgtatggaaaagaatatttatctaactcaccaagacaatttaattcaactgcaagaaatgctcaagaagcacacgaagctattaggccggcaggtgaggtatttaaaacaccaaaggaaactaatctaactggtagagacttatcactttacgatttaatttggaaaagaactgtagctagtcaaatggcggaagctaggttaacaatgattaatgctgaaattagcgtaggggatggattatttaaatcgagcgggaaaagtattgatttcgctggattcttcagagcttatgtcgagggaagtgatgatccaagctcatcccttgaacagcaagaaattattctcccaaacttaacaactggaacat

SEQ ID NO: 293197 - DNA, 508 bp, Unknown
  Bacterial polypeptide expressing nucleotide sequence isolated from the Sargasso Sea
ttgggtgtgaacaaagtagaagacgtgacagcattagtaattgttgaatctccagcaaaagcaaaaactattgaaaagtatttgggtgatggttacatcgtcgattcttccgtgggacatataagggacttaattagcccaaaagatgtaccagaagataaaaaagaacgtttcggaaaactggggattgacgtatacaacaattttgaacctctatatgagataagtccgaatagtaaaaaacaagtgtcacagttaaaaaaagctttaaaaaaagttgatgagctttttctcgcaactgatgaagatcgtgagggtgaagccattgcatggcatctacttgaagttttaaaaccttcagtgccagttaagagaatggtttttaacgaaattacgaaagaagcgattactgaagctttaaataatacacgtgacttggggaaagatcttgttgaagcccaagaagcgcgcaggatcttagatcgtatttacggattgaactttccaa

SEQ ID NO: 293198 - DNA, 217 bp, Unknown
  Bacterial polypeptide expressing nucleotide sequence isolated from the Sargasso Sea
gatgaatttagtaattgttgaaagtccagctaaagcaaaaacaataaataagtatttaggaaaaaattacacagttctagccagttacggccatataagagatttaccatccaaaaatggatctgtagatccagaaaacaaatttaagatgatatgggaaatagatagtttttctaaaaaatatttaaaagaaattacagatgcagcaaaaagtcag

SEQ ID NO: 293199 - DNA, 438 bp, Unknown
  Bacterial polypeptide expressing nucleotide sequence isolated from the Sargasso Sea
aatgacaaaatctttagtaatagttgagtctcctgcaaaggcaaagacaatttcgaagtacttaggacctgagtatattgttgagtctagtgttgggcatattagagatcttccaaagaaaggtggcacaattagaacaagactagttgtaccaaaagatctcagtccagaggaaaaagccagacaaaaggaaatcaatgctagaaaaagtttgataagaaggatgggtgttgatcctgataatggatgggatgctgactggcaaataatacctgagaaagagaaggtgctgaaggctttaaaaaaagctgcaaagaatgttgataatatatatttagcaacagatttagatagagaaggtgaagcaattgcttggcaccttaaagaagccttgggacctcaaaaatacaattactcaagagtgaggtttaatcaaat

SEQ ID NO: 293200 - DNA, 860 bp, Unknown
  Bacterial polypeptide expressing nucleotide sequence isolated from the Sargasso Sea
cttaaagcttattaccgaaagagaaaaggaaatagaattatttaaacccgatgaatattggactcttacatcagactttacaaataaaaataataaaaatattttttcaaaattaagtttatttaatgaagaaaaaatagaaaaattttctttcaaaaataaagaagaaatacaaaaagcagttgatgtaatcaataaaacaaaatttagaattacagatgtaaacacaaaagtattcagacgtaatcccctagccccttttaccacttctaccttgcagcagactgcttcaggacgatttggttttggagcttccagaacaatgcaaattgcacaacgactgtatcaaggagtagatatcgagggtgaaactactggattaattacttatatgagaactgatggaacaaatatttcaaaagaagcaattgaagattttaggaaattcattactgatgattatggtgataaatatttgccagaggcaccgaatagttatactggaaaaaaagcaaagaacgctcaagaagctcatgaagcaattagaccaactaatataagtagaaaaccttctgacgttaaaaaatatgttaatgctgatcaatttaagctctatgaattaatttggagtagggccttatcatctcaaatgacgccagcagagtttgatagaaatacgataattatttcgtcaaatgataataaaattaactttagagcaagcggctcagtagtaaaatttgatggatttcttaaagtttatcaagttcaagaaactgacgaagatgcaaagaatattttgcctgaagtcaaagttggtgaagaaattagcatacttaaattacatgatgagcagcact

SEQ ID NO: 293201 - DNA, 427 bp, Unknown
  Bacterial polypeptide expressing nucleotide sequence isolated from the Sargasso Sea
aatgaatcttgtcatagtagaaagtccagcaaaagctaaaactataaacaaatacttaggtaaagactataaagttttagcgagttatggtcatgttagagatcttccttctaagaatggctccgttgatcctgaaaataattttaaaatggaatgggaattagattctttttcaaaaaaatatgtaaaagaaattaccgatgcagctgctgactctgaaagaattatattagcaactgatcctgatagagaaggagaagctattgcctggcacgttagagaaattcttgaaagtaaaaaacttttaaaaggaaaaaaagtagaaagggttgtgtttaatgaaattacaaaaaaagctgttactaatggaattaacaatcctagagaaattgagtcacttttagttaatgcttacatggctagaaga

SEQ ID NO: 293202 - DNA, 652 bp, Unknown
  Bacterial polypeptide expressing nucleotide sequence isolated from the Sargasso Sea
atgcctgtagttgttgtggagtctccagctaaagcaaagacgatcaataaatatttggggacagattatagcgtatttgcatcatatggtcatgtaagagacctacccccaaaagatggatcagttgatccgaaaaacaactttgagatgttatgggaggtatctactgatagtaaaaaacacatcaaagcaatatcagatgccttgaagaaagataacactcttatcctagcgactgacccagatcgcgaaggcgaggcgataagttggcatttagaggaggcacttcgtaaaagacgtgcaattaatggaaacacgcaaattcaacgcgtagtattcaatgcaatcacaaaatcagctgtttcagaagctatgaaagctccaagagaaatagactcgccgcttgtagaagcctatctcgcgaggagagctttggactatttagtaggttttaatttgagcccagtgctgtggcggaaattacctggggcccgatctgcgggacgcgtccaatcagtatgcttaagattaattgtagaaagagagatggatattgaggcatttaacgctcaagaatactggagtgttcatgcatctttaaaatccccaagagggcagatttttgatgcccgcctcgttaacttagccggtg

SEQ ID NO: 293203 - DNA, 757 bp, Unknown
  Bacterial polypeptide expressing nucleotide sequence isolated from the Sargasso Sea
agtagaaagtcctgcaaaagctaaaaccataaataaatatttgggtaaagattataaagttttggcgagctatggtcatgtcagagatctcccttctaaaaatggttcagttgatcctgaaaataattttaaaatggagtgggaactcgatacattctcaaaaaaatatgtaaaagaaatcactgatgcagcagctgaatctgaaaaaataatattagcaaccgaccctgatagagagggagaggctattgcctggcatgttcgtgaaatactcgaaagtaaaaaacttttgaaaggtaaaaaagttgagcgggttgtttttaatgaaattacaaaaaaagcggttacaaatggaattaataatccacgggaaatagagtctctgttagttgatgcttatatggccagaagagcattagattatcttgttggttttaatatatcgccaattttatggacaaaacttccaggatcgaaatctgcaggacgagtacaatcagttgctcttagattgataactgaaagagagcatgaaattgaactttttaaaccagaggaattttggaccattgctagcaactttcagtatgatgataaacttattcaatcgaagttgtctgtatttaacgaaagaaaaatagaaaaattttcatttaaaaaaaaaatagattcagaaaaagctttaaatgcaattaaagatcaatcatataaaataactgatgtttcctcaaaagtttttcgaagaaatccacttgcg

SEQ ID NO: 293204 - DNA, 866 bp, Unknown
  Bacterial polypeptide expressing nucleotide sequence isolated from the Sargasso Sea
acttttcatgaaaccaaaccgcctgcaagatatacagaggcagccttagttaaggttcttgaaaaagaagggattggaagaccctctacctatgcaagtattattgggacaattgtggatagaggttatgcaaatttatcctccaatactttggctccaacgtttacagcttttgctgttactgctctattagaagaacattttcctgatctggttgatactacttttaccgcaaaaatggagtcttcattggatgaaatatcttcaggtaatcttgagtggcttccatacctcgagactttttataaaggtaaaaatggtcttgaggtgaaagttcagaaaacagagggtgatatagatggtaaagcttatagacaagttgatttcgaagaccttccttgcgtagtcagaataggctctaatggtccttggctagagggcacaaaaattgatgaatctggtaatgaaattcaggcgaaaggtaatcttccaatggatataactcctggagatttagacataaagcaagttgatcaaattttaagtggcccatcagatcttggaactgatccaaaaactggggaaaaagtctttctaagatttggcccttatggaccttacgtacaattgggaaataatgatcaagataaagctaaaccaagaagagcatcattacccaaagagttgaaaactgatgatctaactctagatgaggctcttgtacttttaagtttgcctagattgttaggagttcatcctgaaggaggagtggttgaggctgatagaggaagatttggtccttatattaaatggattaaaaatgaaaatgaatctgaaaatagatcattaaagaaagaggatgatgt

SEQ ID NO: 293205 - DNA, 790 bp, Unknown
  Bacterial polypeptide expressing nucleotide sequence isolated from the Sargasso Sea
catataagggatctgccctcaaaaaatggatctgtaaatcctgaaaaagattttgaaatgcagtgggagttggactctttttcgaaaaaatatttgaaagaaataacggatgccgcgaaagaaagtaaaaaaataatactagcaacagaccctgaccgtgagggagaggcaatagcgtggcatgttaaaaaagttttggaagacaaaaaattacttacaggcaaaaaattagagcgtgttgtttttaacgagataactaaaaatgcagtgttaaatggcataaataatccgagacagatagagaaaagtttagtaaatgcatatttagcaagaagagctcttgattatctagttgggtttaatatctcaccaattctttggacaaaacttccaggttcaaaatctgctggaagagtgcagtcagttgccttaaaattaattacagaaagagagcatgaaatagaatcttttaaaccagaggaatattggagtttaatcgtaaattttcaggatgaaaaagataatttaataaactcgaagataaatgtttttaaaaataacaaaattgaaagattctcttttcgtgacaaatcttctattaataatgctacagatttaataaaaacaaaaaattattcaatcaaaaatgtatcaaataaagtttttaaaagaaatcctgtggcgccttttacaacatcaactttgcaacagtcagcgtcaggtaaatacggatttggagcgtcaagaactatgcaaattgcacaaagactttaccagggaattgatattg

SEQ ID NO: 293206 - DNA, 787 bp, Unknown
  Bacterial polypeptide expressing nucleotide sequence isolated from the Sargasso Sea
aatactgaaaacaggttttcaagtaaggttaaaaatgctcaagaagcccatgaagcaattcgtccagcacatcgtatttttaaaccgatatcagaagttgaaaatattataaataaagaagctgcaaatttatatgaactaatttggaaacgaacaattgcaagccaaatgaaaccagcaaaactaaagcaaacttcaattactattacgaatcagaaagcaaaatttagagcaaatggacaggttatagttttcccaggttacatgagagcatatgtagaaggaagggataatccagacaaagatcttgcaaataaagaaaagactcttccattgcttcaacttggagatgtactaacatgtaataaacttgaatcagaaattcacaataccaaacctccagctcgttttacagaggcatcattaattaaatccttagaagaaaatggcattggtcgcccctctacttttgcctctataataggaactatagttcgtagaaattatgttaatagggcaagcaataaactttctccaacctttttaggtttagcggttactcaattattagaaaaccattatgcaaatctggtagataaagagtttacagcaaaaatggaggatggcttagatgaagtttctcgtggagaattagaggcaataccttttatgaaaaatttttattttggaggaggcccatttaaaggacttgaaaaaatgctggaagaaaaagttgatataccatctgcttgtaaaatagaaatcccacaaaagtatatcagaaaca

SEQ ID NO: 293207 - DNA, 873 bp, Unknown
  Bacterial polypeptide expressing nucleotide sequence isolated from the Sargasso Sea
agagtttacaaatctaaggcagcaaatgcacaagaggcacatgaagctataagaccaactgcaatatctcgtcatccagaaagtatgtcttcctacctagatggtgaacaatttaaactttacgaacttatttggaaaagaactatatcaagtcaaatgcaatcagctgaattagacgaaacatctgctgatatttcaaataaggataaaactattatttttagagcaaccggatcacaagtactctttcctggattttatatttatagaaatagaaatgatgataaaattttacctaatttagttgaaaatgaaaatctcgacttagaaaaagctgacggtgaacaacattttactcaaccacctccaagatatactgacgcaagtcttataaagaaaatggaggaacttggtattggaagaccatcaacatatgcggcgatcttacaagtacttgttaatagaaattatgttgagaaagacagaggcaagcatattcctcaagaaagaggaaggatactgacagcgtttttaaataatttttttggacagtatattgaatatgattttacagctgacttggaaaaaaaattagataaagtttcagatggaaaattaaactataaaaagcttttagaagagttttggaatggttttaaaccacatctaaacaaaatgtcagaacttgaaagagaaaaaattcttgcagcactagaaaaagaattggctgatttattttttcctaaaaatgaggaggatactaatgctcaaccaagtaggaaatgtccaacatgttccaatgggaatttaggtttagaacttggaagatatggtgcttttataggttgttctaattatccagaatgtaaattt

SEQ ID NO: 293208 - DNA, 922 bp, Unknown
  Bacterial polypeptide expressing nucleotide sequence isolated from the Sargasso Sea
atcagctggaagagtccagtctgttgctcttaaattaataacccaaagagagcatgaaattgagtcttttaaaccggaagagtattggtcaattaatgctaaatttaaaaatttaaaaagtgatattctattttcaagattaaatattattgataataaaaaagtagaaagattcagttttaaaaataaaaaagatattaatgaagtaattgaaaaaattaataaacataaatacctaattaaagacgtaagttcaaaaattgtaagaagaaacccatcagccccatttactacttctacgcttcagcaaacatcgtctggaaagtatgggtttggtgcatctagaactatgcaaatagctcaaagattataccaaggaattgaaattgaaggtgaaactattggattaataacttatatgaggacagatggaacaaatatttccaatgaggctgttaaagattttagatcttttattaaaaatgacattggtaaaaattatttacctgagagcccaaataattttaaaggaaaaaaagctaaaaacgcccaagaagctcacgaagctattagaccaactgatataaagaaaaaaccagccgaaatgaaaaaatatcttagttcagatcaatttaaattatatgatcttatatggtcaagagccttggcttctcaaatgaaatctgcagaatttaatagaaatacaattcaaattaattctgatgatagcacaattcaatttatctctagtggttcagtaatcaagttcgatggttttttaaaagtttattctttacaagatgacgatgaagaaaaaaatattcttcctgaggtaaaattaggtgagaaaatatctatagcagaattaatagatgaacaacattttacatcaccacctccaagatattcagaagctagttta

SEQ ID NO: 293209 - DNA, 907 bp, Unknown
  Bacterial polypeptide expressing nucleotide sequence isolated from the Sargasso Sea
gggatatcagggcgtattgtcagtcggtcgggtgcaaaccccggtgttgggtttggtcgtgcagcgtgaattacaaatcgagaattttgtcagccgtgatttttatcaggtcaaagcgcatttaacaggagccgactggccttttactgcgatctggcaacccagcgaagcttgtgcgccttatcaggatgaggaaggtcgggtattgagccgcgaattggcagaactggtgcaacgtaaaaccagccatcaagtcgctgtagtagagcaagtgcaacaactgccgaaaaagcagtacgcgcctttgccttttagcttgtcagctttgcaaattgaagctgcaaaactttatggcatgacagcacaacaagtgctggataattgtcagcaattgtatgaacgccatcaattgatcacttaccctcgttcggattgccggcatttgccagagcagcaatttagccagtctgcagctgtctgccgggctatagtggcgaacagcccagagcttgcagagattcaacagcaagccagtatgagcctgcgcagcaaagcctgggatgacagcaaaattaccgctcaccacgctattattccgaccgacaaatcattgaaatcagccagcctgaatagctttgaagccaaactctactggctgatcgcccggcagtttttatggcagtttttcccgccgttttgttatctggagcagcaggcgctgctgaaaattgccggaggtttatttaaagctcaggccagactagagcagtctttgggttggaaggctttttataaagccagtcaaaaagagcaacaagatgaggatactgatgagcaacaaagcttgcagcgtttaaccaaaggccaagagttgcagtcaggtcagtcagaattagtgtcgaaacaa

SEQ ID NO: 293210 - DNA, 871 bp, Unknown
  Bacterial polypeptide expressing nucleotide sequence isolated from the Sargasso Sea
gcttcagcaaaagattttgacaaaaatggtcaaaagacaagtgagaataagagatacctcgatgaaaatgaaacattagaaatcgttaaaattctaaaaaatcaaattgcaaaaatctcatctattaaagaaacaaccagaagtggtcgaccacctaaaccctttaaaacaaccagtttgcaatcagccgctagcagtagtttaagctttcaacccgcaacaacaatgaggatagctcaacgtctatatcaagaaggtttaattacatatatgagaactgattcaattagattgtcagatgtcgcaattaaagcctcgagagcttatattagggaaaacttttctgaaaaacatttacctgattctccaaatttatatggtgacagcaaaaatgcgcaagcagcccatgaagcaatacgaccttctggtgaaatatttataacacctcaagagcttttaaaaacatacaaaaaagatagtgatgaattcaaactttataaattaatttttaataccacagtcgcctcgcaaatgactgatgctcagggaattacaaaaactattgaaatagaaacgaaagaaaatacttactctcctttaattttgggaatctcaggaacaacatggacatttggtggatacagagatttaataaaagatttatcagagaaatctcaggaattaccagacttgaatgaaagtgatgaaataaagataattaaaccagaaagtgaagaaaaatttacaaaacctcccaatagatactcctccacttcacttattaataaacttgaagagctaggaattggtcgtccatcaacctacgtctcaatcatagataaaataacaaatatttttataaataaagacg

SEQ ID NO: 293211 - DNA, 897 bp, Unknown
  Bacterial polypeptide expressing nucleotide sequence isolated from the Sargasso Sea
attgaaggtgaatacagttggtttaataacatacatgagaacagatggaacaaatatatcaaatgatgctgttactgatttcagaaattatatagataaatcttatggcaaagattaccttccaaacgaaccaaataattattcaggaaaaaaagctaaaaacgctcaagaagcgcacgaggcaataagacctaccgatatatcaagagaaccaaattcagtaaaaaagttcttaagcacagatcaatttaaattatatgacttaatttggtcaagagctctatcttcacaaatggaagcggcaaaatttgatagaaagactattacaataatatcagaagataatttaaatcaatttaaatgttctggatccaccataaaatttgatggttttttaaaacttacaagaattgatgaagatgaagatgaaaaaattctacctgatgttagtaaagaagaagtttttacaaatgactttatagatgagcagcattttactcaacctccaccacgatactccgaagctagtttagtaaaaaaacttgaagagttaggaattggtaggccttcaacctatgcaagtattatttcagttatatcaaatagaggatacgctgatattgtcaataaacgtttttttcctacagatagaggaaaattgatatctgcatttttagaaaaactttttacaaaatatgtagattatagttttactgcaaatttagaagaacagttagatgatattacagctggaaaagaagaatgggttaaggttctagataatttttggaaagattttaaccttaatgtaaataacgttaaggaaaaaagaactagagaagtactagattttattaacgacagtcttggagatttaatttttgaggtagacgaaaa

SEQ ID NO: 293212 - DNA, 756 bp, Unknown
  Bacterial polypeptide expressing nucleotide sequence isolated from the Sargasso Sea
tatgacaaaaaaaattctagttatttgtgaatcaccttctaaaattaaatcacttcaaaaatacttaggtccaagatatattgttaaggcaagttttggacatattcgtgatttagacagaaaggaactatctattgatttagataataattttaaacctaaatatatttctaatccagataagtctagagtaatttctgaacttaaaaaagctatgaaagagtgtaatgaattattaattgcaagtgattgtgatagggagggagaagcaatagggtggcatgtaaccaaaatgttgaaagtaaaaccagaaaatactaaaagaattatttttacggaaattactaaaacagctattcaaaatgctgttcagaatccaactactatagatataaatatgttttatgctcaacaagcacgacgcattttagatcgaataattggatatcttatatctcctatactatggaaacaaattcaatctagctataaagaaaaacaatctctttcagctggtagagtccaaagtgttgtagtaaaacttattaaggaaagagaagaagatatagaaaaatttcaatcagaaacatactataaagtaagtggacaatttagtttacctataaagtctaaagtattatatttaaatgcagaacttaataaagatattaataaaaaaaatactttagatgaatttcttacaaattgtcaatctgatgaattctatattcattctattaaaaccaaaaaaacaaa

SEQ ID NO: 293213 - DNA, 127 bp, Unknown
  Bacterial polypeptide expressing nucleotide sequence isolated from the Sargasso Sea
tatgaatcttgtgatagttgaaagtccggcaaaagctaaaacaattaataaatatttaggtggcgattatacagttttagcaagctatggtcatataagagatcttccttcgaagaatggctctgta

SEQ ID NO: 293214 - DNA, 837 bp, Unknown
  Bacterial polypeptide expressing nucleotide sequence isolated from the Sargasso Sea
gtcgggttcacgatagtgtttgatggtttcatgaaggtaattaatttagatgatgataataatgatgaaaatattttaccaaaagtagaaaaaggagaagtaaatatatctgattttatagatgaacaacattttactcaaccacccccaagatattctgaggctagtttagtaaaaaaattagaggaattaggtattggtcgtccctctacgtacgcaagtattatttcagtaattgctaatagaggttatgcggacgttgttaataaaagattttttccaactgatagaggaaaacttttatctgcttttcttgaaaaactttttacaaaatatgtggattatgactttactgcaaaattagaagatcaattagacgacataacttcaggaaaagaaaactggttaagcgtattagatcaattttggaaagactttaataaaaatgtttcatctgtaaaagaaattagaacaagagaagttcttgatatgttaaatgaaagtttgggagatctaatatttgaaagaaataatgatggtaaaattgatagaaactgcaaattatacaataaaacatgtgtttctggtcaaggcacattaagtttaaaaaatagttttagaggaggtgcatttattggttgttctaactatccagattgcaagtttacaagaccactttcaaagattaaggcatctcaacaaataaatttagcagaacctaagttaattggtaaaaatgataatgataaagaaatttatttaaaaaatggaagatttggtccttacttgcaatatgaattattagaagatgaaatagtaaaaacaaaaaaaagaaaa

SEQ ID NO: 293215 - DNA, 859 bp, Unknown
  Bacterial polypeptide expressing nucleotide sequence isolated from the Sargasso Sea
aagtttttgccttctaattttgaagttctcgcttcaatgggacatgtaagagatcttccaaaaggagctgctgaaatacctgctgcggttaaaaaggaaaaatggtcaaggataggagttaatacaacagaagattttgaaccactttatatagttccaaaagataagaaaaaggttgttaaagagttaaaagatgcattgaaaggtgcgacccagctattactggcaactgatgaagatagagagggagagagtattagctggcatcttatgcaaattcttaagcctaaaataccaactaagagaatggtttttcatgaaattacgaaaaaggcaattaataaagctttagaccaaacaagagaaattgatatggaacttgttcaggctcaagaaacaagaagaatcttagacaggctttttggttatgaattatctcccttactttggaagaaggtagccccccgattatctgctggtcgagttcaatcagtttctgtaagacttcttgtcaggagagaaagagaaagaagatcctttaaaaaagctagttactgggggataaaagcttccctagtaaaagataatgttactttcgaaactaaattgttcagtttaaacggtcaaagaatttctaatggttccgatttcgatgaacagaccggcaaattaaaaccaggaaataaatctttaataattggagaagaaaaagtaaatgatttattgaagactttttcctcagaggattggttagtctcaaaaattgagaaaaaaccatctaatcgtaagccagttcctccatttacaactagcacattacaacaagaggcaaacaggaagcttcgttttctgccagaga

SEQ ID NO: 293216 - DNA, 825 bp, Unknown
  Bacterial polypeptide expressing nucleotide sequence isolated from the Sargasso Sea
agcctctagtaaattaggttttggcgcatcaagaactatgcagatcgcacaaaagctttatcaaggtattgaaattgaaggtgaaactataggattaattacttacatgagaacagatggaacaaatatatcaaatgatgcattaattacttttagggattatattcaaaatgaaattggtaatgaatacctgcctgaaaagtccttaagttactctggtaaaaaagcaaaaaatgcgcaagaagctcatgaagcaataagaccaactgatattattagaacgcccgaaagcgtaaaaaaatacctaagtgctgatcaaaataaattatataatttaatttggtctagagcattatcatctcagatggcttcagctaaatttgatagaaatacaattacaattacatcagatgacgatagtactatttgtaaagctagtggctctgttttaaaatttgatggatttttaaaaatatacaataatatcagtaaagatgataatgaaaatactttacctgacgtatgtaaaggacaaattaacattgaggctttaatagacgagcaacattatactcaaccaccaccaagatattctgaggctagtttagtaaagaaactagaggagttaggtattggtaggccctctacttatgcaagtattatatctactattgctaacaggggttatgcagaaattttaaataagagattttttccaactgatagaggtaaactaatctctgcttttttagaaaaattattctcaaaatatgtagattacaatttcacagcaagcttagaagatcaattagacgagattacttc

SEQ ID NO: 293217 - DNA, 916 bp, Unknown
  Bacterial polypeptide expressing nucleotide sequence isolated from the Sargasso Sea
gcatctaggacaatgcaaatagcacaaaagctttatcaaggtatagaaatagatggtgaaacaattggcttgataacttacatgagaacagatggaactaatttgtccaaagatgcagtgtcagcttttagagattatatccaaaaagaaattggtaaagaatatttacctaaagaggctttaaattattctggtaaaagagctaagaatgctcaggaagctcatgaagcaataagacccacagatataattagaacaccccaaagtgttaagaaatatttaagtgctgatcaaaataagctttatgatcttatttggagtagagctttatcttctcaaatggagtctgctaagtttgatagaaacaccattacaataacttcagacaataatgatactgtctgtaaaacaagcggatcagttctcaaatttgatggatttttgaaaatttataataatcaaaataaagatgatgatgaaaatattttaccagctgtttccaaagggccaataaatattgaagctttattggacgaacaacactatactcagccaccacctagatattctgaggcaagtttagttaaaaaacttgaggaactgggtattggaagaccatctacttatgcaagtataatatctactattgctaatagaggttatgcagagatattaaataaaagattttttcctactgaccgaggaaaattaatttctgcctttttagaaaaattattttcaaaatatgtagattataattttacagcaggattagaagaccaacttgacgaaatcactactggaaaggaaagttggattaaagttttagagcttttttggaaagactttaataataatgtctctgaggtaaaagaaaaaagaactagagaggttttagatctcctcaatgaatagt

SEQ ID NO: 293218 - DNA, 556 bp, Unknown
  Bacterial polypeptide expressing nucleotide sequence isolated from the Sargasso Sea
atgtcaaaacctttagtaattgtagagtctcctacgaaagtaaaaactatatcaaaaatacttgggtctgaatatatagttaaatcaagtgttggtcatattagggatctacctagaaatacaaaatctattcctcctcaatatacaaaagaagagatactttggggagctgtaaagcctgatgaattcgaaaatatttatgttatacctgaagacagaaaaaaaatagttaaagaattaagagaactagcagacaaagctcctgatgtttatctagcaactgatgatgatagggaaggggaagctatcgcctatcacttaaaagaagctcttgaacttaaaaaagaacctaaaagaataaaatttaacgaaattactgaacccgcagtaataaatgctatcgaaaatcctgaagttatagatataggaaaatttaaatcctatgaggcaagaagaactcttgatcgaatgattggatatgaaatatcaccaaaattaagagaccttggtggtgcttttatatctacaggaagagttcaagggcctgctataagac

SEQ ID NO: 293219 - DNA, 823 bp, Unknown
  Bacterial polypeptide expressing nucleotide sequence isolated from the Sargasso Sea
gtcaaaatctgctggcagagttcaatctgtagcattaaaattaattactgaaagagaacatgaaattgagtcttttaaacctgaagaattttggacattaagtgtaaaatttactgatcaaaaaaaacaaaatataacagctagtatcagtcaactggataacacaaaaattgaaaaattttcatttagaaataaggaagaaattaataaagctatttcaaatattaatgaaaaaaaatttagtattactgatatttctagcaaaatagtaaatcgtaatccgtcaggaccatttactacatctactcttcagcaaacagcttcaagtagattggggtttggtgcatctagaactatgcaaattgcacaaaagctctatcaaggtatagagattgagggtgagacaattggtttgattacttatatgagaacagatggaactaacttatctaaagatgcaatattggctttcagagattatattaaaaaagaaattggtaatgtttatttacctaaagagtctttaaattattcagggaaaaaagctaaaaatgcacaagaagctcatgaagcaatcagaccgacagatattattagaacaccccaaagtattaaaaaatatttaagcacagaccaaaataaactatatgatctaatctggagtagagctttatcttctcaaatggagtcagctaagtttgatagaaacacaataaccataacatcagataataatgatactatttgtaaagctagtgggtcagtccttaaatttgatggatttttgaaaatttataacaatcaggctaaagatgatgatgaa

SEQ ID NO: 293220 - DNA, 871 bp, Unknown
  Bacterial polypeptide expressing nucleotide sequence isolated from the Sargasso Sea
ggaaatccgggaattcgaaccggaagaatactggaaagtacgggccgattttgaaggctttcatgcagagctgagcaaagtcgatgggaaagcagtcaaaatccaaaacgaggaagaagcaaaccgggtgacccagtccatcagggccggggaatgtgtgctcaaggaaatcgatgaaagagaagcctcgagaaatcctgcagcacccttcaccacttcaacactgcaacaggaagcatccaacaaactcggtttttcggtcaagaagacgatgctcatcgcacagcagctttatgagggtaattttgagattccggattacagcggcggtctcatcacctacatgcggaccgattcagtgaccctttcgaaagaagcattggcgatggccaacgaagtgatcgaaaaacgctttggaaatgaattcaccctggagaaaccaagatctttccgaaaccgcaccaaaaatgctcaggaagcccacgaagcgatccgtccagtcaacctcgaaatcctgccagatcaggtgatccctcatcttgaacgggaccaggggaggctttatggcttgatctggaaaaggaccctggcaacccaaatgaaagccgccaaaattgcgcgtacgactttccgtatcaatgcaggagaaaaatctgaatatcagtttgaagccaaaggtcagcagattctctttccgggatttctaaaagtctacatggattcgtccagcgatgcccaatcagtcttgggagaaaaggatcttcttctgccccgggttgagcagggccaacgacttcctctgaaagatctgaatgcggaacagctttttaccaaaccaccacctcgttacagcgaagcgagcctggtgaaa

SEQ ID NO: 293221 - DNA, 917 bp, Unknown
  Bacterial polypeptide expressing nucleotide sequence isolated from the Sargasso Sea
cctaataattatacccggaaaaaaagcaaaaaatgctcaagaggctcatgaagctattagaccaacggatgtttctaaaaaaccatcggacatgaaaaaatatttaagtaccgatcaatctaagctttacgaattaatctggaatcgagctgtgtcttcacagatgaatccagctgagtttgataggaagagcataactatagagtctgatgataaaaaaattaattttaaagcaaacggttcaactattaaatttgaaggttatttaaaagtgtataaatttgaagaaaaagatgaagatcttaaaaatattttacctgaagttaaggttggagataaagtgtctataaaagaattaatggatgaccagcattttacagatcctccgccaagatattctgaagcaagtcttgttaaaaaaatggaggagttgggaattggacggccatcgacttatgctagcataatatcagttttatctactagaaattatactgaattattaaataaaagatttcatcctacagatagaggaaagttattatctgcattcctagaaaagttatttaccaaatatgttgattataattttactgctgacttagaaaatcagttagacgaaattactagtggtaaagcagactgggttaaagttttggacggtttttggaaggattttcattcaaatgtaggtcaagttaaggaaaaaagaactagagaggtgttggatctgctgaatgaaagcttaggtgatcttgtgtttgaaagagacaataatgatgttattgacagaaaatgtaaactctgtgagacaggtcaactaagtcttaaaaatagttttagaggaggtgcttttataggttgttctaattatcctgaatgcaaattcactcgaccgttatcaaagtcaaaggctt

SEQ ID NO: 293222 - DNA, 838 bp, Unknown
  Bacterial polypeptide expressing nucleotide sequence isolated from the Sargasso Sea
ttaattgaagacaaaacaaaacctcctgcaagatacactcagcatggactcgtagcactcatgaaatcagaaggaataggtagaccttcgacttatgcgacaacaataaaaaaattacttgatcgcaaatattgtagtgatagtaaaggcaggcttaaacctacagagcaagggataatgctttgcgatgaggtcgttccatattataattcaaacgaaaaaagccttagtctgttttcatctaactttacagctgaaatggaaactgatttagatcaaatagaaacgggtcaacacagtggagctgaggtgtgggaagattttgttgattcatttagagagcttcatgaatctgcagtcgcaaagaaaaaagaaaaacctacaaagcggcaattagattattatcttaggttggcagatttagtttcacaagaagaattagtaaggataataggcgatgatgatcccagagaaatggatggaaaaaggattggagaagttatcgatgatttaagaactgctacagaagatatgcctatgccagcatctccaaagcaaatatcttatgcgaagagtttagcagagtctttggaaatggatgaatcagcagcctgtgaattagtaggtctttcaaatttcagcgagcttactggtggcaaatctggaacagcaagtgaactaataggtaatttgaaaggtaaagtggatagtactccaagaccacctagtcccaaacaattaaatttcattaaaaatttagccaaaaaggctgaattagatgaagaaggggcttgtaagatggtcggtatcagttcttattctgaattatcaggaggcc

SEQ ID NO: 293223 - DNA, 655 bp, Unknown
  Bacterial polypeptide expressing nucleotide sequence isolated from the Sargasso Sea
catgtcgaaaccattagtaattgtagagtcacctactaaggtaaaaacaatttcaaaaattctaggtgatggttatatagttaaatcaagtgttggacatattagggatctaccaagaaatacaaaatctataccttcagcatttaaaaaagaagacatattatggggtgctgtcaaacctgagaattatgaaaatatttatgttattccagaagatagaaaaaaaattgtaaatgaacttaagggacttgccgacaaagcaccagaggtatatcttgcaactgacgacgatcgagaaggtgaagcaattgcttatcatttaaaagaagcattagagctgaaaaaagaaccaaaaagaataaaattcaatgaaattacaaatacagcagttttaagtgcaattaaaaatccagaaaccattgatatcggtaaattcaaatcgtatgaggcaaggagaactcttgatagaatgattggctacgagatatccccaaaacttagagatttaggtggagcttttatatctacaggtagagtccaaggtcctgcaataaggctcattgttgaaagagaagaagagaggttgagcttcgtaaaatcaaaatattttgagataaaagcaagttgtaagagtcaaggttttgaatttgctgca

SEQ ID NO: 293224 - DNA, 916 bp, Unknown
  Bacterial polypeptide expressing nucleotide sequence isolated from the Sargasso Sea
tgcttctggtagattgggttttggtgcatcaagaacaatgcaaatagcacaaaaactttatcaaggaatagaaattgagggagatacagttgggttaattacttatatgagaacggatggaactaatttatcagctgatgctgtctctaattttagaaattttattaaaaaagaatatggaaatgaatacttgccaaaaaatccaaataattactcaggaaaaaaagcaaaaaatgctcaagaagctcatgaagcaataagaccaactgatattaatagaaatccagattctgttaaaaagtatttaagttcagatcagcaaaaattatattctttaatttggtctagagctctatcgtctcaaatggaaacagcaaaatttgatagaaatacaataacgattgagtctgaagaaggtaaaactatatgtaaatcaagtggatcggttttgaaatttgatggatttttaaaagtttattcaaatcaaaacaaagatgatgatgagcaaattttgcctgagatgtcaaaaggaccaattaatatagaagctcttattgatgaacaacattttacccaaccttccccacgttactctgaggcaagtttggttaaaaaattagaggaattaggaattggtagaccttcaacttatgcaagtataatttcaacaatagcaaatagaggttatgcagaaatagttaataaaagatttttcccaactgacagaggtaaattaatttctgcatttttagaaaaactattttcaaagtatgttgattataacttcacagctggactagaggatcagctagatgaaataacttctggaaaagaaagttggttaaaagtcttagaaatgttttggaaagattttaatagcaatgtttcagaggtaaaagaaaaaaagaacaaagaa

SEQ ID NO: 293225 - DNA, 409 bp, Unknown
  Bacterial polypeptide expressing nucleotide sequence isolated from the Sargasso Sea
aatgaatcttgtaatagttgaaagtcctgcaaaagctaaaaccataaataaataccttggtaaaaactataaagtattggcaagttatggtcatgttagagatctgccgtctaaaaatgggtccgttgatcctgaaaataattttaaaatggaatgggaattagattccttttctaaaaaatatgttaaagaaataacagatgctgctgctgactctgaaaaaataatattagcaactgaccctgaccgagaaggagaagcgattgcatggcatgtaagagaaatcctagaaagcaaaaagcttttaaaaggaaaaaaagttgagagagttgtatttaatgaaattacaaaaaaagctgttactaatggtatcaataatcctagggaaattgaatcccttttggttaat

SEQ ID NO: 293226 - DNA, 283 bp, Unknown
  Bacterial polypeptide expressing nucleotide sequence isolated from the Sargasso Sea
atgaatcttgtaattgtagaaagtcctgctaaagcaaaaacaataaataaatatttaggaaaagattatattgttttagctagttatggacatgtgagagatttaccatcaaaaaatggttctgtagatccagaaaacaattttaagatggaatgggaacttgatagtttctcaaaaaaatatgttaaagaaataactgatgctgctgctgattctgaaagaattattttaaatactgatcctgatagagaaggtgaagccatagcttggcatgtaagagaaa

SEQ ID NO: 293227 - DNA, 806 bp, Unknown
  Bacterial polypeptide expressing nucleotide sequence isolated from the Sargasso Sea
caagacaatcaacaagtatctaggaccggattataccgtccttgcctcttatggccatgtgcgcgatctgcctgccaaggacggatcggttgataccgagcatgatttcgaaatgaaatgggagatcggaaccgacagtcgcaaacatgtcaaagccatcgcggatgccttggccgacgacaacaacctcattctcgcgactgaccccgaccgcgaaggcgaagcgatctcgtggcaccttgaagaagccctgcgcaaacgcaaggtaatcaaaaaggacacaccggtcagccgcgtcgtgtttaacgccatcaccaaatccgccgtcaccgaggcgatgcaaaacccgcggcaggtggatgcgcccttggtacatgcctatctggcgcgccgcgcgcttgactatctcgtgggctttaacctctcgccggtgctgtggcgcaaattgcccggcgcgcgctccgccggacgggtgcaatcggtgtgcctgcggttgatcgttgaacgcgagatggagatcgaagccttcaatccgcaagaatactggtccgtcaaggccatgatcgaaaccccgcgcgggcaaaactttgaggcccgcctgacggttctgggcggcaagaagttggagaaattcgacattgccaccgcgacggccgccgaattggccgtgggggccgtggccgcgcgggccatgcatatcaaatcggtggaggccaaaccggccacgcgcaatccctccgcccccttcatgacatcgaccctgcaacaagaagccagccgtaaattcggcatgggcgcacgtcagg

SEQ ID NO: 293228 - DNA, 721 bp, Unknown
  Bacterial polypeptide expressing nucleotide sequence isolated from the Sargasso Sea
gcaaaagcgaaaaccattaataaatatttgggtaaagattataaagttttggctagttatggtcatgtaagagatcttccttcaaaaaatgggtctgttgatcctgaaaataattttaaaatggaatgggaattagacacattctcaaaaaaatatgtgaaagaaattacagacgctgcggctgactctgaaaggattatattagcaactgatccggatagagagggtgaagccatagcatggcatgttagagagattcttgaaagtaaaaaattattaaaaggaaaaaaagttgaaagggttgtgtttaatgaaataacaaaaaaagctgttacaaatggaataaacaatccaagagagattgagtccctattggtaaatgcgtacatggcaagaagagccctggactatctcgttggttttaatatttcaccaattttgtggactaaacttcctggctcaaaatctgcaggtagagttcagtctgttgctctcagacttataactgaacgtgaacatgaaattgaactttttaaaccagaggaattttggacaatatcaagtaactttaactatgatgataaacttattaaatctaaactatctatttacaatagtaataaaattgaaaaattttcgtttagaagtaaatcagaatcagaaaaggctttgaatgaaataaaaaaacagtcgtacaaaataactgatgtatcttcaaaag

SEQ ID NO: 293229 - DNA, 673 bp, Unknown
  Bacterial polypeptide expressing nucleotide sequence isolated from the Sargasso Sea
gaatgggaagttgacagtttttcaaaaaaatatctaaaagagataactgatgcagcaaaagattcttctaagatcatattagctaccgaccctgaccgtgaaggtgaggcaattgcctggcatgtgaaagaatatttaaatgaaaaaaaacttttaaaagataaagaaattgaaagagttgtatttaatgagataaccaaaaaagctgtcatacaaggaattgagaatccaagacaaattgagcctcacctagtggacgcgtatatggccagaagagctttagattacttagttggttttaatatttcgccaatcctttggacaaaactaccaggctcaaaatccgcaggaagagttcaatctgttgctctaaaattaattactgaaagagagcatgagattgagtcatttaaaccagaagaattttggactttaagtataaactttgctgatcaaaataatcaaaaaattactgcaagtatcagtctgttagataataataaaattgaaaaattttcattcagaaataaagatgaaataaatatagcagtagcaagtataaataaaaaaagatttaatattacagatatttcaagtaaaattgttaatagaaatccattaggaccatttactacatctactcttcagcaaactgcgtcaagtagattgggtt

SEQ ID NO: 293230 - DNA, 188 bp, Unknown
  Bacterial polypeptide expressing nucleotide sequence isolated from the Sargasso Sea
aatgaatttagtcattgttgaaagtccagccaaagcaaaaacaataaataaatatttaggtaaagattatacagttcttgcaagttacggtcatataagagatttaccatctaaaaatggatctgtagatccagaaaataaattcaaaatgatatgggaagtagatagtttttcgaaaaaatatttaa

SEQ ID NO: 293231 - DNA, 994 bp, Unknown
  Bacterial polypeptide expressing nucleotide sequence isolated from the Sargasso Sea
atgcgagtgctcaaaaacttttacgaggctggaagaatcacttacatgaggacggatgctcctagtttaagcaatgattcaattgatgatgcaagattatttattaaagatactttagctgatgaatatcttacagataaaccacgaatctattcaggtaaagaaaatgctcaagaggcccacgaggcaattagaccaacaagtgcaagcttgacgtcagaaaagctgactggtcactcagaagaagaagttaaattatatgacttaatttggaggcaattcattgcatgccaaatgcctgatgccaaatatttatcgataaatgcaaaagttgttgttgatgattatgttttcagtgcaagaggaagagaagtaatttttgatggctatacaaaaatatctgtaccaaatgccaaaaagtcagatcaggaaaatcttcctagcctcgaacagggacaagttctcaaattggtagaagtaaagaatgagaaaaagtttacaaagcctcctgctcgattttctgaggcagcactcgttaaggaacttgaaagcaaaggaataggtagaccatcaacatatgcagcaataatttctacaatccaggctagaggatatgtgaagcttgaaaataagagattctttgtaaataaaattggcttgattgtttctgacagactaattgaaagcttcaatgaaattatggattatgattttacagcgaatctagagaatgagcttgatgaaatagcgtctgggaatcttgaatggaaatcagttttaaataagttttatcagacatttcaagatgatcttaaaagtgcagaatcggctgaagatggcatgaagccaaatgaaccaactgaaactaatattctttgtccttcttgcaataagagtaatatgttaatcagaaattcagctaatggtgttttcttaggttgtgcaggctattttaaatgtggtgatgagcaatgtaagcatactagaacctaat

SEQ ID NO: 293232 - DNA, 916 bp, Unknown
  Bacterial polypeptide expressing nucleotide sequence isolated from the Sargasso Sea
ggtttgattacttatatgagaactgatggaactaacttatccaaagatgcactttcagctttcagagattatattaaaaaagaaattggtaatgattatttacctaaagaggcattaaattattctggaaaaaaagccaaaaacgcacaagaggctcatgaggcgatcagacctacagatattattagaaatccccagagtattaaaaaatatttaagtacagatcaaaataaactatatgacttaatctggagtagagctttatcttctcaaatgcagtcagctcagtttgatagaaataccataaccataacatcagataataatgacaccatttgtaaagctagtgggtcagttatgaaatttgatggatttctgaagatttacaacaatcaagctaaaaatgatgatgaaaatattttaccatctatgtctaaaggacctattaatatcgaagcatttttagatgaacaacattatactcaaccacctccaagatattctgaggctagtttagttaaaaaactagaagaactgggtattggaagaccgtctacttatgcaagcattatttctacaatagctaatagaggatatgctgaaatactcaataagcgtttttttccttcagatagaggaaagctaatttcagcttttttggaaaaattattttcaaaatatgttgactataattttacagcaggtcttgaggatcaacttgatgaaattactaccggtaaagaaagttggattaaagttttagaattattttggaaagactttaataataatgtttccgaagtaaaagaaaaaagaactcgggaagttttagaccttttaaatgatagtttaggagatttagtttttgataaagatgataaaggaaatattatcagaaaatgtcaattatgtagtt

SEQ ID NO: 293233 - DNA, 910 bp, Unknown
  Bacterial polypeptide expressing nucleotide sequence isolated from the Sargasso Sea
gggaaagaaaatgctcaagaggcccatgaggcaataaggccaacaagcgcaagcttaactcctgaaaagctcaccggtcactcagaagaagaagttaaattatatgacttaatttggagacagtttattgcatgccaaatgccagatgcaaaatatttatcaattaatgcaaaagttgttcttgatgattatgttttcagtgcaagaggaagagaggtaatttttgatggctacacaaaaatatctaaacaaaatgctaaaaaagcggatgaagaaaaccttccaagtttagaagaaggtcaggttttaaaattggtcgaagtaaagaatgagaaaaagtttactaagcctcctgctcgattctccgaggcagcacttgtaaaagagcttgaaagtaaaggaataggaagaccatccacgtatgcagcaattatttctacaattcaggctagaggttatgtgaagcttgaaaataaaagattcttcgtaaataaaattggcttgattgtctctgacaggctgatagagagtttcaatgaaattatggattatgattttactgcaaatttagaaaatgaacttgatgaaatagcgtctggtaatcttgagtggaaatcagttttaaataagttttatcaaacatttcaagatgatcttgagagtgcgggatcggctgaggatggaatgaaaccaaatgatccaactaagaccgatattgtttgtccttcctgtaaaaaaagcaatatgcttataagaaactcggcaaatggggtctttttgggttgtgagggttatcacaagtcaggtgatgaccaatgtaagcacacgatgaatctcataagtggagatgaggcgataagcattgatgaccaagaggaagcctcaaatctttttattaaaaaacgatgtc

SEQ ID NO: 293234 - DNA, 821 bp, Unknown
  Bacterial polypeptide expressing nucleotide sequence isolated from the Sargasso Sea
tgaatctaaattaatatcaaatataaacttattaaatggtgataaaattgaaaagttttcatttaaaaataaagaagatataaatttagcaatagataaaataaaagagaaaaaatatcaaattactgatattagttcaaaagtttattcaagaaatcccttaggtccttttacaacatcaacactacagcaaacagcatcaagtaaattaggatttggcgcttcaagaactatgcaaatagcacaaagattataccaaggtatagatattgatggagatacagtcggtctaattacttacatgagaacagatggaactaatatttcaaaagatgctattaattcatttagaaattatattaatgaaaattacggagatgaatatttgccggataatcctttaaattattctggtaaaaaagctaaaaacgcacaagaagcacacgaagctataaggccaacagaaataaacaggagtccagaaaatttaaaaaaatatttaagctcagatcaattgaagctttataatttaatttggaacagatccttatcttcacaaatgaaatctgctcaattcgatagaaaaacaataacaatttcatccaatgatgaaaaaaatatatttaaagtaagcggatcaactataaaatttgacggatatctaaaattgtcaaaaatagatgatgaagaagaagaaaagattttaccagatgtagaaaaaggagaaattaaattagaaagttttaaagacgaacaacatttcacgcaacctcctcctagatattctgaagcaagtttggtaaaaagatggaagaattagg

SEQ ID NO: 293235 - DNA, 907 bp, Unknown
  Bacterial polypeptide expressing nucleotide sequence isolated from the Sargasso Sea
atcttggtattcgttcaagtattggctagtattgggcacgttagggatttgtctccaaaaaatgacgctatcgatactgaagataattttaaaatgaaatgggaaacaagtgacagaggaaaaaaagttattaaagatattacagatgcagctaagaattctgaaaatttatatttagctactgaccctgatagagagggggaagctatagcatggcatgtagaaaatatgctacgagaaaatccaaaattagaaaatgttaatattaaaagaataacatttaatcaaattactaaaaatgcagttttagaatcgcttaaggagccaaggaaaatagatgagaatcttgttaatgcttatttagcaagaagagcccttgattttttagtaggttttaatctttcaccagtcctatggagaaaacttccaggaagcaaatctgctggaagagttcaatcggttgcattaaaaatcattactaaaagagaattagagattgaaaaatttgaccctcaggaattttggtcaataaaagctttgtttaacatagataaaagtcaacaatttgaagctagattaataaattttcactctgaaaaaatagataaactaacaataaaaaatgaagattctgcttctaaaaaacaagagttaatagataaaagtaattataaaatatcaaaaattgaaaaaaaagaagtcaaaagaaatccttatccagcatttacaacttcatccatgcaaattgaagcaagtagaaagctaggattttcagcaaatcaaactatgcgtgttgctcaaaaattatatgaaggaactgaaattaacggagaaccaacgggcttaataacctatataaggactgatagcgtagtaatgtcaaatgatgcaattaaaagaaattaga

SEQ ID NO: 293236 - DNA, 132 bp, Unknown
  Bacterial polypeptide expressing nucleotide sequence isolated from the Sargasso Sea
tatgtcaaaaactcttgttatagttgaatcccctgccaaagctaagactatttctaagtatctagggtcagactatatcgtcaagtccagtgttggacatatacgagatctgccaaaaggtaagtctaaaaa

SEQ ID NO: 293237 - DNA, 847 bp, Unknown
  Bacterial polypeptide expressing nucleotide sequence isolated from the Sargasso Sea
agatattcagaagcaagtcttgttaaaaagttagaagaattaggaattggacgaccttcaacatatgctagtatcatatcagtaatctcaaatagaggttatgcggatatagaaaacaaaagattttttccaactgatagaggtaagttactctctgcttttcttgaaaaattattttcaaaatatgttgattatgattttactgcaaaattggaagatcaattagatgatattacagctggcaaagaaaattggattaaagtcttggaggaattttggagagattttaatttgaatgtatctgaagttaaagaaaaacgtactagagaagtcttagatatgcttaatgagagtttaggctcattaatatttgaagtcgataaaaacggtaaaattaacagaaaatgcaaattatgtgatagtggtcaattaagtttaaaaaatagttttcgtggtggtgcttttattggatgttcaaattatccagattgtaaatttacacgacctctttcaaagactaaagctgctcaacaattaactttagcagaaccaaaattaattggtcaaaatgatataggtaaagacatatatttaaaaaatggaagatttggcccctatctacaatatgaaaaagaaattgatgatgtagaagaagaaaaaaagaaaaagaaaaaaataaaaaaagaagataataatatgaaaaatgtatctatccccaagggaattgatattaaaagtatagatttagatagagctaagtatttatgttcacttccaattagtttgggtaaaaatcctgaaaatgataaagatattactgtaaatgttggtcgttttggtccttatt

SEQ ID NO: 293238 - DNA, 199 bp, Unknown
  Bacterial polypeptide expressing nucleotide sequence isolated from the Sargasso Sea
atgaatttggtcattgttgaaagtcctgctaaagctaaaactattaataaatacttgggagatgattataaagttttagcaagttatggtcacataagagacttaccttcaaaaaatggctctgttgatccagatcaagattttaaaatggagtgggaagttgatagtttttcaaaaaaatatctaaaagaaattactg

SEQ ID NO: 293239 - DNA, 880 bp, Unknown
  Bacterial polypeptide expressing nucleotide sequence isolated from the Sargasso Sea
cttgcagggcatattacttatcctagaacagataatatagctatagggggctcagaagaaaaagaatatgccggatcacctctagaggaaattagaaactatattactggcaactttgatcaggcctttttaagcaagcaagtaagggtttataagggtaaattgactgctgctcaggaggcgcatgaagccattcgaccagcaataatttctgtaaaaccttcagatttagatttaccgactagtgaagaaagactttataagttaatttggaatagaacagttgccagtcaaatggaaagttctaagtatgaaagaaaatctttaactatttcttctgaagatagtaaatttgaatttaccgcatcttcaagaaagaatatttttgctggatttgaaattctttctactgctgaagaaaaaaatatagctgaatttcctgaggggcttgaagaagggtcgaaagtaaaaattatttctaagcaagctgaacaaaagttctcacctccgccaaatcgttactcagaagcatcattaataaaaaaaatggaagaagaaggtataggaagaccttcaacttacgcaacaattttagaaggccttagaactaaaaaatacatatacggcggaaaatctatgattccgtctgatttaggtagaattttgacagcttatctacaaaaagtgtttgaagatttttttatagaaactaaatttactgcaaacctagaatctacccttgatgaaatagcttcaggcaatgaagagtatgaaacagttttaaatgaattttatattgagttacaagattacttaaaccgtaagattaacgatattgaaatcagtaataaagatgagtttaaaactagacaagtcttag

SEQ ID NO: 293240 - DNA, 857 bp, Unknown
  Bacterial polypeptide expressing nucleotide sequence isolated from the Sargasso Sea
tgcacaaagattatatgaagctggacacataacttatatgagaacagatagtgtgacactttctgaaactgcacaaaattttattaagaatgctattgaaacaaagtttggatctaattatcatcaatccagaaattttaataataaaagcaagaatgctcaacaagcacatgaagcagttagacctacaaattttttaaataacattcaaaatcttgatgctgatcaatctaacctttatgacttaatttggagaagaagtgtggctagtcaaatgtcagatgcaaaagttgataaaactactgtaaaaattaaatcaaacaatcatgaaggtcttttccaatctgatggtgaagtgatcaaatttgatggttttttaaaactttacattgaatcaaaggacaatcaaaataatgatgattcccaaaataatgtactcccaaattttactgaaggagaaagaattactaaggataaaattctagttacgcagatgttttctagaccaccttttagattcactgaggcttcacttgttaaaaaacttgaggagcttggcataggtcgtccttctacatatgctcccactataacaactgttatgaacagaaagtatgttttcaaaggaactaataacgctcaaacaagggagatagtacaatatattattgattctaatattaacagaaatgttaatcaagaaaattatggatccaacaagggaaaattagttcctagtgaagtagggcttttagtgaatgaatttctaacaaataacttcaaaaacattattgattataatttcacagcatctgttgaaaatgaatttgactcaattgctaatggatcaaaggatt

SEQ ID NO: 293241 - DNA, 122 bp, Unknown
  Bacterial polypeptide expressing nucleotide sequence isolated from the Sargasso Sea
tatgaatcttgtaattgttgaaagtcctgcaaaagctaaaactataaataaatatctaggttcagattatacggttttggcaagttatggtcatattagagacctgccttcaaaaaatggtt

SEQ ID NO: 293242 - DNA, 448 bp, Unknown
  Bacterial polypeptide expressing nucleotide sequence isolated from the Sargasso Sea
tatgtcaaaatctttagtaatagttgagtcgccggcaaaggctaagacgatatcaaaatatcttggttcagaatatattgttcaatcaagtgttggtcatataagagacttaccaaagaaaggtactggtacatccaagagatcttcaataccaaaacatattagtcctgaggaaaaagctaggcttaaagttattaatgatagaaaaagattaattagaagaatgggcattgatccagataatggatggaaagctgattggcaaataattccagaaaaagagaaagttttaaagagtttaaaaaaagctgcaaaaaatgttgataatatatatttggcaactgacttagatcgagaaggtgaggcaattgcatggcatctgaaagaagctcttggctcagacaaatataattattctagggtaagatttaatcagataactaaggat

SEQ ID NO: 293243 - DNA, 891 bp, Unknown
  Bacterial polypeptide expressing nucleotide sequence isolated from the Sargasso Sea
aatgcaaattgcacaaaaattatatcaaggtgttgagattgatggagatactgttggattaattacttatatgagaactgacggaactaatttatcagctgatgcagtaaatgattttagaaattttattaaaaatgagtatggtaatgagtatttgcctgcttctgcaaataattattctggtaaaaaagctaaaaatgcacaagaagctcatgaggctattagaccaacagatataaatagagcacccgatactttaaaaaaatatttaagcagtgatcaacaaaaactatacaatttaatttggtctagggctttgtcatcacaaatggaagttgctcaatttgacagaaataccataacaatagagtcagaagataataagacaatatgtaagacaagtggctctgtactaaaatttgatggttttttaaaagtttactcaaatacaagtaaagatgatgatgaagaaattttaccagaaatgtctctaggaccaattaatattgaagcattaatagacgaacaacattttacacaaccacctccaagatattctgaagcaagtttagtcaaaaaattagaagaattgggaattggtagaccttctacttacgcaagtataatttctacaatagctaatcgaggttatgcagaaatagtaaacaaaaggttttttccaacagatcgtggcaaacttatctctgcatttttagaaaaattgttttctaaatatgttgattataactttactgcaggtttggaagatcaattagatgaaattacatctggtaaagaaagctggataaaagttttagagatgttttggaaagattttaataataacgtctctgaggttaaagagaaaagaaccagagaagtgttagatct

SEQ ID NO: 293244 - DNA, 985 bp, Unknown
  Bacterial polypeptide expressing nucleotide sequence isolated from the Sargasso Sea
aaagaaatcggtaatgaatatttacctgaaagtgctttaaattactctggcaaaaaggcaaaaaatgcacaagaggcacatgaagcaataagacccacggatattatcaggactccccaaagtgtaaaaaagtatctaagcactgatcaaaataaactttatgatttaatatggagtagagctttatcttctcaaatgcaatctgctaaatttgatagaaatactataacgattacatcaaataataatgatacagtatgcaaagcaagtggatcagttcttaaatttgatggatttttaaagatatataataatcaaggcaaggatgatgatgaaaatattctaccctctgtatctaaaggacttgtaaatattgagtccttaatagatgagcagcattttacacagcctcctccaagatattctgaggctagtttggtaaaaaaactagaggaattaggaataggaagaccatctacttatgcaagtataatttctacaatagcaaatcgaggttatgcagagatattgaataaaagattttttcccactgatagaggaaaacttatttcggcttttcttgaaaaattattctcaaaatacgtggattacaactttaccgctggtttagaggatcaattggacgaaattacaactggtaaagaaagctggattaaagttttggagctgttctggaaagactttaataacaatgtgtctgaagtaaaggaaaaaagaacaagagaggttttagatcttttaaatgagagtttaggagatttggttttcgataaggatgataaaggaaatattgtaagaaagtgtcaattatgtaattcagggatactaagcctaaagaatagctttaggggtggtgcatttattggttgttcaaattaccctgaatgtaaatttactagacctctgtataaagctaaagcagctgcacaagcacagttagcagaacccaaaatttatggaaaac

SEQ ID NO: 293245 - DNA, 841 bp, Unknown
  Bacterial polypeptide expressing nucleotide sequence isolated from the Sargasso Sea
atacgcacaaataatatccactatacaagataggggttatgtagaaatccaaaatagaaggttttttgtaaaaaaaattggtcatattgttattgataggttaattgagagttttgatgacattatgaattatgatttcaccgctaaatttgaagataatcttgataaagttgccaatggagagcttgattggaagattgtgcttgataacttctataatgctttccaaaatgatttaatctctgcttctgatgatgatggtggcatgagaggcaatcagccaatatctacaaatattaaatgtccttgtgaaaagactaatatggttatcagaaactcttcaaacggggtgtttttaggctgttctggatatcagaatttaggtgatgataagtgtaaaaaaactttaaatttagtttctggtgatgaagcaataagcgttgatgacactgaagaagcagcaaatttaatgattaaaaaaagatgtgaaaaatgtgacaccagtatggacaattatcttattgatgagaatcgtaaactgcatgtttgtggaaagagtccagactgtgatggttattttgtagaagatggccaatttaaaataaaaggttatgatggtcctatattggaatgtcataaatgtggatcagaaatgcaattaaaaaccggaagatttggaaagtattttggttgtcttaacgaagattgtggcacaacaagagccttgcaaagaaatggtgaaccaaaacctctgagcatggagccaatcagcatacctaaccttctttgcgaaaaatgtgaggatcattttctcttgagagatagcatgaagggcttattt

SEQ ID NO: 293246 - DNA, 640 bp, Unknown
  Bacterial polypeptide expressing nucleotide sequence isolated from the Sargasso Sea
tgttggatttacattatctcctgttttatggaggaaacttcctggtgctcgttcagcgggacgtgttcaatctgtagcattaagattaatatgtgaaagggaaatagagattgagtcttttattcctcaagaatattggtctattaatggtcatttctcatacgaggataacgatccttttgaagcaaaactaactcattttgataataaaaaattagagcaatttgatattaataatgaggataggtctgaagaaattaaaatagctattcaagaagcaaattttaaaataaccgatatacaagaaaaaaatgtatcaagaaaaccgtcgccaccctttattacatctacattacaaatggaagcctcaagaaaacttaatatgacagcaaaagtaacaatgatgacagcacaaaaactttatgaagctggcttaataacatatatgcgaactgacggtgttcaaattggtaaagagagcattgaagaaatcagatctagtattggggcaatttatggggaagattttcttccagacgaattaagagattaccaaggaaatattgcaaatgcacaagaagcacacgaagctataagaccgaccgacccgaaaaaaaacaccagatattgtaaaaaatga

SEQ ID NO: 293247 - DNA, 820 bp, Unknown
  Bacterial polypeptide expressing nucleotide sequence isolated from the Sargasso Sea
aaatcctgatgccccattctctacatcaaccttgcaacaaacttcatcaagtatattcggatttggtgcatcaagaactatgcaaattgcacaaaaactttttcaaggaatcgaaatacatggtgaaacagtaggtttaattacctatatgcgaacagatagtacagaaatttccaaagaagctatagagtcttatagaacttatttaaataataactttgatagcaattatttgcctcaagagattagaacttataaaagtaaaaaagcaaagaatgctcaggaagcacatgaaggtattaggccaacagatattaatttaagacccgatgatttatccaaatttctcgatacagatagccttaaactttataaactaatttggaaaagagctttggctagtcaaatgagctcagcaatatttgagagaactgctcttgagattagttctgaagataattcagtcaagcttagggcaaatggatcaattccaaaatttgatggtttcttaaatatttacagtgaattcaaagtaaaaaatgaagactcagagaaaaaaaatgaagatgaagaatctgaagatgagggttcattgcccagtgttgacttaaatacaaagattaataatgttactcctgaaaatactcaacactttaccctacctcctccaagatattctgaagcaagtttagtaaaaaaacttgaagaacttggaattggtaggccatcaacttatgcaagtattatttcagtgctaaaaatgagaagttatgttgaagttgaaaaaaatagatttattcctgaagatagagcgatatta

SEQ ID NO: 293248 - DNA, 745 bp, Unknown
  Bacterial polypeptide expressing nucleotide sequence isolated from the Sargasso Sea
gctatacgtccaacagaaataattcgaaaaccagaagatatgaaaaaatacttaagtactgatcaatataaactttataatttaatatggtctagatctttatcatcacaaatgcagtcagcaaaatttgatagaaaaactattaccatcaactcagatgatgataaaaatatattcaaagctagtggttcaacattaaaatttgatggtttccttaaactttataagatcgatgaaaatgatgatgacaatgaaaatactttgcctgatgttgaaaaaggtgatgtaatgtttgaagatcatgttgatgaacagcactatacacaaccaccgcctagatattccgaggcaagtctagttaaaaaattagaagagctaggaattggaaggccatctacttatgcaagtattatatcagtaatagctaatagaggttatgctgatataaataataaaagatttttcccaactgatagagggaaattactttctgcttttttagaaaaattatttaccaaatatgttgattatgattttactgcaaaattagaagatcaattagatgatataacatcaggtaaagaaaattggataactgttctagaaaacttttggaaagactttaattctaatatttcaggtgtgaaagaaaaaagaaccagagaagtattagatcttttaaatgaaagtcttggatcactaatatttgaggtcgataaggatggaaatattgatagaaaatgca

SEQ ID NO: 293249 - DNA, 883 bp, Unknown
  Bacterial polypeptide expressing nucleotide sequence isolated from the Sargasso Sea
gttgccgtgaggatcctggttgaccgagaacgggaaatccgggaattcgaaccggaagaatactggaaagtacgggcggattttgaaggctttcatgcagaactgagtaaggttgatgggaaagcagtcaaaattcaaaacgaggaagaagcaaaccaggtaacccagtccatcagggccggggaatgtgtgctcaaggaaatcgatgaaagagaagcctcacgaaatcctgcagcacccttcaccacttcaacactgcaacaggaagcatccaacaaactcggtttttcggtcaaaaagacgatgctcatcgcacagcaactttatgagggtaattttgaaattccggattacagcggcggtctgatcacctacatgcgaactgattcagtgactctctcgaaagaagcattggcgatggccaacgaagtgatcgaaaaacgcttcggaaatgaattcaacctggagaaaccaagatctttccggaaccgcaccaaaaatgctcaggaagctcacgaagcgatccgtcctgtcaacctggaaattctaccagatcaggtgatccctcatcttgaacgggaccaggggaggctttacggcttgatttggaaaagaaccctggcaactcagatgaaagccgccaaaattgcgcgtacgacttttcgtatcaatgccggagaaaaatctgaatgtcagtttgaagccaagggtcagcaaattctctttccaggatttctcaaagtctacatggattcctccagcgatgcccaatccgtcttgggagaaaaggatcttcttctcccccgggttgagcagggtcaacgacttcctctgaaagatctgaatgcggaacagctttttaccaaaccaccaccccgctaca

SEQ ID NO: 293250 - DNA, 880 bp, Unknown
  Bacterial polypeptide expressing nucleotide sequence isolated from the Sargasso Sea
gagagagaaagaagatcttttaaaaaagcaagttactggggggattaaggcttctttattaaaagataatattacatttgaaactaaattatttagtttaaacggtcaaagaatatctaatggttccgattttgatgaacagactggcaaattaaaacaaggaaataaatctttgataattagtgaagaaaaggtaaatgatttgttgaaggctttttcttctgaggattggttagtctcgaaaattgaaaaaaaaccatcgactcgtaaaccagttcctccatttacaactagtacattgcaacaagaagcaaatagaaagcttcgtttatctgcaagagaaactatgagatgtgcacaaggtctatatgaaaggggtttcataacatatatgagaactgattcagttcatctttccgagcaagctgtaagagcagctagagagtgtgtaagttctaagtatgggaaagaatatttatctaattcaccaaggcaattcaattcaaatgcaaggaatgctcaagaagcacatgaagctattaggcctgcaggtgaaatcttcaaaactccaaaagaaactaacttaacaggtagagatttatctctttacgatttaatttggaaaagaactgttgctagtcaaatggctgaagctaggctaacaatgattaatgctgaaattactgttggggatggattatttaaatctagcggcaaaagtattgattttgcaggattcttcagagcttatgtcgagggtagtgatgatccaagttcatcacttgaacaacaagaaataattcttccaaatttaactgcggggacaagtcttgatgttactaataaggaatccactcatcatgaaactaaaccaccagca

SEQ ID NO: 293251 - DNA, 868 bp, Unknown
  Bacterial polypeptide expressing nucleotide sequence isolated from the Sargasso Sea
ggcgagtttaaaaataaagaagataagatcattaattctagactaacggtttataatggcaaaaaagtagataaactcgatattaaaaatgagagtgaggcgacaaaaatttttaatgatattaaaaattctactttcactgttggaaatatcacgaaaaaagaagctaaaagaaacccctaccctgcttttactacatctacaatgcaaattgagtctagtcgtaaacttggccttagtgcaagtcaaacaatgcgaacagctcaacgtctttacgaaggaacagatattaaaggagaaacaactggcttaataacttatatgcgaacagatagtgtcgttatgtcaaaggaagctattaatcaagttcgaagctttgtaactgataattatggtgcaaactatttacctgaagctccaagagtttataaatctaaagctaaaaatactcaagaagcacatgagtgtattagaccgacaaatatttacctaacaccaaaagatattaagcaatacattaccttagaagaatacaaattatatgaaattatttggcaaagagctgtaagttcacaaatggcaagtgctgtattagatcaagtagctgttgatattacaaacgaagataaaaaaattgttttacgagcaaatggatcaacaattaagtttcctggaatgtacaaagtttatcaagaagctaaagatgatgataaagatgaggagaaagaaacaatacttccagtcatgagtgagggagaaagtttgaatttaaatgaagttgaaaagacacaacattttacctcccctcctcctcgttatactgaagcaagcttagtaaagaaacttgaagaacttggcattggtagac

SEQ ID NO: 293252 - DNA, 655 bp, Unknown
  Bacterial polypeptide expressing nucleotide sequence isolated from the Sargasso Sea
aatgccagtagttgttgtagagtcaccagcaaaagcaaaaacgattaataaatatcttggttccgattacaccgttttagcatcatatggtcatgtcagagatttaccacctaaagacggatcagtggacccggaaagaggttttgatatgaaatgggaaattggcgctgacagtaaaaaacatgtcaaagccatagctgatgcccttaaagaagataatgagctgatattagcaacagatccagatcgcgagggtgaagccataagttggcatctcgaagaaacactgcgaaaaaagcgcgttataaagagtgacacaccggtgagcagagttgtttttaacgcaattactaaatcagctgtctcagatgcgatggcaaatcctcgagaaatagatgcaccattagtgcatgcgtatcttgcacggagagctctggattatcttgttggtttcaatctatcgccagtgttatggcgtaaattgcccggggctagatcagctggaagggtacagtcagtttgcctgcgattaattgtagaaagagaaatagaaatagaagctttcaaaccaaaagaatactggtctgttaaagcatctttaaagactccaagaggacaaatatttactggaaagctaataaactttgctggaaca

SEQ ID NO: 293253 - DNA, 763 bp, Unknown
  Bacterial polypeptide expressing nucleotide sequence isolated from the Sargasso Sea
ttcaacttcaactcttcagcaaacggcttctagtatttttggctttggagcatctagaacaatgcaaattgctcaacgcttatttcaaggagttgaaattgatggagatacaacaggattaataacatatatgagaactgatagcactgatttgtcaaaagaagcaattcattcgtatagagattttattcagaaaaactttaattcatcataccttccggaagaagttagaagctttaaaagtaaaaaggctaaaaatgctcaagaagctcatgagggtattaggcctacagatatattaagaaagccagaagagatgaaaaagtatttagatgaagacgggtttaaattatacaatttaatatggaaaagatctctagctagccaaatgagctccgcatcatttgagagaactgctatctcaatttccagtgaaaatgaaacaataaaactaagggcaaatggttcaattcaaacatttgatggctttttaaatatttatagtgaattcaataaaaagccagaaacgattgagtctgaagataatgaagatgataaagatttacctagcattacactcaatgacagtattgataacgtcaaacccactagctctcagcattatacccttcctccacctagatattcagaggcaacacttgtaaaaaaattagaagagcttggaattggaagaccctcaacttatgcaagcatcatttcagttttaaaaatgagaaattatgttgaagttgagaaaaatcga

SEQ ID NO: 293254 - DNA, 829 bp, Unknown
  Bacterial polypeptide expressing nucleotide sequence isolated from the Sargasso Sea
agtttttccaaaaaatatctgaaagaaatcactgataaagctaaaaattcaaataaaattattctagctacagatccagatcgtgaaggtgaagcaatagcgtggcatgtaaaagaatttttagatgaaaaaaaacttctgaaagacaaaaaagttgaaagagtagtcttcaacgaaatcactaaaaaagctgtaacaaatgggatagataatcctagaagtattgagaatgaacttgttgatgcttacatggcaagacgtgctttagattatctagtaggttttaatatatcacctattttatggacaaagctacctggatcaaaatccgcaggaagagttcagtctgtagcacttagattgcttacagagagagagcatgaaatagaggtatttcaacctaaagagttttggacactaaatgtaaattttttaacaaaagataatttaataataaatacaaatattaatcaacttgatggaaaaaaaattgagaagttttcatttaaaaataaagtggaagttaattcaggagtagaattgataaaaaacaaaaaatataaaattagtgatataacttctaaaacatacactcgaaacccatctggtccatttactacttcaactttacaacaaacttcatctaataaattagggtttggggcatcaagaacaatgcaaattgcacaaagattgtatcaaggtatagatatagatggtgaaacagttggtttaattacatatatgagaatcggatggtacaaatatctcaataggatgctgttacatcatttagagatttcattactcagaactacggaaatgatta

SEQ ID NO: 293255 - DNA, 747 bp, Unknown
  Bacterial polypeptide expressing nucleotide sequence isolated from the Sargasso Sea
ctacgtaccagacaagccgcgaatcttttcaagttcaaataacagtgcacaagaagcccatgaggcgattcgccccacagatgctgccagggacccagaatcactgtctggggcgctcacagaggagcagatgaggctttatcgattgatttggcaatgctttgttgcgtgccaggcaacagaggcacaatgggactcgacatctgttcgattacgtcgcactgatcaggatacaggtgccgtcttcaaagcccatggacgcgtccttcgatttgatggcttttatgccattagtggaatacctcgcgatgatggcgatcaggtgcttccggattttcagaaaggcgccgaacttgctccattcacaatcgaacctcgtcagaaatttcaatcacctccatctcgatattcagaagcttcacttgtcaagaagcttgaggaagaggggatcggtcgtccctccacctacgcaagtatcatcaatgtgattgaaaaccgaggctacgtcgaacagcaggatcgccgcttctatgcgacagctcttggagaaaaagttactgagtttcttgaggaagggtttgaaagtcagtttattgaaatcggatatacccgagaaattgaacaagaactcgatcagattgctgagggctcaaagctttggacggatatgctgcatgagttttacaaagctctagaaagtagaatagaagttgcaaaagaattgccacatgtcaaagggaaaggaga

SEQ ID NO: 293256 - DNA, 550 bp, Unknown
  Bacterial polypeptide expressing nucleotide sequence isolated from the Sargasso Sea
atgaactcagttgttgttgttgaatctcctgccaaggccaaaactatagaaggctatttaggagatagttatagcgtaattgcctcttttggacatgttagggacatggaagaaaaagatggtgctgttgtccctggagattggactaatattaaatggtcattaaataagagaggaaaacaacaagttgatgaaattctttctttaatcagaaatgctgatagattaattctagctactgacccagatagagaaggagaagctatagcgtggcatatttgccaactgcttgaagaaaaaaaagtccttgaagataaacaagtttatagggctgtttttaattcaatcactaaaaactccattactgaatccataaacaaccttaaagaaatagatatcgatagagtcgagtcttacttagctaggcgagtattagattatttggtgggctttaatatctcacctttattatggagaagacttccaggagcaagatcggcaggaagagttcagtctgtagctcttaagttaatttgcgagagagaggcgg

SEQ ID NO: 293257 - DNA, 673 bp, Unknown
  Bacterial polypeptide expressing nucleotide sequence isolated from the Sargasso Sea
cccatctaaaaatggatcggttgatcctgataataattttcaaatgctttgggaaatagatgcattttcaaaaaaatatttaaaagaaattacagatacagcagcagactctaataaaattatattagctactgaccctgaccgtgaaggtgaagctattgcttggcacgtaaaagaagttttgggtcaaaaaaaactcttgaaagataaaaaagttgaaagagtagtgtttaatgaaattacaaaaaaagcggtaacaaaaggtattgaaaatccaagagatatagaaccgcaacttgttgatgcatatatggcaagaagggctttagattatcttgtaggcttcaatatttctccgatactttggactaaacttcctggttcaaaatctgcaggaagagttcaatctgttgctctaagactgataacagaaagagaaaaagagattgagctattcaatccaaaagaatattggacattaacttcaaatttcacaaataaagataataaaagtattttatctaaattaagtttatataatggacaaaaaatagaacgatttacatttaaaaataaaaatgaaattgatcaagcaaaagatgtaattaataaatctaaattcacaataaatgatgttaatacaaaaatatttaaaagaaacccattaacacct

SEQ ID NO: 293258 - DNA, 922 bp, Unknown
  Bacterial polypeptide expressing nucleotide sequence isolated from the Sargasso Sea
attctttgtgaaaaagaagatgagagagatttacatattccagaagaatattggccttttgagtcaagttttgattttttgggtacttcatttgaagcgaaattaactcaaatcttcgaaagaagcatcaacaaagaacctctaaaagatgagcaagaaattaataatttggttaatgaattggaagctaccagtttcaagttaaaaaatattgaatctagagctcaatcaagtagtcccaaaccaccattcagaacttctacattgcagatgtcagccgcaagtggcttgggctttacagcagatagaactatgcaagctgcacaaaaactatatgaaggaggtttaataacttatctaagaaccgatggtatatcgatcagcacatctcccaatacaggagaaccattttctgaagaaaagcctggtccacctcctttacaagaaataagaaactttatttcttcaaactatgattccacttttctttcgaaagagccacgaatctataaatctaaagtacaaaattctcaagaagctcatgaggcaatcagacctacagatatttctatgacgccttcagatgcaggtttatctggagatgaagaaaagctatataccttgatatggaatagaactgttgcaagtcagatggagagttcaaaatatgagagaaaaacccttgtgatatcttcagaagataacaagtatgaatttagggcttcatcaagaaagaatatatttaaaggttttgagattcttaccggcactgaagatgaaaaagttacattatttcctgaaggactcgaggaggggagtcagctcaacttaatctcaaacaaatatgaacaaaaatttacttcacccccaaatagatactcagaagcttccttgataaaaaagatggaagaggaaggtatcg

SEQ ID NO: 293259 - DNA, 361 bp, Unknown
  Bacterial polypeptide expressing nucleotide sequence isolated from the Sargasso Sea
tatgagtaaattagtgatagtagaatcgcccgcaaaggcaaaaacgatccagaaatatctgggcgatggttttactgtcttgccaaccattggtcatattagggaacttccaaaaaaggatgcgattgacccaaacaatgggtattccatgaaatatatagttagcccaggaaaggaagacgcagtaaaaaagattaagagcgatgcaaaaagtgctgaacaagtaatactcgcaacagacccagatagagagggagaagctattgcttggcatgttgccgacattatttcaaaagcaaaatttgagcagccggatattaagcgtgctgttttttatgaaataagcgaaaaagcggttaaa

SEQ ID NO: 293260 - DNA, 202 bp, Unknown
  Bacterial polypeptide expressing nucleotide sequence isolated from the Sargasso Sea
tatgaatctggtcatagttgaaagccctgctaaagcgaaaacaattaataaatatttaggtgataactatactgttttagctagctatggtcatattagagatcttccttcaaaaaatggatcggttgatcctgatcaaaattttaaaatggaatgggaagttgatagcttttcaaaaaaatatttaaaagaaattactgat

SEQ ID NO: 293261 - DNA, 835 bp, Unknown
  Bacterial polypeptide expressing nucleotide sequence isolated from the Sargasso Sea
agagctttagattacttagttggatttaatatttcacctatactttggacaaaactcccaggttcaaaatctgctggaagagttcagtccgtggcattaaaattgattactgaaagagaacatgaaattgaatcttttaaacctgaagaattttggacactaagtataaaatttgcagatcaaaaaaatcaaaatataactgctagcattagtcaacttgatgattccaagattgaaaaattctcgtttagaaataaagatgagataaataaagccatatctagcattaataaaaaaaagtttagtataactgatatttcgagcaaggtaataaatcgtaatccatctgggccatttacaacatctactcttcagcaaactgcatcgagtagattgggatttggtgcatcaagaacgatgcaaattgcacaaaagttatatcaaggtatagagatagagggagaaacaatcggtttaataacttatatgagaactgatggaaccaacctttctaaagatgcagtatcaacttttagagattatattaaaaaagaaattggcaatgagtatttacctaaagatgctttaaattattctggtaaaaaagctaaaaatgctcaagaagctcacgaagcaattaggcctacagatattattagaacacctcaaagtgttaaaaaatatttaagcacagatcaaaataaactatatgaccttatctggagtagagcgttatcttctcaaatggagtctgctaaatttgatagaaacactattactataacttcagataataatgataatatttgtaaagcccagtgggtccagtattaaa

SEQ ID NO: 293262 - DNA, 823 bp, Unknown
  Bacterial polypeptide expressing nucleotide sequence isolated from the Sargasso Sea
gggctagttacagatagagaaaatgagattaatgcttttataccagaagagttttggaatattaatgcttcattttcttctaattctaaaaagtatgaagggcaattatttaaattgcctggcgtatcccaaaaagattttaaaataaataatgtatctgaagctgaaaatatagaaaatataataaaaactagtaaatttaacatagagtcaataaaagttactaaaagatcctcaaagccatctgccccatatactacaagcagtcttcagcaagatgcatcaactagactgaatatgagcccatcaaacacaatgagaaatgctcaagaattatttgaaggggttgaagggcaagaaggactaattacgtacatgagaacagattctccttcactatctaatgaggctatgaaagatattcataatcaaataataaattcttatggagataaatacttcgagaaaagaatatttaaagctaaagttgcgaacgctcaggaggctcatgaggcaattaggcctacttctgtatctagaactccggaatcagtaaaaagcttacttaatgaatatcaatataagctttaccaactaatttggaaccgtactgtagcaagtcaaatgacaaacagcttgactgaaaaaactacattaataacgtcttcttcaactgaagaagatggttataaatttaaatctgaagcagataaattagtttttgatggatttaaaaaactaattaaatctaatgaaaaatatgacgaacttccagatctatctgaaaatcaagctgtagaccttgaggaaatagagaaagaac

SEQ ID NO: 293263 - DNA, 511 bp, Unknown
  Bacterial polypeptide expressing nucleotide sequence isolated from the Sargasso Sea
aatgaatttagtcatagtggaaagtcctgcaaaagcaaaaactataaataaatatttaggtaaagactataaagtattagctagttatggtcatgttagggatcttccctctaaaaatggatctgttgatcctgaaaataattttagaatggaatgggaattagactctttttcaaaaaaatatgtaaaagaaattactgatgctgctgctgaatcagaaaaaattatattagccactgatccagacagagaaggagaagctattgcctggcatgttagagaaatactagaaagcaaaaaacttttaaaaggaaaaaaagtagaaagagttgtctttaatgaaataacaaaaaaggctgttacgaatggaattaacaatccaagagaaattgaatcgctattagttaatgcctatatggctagaagagccttagattatcttgttggttttaatatttctccaattttatggactaagttaccaggctcaaaatctgcaggacgagttcag

SEQ ID NO: 293264 - DNA, 451 bp, Unknown
  Bacterial polypeptide expressing nucleotide sequence isolated from the Sargasso Sea
tatgtcaaaatcattagtaatagttgaatcaccagcaaaagccaagactatttcaaagtatcttggatctgaatatattgttgaatcaagtgtgggtcatataagagatcttccaaaaaaagcatcaccaaattctaagagagcatcgataccgaaggatgtatccccagaggaaaaattaaggcttaaatctataaacgacagaaatagattaattagaagaatgggtattgatccagataatggatggaaagcagactggcaaataattcctgaaaaagaaaaagtaataaaatctttaaagaaagctgctaagggagtcgatcatatctatcttgcaactgaccttgatcgagaaggtgaggctatagcatggcatctaaaagaagcgctaggaccagaaaaatatgaatattcaagagtaagattcaatcaaatcacaaagtcagcg

SEQ ID NO: 293265 - DNA, 861 bp, Unknown
  Bacterial polypeptide expressing nucleotide sequence isolated from the Sargasso Sea
tagctatctaccaaatgaacctaataattattctggaaaaaaagcaaagaatgctcaagaagcacatgaagcaataagaccaactgatatttccagaacaccggatagtattaaaaaatttttgagcactgatcaaattaagttatatgatttaatatggtcaagagctctatcatcacaaatggaagcagctaaatttgatagaaaaactataacaattgtttctaataataatttaaacctatttaaatgttctggatctacaattaaatttgatggttttttaaaactaacaaaaatagatgatgaggatgaaaaaattttacctgatgtaaataaggaagaagttttggctgaagaatttattgatgctcagcattttacacagccaccaccaagatactcagaagctagtttggttaaaaaacttgaagaattaggtattggaagaccttctacttacgcaagtattatatctgtaatatcaaatagaggatacgcagatgttattaacaaacgtttttttccaacagatagaggtaaattattatcagctttcttagaaaagctatttaaaaaatatgttgattacaacttcaccgctggattagaagaacaactagacgatataacttctggtaaagaggaatggattaaagttcttgataatttctggaaagacttcaatagcaacgtttcaaatgttaaagaaaaaagaacgagagaagtattagatcttttaaatgaaagcctaggtgaactgatatttgagtcagacgaaaatggcaaaattgatagaaaatgcaaactatgtaatactggggaattaagtttaaaaatagtttcagaggtggtgctttt

SEQ ID NO: 293266 - DNA, 790 bp, Unknown
  Bacterial polypeptide expressing nucleotide sequence isolated from the Sargasso Sea
gaatataatgtaagtgattcaaagcaagttgtaaaaaaaccacctttaccattttcaactagcatattacaacaaaaagcgagtaatgaattaggatattctccaaaacagacaatgagagtagctcaaaatttatatgaagcgggtcatataacttatatgagaactgataataaagtatatagtcctgaatttataaaaacgataaaaaaattcatacaaaatagatgggataaaaattatgtaagtaaaaatttaagtaaagtaacattaggtggaaaaaagaaaaagaaaaaagatgatacagctcaagaagcgcatgaggcgataagacctacaaatatagaaaataatatattagaaattgctggtaagataagtaataaagaaaaacgtttatatgaattaatatggaaaaatacaatgaaaagttgtatgagtgatgccgtatttgatagtattactgcttttataagtgcgccttatgaaaaaaagtataaatgtaatgaagaaaaatgtatattttctggatggaagataatagataatattacagtccatgatgattttaaaatatatgaatatttatttaaaaagaaaaaaggatcaattgtaaaatataatgaaataagaagccgtgttatattaaaaaatttaaaaacccattatacagaagctagattagtgaatcaattagaaaagatgggtataggtaggccatcaacattttctagtttaatatcaaaaatacaagatagaaattatgtaaaaaaagaagatgttcaaggac

SEQ ID NO: 293267 - DNA, 772 bp, Unknown
  Bacterial polypeptide expressing nucleotide sequence isolated from the Sargasso Sea
atgcacgtcgttgtcgtcgaatcaccggctaaagccaagacaattagtaagtatctgggcgacgattttgtcgtcttggcgagctacggacatgtcagggatttaccatcaaaagacggctcggtccgtcccgacgatgactttgcaatgacctatgagaccaaccccaattccgtcaaacacatacgcgaaattgtgcgtgcactaaagaatgctgagcatctctatctcgccaccgaccctgatcgggagggtgaggctatttcatggcatgttctcaaagaattagagcaaaggaacgcagtcaacggagttgacgtcaagcgtatcgtatttaacgaagtgacccgcggtgctgtgcgcgaatcgatctcgcaacctcgcgacctcgatatggacttgatcaacgcccagcaagctcgccgcgctctggattatcttgtcggtttcacactatcgcccgtgctttggcgaaagttgcctggttcccggtccgctggccgcgtgcagtccgtcgcattgcgtctgatctgcgaacgcgagctcgagattgaagcctttaaaccacaagaatactggtcaattgaggctgcgctacgtgctgcggacggtacgccattcactgcacggttaacgtcactcgaaggcgaacagcttgacaagttctccctaggtaacgccgaagatgccgaatgcgcggttgagatccttcgtgaacacacccatttgacggtcaccggaatcgaagcaaaagaactgcagcgccacccga

SEQ ID NO: 293268 - DNA, 885 bp, Unknown
  Bacterial polypeptide expressing nucleotide sequence isolated from the Sargasso Sea
catgaaccgccagtccgtcacgccggaacagcacttcacccagccgccgccccggttctccgaagcgagcctggtcaagaagctggaagagctcggcattgggcgtccctctacctacgcctccatcatctctgtgctgcaggaccggaattatgtccggctcgacaaacggcgattcttcccggaagaccgcggccggctcgtcaccgcgttcctgtcgagcttcttcaccaaatatgtagagtacgacttcacggcggatctggaagaaaagctggacgacatctccggaggacgtatggagtggaaggccgtcctgcgtgatttctgggcgtcattcaatgaagcgatcggcggcaccagcgacttacgggtccgggaagtgctcgatgcgctcaacgaattgctggggccccacttctttggattggacaacgacggaaacctgaagcgctcctgtcccagttgtgacggcggcaaattgtccctcaagcttggccggcacggtgcgtttatcggctgctccaactatccggactgcaagcacacgcggcccctcgctgtgcccaatggcgaagacgaaggcgcggcgcttacggacaatgggcctaaggaactgggcattgagccggagacgggctttgccgtatctctccggcgcggcccctatgggtactacatccagctgggggaacaagaagggaaaaagaagcccaaacgggcgacgctcaccaaagatatggacccggccgaggtcgacctcaagatggctttgggcctcttagcgctgcctcgggaggtgggtatccacccggaaacgggtgacataatcaccgcggctatcggacggttcggcccctatatcaaaatgggcggcacgtatgt

SEQ ID NO: 293269 - DNA, 810 bp, Unknown
  Bacterial polypeptide expressing nucleotide sequence isolated from the Sargasso Sea
aagtataaattaacaggagtagttactgataataatgataatacattagatgtatcatttaaatttaaaaataaaaacatatcaactaaagaattaaatatgctaatgaatttatttgttactactataatgttctcggtgagtaattatgaaataaaacaagaaaaatcccatccatcccctccattgataacatcaaccttacaacaattggcgcaaaaaacacatggatttaaagttgcacatactatgtctatagctcaaaaactatatgaaaatggattaatcacatatatgagaactgattcaacattcattaataatgagtttgagtctatattagaaggcaaaattataaaagattatggaaaagaatatttttataaaaaaacacgtaaaaaagtaaagggagcacaagaagctcacgaagctataagacccactaaattaaacgcacaattaacagatgataaatataatgattgtgacaaaaaattatatcacttaatagttaaaaggactatacaggcatatatgtctccagctatttatgatgttcatctattagaatttagtaatgaatctattgatcgatatggattatttacttcaaaagaacaatttattcaatttgatggatatttaaaatattctaataataatgatactataaaaggtattaatcaaaagttatatactgaagatataactgagaaagaatttacattaaaaacgggtaaggctattaattctatatctaacccaccacaatattataatgagtcgagtattgtaaaacaactgaatcaa

SEQ ID NO: 293270 - DNA, 331 bp, Unknown
  Bacterial polypeptide expressing nucleotide sequence isolated from the Sargasso Sea
atgatattagtaatagtagaatcgccggctaaagcgaaaacaattaataagtatctaggatcagaatataaggtacttgcctctatggggcatgtgcgggacctacctgcaaaaagtggttcaatagatcctgaaaataattttgaaatgaaatgggaaaaaacaactagcagggctaagaccttgagagagattgagcatgcagttgaaaaatctgaaaaaatagtacttgccaccgatcccgatcgggagggtgaagctatttcatggcacctttttgagttattaaataaaaaaaaatctaagaatttcgaaaagggttgtttttaat

SEQ ID NO: 293271 - DNA, 729 bp, Unknown
  Bacterial polypeptide expressing nucleotide sequence isolated from the Sargasso Sea
ttttggactttaaatattatttttaaaaataataaaaatgaaaaaataaatacaactatttcacaattagatggaaataaagttgaaaaattttcattcaaaaataaacaagatattaataatgctttatctcaaataaaaaataaaaaatacaatataacagatataagttcaaaaacttataacagaaatccatcaggaccttttactacatcaacattacaacaaacagcatcgagtaaacttggttttggagcatcaagaacaatgcaaattgcccaaaggctatatcaaggaattgatattgatggtgaaaccgtaggattaattacttatatgagaacagatggaactaatatttcaaaagatgcaataatatctttcagagattttataatacagaattatggtgataaatatttaccagaacaacctctaaattatagcggcaaaaaagcaaagaatgctcaagaagctcacgaagctatacgtccaacagaaataattagaaaaccagaagatatgaaaaaatacttgagcactgatcaatataaactttataatttaatatggtccagatctttatcatcacaaatgcagtcagcaaaatttgatagaaaaactattacaatcaattctaatgacgataaaaatatattcaaagctagtggttcaacattaaaatttgatggtttccttaaactttataagatcgatgaaagtgatgat

SEQ ID NO: 293272 - DNA, 613 bp, Unknown
  Bacterial polypeptide expressing nucleotide sequence isolated from the Sargasso Sea
atggcaaaaaaaatcatcattgttgaatcacctgctaaagcacgtaccatcaccaaattccttgacaaggattactcagtaatggcttcaatgggtcatgtaagggatctaccttcgtcaaagcttggttttgatcctgaaaacaattttatacctcagtacgaaatatctaaagataaaagaaaagttgtttcagatcttaaaaaacaaatagacaagaacacagaagtatttctggcaactgatgaagacagggaaggtgaggcaatttcatggcatctacttgaggcattggggcttaaaagtagttcagttaaacgaattgtttttcacgaaattactgaatccgcaataatcaatgcccttgaaaatccaagggatgtcgaccagcaactggttaacgctcagcaagcaagaagaattttggatcgcgctgtgggttacaaattgtcaccattgctttggaaaaaaattaaacccggactctctgcaggcagagtacaaagtgtctcagtttatatattggttgagagggaaagagagatcaggaaatttgtcccagaagaatactggaagatcaaagctgagtttaaagatttctctgcagattgaa

SEQ ID NO: 293273 - DNA, 915 bp, Unknown
  Bacterial polypeptide expressing nucleotide sequence isolated from the Sargasso Sea
ggttataacctcagaatttgggaagaaatatattttaaaggaaccaagaaaatacaaaagccgtgcagtaaacgcccaggaagctcatgaagcaatcaggccagtggacttctctcaaaaacctactatggttcagacacacttgagtcacgatcagtttcgactttacagcttgatttggaagcgcgcacttgcttcccaaatgactgcagcggaaatagcccgtacgacgataaatattgaagctgggcaggaaaaagaatatttgtttgaagcacagggacagcgtgttatttttcctggatttctaaatgtttatgcggaaacaagcgatgagcaatcagatactctcagtgaaaaagatgtgatcctgcctaaagtggaaaagggagagatgcttgcacttaaagattcagaagaacctgtagatatggacaagctgtttactaaacctcctcctcgttatacagaagcatccttagtaaaaaaactggaatcagaaggcattggacgtccatccacctatgcaccaacaatttcaaccatacaggatcgcggttatgttgaattaactgatgaaaagaaactgaaaccgacttcaattggggaagttgttacagattttctggcaaatcattttacaaaaatagtaaatctgggatttactgctgagattgagcgtaactttgatcgcattgccaagggagatgaagactgggtagaaatgatgacagatttttatgagccttttcacgaaaacgtagttgagaaagataaatcggtttcacgggccgaagtgctaaaacgtagagaactaggcactgaccctgaaagcggcaaaccagtaagtgtaagcgtaggaaggtatgggcctatggttcaaataggtactcgcgaagatgaagaaaaacacgg

SEQ ID NO: 293274 - DNA, 910 bp, Unknown
  Bacterial polypeptide expressing nucleotide sequence isolated from the Sargasso Sea
tattctggtaaaaaagctaagaccgctcaagaagcccatgaagctataagacccactgatatcaacagaacaccagaatcgatgaaaaaatttttaagcactgatcaaatcaagctatatgatttaatttggtctagagctttgtcatcacaaatggaatctgcaaaatttgatagaaaaactattactatagtttcaaatgataatttaaatcaatttaaatgttcaggatcaacaattaaatttgatggttttttaaaacttacaagaattgaagaaagcgaagatgataagattcttccagatgtaaacaaagaagaagtttcaataaatgattttattgatgaacaacacttcactcaaccaccacctcgttattctgaagcaagtttagtaaaaaaacttgaagaattaggaattggaagaccttcaacttatgcaagtattatttctgtaatttcaaatagaggttatgcggatgttgttaataaacgattttttccaacagatagaggaaaattgttatcagcgttcttagaaaaattattttctaaatatgtagattatggttttactgctggcttagaagatcaactagatgatatcacagctggcaaagaagagtggataaaagtccttgataatttttggaaagatttcaacttaaatgtgtctaatgttaaagaaaaaagaactcgagaagtattagatttgctaaatgaaagtctaggtgaattaatttttgagtctgatgaaaatggaaaaattaatagaaaatgtaaattatgtaaagttggtgagttaagtttaaaaaatagtttcagaggaggagcttttatagggtgttctagttatccagaatgtaaatttaccagacctttatctaagtctaaagcaaatgatcaaattg

SEQ ID NO: 293275 - DNA, 684 bp, Unknown
  Bacterial polypeptide expressing nucleotide sequence isolated from the Sargasso Sea
attgaaaaggcaattgataatattaagaacaaaaaatttaatataactgatatttcatcaaaaattgttagcagaaatccctctggaccctttactacctcaacacttcagcaagttgcttctagtagattaggctttggtgcatcaagaactatgcaaatagcacaaaaactttatcaaggaatagaaattgagggagatacagttggtttaattacttatatgagaacggatggaactaatctatcagctgatgctgtcactaattttagaaattttattaaaaaagaatatggtaatgaatacttgccagaaaatccaaataattactcaggaaaaaaagcaaaaaacgctcaggaagctcatgaagcaataagaccaactgatattaatagaaatccagatgctgttaaaaagtatttaagttctgaccagcaaaaattatattctttaatttggtctagagctctatcatctcaaatggaaacagcaaaatttgatagaaacacaataacgattgaatctgaagatggtaaaactatatgtaaatcaagcggatcggttttaaaatttgatggatttttaaaagtttattcaaatcaaaacaaagatgatgatgagcaaattttacctgagatgtcaaaaggaccaattaatatagaagctcttatagatgaacaacat

SEQ ID NO: 293276 - DNA, 832 bp, Unknown
  Bacterial polypeptide expressing nucleotide sequence isolated from the Sargasso Sea
atgccaaaaaatttagtcattgttgagtctgctacaaaagcaaagactattgaaaaaattttaggacaagactttaaagttgtgtcttgtgttgggcatatttcagaccttccagttaaagaattaggagttgatgttgaaaataattttaaacctaaatatataattcctacagaaaagaaacctgttataaaagatcttaaaaagtatgttaatgaatctgataaaatttggttagcaagtgacgaagatagagaaggtgaggcaattgcttggcacttatatgaaaatttaaacttaattaataaagactatgatcgaatagtatttcatgaaataaccaaaaacgcaattttaagtgcattagatagtcctagagagataaactataatcttgtaaatgctcaacaggctagaagagtcttagatagattagtaggttatgaactatctccagtattatggagaaaagttaagacaggcctttctgctggaagggttcagtcagtttcagtaagacttattgttgaaaaggaaagagagattaaaaactttttaacaaatagtacttacaagtcaattgcaacttttaaaaattctagtggagtcaacctaaaggctgagttaaacaagaaatttgattctgctgaagcagttaaagcatttcttgtaaaaaatatcaatagttcatataatgtgtctaacgtagaaaaaaaaccggctaagaaatctcctacacctcctttcaccacatcaacgcttcagcaagaggcttctaggaaacttggttttggggtcacaaggactatgtcaacagctcaaaaactttaga

SEQ ID NO: 293277 - DNA, 767 bp, Unknown
  Bacterial polypeptide expressing nucleotide sequence isolated from the Sargasso Sea
aactaatttatcagctgatgctgtcactgattttagaaattttattaaaaaagaatatggtaacgaatacttgccagaaaatccaaataattactcaggaaaaaaagcaaaaaacgctcaggaagctcatgaagcaataagaccaactgatatcaatagaaatccagactcaattaaaaagtatttaagttctgaccagcaaaaattatattctttaatttggtctagagcactatcttctcaaatggaaacagcaaaatttgacagaaatacaataacgattgagtctgaagacggtaaaactatatgtaaatcaagcggatcggttttgaaatttgatggatttttaaaagtttattcaaatcaaagcaaagatgatgatgagcaaattttacctgagatgtcaaaaggaccaattaatatagaagctcttattgatgaacaacattttacccaaccacccccacgttactcagaggcgagtttggttaaaaaattagaagagttaggaattggaaggccttcaacttatgcaagtatcatttcaacaatagcaaatagaggctacgcagaaatagttaataaaagatttttcccaactgacagaggtaaattaatttcagcgtttttagaaaaactattttcaaagtatgtagattataactttacagctggactagaggatcaactagatgaaataacttctggaaaagaaagttggttaaaagtcttagaaatgttttggaaagattttaatagcaatgttt

SEQ ID NO: 293278 - DNA, 865 bp, Unknown
  Bacterial polypeptide expressing nucleotide sequence isolated from the Sargasso Sea
gaaaattttataaaaactatttacggagataattatttgcccaaagaacttaataattattctggaaaaaaagcaaaaaatgcacaggaagctcacgaagcaataagaccaacagatatttctagaactccagatagtatgaaaaaatttttaagcactgatcaaattaaattatatgatctaatatggtcacgagccctttcatcgcaaatggagtcagcaaaatttgatagaaaaacaattacaattgtctcagatgataatttgaatcaatttaaatgttctggctctacaattaaatttgatggatttttaaaattaactagaatggatgatgaaaatgaaaaaattttaccaaatgtagataaagaaaaagtattagctgatgaatttaatgatgaacagcattttacacagcctcccccgagatattcagaagcaagtttagttaaaaaacttgaagaattaggtattggaaggccttctacatatgcaagtataatatctgttatatcaaatagaggatatgcagatgtagttaacaaacgtttttttcctacagatcgtggtaaattattatcagcatttttagagaagctttttagtaaatatgttgattatggatttaccgctggattagaagaacaattagatgatattacatcaggtaaagaagaatggataaaggttcttgataatttttggaaagatttcaataataacgtctcaaatgtaaaagaaaaaagaacaagagaagtgttagatcttttaaatgaaagtcttggtgagttaatttttgaagctgatgaaaatggaaaaatcaatagaaaatgtaaattatgtaatactggtgaattaagttaaa

SEQ ID NO: 293279 - DNA, 790 bp, Unknown
  Bacterial polypeptide expressing nucleotide sequence isolated from the Sargasso Sea
aagaaaaagagtcagtcagtagagcgagtttatattgccagtgaccccgatcgtgaaggagaggcaatcgcagcacaccttgctagtgaaatacctaaagagaaggtagagagggttgaatttactgagattacaaaagcaggaatcaagcaaggaatgagacagagtcattctctgaatgataatcttgtcaatgctcaaaaatccagacgaattattgatcgcctcgttgggtataaagtttctcccgtattatgggcgacgctacaaaaaaatatgaactttgttagtactacactatcagctggaagggttcaatcagcatgtgtgaaaattttaattgaaagagatcgcaaaagacaaaagtatttaaaaaccgaatactatgatctaaaagcaaatttaaatgatgagcaatcagaaacttcatttgcagcgaatttgaataaagttggcaataaaaatattatttcaagtaatgattttgactcagatactggtaaacaaacgaatcccaatgccttaattcttagcaagaaggaagctgagaatctcgcttcaaaacttgaaaaaggatcctggatagtttctagtgtaaacaaaaagccaagaacctctaatccaaaacccccttttacaactagcactcttcagcaggaagcagcaagaaaactacgattttctgcaaaaaatacaatgagagtggcccagcagctttatgaaaatggttttattacttatatgagaacggactcaacaaacctatctgaagaagctataaacggatcaa

SEQ ID NO: 293280 - DNA, 906 bp, Unknown
  Bacterial polypeptide expressing nucleotide sequence isolated from the Sargasso Sea
tttcttaaatatttacagtgaattcaaagtaaaaaatgaagactcagagaaaaaaaatgaagatgaagaatctgaagatgagggttcattgcccagtgttgacttaaatacaaagattaataatgttactcctgaaaatactcaacactttaccctacctcctccaagatattctgaagcaagtttagtaaaaaaacttgaagaacttggaattggtaggccatcaacttatgcaagtattatttcagtgctaaaaatgagaagttatgttgaagttgaaaaaaatagatttattcctgaagatagagcgatattaattactgcatttcttaaaggattctttggtcaatatattgattatgaatttactgctggaatggaagaatcgcttgatgaaattacctctggaaagattaaatggacggatttcttagaaaaattttggaatggattttcagctaatgtagggagtgttacagatcttaggatcacaaatgtactagatagtcttaatgagattttaaaaaatcatatatttgaaaaatcttctgataatgaaacatcagtatcaagagcctgtccttcagaaggatgcaaaggtcagctaagcttaaaagtaagccgatttggagcatttgtaggttgttcagattaccctgaatgtaagttcacaagacctatatcatataaaaagattaaagaagcttttgaagatgaagttttaggaattgatgaagtttcaaataaagaaattaaattgttgaatggaagatttggaccttacgtacaattaggtgaacaagaaggaaaagaaaagcctcaaagatcatctgtccctaaaggagtttcgccgagtataattgattttagaaaagctaaatatcttttaagtttaacaagagagat

SEQ ID NO: 293281 - DNA, 892 bp, Unknown
  Bacterial polypeptide expressing nucleotide sequence isolated from the Sargasso Sea
atcagtagctgtaagacttatttatgaaaaagagattgagatagaacagtttgaaccagagaaattctataaaataaatgttcaaggggaaattaatggcgcaaaactagatacttctatcactagcttagagggtgaaaaagttgataaacttttctttagagatgaagctttagctaataaagctaaaaattatttgaaatcaaatagttttttcatcagaaaaattgatgaaagaacaatatctcgcaaaccaaaggcaccttttaatacctcaactttacaacaaactgctaatagtcaactaaactttagtgctagtcaaactatgactattgctcagggtttatacatgggaatagatattaacaaagaaactatagcccttatcacatatatgagaactgatagcattacactttcaaaagactcgatagatactataagagaaaatatatcaaaggagtacggagataagtatttacctgataaacccattgagtataattctaggaaaaaaaatgctcaagaagctcatgaagcaataagaccaactgatatttctataaaaccagaggatataaaagactttttaaatgaagaacaatttaaactctatgatttaatctggaaaagaacaatagcttctcagatgacaagtgctgagactaaccaaaacacacttcaaatagattgtgaagagaaaaatataactttaaaagctacacttggtaaattaatttttgatggatataaaaaagtttataatcttcaagaagatgatgaagaacagattatttcattattagaaaatataaaacaaaatgataaatatattgtatatgaagttgaagcactcgagtcatttacttctcctccttcaagatacact

SEQ ID NO: 293282 - DNA, 966 bp, Unknown
  Bacterial polypeptide expressing nucleotide sequence isolated from the Sargasso Sea
attttccgttgaagaagtaaagaatttcttagaaaagaattataattctatttttaatatctcttctatcgataagaaaccagcaaaaaagtccccaactccaccttttactacttctacgcttcaacaagaggcttctaggaaattagggtttggagttactagaacaatgtcaactgctcagaagctatatgaagctgggcttataacgtatatgagaactgatagtgtaactatatcaaatgaagcaaagtcatctatagttcaaaagatagaaagtaaatacggtgaagattatgtttatctcagagattacaaaaacaaaaataagtctgctcaagaagcacatgaagctgtaaggccaactgacattaatattgaggaaattacatctgattatgatcagcaaagactttaccacttaatttggaaaagaacgatctcctctcaaatgtctgatgctcaaattgaaagaactgtagttaatataaaatcagattcctacaatgaattctttgttgcaagaggtgaggtaataaaatttgatggttttctaagagtttacaacgaggggacagatgatgaaattgaagaagaaaaaggtgttttaccagcactatctataaatgaaaatctaaacttattaagtatcagctcaagggaatctttttctagacctccctcaagatttactgaggcttctttggtaaaaaaattggaagaactaggtattggaaggcctgctacatatgccactaccatctcaactattcaaaatagaggctatatagctaaaggagttaatgagggattagatagaaattataatttaatagagtttagtaagaatggcattaaagaatctcaattaaaagaaaaaaccggctcaaataaaggaaaacttgtccctactgacataggtatgatagttaatgattttttagttgataatttaaatatatttta

SEQ ID NO: 293283 - DNA, 847 bp, Unknown
  Bacterial polypeptide expressing nucleotide sequence isolated from the Sargasso Sea
gaagagttttggactttaaatgtaaatttcaaaactacaaaaggagatatattaaattcaaatattgtattgctaaacaatttaaaaatagaaaaattctcttttaaaaataaagaagatataaataatgctatagaattaattaaaaaatcaaaatacaaaatttcagatattaactccaaaatatatactagaaatcctcttggtccatttactacatcgactcttcagcaaacctcttcaactaaactaggttttggcgcatctagaacaatgcagatcgcacaaagattatatcaaggaatagatattgaaggtgatacagtcgggttaatcacctacatgagaacagatggtacaaatatatcaaatgatgcagttaatgactttagaaagtttataaaaaactcttatggagataattacctacctaaagaacccaataattattctggtaaaaaagctaaaaatgctcaagaagcacatgaagctataagaccaactgatataaccaaaacacctgagtcattgaaaaaatttttaagcgtggatcaaattaaactttatgatttaatttggtctagagctctatcttcacaaatggaagctgcaaaatttgatagaaaaactattacaatagtttcaaacgatagtataaatcaatttaaatgttcgggatcaacaattaaatttgatggatttttaaaactaacaagaattgatgaaaatgatgatgaaaaaattctcccagatgtaaataaggaagaagtttcaacaaacgaatttattgatgagcaacattttacacaaccgccgccccgttattctgaagctagcttggtaaaaa

SEQ ID NO: 293284 - DNA, 498 bp, Unknown
  Bacterial polypeptide expressing nucleotide sequence isolated from the Sargasso Sea
gcggtagcgatatggagctaaaaaatggtcgatttggtaaatacttcggttgtaccaacgaagaatgtaaaaatacccgtaagctactgagaaacggcgaagctgcgccgccaaaagaagatccggtcgatttaccagagcttccgtgtgaaaagtctgacgcgcactttatgctacgcgacggcgcttcgggtatcttcttggctgcccataactttccaaagtcgcgcgagactcgtgcgccgaaagtggaagaacttgcacgctttagagatagaatatcgccgaaattctactatcttgctgatgcgccacaaacagaccctgacggtaaccctgcaatagttcgctatagcaggaagaccaaacagcaatacgtgatgtctgaaaatgacagcggtaaagcaacaggctggtctgcgtggtatgaaaacggcaagtggcaagagcaagcggctaaaaagccggctgctaagccaaaagcgaagaaaaaataaa

SEQ ID NO: 293285 - DNA, 813 bp, Unknown
  Bacterial polypeptide expressing nucleotide sequence isolated from the Sargasso Sea
tagtaatggaatcgataatccaagaaatatagaaactaatttagttgacgcttatatggcaagaagagctttagactatttggttggatttaatatctcccctattctatggacaaaattaccaggctcaaaatctgcaggcagagttcaatctgttgcattaagattggttactgaaagagagcatgaaatagagcaatttaaagctgaagagttttggtctttaaatgtaaatttcaaatctttaaaaggtgatattttaagttcaaatattatattattaaataattcaaaaatagaaaaattctcttttaaaaataaagaagatataaataatgctatagaaataattaaaaaatcaaaatataaaatttcagatataagttctaaagtatatacaaggaatcctcttggtccatttacaacatctacacttcaacaaacttcttcaagtaaattaggttttggagcttctagaacaatgcaaattgctcaaagactataccaaggaatagatattgagggagatgccgttggattgatcacatacatgagaaccgatggtaccaatatttcaaatgatgctgttaataaatttaggaattttataaaaaattcttatggtggtaattatttaccaaaagaaccaaataattattcaggtaaaaaagccaagaatgcacaagaagcacatgaagctataagacctactgatataaatagaacacctgaatcattaaaaaaatttttaagtacagatcaaaataaactatataatttaatttggtcaagagctctatcatcacaaatgga

SEQ ID NO: 293286 - DNA, 757 bp, Unknown
  Bacterial polypeptide expressing nucleotide sequence isolated from the Sargasso Sea
aatgacaaccaaatctctagtaatagttgagtctccgtcaaaggcaaaaactatcagtaaatacttaggcaaggactttgtagttaagtctagtatcggtcatgtaagaagattaactaaaggaaataaggctataaatctcaatgactggtcaatttcttacgaaattgatcctaaaaaagagaaagttgttaaagatctcaaaagttcagccaaaggtgttgaaaatatatttttagcaactgaccttgatagagaaggcgaagctatagcctggcatttaaaagaaattcttggtaaaaagtttaattacagtagagtaagatttaatgaaataacaaaaggagctattcaagaggcgtttgagactcctggagatcttgatgagggtctcatcgacgcgcaaaaaacaagaagaatcctagatcgtattgtaggttatgatttatcaagtttattgtggcaaaaaattggaagttacggaaaactatcagctggaagagttcaatcagttgcagtcagattggttgtcgagcgtgaaaaagaaatcaaagctttctccccacaagaatattgggaattcgaagttaatgtaaggcatgatgaacgagatatagttctcaaactaaatactaaaaaatctgggttagaagtaaattcaaaagaggaagcagaaaaaattgcttctgcattaaaagagaacgaaatagagattactagtaatgaaaaaaccaaacgtaagatcccggtaaaacca

SEQ ID NO: 293287 - DNA, 862 bp, Unknown
  Bacterial polypeptide expressing nucleotide sequence isolated from the Sargasso Sea
acaaattgaacctttgttagtggatgcttatatggctagaagagctttagattacttggttggttttaatatctctccaatactttggacaaaattaccaggatctaaatctgctggacgagttcaatcagtagctttaaaattaattactgaaagagagcatgaaattgagtcatttaagccagaagagttttggactttaagtgttaaatttataaatgaaaaaaatcagaatattacagctagtataagtcagctagataataataaaatagaaaaattttcatttagaaataaagatgaaataaataaagctatatcaaatattaaaaaaaaaaaatttagtattactgatatttctagcaaagtggtaaatcgtaatccctctggaccattcactacatctactcttcaacaaacagcttcaagtagattgggttttggtgcatcaagaacaatgcaaattgcacaaaaactatatcaaggtgtagagatagagggtgaaacagtaggtttgattacttatatgagaactgatggaactaatttatctaaggatgcagtttcagattttagaagttatattgaaaaagaaattggcaatgaatatttacctgaaaatcctttaaattattctggaaagaaagccaaaaatgctcaagaagctcatgaagcaataagacctacagatattattagaactcctcaaagtgttaaaaaatatttaagtacagatcaaaataaactttatgacttaatttggagtagagctctatcctctcaaatggagactgctaagtttgacagaaacactattactatattgtcagataataatgatacagtttgtaaggctagtggt

SEQ ID NO: 293288 - DNA, 847 bp, Unknown
  Bacterial polypeptide expressing nucleotide sequence isolated from the Sargasso Sea
gttatcgtagagtcagctacaaaagcaaagacaattgaaaaaatactaggagaagattataaggtcgtctcttgtgttggtcatatatctgatctacctgttagtgagattggagttgatgtagataatgattttaaaccaaaatatattataccagatgaaaaacaacaggttattaaagacctgaaaaaacatgttaaacaatctgaaaaagtttggctagcaagtgatgaagatagagaaggtgaagcaattgcttggcatttatatgagaatcttaatctaagtaataaagaatctgatagaattgttttccatgaaatcaccaaaaatgcgatattaaaggctttagacaatccaagatcaattgattacaacctagttaatgctcaacaggctagaagagttttagatagacttgttggatatgaattatctcctgttttatggaaaaaagttaagactggactatccgcaggaagagttcaatcagtttgcgttagagtaattgtagaaagagaaagggaaatccaaaagcatgaatctaaaagtagcttcaagactcaaggtatttttaataatctagagggaaagtcaatcaaatctgaacttgacactaggtttaattcagatgaagaaataagaaactttttaattcaaaatgaaaatgcaacttttcatattaactctttatctaagaagccatcaaagagatcaccgactcctccttttacaacttcaactcttcaacaagaagcatcaagaaaacttggttttggagtttctaggacaatgagtactgctcaaaaactatatgaagctggacttataacttatatgagaacag

SEQ ID NO: 293289 - DNA, 268 bp, Unknown
  Bacterial polypeptide expressing nucleotide sequence isolated from the Sargasso Sea
aatgaatctagtcgtagtagaaagtcctgcaaaagcaaaaacgatcaacaaatatcttggtaaagattatatagttttagcaagctatggacacattcgtgatctaccttcaaaaaatggttctgtagatcctgagaacaattttcaaatgctttgggaaatagattctttttcaaaaaaatatttaaaaataattacagacactgcagctgactcaagtaaaataattttagcaactgaccccgatcgtgaaggtgaggctattgct

SEQ ID NO: 293290 - DNA, 754 bp, Unknown
  Bacterial polypeptide expressing nucleotide sequence isolated from the Sargasso Sea
tatgaaggaataaaattaaataatgaaactagtggactaattacttacatgagaacagatggtgttcaaataggaaatgaagcaataaaaaatgtaagagataaaatcagtacagactatggtgatgaatttttaccttctagccctagaatatacaaatcgaaagccgcaaatgctcaagaagcgcatgaagccattagaccaacaaattttgatttagatccccaatcaatgcaaagttttttagatgcagatcaatttaaactgtatgaattaatctggaaaagaacaatatcaagccaaatggaatcagcgtctttagataaaactagtatagatattttatcaaatgatcaaaaaataatttttcgtaccaatggctcccaaataatctttcctgggtttttgaaagtctataaagaaggaatagataatataaatgaaaataataacgatagtgataatgatgaaaataaaataattccacctttaaatgaaaaagacaaggtcaaattactttcttctaaagaagaacaacactttactcaaccaccaccaagatttacagatgcaagtcttgtgaaaagaatggaagaactaggtattgggagaccttcaacttatgcttcaattttaaaagtcttggttgatagaaattatgtaaagaaagaaggctctaaacatatacctgaagaacgtggaagaatattaacagcttttttaagcaatttttttggtaaatatattcaatatg

SEQ ID NO: 293291 - DNA, 767 bp, Unknown
  Bacterial polypeptide expressing nucleotide sequence isolated from the Sargasso Sea
aaaattaccaggttcaaaatctgcaggtagagttcagtcagttgcattaagattacttacagaaagggaacatgaaatagagcaatttaaacctgaagagttttggtctttaaatgtaagttttaaaacctcaaaaggtgatattttagattcaaatattgtattattagataattcaaaaatagaaaaattctcatttaaaaataaggatgatataaataatgctatagaattaattaaaaattcaaaatacaaaatttctgatattagttctaaaatatacaccagaaatcctcttggtccatttactacatctacacttcagcaaacttcttcaagtaagttgggatttggagcttccagaacaatgcaaattgctcaaagattatatcaaggaatagatattgagggtgatacagttggattgataacatatatgagaacggatggtacaaatatttcaaatgatgctgttactaactttaggaattttataaaaaattcttacggtgataattatttaccttatgaacccaataattattcaggtaaaaaagctaagaatgcacaagaagcccatgaagctataagacctacagatataactagaactccagaatcaataaaaaaatttttaagtactgatcaaaataaactatataatttaatttggtcaagagctttatcatcacaaatggagccagctaagtttgatagaaaaacaattacaataaattctgataacggcttaaaccagtttaaatgtt

SEQ ID NO: 293292 - DNA, 895 bp, Unknown
  Bacterial polypeptide expressing nucleotide sequence isolated from the Sargasso Sea
tcttggcacttattggaggcggcatccattgatccgaataaagttaaaagagttgtattccatgaaattacaaagcctgcaattgaagaggcatttgctaatcctagatcattggaccttgatttagtagatgcatatcaggcacgtcgagttcttgatagggtagtaggatttaaattaagccctgtattgtggagaaaagttaagcgagatctgtctgctggaagagttcagtctgttgcagtgagaataattgttgataaagaagatgaaataaactcttttgagaaagatgagtattggaccttagatgctattttggagaccggaaattcctcttcatttaaagcatccctagttagtattaacggaaataaaggaaatgataaaaaacatctaattaaaaatgaaaaagaatctaagagtatattgaaagaattatcaaattcagaattccaggtttcaaaatttgaaactaaagaaactaaaaggagaccatcggctccattcataacaagcaccctgcaacaggaatcatctagaaggctaaggttgtctgctacaaggactatgaatatcgctcagggtttatatgagggaaaagctattggggggacagatgatgtagtaggtcttattacgtatatgaggacagattctacagaagtttcttctgctgcgcttactgaaatcgcctcttttataaaagataaatatgggcctaactacttaccagaaaaaccaaggttatattcaaaaaaggttcaaggggctcaagaagctcacgaggctatacgtccaacgtctattctcagaaccccagattctttgagggattttttggataacgatgaattaagattatatacacttattggaaacgcagcttcgagcc

SEQ ID NO: 293293 - DNA, 592 bp, Unknown
  Bacterial polypeptide expressing nucleotide sequence isolated from the Sargasso Sea
catgagtagtgttgtaattgtcgaatccccggcgaaggccaagacgattaataagtacctgggtagtgattacaccgttctcgccagctatgggcatgtccgcgacctaccgccgaaggatggatcggtccgtcctgatgacaacttctccatgagttggcagatcgacgacaaatcccaaaaacatgttcgggagatagctaaggctcttaagagtgccgatcgcctttatctcgccactgacccagaccgcgaaggcgaagccatctcctggcatgtacaggagatcctcaacgaaacaaagtcactcgacacggttgaagtcaaacgagtggttttcaacgagattacaaaggacgccatcttggcggcctttgaaacaccgcgggaactagacaacgaactgatcgaagcctatctggcacgtcgtgctttggattacctggtcgggttcacgctctcccccgttctatggcggaagttgcccggtagccgctcagctggccgcgtccaatcggtggcactccgcctgatctgtgaacgcgagaccgagatgaaaatttcgtgccgcgcgaatactggtcgatcaagg

SEQ ID NO: 293294 - DNA, 832 bp, Unknown
  Bacterial polypeptide expressing nucleotide sequence isolated from the Sargasso Sea
acattttactcagccaccaccaagatattcagaagcaagtcttgttaaaaagttagaagaattaggaattggacgaccttcaacatatgctagtatcatatcagtaatctcaaatagaggttatgcggatatagataacaaaagattttttccaacagatagaggtaagttactctctgcttttcttgaaaaattattttcaaaatatgttgattatgattttaccgcaaaattggaagatcaattagacgatattacagctggcaaagaaaattggattaaagtcttggaggaattttggagagattttaatttgaatgtatcagaagttaaagaaaaacgtactagagaagtcttagatatgcttaatgagagtttaggctcattaatatttgaggtcgataaagatggaaaaattaacagaaaatgcaaattatgtgaaagtggtcaattaagtttaaaaaatagttttcgtggtggtgcttttattggatgttcaaattatccagattgtaaatttacacgacctctttcaaagtcaaaagcagctcaacaattaactttggctgaaccaaaattaattggtcaaaatgatataggtaaagacatatatttaaaaaatggaagatttggtccctatctacaatatgaaaaagaaattgataatgttgaagaagaaaaaaagaaaaagaaaaaaataaaaaaagaagataataatatgaaaaatgtatctatccccaagggaattgatattaaaagtatagatttagatagagctaagtatttatgttcacttccaataagtttaggtaaaaatccagaaaatgataaa

SEQ ID NO: 293295 - DNA, 952 bp, Unknown
  Bacterial polypeptide expressing nucleotide sequence isolated from the Sargasso Sea
aatatttcacagtggggtgcgcaggtaagaaagcagaaagaaccttttgatccatttttgttaaaactagcccgaataaataatgaatctgttggaacaaaagatcgtaaattattggccggagcagttaaaacagttgaacaattaaattgtattgaactagaattaagagattcggcattagaagttaccgatatctcaacaaaagaggttacacgcaaagcaaggccaccttttattacaagtacccttcagcaatctgcatcaggtgctttaagttttactcctgcacgcacgatgggtgtagcccaaaaattatatgaaagtggtcttattacatacatgagaacagactcatttaatatcgctcaaactgctcagagtgaatgtagagaatttataaaaatttattatggagaagagtttatcccagaaaaggcaaatatatatagtcgaaaaagctcatccgcacaagaagcccacgaggcaatacgcccaactgatgtagcggttaagccaaatgataatggattaaacttagagcctgctgagcaaaagctttacaaactaatttgggaacgttttgtggcgagtcaaatggttccagcacgtatatcaaggcggacggttgaagcagaggcggggaatgaaaatagttatctatttcgagcgacttcttcagatattctgtttccgggttatatgcaagccagtggtatagaagcagctgaggaccggaaaaaacaagatgatgaagaagatggcattataccgccattagaattaaatgaatctctagatgttatagattggttaactgaagaaaaggaaacaaagcctgtcgcaagatattcagaagcatctttaattaaggcgcttgaggaaaatggagttggccgtccaagtacatatgcagcgataatgtcaaaattagacaaacgagaatatgtag

SEQ ID NO: 293296 - DNA, 490 bp, Unknown
  Bacterial polypeptide expressing nucleotide sequence isolated from the Sargasso Sea
atgaatttagtaattgtagagagtcccgctaaagcaaaaacaataaatgcttatttagggaataattttaaagttttagcaagctatggtcacgttagagacttgccgtcaaaaaatggatctgttgatcctgaaaataattttgaatttgaatgggaaacatcagataaatcaaaaaaaaatctgtctgaaatttataaagctgcagaacagtcagatacgctttttcttgctacagatccggatagagagggagaggctattgcatggcatatattagaactccttaaaaagaaaaaacttttaaaagacaagtcggtaaaaagagttgtgtttagtgaaattacaaaaactgctgtatcaaggggtattgaaaacccaagggaaattgataactctcttgtatccgcatatctagctagacgagctcttgattatttagttggctttaatttatctcccagtactttggagaaaacttcctggagca

SEQ ID NO: 293297 - DNA, 766 bp, Unknown
  Bacterial polypeptide expressing nucleotide sequence isolated from the Sargasso Sea
tttggcgcacaccctcgtcatcgttgaaagccccacaaaggcccgaaccatccgcggctttctgccaaaggggttccgggttgaggcgtcgatgggtcatgttcgtgatctgcccaacaacgccagcgaaatcccagcgtctgccaagggacagaagtgggccaatctcggcgtgaacaccgaggccgacttcgagcccctttacgtggtgccgaaggacaagaagaagattgtccgtgaattgaaggacgccctcaagggagctgagcagctgctgctcgcaacggacgaggatcgtgaaggggaaagcatcagctggcacctgctgcagttgctttctcccaaggttccggtgaagcggatggtgtttcacgagatcaccaaggaggcgatcggcaaggccctggatcagacccgagaactcgacatggagctggtgcacgcccaggaaacccgacggattctcgatcgtctggtgggttacaccctctcgccgctgctctggaaaaaggtggcctgggggctgtcggccggtcgggtgcaatcggttgccgtccgccttctggttcagagggagcgggccagacgagcgtttcgcagcggcagctactgggatctcaaggcgcagcttgagctgaatgggagcggcttcgaagccaagctcacccatgtggacggccgtcgaatcgccaatggcagcgatttcgacaaaagcaccggcggcctcaaggccgggagtgatgtgcggctgctgaggagcaggagg

SEQ ID NO: 293298 - DNA, 709 bp, Unknown
  Bacterial polypeptide expressing nucleotide sequence isolated from the Sargasso Sea
atgccagtcttagtggttgaatctcctgcaaaggctaaaactataaatagctacctaggttctaattatactgtcattgcctcttatggccatgtaagagatttgccctccaaaaatggttctgtcgacccacaaaatgatttcaaaatgaagtggcaagctgattcaaatgcccaaaagcaaataaaaaaaatcgttgatgctctaaaaaatgacaatgacctgattctagcaacagatcctgatcgggaaggtgaagcaatttcttggcatgtagtggaaagtcttaaaaacagaaaggtaataaaaaaggatacaccagttaaacgggtagtctttaatgcaattaccaaatcttcaattttagaagcgatgaaataccctagacaaattgatatgccattggttgaggcatacttggcacgcgtagctcttgattatcttatggggtatgaaatctcccctgtgctttggagaaaattgccaggctcacgttctgctggaagggttcaatccccaactttaaaactaattgtcgagcgagaaatggaaatagaatcgcatgtgccattggaatattggttggttgaagtgaaacttaaaaactctaatggcaacttcttgacagcaaaattattttcacttgatgggaaaagagtcaaagatcatgatataacgtcaaaaaatgagagtgagaaggttgttgatg

SEQ ID NO: 293299 - DNA, 952 bp, Unknown
  Bacterial polypeptide expressing nucleotide sequence isolated from the Sargasso Sea
acgaaacgaattatatttcacgaaataacaaaaccagcgctaataaaggcacttgaatctcctacaacaataaatatgaacattgttcgtgcacaacacgcgcgccaatgtttagacatattggttggattcaaagtaacacctttactgtggaagcacatatgcccttattatagtaagggattatctgctggaaggtgtcaaactcctgcgttgagactgatatatgataatgcaaatgagataaataactgtaaaggggaacaaacgaatgtagtttcggggtatttcacaaaactgaatgcgcgttttacactgaataagaccattaatagcgacgaagaggtaaaagatttttttgatgaagtgaaaacattcgaattcgttttgaataaagaacccgctaaaaaacaaaaagtggatccacccacccctttcagtactagtttgctccaacaaaaaagcaattccctattgaatatgtcgcccaaagatactatgagcaattgccaaaagttgtacgaggcgggtttgattacgtacatgcgaacagataataagaaatatagtgcagagttttgtaagggatgtgaagactttattgtgagcaactttggtgagaagtatgtaggggatataaaaaaaaacataagcggagacaagtcggcacacgaagcaatcagaccgacgaaaatatcattgcggccgaatgaactaccggttgattatcatagtaaaaccaaacgattatatgaactaatatggacaaattcaatacagagcctgatgagtgcagttgagcgattgatgttacacgttaatataacggctccactaggatataaattccaaagcattttccataaaaatatattcgatgggtggcaagttgtcggtacgaaaaaggaggcgtctcaatatgattacataatgatggtatgcgataatagta

SEQ ID NO: 293300 - DNA, 832 bp, Unknown
  Bacterial polypeptide expressing nucleotide sequence isolated from the Sargasso Sea
gagggtcgctcaaactctttatgaacaggctctttttacttatatgagaacagacagtactaatgttgttggtgaagctattagtgaaatgagacagctaatcaaaaccaaatatggagatgattatttaccaggtagtccaaaattttattctaaaaaaaatcaacaagcgcaagaagctcatgaggcagttcgacctactcaggttaatataaccccaaaagagagcggattgaggggagatgagctaaagctatactctttaatatggaatagggctgtatctagccaaatggaaagtgcgaaactaacgcaaaccgaagtttttatagattcgcatgataaagaatttacttttaaagcgaatggctcacaggttgtatttaatggttttttagaagtatacgaagaagggtcagatgatcaacaggaagatgatgccaaagaatacagattgccttctagcttaaatataaatgattctttagacaaagaagctatagaaacagaccagcatttcacaaaacctccagctagatatacagaggcttctttaattaaagaattagaagagaagggcattggaagaccctcaacttacgcttcgataatgaattcaataaagaaaagagattatgcctccctagaaaataagcagtttaagccggcgagtagaggaagggttgttgttagttttttagatgcttatttttcagattattttaaatatgagttcacagcagaaatggaggaatctctagactatatagcaaagggagatcaagagtggacaacattacttgataatttttgggaatggttttggtcctaa

SEQ ID NO: 293301 - DNA, 905 bp, Unknown
  Bacterial polypeptide expressing nucleotide sequence isolated from the Sargasso Sea
aactgatgtaaataaaaaaccttctgatatgaaaaaatatttaagcaccgatcaatctaaactttatgaattaatatggaatagagctgtatcttcacaaatgaatccggctgaatttgatagaaaaagtataactatagagtctgaaaataaagaaattagttttaaagcaaatggatcaactgtgaaatttgaaggttatttaaaagtctacaaatttgaagaaaaagatgaagatctaaaaaatattttacctgaagtcaaagttggagataaggtttcaataaaagaattaattgatgaacagcattttacagatcccccgccaagatattccgaagctagtcttgttaaaaaaatggaagaattgggtataggacgtccatcaacatacgcaagcataatatcagttttatctactagaaattatgtggaattattaaataaaagattccatccaacagacaggggtaaattgctttcggcattcctagaaaaattatttacaaaatatgttgattataattttactgcggatttagaaaatcaactagacgaaatcactagtggtaaaattgattgggttaaagttttagacggtttttggaaagatttttattcaaatgttggtcaggttaaggagaaaagaactagagaagttttagatttgttaaatgaaagtttgggtgatctagtatttgaaagagacaacaatgatgcaattgacagaaaatgtaagctttgtgaaaacggccaattaagtctaaaaaatagtttcagaggtggtgcttttataggatgctccaactatcctgagtgtaaatttaccagacctttatcaaaatcaaaagcatctcaacaagtcaatttagcagaacctaaattgatggaaaaaatgacttagg

SEQ ID NO: 293302 - DNA, 736 bp, Unknown
  Bacterial polypeptide expressing nucleotide sequence isolated from the Sargasso Sea
gtttttaatgaaattacaaaaaaagctgtaacacatggaatagataaccctagacaaatagaacctttgttagttgatgcatacatggctagacgagcactcgattatctcgtaggtttcaacatctcacctatattatggaccaagctaccaggatcaaaatctgctgggagagttcagtcagtagcattaaaactaataactgaaagagaacatgagatagagctttttaaaccagaagaattttggacattaaatattaaatttaatgatagtaataagaattcatttacagcaaatatttctcaactagacaataagaaagttgaaaaattttcttttaaaaataaaacagatgttaatagtgcaatagataatattaaaactaaaaaattcaaaataattgatatatcaacaaaaatagtaaacagaaacccttcgggtccttttacaacgtcaactctgcagcaagtatcttcgggaagattaggtttgggagcgtctagaactatgcaaatagcacaaaaactatatcaaggtatagaaattgatggagaaacaattggtttaattacttatatgagaacggatggatctaacatatcaaaagaagctgtacctttatttagagattatatccaaaaagaatatggagataaatatttacctaaggaacctttaaattactctggaaaaaaagcaaaaaatgctcaagaagctcatgaagctataagac

SEQ ID NO: 293303 - DNA, 634 bp, Unknown
  Bacterial polypeptide expressing nucleotide sequence isolated from the Sargasso Sea
accttaatatggaatagaactgttgcaagtcagatggagagctcaagatatgagagaaaaactctagtgataacttcgaccgacaataagttagaatttagagcttcatccagaaagaacatatttaaaggttttgaaattcttaccggtacagatgatgaaaaggttacattattccccgaagggcttgaagaaggtagtgagctgagcttaatttcaaataaatacgaacaaaaatttactctacctccaaatagatactcagaagcatcattaattaagaagatggaggaggagggtattggaaggccttcgacatatgcaacaatcgttaagggtttgagaacaaaaaaatatgcctatggagccaagtcaattatcccttctgatctaggaagagttttaacttcctacctgaaaaaagtttttgaagatttttttatagaaacagaatttactgctcgaatggaagcagatctagatgaagttgcttcaggaaataaaaattatgaagaagttttaaatgctttttgggcggagctccaaaattacctcaatagaaaaattaatgacattgaaataagtaacaaggatgaatttaaaactagacaagttttagacttgcttaatgaag

SEQ ID NO: 293304 - DNA, 895 bp, Unknown
  Bacterial polypeptide expressing nucleotide sequence isolated from the Sargasso Sea
tatttacagtgaatttaaagaaaaaaatgaagactcagagaaaaaaaatgaagatgaagaatctgaagatgagggttcattacccagtgtcgacttaaatacaaagattaataatgttactcctgaaaatactcaacactttaccctacctcctccaagatattctgaagcaagtttagtaaaaaaacttgaagaacttggaattggtagaccatcaacttatgcaagtataatttcagtgctaaaaatgagaagttatgttgaagttgaaaaaaatagattcattcctgaagatagagcaatattaattactgcatttcttaaaggattctttggtcaatatgttgactatgaatttactgctggaatggaagaatcgcttgatgaaattacctctggaaagatcaaatggactgatttcttagaaaaattttggaatggattttcaactaatgtagggaatgttactgatcttagaatcacaaatgtacttgatagtcttaatgagattttaaaaaatcatatatttgaaaaatcttctgataatgaaacatcagtatcaagagcctgtccttcagaaggatgcaaaggtcagctaagcttaaaagtaagtcgctttggagcatttgtaggttgttcagattaccctgaatgtaaattcacgagacctatatcttataaaaagattaaagaagcttttgaagatgaagttttaggaattgatgaagtttcaaataaagaaattaaattgttaaatggaagatttggaccttacgtacaattaggtgaacaagaaggaaaagaaaagcctcaaagatcatctgtccctaaaggagtttcgccgagtataattgatttagaaaaagctaaatatcttttaagtttaccaagagag

SEQ ID NO: 293305 - DNA, 142 bp, Unknown
  Bacterial polypeptide expressing nucleotide sequence isolated from the Sargasso Sea
tatgaatcttgtcattgtagaaagtccagcaaaagctaaaactattaacaaatatcttggtaataactatacagttttagcaagctatggacatattagagaccttccttcaaaaaatggatctgttgatcctgatcatgat

SEQ ID NO: 293306 - DNA, 151 bp, Unknown
  Bacterial polypeptide expressing nucleotide sequence isolated from the Sargasso Sea
tatgaatttagtcattgttgaaagtccagctaaagctaaaacaataaataaatatttaggtgataaatataaagtattagctagctatggccatataagagatctaccctctaaaaatggttctgtagatccagataaaatttttgaaatg

SEQ ID NO: 293307 - DNA, 739 bp, Unknown
  Bacterial polypeptide expressing nucleotide sequence isolated from the Sargasso Sea
attggaaaaatatgatttgaaaagtagttcagaagcagagttagcagctcaggcaatcacgacacgagagcttgttgttgcctcagttgaaagcaagccgactagtagaaacccgtttgctccgttcatgacatctactctccaacaagaagccggaagaaagtatggaatgggtgctagacaaacaatgcaagcagctcagaggttatacgaggctggccatattacatatatgcgaacagacggaattgatatggcaccagaagctgttacctctacaagagaagctataagagagagatatggtgataaatttcttccagcatcgcccaggttctacaaaaataaagctaaaaacgcccaagaggcccatgaatgcataagacctacctctatttcaagagatgcaaagcaattgaaactttccgatactgatcaatttaaactatatgacttaatctggaaaagaacgatatcctgccaaatggagtcggcaaagttagagagaacttccgtagatttacaaagcctcgataaggaagttactctcagagctaatgggcaagtagtgttattcgatggatttctaaaagtttacgaagaaagcagcgatgacgcagagcaatcagaagatgaaagtcggcttccacaaatgtctgagggagaaaacattgaaaagcttagtgttgatcctgagcaacactttacccaaccaccaccaagatacacggaagccagc

SEQ ID NO: 293308 - DNA, 844 bp, Unknown
  Bacterial polypeptide expressing nucleotide sequence isolated from the Sargasso Sea
tccaattttagaaattttattaaaaatacatatggaaatgaatatcttcctaaagatcctctaaattattctggtaaaaaagcaaagaatgctcaggaagcacatgaagcaatacgacctactgatattgataaatcaccaaataaagtaaaaaaatatttaagtcctgaacaatataaagtgtatgatctgatttggagtagagctttatcctctcaaatgcaatcagcgcaatttgatagaaacacaattacaattacatctgataacaaagaaactattttaaaaactacaggatcggtgattaaatttgatggttatttaaaagtttataaagatcctaaaaaagaagatggtgaaaccattttgcctaaaatgtcaaatggtcctgttaatattgaagatcttatagacgagcagcattttacacaaccacctcctagatattcggaagcaagtttagtaaaaaaacttgaagaattaggtattggaagaccttctacatatgcaagtattatatctgtaatatctactagaggttatgttgaaaatttaaataaaagatttcaccctacagatagaggaaaattaataacagctttcttagaaaaactattttctaagtatgtagactacaattttactgctggactagaaaatcaactagacgaaattacttcaggaaaagaaggatggattaaagttctagagatgttttggaaggactttaatcaaaatgttactgaggttaaggaaaagagaacaagagaagttttagatttattgaatgacagtctgggtaccttaatatttgaaagggataatgatggtaatattgatagaa

SEQ ID NO: 293309 - DNA, 430 bp, Unknown
  Bacterial polypeptide expressing nucleotide sequence isolated from the Sargasso Sea
atgggtaaatcgttggttatcgttgagtctccggccaaggccaagaccattaaccaataccttgggaaggagtatgtggtccgatcgagcgttggccacgtccgtgacttgcccgtgagtggatcaaaaaagaaggtagatcccaagaagcgtgctgagcaagcggccaagactcgtaaaatgtcgcctgcccagaaggcgcggtatcgaaaggagaaagcccgcagagatctggtcgtcaatatgggcatcaatcctgataaggggtgggaggcgaattaccaggtattgcccgacaaggtcaaggtcgtcaacgaacttcagaagctggcggctgaaagtgatgccatctatctcgccactgaccttgatcgcgagggagaagccatcgcctggcatctcaaagaggtgatcggctcggactcccagc

SEQ ID NO: 293310 - DNA, 865 bp, Unknown
  Bacterial polypeptide expressing nucleotide sequence isolated from the Sargasso Sea
gattatctcccagatcaaccaaacaactattcaggaaaaaaagcaaaaaatgcacaagaggctcacgaagcaattaggcctacagatataaataatgatccttcaatgcttaaaaaatatttaagttcagatcaacacaagctttacaatttaatctggtctagagccctttcctcacaaatgcaaacagcaaaatttgatagaaaaactataattataaattctgatgatggaaaaaacatattcaaggcaagcggctctgttgtgaaatttgatggatttttaaaactttataaaattgacgaaaacaacgatgaggaaaaaatattaccagaagtgtctaaaggaccaataaatatagaaagtttcattgatgaacagcattttacactacatccacctagatactctgaggcaagccttgttaagaaacttgaagaacttggtattggaagaccctcaacatatgcaagcataatatctgtaatcgcgaatagaggatacgcagatatattaaataagagattttttcctactgacagaggaaagcttatttctgcttttcttgaaaaattatttactaaatatgttgattacaattttacggctaaattagaagatcaacttgatgatataacctctggtaaagaagattggataaaagtgcttgagcagttttggagtgattttaatcaaaatgtttctcaagtaaaagaaaaaagaactagagaagttttagatatgctcaatgaaagtttgggtagtcttatttttgaaactgatgataatggaaatattgatagaaaatgtaaattatgtcaaacaggacaactaagcttaaaaaatagtttcagaggaggtgctt

SEQ ID NO: 293311 - DNA, 856 bp, Unknown
  Bacterial polypeptide expressing nucleotide sequence isolated from the Sargasso Sea
gcacaatatgaacgtacatctgttgacataacttcagatgataaaattttagaattaagggctaatggctcaattcaaaagtttgatggttttttaaatgtttatggtgaatttaaagaaaatgatacttcaacaagtgatgagtcaaatgaaaatacagataataatgaaaaactgttgccagatttaaccatggatacggtatttgcaactcataaccctgaatcaagtcagcactttacattaccaccaccaagatattcagaagctagtctagtaaaaaagcttgaagaacttggcattggaagaccatctacttacgcaagtataatttctgttttaaagatgcgggcttatgttgatcttgaaaagaatagatttgtgcccgtagatagagcgatacttataactgcctttttaaaagggttttttgataaatatgttgattatgattttactgctgatatggaaaataaacttgatgatattacaaccggaaagattagttggactgagtttttatctttattttggaaagatttttcaaaaaatatcaatcaggttactgagttaagaataacaaatattttagataatctaaatgaaagtcttaaatctcatattttcaaaactgaagaaagtactaataaaattactagagtatgtccaactggatgtggtggtgaattaagcctaaaggtaagtcgttttggtgcttttgttggttgtacaaactatcccgattgtaaatttacaagacctatttcacacaaaaaggtcaaggaagtatttgatgatatcattttaggaatagatgaagctacctcaaaagagattaaacttttaaatggaagat

SEQ ID NO: 293312 - DNA, 763 bp, Unknown
  Bacterial polypeptide expressing nucleotide sequence isolated from the Sargasso Sea
aatcgagtccagcagaaaattagggttaaccgcaagtcaaactatgcgcacagcacaaaaactttatgagggtactgaaataaacggtgaaacaacaggtttaattacttatatgagaacagacagtgttatgatgtctaatgaagcgattaatcaagtacgcaattttgtaagtcagaattatgggaatgaatatcttcctgaaagtccaagagtttataaatctaaagctaaaaacgctcaagaggctcatgaatgcataagaccaactgatattaacttaactccaaaagatattaagcaatacattactggtgaagaatttaaattatatgaaattatttggcaaagggcagtatcttcacaaatggctagtgccgtactagatcaagtggcagttgacattgttgatgaagatcaaaaaataacacttagggcaaatggctcaactattaaatttcctggaatgtataaagtttatcaagaagcaaaagatgatgacaaggatgaagaaaaagaaacgatacttccaatgatgaatgaaggtgaaacattagatttgcaggaggtaatcaaaaatcaacattttacaatgccccctcctcgctacacagaagcaagtttggttaaaaaactagaagaacttggaattggcagaccttccacttatgcctccattataaaagtcttacaagatagagattatgtaattttagataagaaacgttttaatcctcatgatagaggtcgtattgtatctata

SEQ ID NO: 293313 - DNA, 1001 bp, Unknown
  Bacterial polypeptide expressing nucleotide sequence isolated from the Sargasso Sea
tatcaatgatgctgttagtgactttagaaattttataaaaaattcttacggagatgattatttgcctaatgaacccaataattattcaggtaaaaaagctaagaatgcacaagaagctcatgaagctataagacctacagatataactagaactccagagtcattaaaaaaattcttaagtactgatcaaaataaattatataatttaatttggtcaagagctctatcatctcaaatggaagcagccaaatttgatagaaaaaccattacaataaattctgataatagcttaaatcagtttaaatgttcgggatcaacaattaaatttgatggttttttaaagcttacaagaattgatgaaaatgaagaggaaaaaattcttccggatgtaaataaagaagaagttctggttaatgaatttattgatgaacagcacttcacgcaaccacctcctcgatattctgaggctagtttagtaaaaaaacttgaagaattaggaattggaagaccttcaacatacgcaagtattatttctgtaatttcaaatagaggatatgctgatgttattaataaacgtttttttcctactgataggggaaaattattatcagcatttttagaaaagttatttactaaatatgtagactatggttttacggctggtctagaggatcagcttgacaatattacaagtggtaaagaagaatggataaaagtacttgataaattttggaaagatttcaatataaatgtatcaagcgttaaagaaaaacgaactagagaagtattagatttacttaacgaaagtcttggagaactaatttttgaatctgacgaaaatggaaaaattaacagaagttgcaaattatgtaataatggtgaattaagtttaaaaaatagttttagaggaggtgcatttataggttgttcttattatcctgaatgtaaatttaccagacctctatctaaatcaaaagcaaatgatcaatacgcactagcag

SEQ ID NO: 293314 - DNA, 771 bp, Unknown
  Bacterial polypeptide expressing nucleotide sequence isolated from the Sargasso Sea
gaaggctcatctcaaaaaatctagcaaagaaattgaagctgttcttacacattatgatggtgaaaagctcgcgacggggaaagattttgatgataaaactggtaagcttatcgaaggtcgaaaagtcatattaatcggagagcaaaaaatccgagagttaaaagaaagatttacttctcaaccttggctagtcgatagtattgaagaaaaaaaatcgaccagaaaaccatctcctccttttacgacctctaccttgcaacaggaatcaaacagaaaattaaaactttcagcacgcgatacgatgaggattgctcaatcgctatacgagcgaggtttgattacctacatgagaacggactctgttcatttatcggatcaagctattacagctgcgaggactcatgttgagcaaatgtatggaaaagaatatttaagcccaaaaattaggcagttcacaacaaaatcaaaaggagctcaggaagcgcatgaagctattcgtccttcaggcgttacttttcagttaccccagcatacagggttatctggagttgagctaagactctatgatttgatttggaaaagaaccatggcaacccaaatggccgacgcaaaacaaactcatgtcagtttgaatgttaaagtggatgagggcatttttagggcggctggtaaacgaatcgatttccctggtttctttagggcttatgtcgaaggttctgatgatccagaagctgctttggatgatcgtgaactacatttacccaaagttaa

SEQ ID NO: 293315 - DNA, 953 bp, Unknown
  Bacterial polypeptide expressing nucleotide sequence isolated from the Sargasso Sea
ttctctgattgctgctgctaacagtcaattcggcatgcttgctaaacaaaccatgaaggcagctcagagcctttttcttgcaggacatattacttatcctagaacagataacatagctatagggggttcagaagaaaaagaatattctggatcacctctagaagaaattagaaactatattgcagataattttgatcaaccctttttaagtaagcaagtaaggagttataagggtaaattgacaactgctcaggaggctcatgaagccattagaccagctttaatttctgtaaaaccttcagatttagatttatccactagtgaagaaagactttataagttgatttggaatagaacagttgccagtcaaatggaaagttctaagtacgaaagaaaatctttaactatctcttctgaagatagtaaatttgaatttactgcatcttcaaggaaaaatatttttgccggatttgaaattctttctactgctgaagaaaaaaatatagctgaatttcctgaggggcttgaagaagggtcggaagtaaaaattattgctagacaagctgaacaaaagttctcacctccacccaatcgttactcagaagcatcattaataaaaaaaatggaagaagaaggtataggaagaccttcaacttacgcaacaattttagaaggccttagaactaaaaaatatatatacggtggaaaatctatgattccgtctgatttaggtagaattttgacagcttatctacaaaaagtttttgaagatttttttatagaaactaaatttactgcaaacctagaagctacccttgacgaaatagcttcaggcaatgaagagtatgaaacagttttaaatgaattttatattgagctacaagattacttaaaccggaagataaacgatattgaaatcagcaataaagatgagtttaaaactagacaagtgt

SEQ ID NO: 293316 - DNA, 146 bp, Unknown
  Bacterial polypeptide expressing nucleotide sequence isolated from the Sargasso Sea
tatgaatctagtcatagttgaaagccctgctaaagcgaaaacaattaataaatatttaggtgataactataccgttttagctagctatggtcatattagagatcttccttcaaaaaatgggtctgttgatcctgatcaaaatttta

SEQ ID NO: 293317 - DNA, 918 bp, Unknown
  Bacterial polypeptide expressing nucleotide sequence isolated from the Sargasso Sea
gttcaatcagtttctgtaagacttcttgttagaagagagagagaaagaagatcctttaaaaaggctagttactggggaattaaagcttccctagtaaaagataatgtaactttcgaaactaaattatttagtttaaatagtcaaagaatttctaatggttcagatttcgatgaacagaccggcaaattaaaacaaggaaataaatctttaacaatcggagaagaaaaagcaaatgacttattgaagaatttttcttctgaggattggttagtctcaaaaatcgaaaaaaaatcatccactcgtaagcccgttcctccatttacaacaagttcattgcaacaagaagccaacaggaagctacgattgtctgcaagagaaactatgagatgtgcacaagggctatacgagagaggtttcataacatatatgagaactgattcggttcatctttccgaacaagcaacaaaagctgctagagaatgtgtcagctctatgtatggaaaagaatatttatctaactcaccaagacattttaattcaactgcaagaaatgctcaagaagcacacgaagcaattcggcctgcaggtgaagtatttaaaacaccaaaggaaactaacctgactggtagagacttatccctttacgatttaatttggaaaagaactgtagctagtcaaatggcggaagctaggctaacaatgataaatgctgaaattagtgtgggggatggattatttaaatcgagtgggaaaagtattgatttcccaggatttttcagagcttatgtcgagggaagtgatgacccaagttcatcccttgaacaacaagaaattattctcccaaacttaacaacaggaacatgtcttgaagttactaataaggaatctacttttcatgaaactaaaccgcccgcaaga

SEQ ID NO: 293318 - DNA, 226 bp, Unknown
  Bacterial polypeptide expressing nucleotide sequence isolated from the Sargasso Sea
tatgaatttggtcattgtagaaagtcctgctaaagctaaaacaataaataaatatttaggtgatgattataaagttttagcaagttatggtcatataagagacttaccttctaaaaacggttctgttgatccagatcaagattttaagatggaatgggaggttgatagtttttcaaagaaatatcttaaagaaataacagatgctgcgaaaaactcttctaaaatt

SEQ ID NO: 293319 - DNA, 746 bp, Unknown
  Bacterial polypeptide expressing nucleotide sequence isolated from the Sargasso Sea
taaaaatcttacggagatcattatcttccaaaagaaccaaacaactatttctggaaaaaaagcaaaaaatgcacaagaagcacatgaagcaataagaccaacggatatttctagaaatcctgatagtatgaaaaaattcttaagcactgatcaaattaaattatatgatcttatatggtcacgagccctttcttcgcagatggaaccagctaaatttgatagaaaaacaattacaattgtttctgatgataatttaaaccaatttaaatgttctggatctacaattaaatttgatggttttttgaagttatcaagaattgatgatgaggatgaaaaaattttaccaaatgttgatagggaagcagtttcaactgaagaatttattgatgaacaacattttacacaaccacctccgagatattcagaagcaagcttagttaaaaaacttgaagaattgggtatcggtagaccttctacttatgcaagtattatttcagttatatctaacagaggatatgctgatgtggttaataaacgtttctttccaacagataggggtaaactattatcagctttcttagaaaaacttttctcaaaatatgttgattatggatttactgctggattggaagagcaacttgacgatatcacttcaggtaaggaagagtggattaaagttctcgataatttttggaaagacttcaacaataatgtttcaaatgtaaaagaaaaaagaacaagagaag

SEQ ID NO: 293320 - DNA, 898 bp, Unknown
  Bacterial polypeptide expressing nucleotide sequence isolated from the Sargasso Sea
aagccttttaaactacaagttgcaaacttctgcgagaagcaacttaggctttcagcctaaaaagacaatgggcattgctcaaagactttatcaagagggattaattacatatatgaggacagactctataaggctctctgataatgcaatcaaagcttcccgcgattatatttctgaaaatttttcaagcaaacatcttccacctcaaccaaatttatatggtgatacaaaaaatgcccaagcagctcatgaggcaataagaccctctggagataaatttatcacacctgaagaattgctatcaactcataaagaagatagcgatgaatacaagttatataaattaatttttaataccacagtagcctcacaaatgactgacgctcagggaataactaaaacaattgaaatagaagttacagatcctgaatattcttctctgacacttagtatctctggaaccacatggacatttggtggttatagagatttaataaaagatgcaactgaaaagtctcaagagttaccagacttaaaagaaaatgatgaggtgtctattgtttctgctgaaaaagaagaaaaatttacaaatccaccaaataggtattcgtccacttcattaattaacaaactagaagagcttggaataggaagaccttcaacctacgtctccattattgacagtattacatctgttttcataaatgctgaatctagtttaaaacctagaattttagcgatggctttaattaataatttcatgaaaccacactttaatcaatatattgattatgaattttcaaaatctatggaagatgatcttgataaaatcttagaaagtagtgatccagaaaaatctaaaattgaatttttagaaaactcatttaatacaataaat

SEQ ID NO: 293321 - DNA, 793 bp, Unknown
  Bacterial polypeptide expressing nucleotide sequence isolated from the Sargasso Sea
atgactcagaaatctcttgttatcgtcgagtccccgactaaggcaaaaacaatacgtaagtttcttcctaaaaactttgaagtcattgcctgtgttggtcatatccgagaccttccctcgtctgcggccagtattcccaaaaaatataaagactatgaatgggctaaaataggagttaatgttaacgaaaacttttctcctatctatgtcctaagcaaaggcaaatcaaaaattatccaagatattaaaaagtctctcaaagagaaaacaactctctatcttgctacagacgaagatagagagggtgagagtatttcttggcatctttgtgaagtattgaaacccaaaattacaacaaaaagaatggttttccatgaaataacgaaagctgccattgaaaaaagtttaaagaatccaagagaacttgatatgaatcttgttcgcgctcaagaagcaagaaggattttagatcgactttttggctatacactatcgccattactatggaaaaaaattgcttatggactctctgctggacgtgtccagtctacaggacttcgactcatcgttgaaagagaaagagaaagaagaaaatttgtacccgctcatttttcaagtatcaaagctaagctaaataaaaaagattcttctcaaaatgagaatatgattgcaagtttagtcctctataaaaataaaaaaattgctattggaagtgactttaatccttatacgggaaagcttaaagaagaaaaagaaaaaactcattatattttaagtaaaaaagaagctgaag

SEQ ID NO: 293322 - DNA, 868 bp, Unknown
  Bacterial polypeptide expressing nucleotide sequence isolated from the Sargasso Sea
acttatccaagatgcagtatcagctttcagagattatattgaaaaagaaattggaaatgaatatttacctaaagaggcattaaattattctggaaaaaaagctaaaaatgcacaagaggctcatgaggcgatcagacctacagatattattagaactccccaaagtgttaaaaaatatttaagtacagatcaaaataagctatatgacttaatctggagtagagctttatcttctcaaatgcagtcagctcagtttgatagaaataccataactataacatcagataataatgatactatttgtaaagctagtgggtcagttattaaatttgatggatttctaaagatttataacaatcaagctaaaagtgatgatgaaaatattttaccatctatgtctaaaggacctatcaatattgaagcattgttagatgaacaacattacacacaaccacctccaagatattctgaggctagtttagttaaaaaactagaagaactgggtattggaagaccgtctacttatgcaagtattatttctacaatagctaatagaggatatgctgaaatactcaataagcgtttttttcctacagatagaggaaaactaatttcagcttttttggaaaaattattttcaaaatatgttgactataattttacagcgggtctagaggaccaacttgatgaaattaccactggtaaagaaagttggattaaagttttagaattattttggaaagattttaataataatgtttcggaggtaaaagaaaaaagaactcgggaagttttagaccttttaaatgatagtttaggagatttagtttttgataaagatgataaaggaaatattgttagaaaatgt

SEQ ID NO: 293323 - DNA, 916 bp, Unknown
  Bacterial polypeptide expressing nucleotide sequence isolated from the Sargasso Sea
aacaaatggaatagataatccaagaaatattgaatctaatttggttgaggcatacatggctagaagagccttagattatttagtaggatttaatatttcacctattttgtggacaaaattacctggttcaaaatctgcaggaagagttcaatccgtagctttaagattactaacagaaagagagcatgaaattgagcaatttaaacctgaggaattttggacattaaatattaattttaaaacctctaagggtgatattttaaattcaagtatcgtaatactaaataattctaaaattgaaaaattctcttttaagaacaaacaagatataaataaagctattgaagtaattaacaaatgtaaattcaaaatttcagatattaattcaaaaatttatacaagaaatccacttggtccatttacaacatccactctacaacaaacggcctctagcaaattaggttttggagcatcaagaactatgcaaattgcacaaaggctatatcaaggtatagatattgaaggagataccgttggactaatcacatatatgaggacagacggtactaatatatcaaatgatgccattaatgattttagaagctttattaaaaaatcttatggtgataattatttacctaaagatgcaaacaattattcaggtaaaaaagcaaaaaatgcacaagaagctcatgaagctataagacctactgatattaccaaaacaccagactcaataaaaaaatttttaagtacagatcaagctaaattatatgatttgatatggtcaagagctttatcgtcacaaatggaatcagctaaatttgatagaaaaactattacaatagtttctgaagatgatatgcatcattttaaatgcactggatctactgttaaatttgatggatttttaaaa

SEQ ID NO: 293324 - DNA, 868 bp, Unknown
  Bacterial polypeptide expressing nucleotide sequence isolated from the Sargasso Sea
ttatcactttacgatttaatttggaaaagaactgtagctagtcaaatggctgaagctaggctaacaatgattaatgctgaaattagcgtaggggatggaatatttaaatcgagcgggaaaagtattgatttcgcagggttcttcagagcttatgtcgagggaagtgatgacccaagttcatcccttgaacaacaagaaattattctcccaaacttaacaactggaacatgtcttgatgttactaataaggaatctacttttcatgaaactaaacctcctgcaagatatacagaggccgcattagttaaagttcttgaaaaagaagggattggaagaccttctacctatgccagcattattgggaccatagttgatagaggttatgcgaatatatcttccaatactttggctccaacctttacagcttttgctgttactgctctattagaagaacattttcctgatctggttgatactacttttactgcaaaaatggaatcttcattggatgaaatatcttcaggcaatcttgagtggctgccatacctcgaaactttctataaaggtaaaaatggtttggaggtaaaggttcagaaaacagagggtgatattgatggtaaagcttatagacaagttgatttcgaagaccttccttgcgtagtcagaataggctctaacggaccttggctagagggtacaaaaattgatgaatctggtaatgaaattcaagcgaaaggtaatcttccaatggatattactcctggagatttagacataaagcaagttgatcaaattttaagtggcccatcggatcttggaactgatccaaaaactggggaaaaagtctttttaagatttggcccttatg

SEQ ID NO: 293325 - DNA, 450 bp, Unknown
  Bacterial polypeptide expressing nucleotide sequence isolated from the Sargasso Sea
aatgacaaaatctttagtaatagttgagtctcctgcaaaggcaaagacaatttcgaagtacttaggacctgagtatattgttgagtctagcgttgggcatattagagatcttccaaagaaaggtggcacagctagaacaagacttgttgtaccaaaagatctcaatccagaggaaaaggccagacaaaaggaaatcaatgctagaaaaagtttagtaagaaggatgggtgttgatcctgataatggatgggatgctgattggcaaataatacctgagaaagagaaggtgctgaaggctttaaaaaaagctgcaaagaatgttgataatatatatttagcaacagatttagatagagaaggtgaagcaattgcttggcaccttaaagaagctttggggactcaaaaatacaattactcaagagtgagattttatcaaattacaaaagatgc

SEQ ID NO: 293326 - DNA, 917 bp, Unknown
  Bacterial polypeptide expressing nucleotide sequence isolated from the Sargasso Sea
aatcgagcggcaaagtattgatttcgcaggattcttcagagcttatgtcgagggaagtgatgacccgagttcatcccttgaacaacaagaaattattctcccaaacttaacaactggaacacttcttaaagttactaacaaggaatctacttttcatgaaactaaacctcctgcaagatatacagaggctgcattagttaaggtccttgaaaaagaagggattggaagaccttctacctatgcaagcatcataggtacaattatggatagaggttatgcgaatatatcctctaatagtttggctccaacgttcacagcttttgctgttaccgctttactagaagaacattttcctgatctggttgatactacttttactgcaaaaatggaatcttcattggatgaaatatcttcaggtaatcttgagtggctaccctacctagaaactttctataaaggtaaaaatggtttggaggtaaaagttcagaaaacagagggtgatattgatggtaaagcttatagacaagttgattttgaagatcttccttgtgtagtcagaataggctctaacggaccttggctagagggtacaaaaattgatgaatctggtaatgaaattcaggctaaaggtaatcttcccatggatattactcctggagatttagacataaagcaagttgatcaaattttaagtggcccatcagatcttggaactgatccaaaaactggggaaaaagtctttttaagatttggcccttatggaccttacgtacaattgggaaataatgatcaagataaagcaaaaccaagaagagcttcattacccaaagagttgaaaactgatgatctaactctagatgaggctcttgtacttttaagtttgcctagattgttaggagttcatcctgaaagaggag

SEQ ID NO: 293327 - DNA, 214 bp, Unknown
  Bacterial polypeptide expressing nucleotide sequence isolated from the Sargasso Sea
tatgtcaaaatcacttgtaattgtagagtcccctgcaaaggcaaagacgatatcaaaatatcttggtaacgaatatattgttaaatcaagtgtaggtcatataagagatttaccaaaaggaaaatcaaaagctaagagacaaaattcaatcccaaaagatgctagtcctgaagaaaaggctagattaaaaaagagcaagaaagaggaaggataa

SEQ ID NO: 293328 - DNA, 864 bp, Unknown
  Bacterial polypeptide expressing nucleotide sequence isolated from the Sargasso Sea
tcaagtggatcggttttgaaatttgatggatttttaaaagtttattcaaatcaaagtaaagatgatgatgagcaaattttacctgaaatgtcaaaaggaccaattaatatagaagctcttgttgatgaacaacattttacccaacctcctccacgtttctctgaggcaagtttagttaaaaaattagaagagttaggcattggtagaccctcaacttacgcaagtataatttcaacaatagcaaatagaggttatgcagaaatagttaataaaagattttttccaactgacagaggtaaattaatttctgcatttttggaaaaactattttcaaaatatgtggattataattttacagcaggacttgaagatcaactagatgatattacctcaggtaaagaaagttggttaaaagttctagagttattttggaaagattttaatagcaatgtttcagaggtaaaagaaaaaagaacaagagaagttttggatcttttaaatgacagtttgggagcattgatatttgatactaataaagaaggaaaaatagttagagagtgtaagttatgtaatactggttcactgagtttaaaaaatagttttagaggaggtgcttttattgggtgttcaaactatccagaatgtaagttcacaagacccttatcaaaagctaaagcggctgctcagtcacaattagcggaaccaaaatttcttggaaaacatgaaaatggaaacgatatttttcttaaaaatggaagatttggtccttatcttcaatatgagaaaattcttcaagaaaatacagaggaagaaaaacctaaaaaagcaaaaaaaacaaaaaaaaagaaaactgaagtaaatgaa

SEQ ID NO: 293329 - DNA, 871 bp, Unknown
  Bacterial polypeptide expressing nucleotide sequence isolated from the Sargasso Sea
aaactttatcaaggtgtagaaattgagggagaaactataggattgattacttacatgagaaccgatggaactaatctatctaaagacgctatatcagcttttagagattacatcaaaaaagaaattggtaatgagtatttgccagagacagctttgaattattctggaaaaaaagcaaaaaatgcccaggaagcacacgaggctataaggccaaccgatattataagaactcctcagagtattaaaaaatatttaagcccagatcaaaataagctttatgatttaatttggagtagatctttatcctctcaaatggaatctgcaaaatttgatagaaatactattactatcacttcagatagtaatgatactatatgcaaagctagtggttcacttctcaaatttgatggttttttaaaaatctacaaaaatcctagcaaggatgaagatgaaaatattttaccatctatgtctaaagggcttgttaatattgaagctttattagatgagcagcattttactcaacctccgccaagatattcagaggcaagtttagtaaaaaaattggaggaattaggcattggtagaccatctacatatgctagcatcatatctacaattgctaatagaggttacgcagaaatactaaataaaagattttttccaactgatagaggtaaattaatttcagcctttttagaaaagcttttttccaaatatgttgattataattttactgcaggactagaagatcaactggatgaaattacaagtggaaaagagagttggattaaagttttagaactattttggaaagattttaataataatgtcactgaagtaaaggaaataagaacaagagaagttttag

SEQ ID NO: 293330 - DNA, 1084 bp, Unknown
  Bacterial polypeptide expressing nucleotide sequence isolated from the Sargasso Sea
tggtgcatctagaacaatgcaaattgctcaaagattatatcaaggaatagatgttgaaggtgatacggttggattgataacatacatgagaacagatggtacgaacatatcaaatgatgcaattaacgactttagagattttataaaaaaatcatatggtcacaactatttgcctaaagagcctaataattattccggtaaaaaagctaagaatgcacaagaagctcatgaagctataagaccaactgatatcactagaactccagagactatgaaaaaatttttaagctcagatcaaattaaactatatgatttaatttggtcgagatctttatcgtcacaaatggaagcagcgaaatttgatagaaaaaccattacaatcaattctgataatggactaaaccagtttaaatgctcaggatctacaattaaatttgatggttttttaaagctctcaagaattgatgaaaatgaagatgaaaaaattcttccagatgtaaataaagaagaagttttagctaacgattttattgatgaacaacattttacccaacctccgcctagatactccgaggcaagtttagtaaaaaagctcgaagaactagggattggaagaccatcaacatatgcaagtatcatttcagtaatttcaaatagaggttacgcagatgtagttaataaaagattttttccaacagatagaggaaaattattatctgcatttttagaaaaattattttctaaatatgtcgattatggttttacagctggtttagaagatcagcttgacgatattacgactggtaaagaggaatggataaaggtacttgaaaatttttggaaagatttcaattcaaatgtatcaaacgtcaaggaaaaacgaactcgtgaagtattagatttgcttaacgaaagtcttggtgaattagtttttgaagccgacgaaaatggaaaagttaacagaaaatgtaaattatgtgataatggtgaattaagtctaaaaaacagtttcagaggtggagcatttataggtttgtctaattatccagaatgtaaatttaccagacctttatccaagtctaaa

SEQ ID NO: 293331 - DNA, 1318 bp, Unknown
  Bacterial polypeptide expressing nucleotide sequence isolated from the Sargasso Sea
agctatacgtccaacagaaataattcgaaaaccagaagatatgaaaaaatacttaagtactgatcaatataaactttataatttaatatggtctagatctttatcatcacaaatgcagtcagcaaaatttgatagaaaaactattaccatcaactcagatgatgataaaaatatattcaaagctagtggttcaacattaaaatttgatggtttccttaaactgtataagatcgacgaaaatgatgatgacaatgaaaatattttgccagaagttgaaaaaggtgttgtaatgtttgaagatcatattgatgaacagcactatacacaaccacctcctagatattcagaggcaagtctagttaaaaaattagaggagctaggtattggaagaccatctacttatgcgagtattatttcagtaatagctaatagaggatatgctgacataaataataaaagatttttcccaactgatagagggaaattactttctgcttttttagaaaaattatttaccaaatatgttgattatgattttactgcaaaattagaaaatcaattagatgatataacatcaggtaaagaaaattggataaaagttctagaaaacttttgggaagactttaactctaatgtttcaggtgtgaaagaaaaaagaaccagagaagtattagatctattaaatgaaagtcttggatcactaatatttgaggtcgataaggatggaaatattgatagaaaatgcaagctttgtgaatctgggcaattaagtttaaaaaatagttttagaggtggtgcttttatagggtgttcaaattatccagactgcaaatttacaagaccactatcaaaatctaaagcagcacaacagctgacactagcagaacctaaattcattggaaaaaatgataaaggtaaagatatttttcttaaaaatggaagatttggcccatatttgcaatttgaaaaagaaatcatagaggaagatgaaaaaactaaaaagaaaaaaagaaaattaaagaaagaagaaaataatttaaaaaatgtttctatccctaaaggaattgagattgaaaatatcgatttagaaaaggcaaaatacttatgctcattaccattaagtttaggtaaaaatcctgaaaatgataaggatattactgtaaatgttggaagatttggtccttaccttaaatgtgaaaataaatctgctagactagaaaatgtggatgaattatttacaattggattaaatagagctgttactttaattgctgaagctaaaccaggaagaatttcatcatctatgataaaagattta

SEQ ID NO: 293332 - DNA, 1690 bp, Unknown
  Bacterial polypeptide expressing nucleotide sequence isolated from the Sargasso Sea
aatagacatcgagggtgatacagttggattacttacttatatgagaacagatggcacaaatatttcaaaagatgcagtaaatgacttcagaacctatataaaaaaatcatatggtgaaaattacttgccaaaagagccaaataatttttctggtaaaaaagctaaaaatgcgcaagaggctcatgaagccataaggcctactgatattactagatcaccagaaacattaaagaagtttttgagcacagatcaaattaagctttatgatttaatttggtctagggctctttcatcgcaaatggaagcagcaaaattcgatagaaaaactattacaataatttctgataataatcttaatcaatttaaatgttcgggatctacaataaagtttgacggatttttaaaacttacaagaattgacgaagacgaagatgaaaagattataccagatgtaaataaggaagaggtatcaataaataaatttatagatgaacaacattttacccaaccgcctccaagatattctgaagctagcctagtaaaaaaacttgaagaattaggtattggtaggccatcaacctacgcaagtattatttctgtaatttccaatcgtggatatgctgaagttgtaaataaacgatttttcccctcagatagaggaaaattgctttcagcttttttagaaaaattattttctaaatatgttgattatggttttactgcaggcctagaggaccagctagatgacattacagcaggcaaagaagaatggattaaagtgcttgaaaaattttggaaagatttcaacttaaatgtatcaagtgttaaagaaaaacgtacccgagaagtattagacttattaaatgagagtctcggagaattaatttttgagtcaaataatgaaggggaaattgatagaaaatgtaagctttgtgacaaaggaaagctaagtttaaagaatagttttagaggtggtgcatttattggatgttcaaactatcctgaatgtaaatttacaagacccttatcaaagtctaaagctaatgaacaattctcattagctgaacctaaattaattggtaaaaatgataataataaagatatatttttaaaaagcggaagatttggaccttatcttcaatacgaaaaaatagaggaagaatctatcaccaaaaaaaagaataagaaaaagaaaaaagaaaatgataattttaagaatgtatcaataccaaaaggattggatatagatcaaatagatttagataaagcaaaatatttatgttctcttccaaaaattatagggcaacacccagaaaatggtaaagatataactattaattctggaagatttggtccatatctaaaatgtgaaaataaatcagcacgcttagaaaatatagaagatctatttacgattggcttaaatagagcaataacattaattgcagaagctaagcctggaagaatatcatcatctttaattaaagatttaggtgaacacccggaggataaaaaacctgtgagaataatgaaaggtcagtatggtccatatattaaatacaaatcattaaatgcaacaatacctgaggaaaaagacccagcagaagtaaatatggaagaggcactaattttaattgagaaaagaaaagaatacgatagaaataaaaaaaagaaaaaaaaaaataaatga

SEQ ID NO: 293333 - DNA, 1343 bp, Unknown
  Bacterial polypeptide expressing nucleotide sequence isolated from the Sargasso Sea
gactgatggaactaacttatctaaagatgcaatctcagcatttagaaattatatccaaaaagaaattggagatgaatatttacctaaaaatgctttgaattattctggtaagaaggctaaaaacgctcaagaagctcacgaggcaatcaggcccacagatattatcagaacacctcaaagtatcaaaaaatatttgagttcagatcaaaacaaactatatgaacttatttggagcagagctttatcctctcaaatggcatctgcgaagttcgacagaaacaccataactataacttctgaaaataatggtactatttgcaaagctagcggttctgttcttaaatttgatggttttttgaaggtctataataatcaaaataaagatgatgatgaaagtattttaccatctatgtctaaaggaccaataaatatagagtcattactagatgaacaacattatacacaaccaccaccaagatattctgaagctagtttagtaaaaaaacttgaagaactgggtattggaagaccgtccacttatgcaagtataatttctactattgccaatagagggtatgcagaaatattaaataaaagattttttcctacagatagaggtaaattaatttctgcctttttagaaaaattgttttcaaaatatgtagattataactttacagcgggtttagaggatcagcttgatgaaattactactggtaaagaaagttgggttaaagttttagagcttttttggaaagattttaataacaacgtttccgatgtaaaagagaagagaacaagagaggtactagacatgcttaacgatagcctaggagatctaatttttgataaagataataaagggaatatagttagaaattgtaaattatgcgactctggaactctaagtttgaaaaatagttttagaggtggtgcttttattggatgctcaaattaccctgaatgtaagtttacaagaccgttatctaaagcaaaagctgccgctcaagcacaactagctgaaccaaaattcattggaaaacatgaaaatggaaatgatatatatcttaaaaatggaagatttggcccttatcttcaatatgaaaaattacctacaataatagagactgaaaaaactacaaaaaaaaagaaaaaaattaaaaaatctaaacctgatactaatcaactaataaaaaatgtttcaatacctaaaggcctagaattagaaagtattgatttagaaaaagcacaattcttatgttcattaccaatatctttaggaataaatccagaaaatcaaaaggaaattacgttaaacactggtagatttggtccttacttaa

SEQ ID NO: 293334 - DNA, 2077 bp, Unknown
  Bacterial polypeptide expressing nucleotide sequence isolated from the Sargasso Sea
catggatcttgttcagtcccaagaaaccagaagggctttagatagacactttgggttttctttatctcctttgttatggcgactgtttcctagcaacaatcactcagccggaagagttcaaagccctgcgctaaggatgattgttgagcgtgaaagagaaattgaagcttttgttccacaagaatactggactatttcagcgaagctagaaaaagatggtgaatacgatgcgaagctatcagtttttaaagaagagactattaaaaagttcacatttgattcaaccgcactcgttgaagaggcgagcgaggctttggtggacagttgtaaagaaggtcttgttgccaagtcaatcaccaaaaaaaccattaagcgttcgccgagagagccttttagaacctctgtgcttcagcagcaagcatccaataggtttggttttacgccaaaaaggactatgcagatagctcaatcgctctatgctcgcgagggtggtggtctaatcacatatattagaacggattcaattgaaattgatgagggaaagcttccttctgtaagagaccaggttgcttttatgtttggggatgattttgttcaaccaaggaactataaaaataaaaaagaggccaagaatgttcaggaagcgcacggtgcgataacccctgttgatataagtcttattccaactgaggccaaaaaagttcttaaagatgatgagttcaaactctaccaactaatctggcaaagaacagttgcgtcccaaatgaaggacgcactctttgaaagaacttctattgaatttgtgcctactggagatgaaggcctggcgacgttttctttttctgatcaagaacttatttttagtgggtatttggaggcaacccaagaagaggttacaaacaacaagccacccttaattaatgaaaatgattcaatagagttcaaggggctcataaaaactcaacatttcacagacccgcctcctcgttacaatgatgcgagcatgattaaggcgctcgaggagaaaggtattggaaggccctcaacatatgcagacatactctctaagctcacagatagaaagtatgtttggttgaagcaaaaaagatatgagccctctgatatgggcaggcttgtgagcaatttcctgaacgaacgctttggtggatatatcagtgatgagtttacctcaaatatggaaaacaacttagatgaaatctctagtggaaaaaagagcaaggaagatgttctgaatgacttctggtctccgttgatagatacggtggatgaggtcagcgatgtggttacgagaaaagatgtaaacccacaaaggcctttgggcaatcacccagaaacaggccgccctgtattcgctagaatgacaaaaaatggccccgcagttcaagtgggcgacatggataaagacgaaaagcttgagtgggctgctataaaagagggtcagtcgctgttttcgattgatcttgagattgcttgtgagcttctcaataaaccgagtgaaaacatacttggttaccacccccaaacaaacgaaccagtgattgtcagagaagcaaggtacggtccgactgttcaacttgggtcgaaggaaggtggcaataaaccaaggtatgttggcttactgaaaacagattctattgaagaaatcacatttgaaagggctttagattatttaagcttaccaaaagagttggggcttgatcctgaatcaggggaaaaggttcttgtgactatcggtccttatggcccttatttcaaacgtggttcaaaaaactttaggggacgaaaagggcttgacccgttttcagttgagcttgaggaagctcttttaagcatatcaagctcgaaaggctctggcgctcttaaaacctttgatgacagctccgttaaaattgttgatggaagatggggtgcctatgtcacagacggtaaaaagaatgcctcggtacccaaagacaaagacccagagagcctagaacttcaagactgtctggaactactagaaaaggctcctgccaaaaaaagaggtaagagaaaatcaaagaaagcagccaagtag

SEQ ID NO: 293335 - DNA, 1288 bp, Unknown
  Bacterial polypeptide expressing nucleotide sequence isolated from the Sargasso Sea
agcaaataacttccaaggtgcagatttagaaataacagaaaatgaaaaaaagaaaagaaaagtttctgtaaggcctccattcataacatcaacgatgcagcaatcagcaagttcatttcttggttatagtcttaaaaagactaacaagctagcacaagatctttatacaggaggctatataacatatatcagaactgattcgcctaatataagtgttcttgcacaaaataattgcaaacaatatttactagatacttatggtgaagcctatagcactccaagaaactttgcttctaagtcttcaaactctcaggaagctcatgaagctattagaccaacagatgtaactttcaagacagatgaactttcattatctgaagatcataaaaaactttataaattgatatgggatagatttgttgcatctcaaatgccacaaccagaattaactgtaaatagtattaaagctaagattgataataatatttttgaaacttcattaagtagcattagttttgatggtttttataaggtaatgccgccaagtaaatcaagcggttatgttgattatgaattatctggactagatgtaggtattaataaaacaatagagttagtagataagtcacaacattttactaaacctccttcaagatattcagaggcaagcttagtcaaagaattagagaagaaggggataggcagaccttcaacataccaagagactattacaactatccaggataggggttatgtgaggagtgaaaataaaagactttatgctacaaaaatagcgaatcttgttactgatagattacaaaactcttttaaaaatatcatggattacggttttactgctgaaatggagaaaaacctcgacaaagttgctgaaggaaaagaagattggaaaaaattgcttgaagattttaataaagtatttgaagacgctaagagcaaggcagatgaatctatggaaagaaatcctccaatagatacagatgttgaatgtccatgcggaacaggtaagcgcatgcatttaagaacaaatcataatggtcaatttttaggatgtgaaggatacttactcgaaggagatgaacagtgcaaaaagactagctctttaatatctgtagatcttttttcagacgacgacgataaagaagcagaaagtatatttaataaaactaagtgcgatttatgtggttcaactatggatggcttcatcatagatgaaaataaaaagctacatatttgttcaaactccccaatatgtcctggtactaaattt

SEQ ID NO: 293336 - DNA, 736 bp, Unknown
  Bacterial polypeptide expressing nucleotide sequence isolated from the Sargasso Sea
atgaatattgttgttgtagaatcaccagctaaagctaaaacgattaatcaatacttaggtaatgattataaagtattagcgtcttatggacatataagagaccttccaaataaaaaaggatctgtcataccagaagatgatttctttatgaaatatgaagtacaagatgacaaaaagaaacaaatccaagcaattagcaaatcaatatctaaaggagatactctatggttagcaactgattcagatagagaaggcgaagctattgcgtggcatatacattcatttttgtctgaaaaaaataagttaaaagatgttgatataaagagggtaatttttaatgagataactaaaaatgcaatattagaagcttttaataatccaaatactatagacataaatatggtagatgcttatcaagctagaagagctttagattatttaatgggtttttctctctctcctgttttatggaaaaccctacctagggccaaatctgctggaagagttcaatcagttgcactcaaattaatttgtgatagagaaacggagagagaaaagttttctccaaaagaatattggacaataaattctgcgtttaaaaaaggcgaaagtgaaacatttactgctcatctaaatatcttagacaataataagctaaaaaaatttgatattgataataagaatagcgctgatgaagctattaaaaaaattactaatgtaaataatttttatattg

SEQ ID NO: 293337 - DNA, 1114 bp, Unknown
  Bacterial polypeptide expressing nucleotide sequence isolated from the Sargasso Sea
ctggaagaacataacacaaagccacctgcacgctttacagaggcgtccttagtaaaagagcttgaaatgaaaggaataggtaggccatctacatatgccatgataattgagactatcgtaaaaagaacgtatgtccataagaaacagtctaagcttactccaactttcttaggtcttgctgttactcagcttttagaaaatcatttttcgtcgctcgtagatagtaaatttactgctgaaatggaaaatggattagatgctatttctcggggagaattagattctcttccgtttatgaaagagttctactttggttcggataatcaaaatggcttagtcaagatgctggatgaaaaagttgatattggaaaagcatgttctgttcaattagatgaaaaagatgagcccattgaggtgcgtgtaggtcaatatggtccatttttaaggcaaggtgaaaatagaaagtcggttcccgctgaggtctatttgggtgatctaaatattgaaaaggctttggaaatccttaatcaagaaattaatgaagataaagaaattggtaccgatcccgaaacgaatgaaacgattcttcttaaaaccggcccctatggtccttacgttcaagtcggtgattctagcaagagaaaggcaatccctaaaggaacagaaattgctgaagtgaatttggaaatggcattgaaactacttgcgcttccaagagttcttggaatacacccagaaacaaaccaagaagtaaaggcggactacggacgttttggcccctatgttacagctggaaaaggaaagaatggaagaattcccccagaatactcccctctcaccattgaattggatgctgctctggaattaatagccaaacgatcaagtggcccacaagaattaaaaacccttggcgatcatccaaaaacaggtgaagcacttattttaaaggatgggaggtatggtccttatattacagatggaaaattaaatgcctctatgccaagtgatttggaagttgaaacaatcacacttgaagatgctgtaaaattaattgataaaaaaagagctgcacctcctcgaaaaaagaaagcaaagcgtaaaaagaaaaaatgaa

SEQ ID NO: 293338 - DNA, 553 bp, Unknown
  Bacterial polypeptide expressing nucleotide sequence isolated from the Sargasso Sea
ttgatagtttttcaaaaaaaatatttaaaagaaataactgatgctgcaaaaaaatcagaaaaaattattctcgcaacagatcctgatcgtgaaggtgaagcaatagcttggcatgtaagagagtacttaggggaaaaaaaacttttaaaagataaaaaaattgaaagagtagtttttaatgaaataactaaaaaggctgtaactaatggaatcgataatccacgaagtatagaaaccaacttagttgatgcttatatggctagaagagctttggattatttggttggatttaacatctcccctattctatggacaaaattaccaggttcaaaatctgcaggtagagttcaatctgttgcattaagattacttactgaaagggagcatgaaatagaacaatttaaacctgaagaattttggtctttaaatgtaaatttcaaaaacacaaaaggtgatattttaaattcaaatattgtattattaaataattcaaaaatagaaaaattttcttttaaaaataaagaagatataaatggcgctatagaattaataa

SEQ ID NO: 293339 - DNA, 1154 bp, Unknown
  Bacterial polypeptide expressing nucleotide sequence isolated from the Sargasso Sea
ttttagaaattatatcaaaaaagaaattgggaaagaatatttgcctgaaaatattttaaattattctggaaagaaagcaaagaatgcccaagaagctcatgaagctataagaccaacagatatttctagaacaccagaaagtgtaaaaaaatatttaagtacagatcagaataaactatataatttaatttggagtagagcactctcttcacaaatggagtcagctaaatttgatagaaatactattactattaaatctgaaaatgatgatacaatttgtaaggctagtggttctgttttgaaatttgatggatttttaaaaatttataatacaactaataaagatgatgatgaaaacatattaccaaaaatgtctgaaggcccagtcaatattgaggcgttgttagatgagcagcacttcacacaacctccacctagatattctgaagcgagtttagttaaaaaattagaagaattaggtattggaagaccttctacttacgcaagtattatctctacaatagcaaatagaggatatgcagaaatactaaataagagattttttccaacagatcgtggaaaattaatttctgcctttttagaaaaattgttttcaaaatatgtagattataattttactgctggtttagaagatcaattagatgaaattacaactggtaaagaaagctggataaaagttttagagctattttggaaagattttaataataatgtttctgaagtaaaagaaaaaagaacaagagaggtattagatttattaaatgatagtttaggtgatttagtattcgataaagaccaagatggaaatattgtaagaaaatgtcaattatgcagttcaggaattttaagtcttaaaaatagtttcaggggtggtgcttttataggctgttcaaattatccagattgtaaattcacaagacccttatctaaagcaaaggctgcagcacaagcacaacttgcggaacctaaattaattggaaaaaatgacaatggaaaagatattttattgaaaaatggtagatttggcccctatcttcaatatgaaagcttatcgcatgaagaaaatatagagcttaataaaaagaaaaaaactaaaaagaaaactgataataatttaaaaaatgtgtctatac

SEQ ID NO: 293340 - DNA, 1675 bp, Unknown
  Bacterial polypeptide expressing nucleotide sequence isolated from the Sargasso Sea
atgcgtactgcacagagactttatgaaggaactgaaatcaatggagacacaacaggtttgatcacttatatgaggacagacagcgtcgtaatgtctagtgaagccattactcaagttcgtagttttgtaagtgaaaactatggagctaaatatttgccagatagccctagagtatataaatcaaaagctaaaaatgctcaagaagcgcatgaatgtataaggccaactaatatcaatttaactccgaaagatattaagcaatacataactggggaagagtttaaattgtatgaaataatttggcaaagagcagtttcatcacaaatgtctagtgcaatactagatcaagtagctgttaatataatgaatgaagatcagcaaatcagtttgcgagcaaatggctcaactataaaatttccaggtatgtatatagtttatcaagaggcaaaagatgatgataaagatgaagaaaaagaaacaatacttcctgcaataaatgaaggtgaagaattggatctaaatgaagtaattaaaaatcaacattttacaatgccccctcctcgctacactgaagcaagtttagtaaaaaaattagaagaattaggaattggtaggccatcaacatatgcttcaattattaaagttttacaagatagagactacgttgtattggataaaaagcgatttaatcctcatgatagagggcgtatcgtatctatatttctagaaaaatattttaatcaatatgtagaatatgacttcaccgcagatcttgaaaatcaattggatgagatttcagatggaaaattagattggaaagaagttttaagtaaattctgggagacttttaaaaaactatgtgatgatactgttggtaaatcaaatagagaagtaattgatgtactagatgatgcattaggttctcatttctttccaccagaagggaaggatgagagtagaaaatgccctacttgtgagaatggtagactaggtattaaagtagggaagtttggaggatttgttggttgttctaattaccctgattgtaaatatactgttcaatttaatcaattaaatgacaaagatggtgcatctttaagtggccctaaagaaattggtgtttatcctgaaactaatgaaatgattactcttagaaagggtccgtatggtttttatatgcaggttggtgaaggaactccagaaaaaaaacctaaaagagtctcaatcccaaaaaattttgaaccagatgaaataggtttaaatacagctatacaattattagggttaccaagaaaactaggatttcatccagataataataaaacagtaagtgccggtataggtatgtatgggccttacattcttcatgataaaaaatataaagccttagagaaaacagataatattttagatatagaattagaaagagcacttgaactaatagccaaacctacgcaaagaggtaatgctacacttaaaagtttcggagaacatccaacagaaaaaaagaatataacagcccatgatggtaagtacggaccttatgtaaaatgtgggaaaattaatgcctcccttcttggtgatcaaacaattgatagtctaagcatagaagatgccgtaaaattaattgatgatagaaaacttaaaatgggtttaaaaaaaaagaaaaaataga

SEQ ID NO: 293341 - DNA, 786 bp, Unknown
  Bacterial polypeptide expressing nucleotide sequence isolated from the Sargasso Sea
aatgaatttattaattgtagaaagtcctgcaaaagctaaaaccattaataaataccttggttcagactatatagttttagctagctatggtcatgttagagatcttccttcaaaaaatggatctgtcgatactgagaataatttcaatatgacatgggaaatagatacaagctcaaaaaaatatataaaagaaattactgatgctgcaaaaaaagcgaataaaattattttagcaaccgatcctgaccgagagggagaggcaattgcttggcatgtgaaacatatattagaacaaaaagatttaactaaagacaaaaaagttgagcgagttgtttttaatgaaataacaaaaaaagctgttacaaatggtatcaataatcctagagatataaatattgagcttgtaaacgcttacctggcaagaagagctttagattatttagttgggtttaatatttcacccattttgtggactaagttacctggttctaaatctgcgggaagggtccagtcagttgcactaaaaattatttctgagagagagcatgaagttgaattatttaaacctgaagaatattggacgattaaatgtatatttcaaaatcatgaaaatgaaaaaataaatgcaaaattaaatctattaaataatcaaaaaattgaaaaattttcttttaagaataaaagcgagagtgataaagcaaaatctaatttagaaaatttaaatttttctataaaaagcattgaaagtaaaccgtataaaagaaatccttatgcaccctttcgaac

SEQ ID NO: 293342 - DNA, 1012 bp, Unknown
  Bacterial polypeptide expressing nucleotide sequence isolated from the Sargasso Sea
aaagaagctagaagaaatccctaccctgcttttactacatctacaatgcaaattgaatctagtcgtaaacttggtcttagtgcgagtcaaacaatgcgcacagctcaacgcctttatgaaggaacagatattaaaggagaaacaactggcttaataacttatatgcgaacagacagtgtcgtcatgtcaaaagaagctattaaccaagttcgaggttttgttactgataattatggtgcaaactatttaccagaagcgccaagagtttataaatcaaaggctaaaaatgcccaagaagcacatgaatgtattagaccaacaaatatttacctaacaccaaaagatattaagcaatacattactttagaagaatacaagttatatgaaattatttggcaaagagcggtaagttcacaaatggcgagtgctgtattagatcaagtagctgttgatattacaaacgaagataaaaaaattgttttacgagcaaatggatcaacaattaagtttcctggaatgtacaaagtttatcaagaagctaaagatgatgataaagatgaagaaaaagaaacaattcttcctgccatgagtgaaggagagagtttaaatttaaaagaggttgaaaagacacaacattttacctcccctcctcctcgttacaccgaagcaagcttagttaaaaaacttgaagaacttggtattggcagaccgtctacttatgcttctattattaaagttctacaagatagagattatgtaattttagataaaaaacgttttaatcctcatgatagagggagaatagtatcgatatttttagagaaatatttcaatcaatatgtcgaatatgattttaccgccgatcttgaaaatcaacttgatgaaatttctgatggtaagcttgattggaaagaggttctaagaaaattttgggaaacatttaaacaactttgtgatgaaactgtaggcaaatcaaatagagaagtcattgatgtgttagatgaagcattgg

SEQ ID NO: 293343 - DNA, 864 bp, Unknown
  Bacterial polypeptide expressing nucleotide sequence isolated from the Sargasso Sea
agggaggcatgcgtgccaaccagatggtgctgaccgacatcgattgcccggattgcggccgcaagatgggtatccgtaccgccaccaccggggtgttcctcggctgttccggctatgcactgccgcccaaagagcgctgcaagaagaccatcaacctagtctccgccgacgagttcgtctccgccaccgacggtgaagaggctgaaaccgaggcgctgcgtgccaagcaccgctgtggcgtgtgtggcaccgcgatggatgcctacatcatcgacgacagccgcaagctgcacgtctgtggtcgcaacccggattgcgatggctacgaaatcgaaaaaggccagttcaagctcaagggttacgaagggccgagcatcgagtgcgaccgctgcggatccgagatgcagctcaagaacggccgcttcggcaagtacatgggttgcaccaacgacacctgcaagaacacccgcaagatcctgaaaaacggtgatatcgcgccgccgaaggaagatccggtcccgctgccggagctcaagtgcacccagtccgacgcccacttcgtgctgcgtgacggggcggccggcctgttcctggccgccagcaacttcccgaaatcccgcgagacccgtgcgccgctggtggaagagctcaagcgcttcaaggagcgtctgtcgcccaagcaccagtatctggccgatgccccggcgtcagatcctgacggaaaccccgccatcgtgcgcttcagtcgcaagaccaaggagcagtacgtgatgaccgaggtgaacggcaaggcgaccggctggacggcgcactacgacaacggtaagtggcaggagagcctggccaagtcgaagaaggcgtgat

SEQ ID NO: 293344 - DNA, 766 bp, Unknown
  Bacterial polypeptide expressing nucleotide sequence isolated from the Sargasso Sea
atggcaaaaaaaatcatcattgtagaatcacctgctaaagcacgtaccatcaccaaattccttgacaaggattactcagtaatggcctcaatgggtcatgtcagggatttgccttcgtcaaagttaggttttgatcctgaaaacaattttatacctcagtatgaaatctctaaagataaaagaaaagttgtagcagatcttaaaaaacaaatagacaaggacactgaagtatttctggcaactgatgaagacagagaaggtgaggctatttcatggcatctacttgaggcactggagcttaaaagtagttcagttaaacgtattgtttttcacgaaattactgaatccgcaataatcaatgcccttggaaatccaagggatgtcgaccagcaactggttaacgcacaacaggcaagaagaatactggatcgcgcggtaggttataaattgtcgccattgctttggaaaaaaattaaacctgggctttctgcaggcagagttcaaagtgtttcagtttatatcctggtggagagggaaagagagatcaggaaatttgttccagaagaatactggaagattaaagcctggtttacagatttctctgcagatttgaaaaaaataggaggaaagcctgccaaagtcagaaatgaaacagaggcccttgcaatagaatcgagtgtcaagcagggtaactttgttgtcagtgaaattaaagagcgtatggcaaatcggaatccaggcgcccctttcactacttcaacgattc

SEQ ID NO: 293345 - DNA, 1948 bp, Unknown
  Bacterial polypeptide expressing nucleotide sequence isolated from the Sargasso Sea
atgcgactcttcatcgccgagaagcccagtctgggacgtgccattgccgacgtgctgcccaagccccacaagaagggggacggttttatcgaaaccgcgcagggggatgtggtgacctggtgcatcggccatctgctggagcaggccgagccggatgcctatgacgccgcctacaagcagtggcgcatggagtcgctgcccatcgtcccggcccagtggcagctggtggccaaaccgaagaccaagacccagctcaccgtcatcaagcggctgatcaaacaggccgactgcgtggtcaacgccggtgacccggaccgggaggggcagctgctggtggacgaggtgatcgatttcctcggctacggcaaaaccaggccggtgctgcgctgtctcatcagcgatctcaacccgccggcggtgcgccgtgccctcgacaagctcagggacaacaaggagttcgtgccgctggcggtgtcggcgctggcccgcagccgggccgactggctctacggcatcaacatgacccgggcctataccctgcttggccgcaaggggggttgcagcgagctgctgtcggtcggccgggtgcagacgccgctgctggggctggtggtacggcgggatctcgagatagaagccttcgtgcccaagcccttcttcgaggtgctggcccatctacagaccgaaggcaacgagcgtttcagcgccaagtggctgccttccgaggcctgtctgccctggcaggacgaggagggacgagtgctcaaccgggcgctggccgccaaggtggtggagcggatccagggtgaacccgcactggtagaagaggtggaggagcaggcccgcaagcaggcggcgccgctgccctataacctctccagtctgcagatcgatgccgccaagcggttcgggatggacgccaaacgggtgctggacgtctgccaggggctctacgagcgccacaagctgattacctacccgcgatccgacagccgtcatctgccgagcgatcacttcaaccgggccggccaggtgcgggaggccatcgccagcacggcgccggcgctggccaaggcggtgagcgaggcggacggcaagatccgcagcaaggcgtggaacgacagcaaggtggatgcccaccacgccatcatccccaccgagaagcagggcaacccggccacgctgggggctgacgaggcgaagctttacggcctgattgcccgtcagtacctgctgcagttctacccgccgttcgagtacaacgacagcaaagtgctgctgcgcatcgccggcggcctgttccaggccaaggcgcggcggatcctcaaggcgggctggaaggcgctgctcggggtggaagaagatgatgaggaggaggcggggaccctgccggccctgcgcaagggcgagcagctgctgtgcgagcggggggagctgcaggagaagatgacccagccgcccaagtcgttcaccgatgccaccctgctggccgccatgaccggcatcgcacgctacgtgcaggatcccgagatccgcaagaccctgcgtgagaccgacggcctcggcaccgaggcgacccgggcgggcatcatcgatctgctgttcaagcgccgttttctggtgcgccagggcaagagcatcaaggcgaccccgaccgggcgggctctcattcaggcgctgcctgccacggcgaccacccctgacatgacggcgttgtgggagcagcatctcggccggattgccgagcggcagacgagctatcagcaattcatggggccgctgaccgagcagttgaacggcctgatcgacggtgccagacaggattcgggagccagcttcagcgccctgcccaaggcggcgcccggagccgacaagcgtcgctttaccaagcgcaaacgcagcacggcagctggtggcacgagcgggactgccaagcgggggagcaagc

SEQ ID NO: 293346 - DNA, 1273 bp, Unknown
  Bacterial polypeptide expressing nucleotide sequence isolated from the Sargasso Sea
ctttacagcttgatttggaagcgtgcacttgcttcccaaatgactgcagcggaaatagcccgtacggccataaacatcgaagctgggcaggaaaaagaatatttgtttgaagcacagggacagcgtgttatttttcctggatttctaaaagtttatgcggaatcaaacgatgtgcaattagatactctcagcgaaaaagatgtgatcctgcctaacgtggaacagggaaagatgctcgcacttaaagatccagaaaaacctgtagatatggaaaagctgtttacaaaaccaccgcctcgttatacagaagcatccttagtaaaaaaattggaatcagagggcattggacgtccatccacttatgcaccaacaatatcaaccatacaggatcgtggttatgttgaattaactgatgaaaagaaattgaaaccgacttcaattggggaagttgttacagatttcctagcagatcattttacaaaaatagtaaatctggggtttactgctgagattgagcgtaactttgatcgtattgccaagggagatgaggactgggtagaaatgatgacagatttttatgagccttttcacgaaaacgtagttgagaaagataaatctgtttcacgcgccgaagttttaaaacgtagagaactaggtactgaccctaaaagcggcaaaccagtatgtgtaagcgtaggaaggtatgggcctatggttcaaatcggtactcgcgaagatgaagaaaaaccaaggtttgcttcacttccgagcagtcttaatttgaatgatgtaactttggaagaggcgctggaatgttttgcactacctcgtgtactggggaaatatgaaaacggagaggagatttcggccaataacggacgttatggcccttatgtgaaattaggcaaagattttttttcaattccaaaaggtgaaaaggcggagaatattgaattggttcgagcagtagaaatcattcgagaaggacttgaaataaaaagtaaaagtgtcattcatgattttggagtaataaaagtattaaatggccgttatggtccatacattaagtctggaaagaataattataaaattcctaaggatgttgaacctgaagtgcttgatgaagattcctgtaaaaaaattatagaagaatctcccccaaaagggagtaggagaggaagaaacaaagtctcaaaaaatataactgataaaaaaattataaaagaatatcctccaaaaggtattaaatctagtaatttcccaaagaagtttg

SEQ ID NO: 293347 - DNA, 380 bp, Unknown
  Bacterial polypeptide expressing nucleotide sequence isolated from the Sargasso Sea
catgtcgaaaccattagtaattgtagagtcacctactaaggtaaaaacaatttcaaaaattctaggtgatggttatatagttaaatctagtgtcggacatattagagatctaccaagaaatacaaaatctataccttcagcatttaaaaaagaagacatattatggggtgctgtcaagcctgagaattatgaaaatatatatgttattccggaagatagaaaaaaaattgtaaatgaacttaagggacttgccgataaagcaccagaggtatatcttgcaactgatgacgatcgagaaggtgaagcaattgcttatcatttaaaagaagcattggagctaaaaaaagaacccaaaagaataaaattcaatgaaattacaa

SEQ ID NO: 293348 - DNA, 913 bp, Unknown
  Bacterial polypeptide expressing nucleotide sequence isolated from the Sargasso Sea
cttggatcacacacttgttattgttgaaagtcccacaaaggcaaaaactattagaaagtttttgccttctaattatgaagttttagcttccatgggacatgtaagagatcttccaaaaggagcagctgaaattcctgcatcagttaaaaaagaaaaatggtcaaggataggtgtaaacactacagaagattttgaaccactttatattgtcccaaaggaaaagaagaaggttgttaaagatttaaaaaatgctttaaaagatgctactcagttgttactagcaactgatgaagatagggaaggagaaagtataagttggcacttaatgcaaattcttaaaccaaaaatcccaactaggcgaatggtttttcatgaaatcactaaaaaggcaattaataaggcacttgatgagacaagagaaattgatatggaattagtccaggctcaagaaacgagaagaattcttgataggctttttggatatgaactttctccattactatggaaaaaagtagctcccagactatctgctggtcgtgttcagtctgtttcagtaagattgcttgttaagaaggaaagagaaaggagagcgtttaaaaaagcctcttactggggattaaaagcctctttgcttaaagataatatttcttttgaatctaagttatttagtctagatgaccaaaaaatctccaatggttctgattttgatgaaaagacaggtaacttaaaaaaaggtaataaatctttaattttgaccgaagacagggcaaagagtcttctcaaaaatttatccaaggaaaagtggaaagtcttaaaagtagaaaaaaaacctacaattaggaagcctgttccaccctttactactagtactttgcagcaggaagctaatcgaaaacttcgactatctgcaaga

SEQ ID NO: 293349 - DNA, 523 bp, Unknown
  Bacterial polypeptide expressing nucleotide sequence isolated from the Sargasso Sea
atgacaagcaaatctctagtaatagttgagtcaccatcaaaagcgaaaactattagcaaatatttaggaaaagacttcgtagtgaagtcaagtgttggacatgttagaaggttgcccaagggtagtaaggctatcaatcttgatgattggtcaatttcttatgagatagatccaaaaaaagagaaagtcgtcaaagatctaaaaagttcagctaaaggagttgaaaatatattcttagcaactgacttagatagagaaggcgaagcaatcgcctggcatttaaaagaaattcttgggaaaaaatttaattacagcagagtgagatttaatgaaattactaaaggtgcaattcaagaagcgtttgaaagtccaggtgatcttgatgagggtctgattgacgcccaaaaaacacgtaggatattagatcgtatagttggatatgatttatcgagtttactttggcagaaaattggtagttacggaaaattatcagctggaagagttcaatctgtagcagtgagat

SEQ ID NO: 293350 - DNA, 253 bp, Unknown
  Bacterial polypeptide expressing nucleotide sequence isolated from the Sargasso Sea
tatgaatctagtcatagttgaaagtcctgcaaaagccaaaacaattaataaatacttaggagataattataccgttttagctagttacggtcatattagagatttaccatcaaaaaatggttcggttgatccagatcaaaattttaaaatggaatgggaagttgataacttttcaaaaaaatatcttaaagatattactgatgctgcaaaagaatcatctaaaattattttagcaacagaccctggatcgtga

SEQ ID NO: 293351 - DNA, 313 bp, Unknown
  Bacterial polypeptide expressing nucleotide sequence isolated from the Sargasso Sea
atgaacctagttatagtagaaagtccagctaaagcaaaaactataaacaagtatttaggagaaaattttaaagttctcgctagttatggtcatataagagacttgccatctaaaaatggttcagttgatcctaacaatcaatttaaaatgatttgggaagttgatagcttttcaaaaaaatatcttaaagaaatcacagatgtagcaaaagactctgataaaattattttagcaacagatcctgaccgtgaaggtgaggctattgcatggcatgttaaacaatttttagaagaaaaaaaattcttaaaggaaa

SEQ ID NO: 293352 - DNA, 505 bp, Unknown
  Bacterial polypeptide expressing nucleotide sequence isolated from the Sargasso Sea
tatgtcaaaatctttagtaatagttgagtcaccagcaaaggctaaaaccatatcaaaatatcttggttcagaatatattgttcaatcaagtgttggtcatataagagatttaccaaaaaaaggtactggcataactaagagatcttcaatacctaaaaatattagtcctgaggaaaaagcaaggctaaaagcagtaaacgatagaaatagattaatcagaagaatgggtattgatccagataatggatggaaagccgattggcagataattccagaaaaagagaaagttctaaagagtttaaaaaaggctgcaaaaaatgttgataatatctatttggctaccgacttagatagagaaggagaggcaatcgcatggcatttaaaagaagctcttggttcaaacaaatataattattccagggtaagatttaatcaaataactaaggatgccatcctagaatctttctcagatccaaaagaaatagatttaaacctcgttaaagct

SEQ ID NO: 293353 - DNA, 262 bp, Unknown
  Bacterial polypeptide expressing nucleotide sequence isolated from the Sargasso Sea
atgaacttggtaattgtagaaagtccagctaaagccaaaactatcaataaatatttaggtgacaattataaagttttagctagttatggtcatataagagatcttccatctaaaaatggatcagtagatccaaatcaagattttaagatggaatgggagatcgatagtttctctaaaaaatatctaaaagaaattaccgatgcagctaaagactcctcaaaaataatattagctaccgatccagatcgcgagggtgaagcaa

SEQ ID NO: 293354 - DNA, 979 bp, Unknown
  Bacterial polypeptide expressing nucleotide sequence isolated from the Sargasso Sea
tatgagtaaattagtgatagtagagtcgcctgcaaaggcaaaaacaatccagaaatatctgggtgatggctatacagttttaccaactattggtcacattagggagcttcctaaaaaagatgcgattgatccaaacaatggatattccatgaaatatatagttagcccaggaaaggaagacgctgtaaaaaagattaagagtgatgcaaaaagtgctgaacaagtaatactcgcaacagacccagacagagagggagaagctattgcttggcatgttgctgacattattacaaaagcaaaatttgagcagccggatattaagcgagctgttttttatgagataagcgaaaaagcagttaaggccgccgtgggcaatcctggcgagatagccatggatcttgttcagtcccaagaaaccagaagggccttagatagacactttgggttttctttatctcctttattgtggcgattatttcccagcaataaccactcagctggaagagttcaaagccctgcactgaggatgattgttgagcgtgaaagagaaattgaggcttttgttccgcaagaatactggaccatttcagcgaaactagaaaaagatggcgaatacgatgcgaagctatcagtttttaaagaagagactattaaaaagttcacatttgattcaaccacactcgttgaagaggcgagcaaggctttggaggacagttgtaaaaaaggccttattgccaagtcgatcaccaaaaaacacattaagcgttcgccgagagagccttttagaacctctgtgcttcagcagcaagcatccaataggtttggctttacaccaaaaaggactatgcaaattgctcaatcgctctatgctcgtgagggcggtggtctaatcacatacattagaacggattcaattgaaattgatgagggaaagcttccttctgtaagagacacaggttgcttttatgtttggggatga

SEQ ID NO: 293355 - DNA, 230 bp, Unknown
  Bacterial polypeptide expressing nucleotide sequence isolated from the Sargasso Sea
catgtcaaaacctttagtaattgtagagtctcctacgaaagtaaaaactatatcaaaaatacttgggtctgaatatatagttaaatcaagtgttggtcatattagggatctacctagaaatacaaaatctattcctcctcaatatacaaaagaagaaatactttggggagctgtaaagcctgatgaattcgaaaatatttatgttatacctgaagatagaaaaaaaaaat

SEQ ID NO: 293356 - DNA, 2599 bp, Unknown
  Bacterial polypeptide expressing nucleotide sequence isolated from the Sargasso Sea
catgtccaaagcactgatcattgcggaaaagccttctgtcgcgaacgacatcgcacgcgctttgggcggctttaccaagcatgacgagtattacgaaagcgacgatttcgtcctttcgtccgctgtcggccacctgctggaaatcgccgccccggaagagtacgaggtcaagcgcgggaaatggagcttcgcgcatctgcccgtcatccccccgcatttcgacctgaacccgatcgcaaaaagcgagtcgcgcctcaaggtgctcaccaagctgctgaagcgcaaggacgtcgaccgtctgatcaacgcatgtgacgcggggcgcgagggcgaactgattttccgcctgatcgcgcagcacgcgaaggcgaaacagccggtccagcgcctgtggctgcagtcgatgaccccgcaggcgatccgcgacggcttcgcgaacctgcgcagcgacgcggacatgctgccgctcgccgacgccgcacgctgccgctcggaagccgactggctcgtcgggatcaacggcacccgcgcgatgaccgcgttcaacagcaagggcggcggcttcttcctgacgacagttggccgcgttcagacgccaacgttgtcgatcgtcgtcgaacgcgaagagaaaatccgccgctttgtcccgcgcgactactgggaagtgaaggccgaattcgcgtgcgcgggcggcttctacgaaggcaagtggtacgacccgaaattcaagcgcgacgaattcgatccggaaaagcgcgactcccgcctgtggagcctgccggccgccgaaacgatcgtcgccgcgtgtcgcgaccaggtcggcacggtctccgaggaatcgaagccgtcgacgcagctgtcgccgctgctgttcgacctgacgagcctgcagcgcgaagcgaacagccgcttcggcttctccgcgaagaacacgctcggcctcgcgcaggcactgtatgaaaagcacaaggtgctgacctacccgcgtaccgatgcacgcgcgctgccggaagactacctgtcgacggtccagtccacgctcgagatgctcaaggagagcaacaactacctgccgcatgcgaagcaggtgctcgacaagggctgggtgaagccgaacaagcggatcttcgacaactcgaagatcagcgaccactttgcaatcatcccgacgctgcaggcgccgaagtcgctgtccgagccggagcagaagctgtacgacatggtcgtgaagcgcttcctcgccgtgttcttcccggccgccgaattccgcgtcacgacgcggatcaccgaagtcgccggccatcacttcaagaccgaaggcaaggtgctcgtcgagccgggctggctgcaggtgtacggccgcgacgccgaaggcgcggatgcgaacttggtgccggtgcagaaggacgagaaggtgaagacggacgaaatcgccgccgtcgcgctcgtcacgaaaccgcccgcacgctactcggaagcgacgctgctgtccgcgatggaaggcgcgggcaagctcgtcgaggacgacgaactgcgcgaggcgatggccgcgaagggcctcggcacgccggccacgcgcgcggcgatcatcgaaggcctgctcggcgagaaatacctcgtgcgcgaaggccgcgaactgatcccgaccgcgaaggcattccagctgatgacactgctgcgcgggctcggcgtgaaggaactcaccgcgcccgagctcaccggcgaatgggaatataagctgtcgcagatggagcgcggcaacctcgggcgcgaagcgttcatgcaggaaatcgcccgcatgacgcagcagatcgtgaagcgcgcgaaggaatacgattcggacacgatccccggcgattacgcgacgctcgagacgccgtgcccgaactgcggcggccaggtgaaggaaaactaccgccgcttcgcatgcacgaagtgcgagttctcgatctcgaagatcccgggcagccggcagttcgagatcgcggaagtcgaggagctgctgcgcgagaagacgatcggcccgctgtccggcttccgcagcaagatgggccgcccgttctcggcgatcctcaagctgtccttcgacgacgagacgaagaactacaagctcgagttcgacttcggtcaggacacgggcggcgaggagggcgaggcgcccgatttctccgcacaggagcccgtcggcgcgtgcccgaagtgcaagggccgtgtgttcgagcacgggatgagctacgtgtgcgagcactcggtggccaacccgaagacctgcgacttccgctcgggcaaggtgatcctgcagcaggaaatcacgcgcgagcagatgggcaagctgcttgccgacggccgtacggatctgctgccgaacttcaagtcgtcgcgcacgggccgcaacttcaaggccttcctcgtgaagcagccggacggcaagatcggcttcgagttcgagaagaaggagccgaaggccgctgccgcgaagaagacggcaaaatcggcgacgaaggacgccgaaaccgtgacggaaggcgccgaggagaaaccggcaccggctcgcaaaaccgccgcacgcaagacgacggcgcgcaagactggctcgtga

SEQ ID NO: 293357 - DNA, 687 bp, Unknown
  Bacterial polypeptide expressing nucleotide sequence isolated from the Sargasso Sea
aatgtctaaaaatcttgtaattgtagaatcaccagctaaagctaaaactatagaaaaatttttaggtagtgaatacaaagttgtttccagtaatggtcacattgcagatttaccatcaaatgagttggggatagatatcgagaatgattatgcccctaagtacaaaattactaatgataaaaaggatttagtaaaaaaattaaaaaatgaattaaagggtgttgatactgtatggttagctagcgatgaagacagagagggagaggctattgcatggcatttggctgagaacctaaatctaaatgaatcaaatactaaaagaattgtttttagagaaattactgaaaaagctattaaaaatgccattgaaaatcctagacaaataaacaaatctcttgtggatgcccaacaagctagaagggttattgataggttagttggttataaaatttctccgatactttggagaaaagttaagggaggattatcagcaggaagagtccaatctgtagttttaagattaattgctgaaagagagaaagaaattttaaattttaatcctgtatcctcatacaaaactactgctgaatttattaatagtaataatgtaaaatttaaagctaaatactccattaacacaaatgatgatgataattttaattcttttcttgatggctttaaaaatgc

SEQ ID NO: 293358 - DNA, 529 bp, Unknown
  Bacterial polypeptide expressing nucleotide sequence isolated from the Sargasso Sea
tatgactaaatctcttgtaatagttgaatcaccagccaaagctaggacaataacaaagtacttaggttctgaatttattgttgaatctagtgttggtcatataagagacttgccaaaaaaagctacagcgactggaacaagatcatctataccaaaagatgcaagtcccgaagagaaggccaagttaaaaaatattaatgatagaaatagattaattaaaagaatgggaatagacccagataatgaatgggaggctgaatggcaaattattccagaaaaagaaaaagtattgaaagctttaaagaaagcagctaaatcagttgaccacatttacttagcaacagacttagatagagagggcgaagctattgcatggcatttaaaagaagctttaggaccaaaacataattattcaagagtaaggtttaatcaaattacaaaaacggcaatcttagattctttttctgatcctaaagaaatcgatttggatttagtaaaagcttatagggcaagaaggtttcttgataag

SEQ ID NO: 293359 - DNA, 214 bp, Unknown
  Bacterial polypeptide expressing nucleotide sequence isolated from the Sargasso Sea
atgaacctcgtcattgtagaaagtcctgctaaagctaaaacaatcaacaaatatttaggtagcaattttacagtactagctagttatggtcatattagggatcttccatctaaaaatggttcagtagatcctgaaaataaatttaaaatgatatgggagattgatagtttttcaaaaaaatatttaaaagaaattactgatgctgctaaagatt

SEQ ID NO: 293360 - DNA, 791 bp, Unknown
  Bacterial polypeptide expressing nucleotide sequence isolated from the Sargasso Sea
aatggcagataaatcattagtaatagtcgagtcaccggcaaaagcaaaaactattagcaaatatcttggcaaggaatatattgttaaatctagtgttggtcatgtgagaaaattgcctaaaggtgaaaaggctattgatcgtaaagattggagcatatcttatgagattgaccccaaaaaaaccaaagtagttaaagaactaaagagtgccgctaagggtgtggaagatatttttctggcaactgatttagatagagaaggagaatcaattgcttggcatctaaaagaaatcttaggaaaaaaacacaactacattagagtccgtttcaatgagattacaaaaacggctatcaaagatgcctttgacaaccctagcaaattaaatgaagagctcattaatgctcaaaaagctagaagaattttggacagagtagttggctatgatctttcaggaatgctttggaaaaaaattggaagttatgggaagttatcagctggacgagttcagtctgttgctgttcgtttagtagtcgaaagagagattggtataaaagcatttactccagaagaatattgggagattgaaattgagatcaaacatgatgataggaatataagatttaaattaaatacaaagaaatcaaacctagagataaaaaatgaaagtaaagctctagaattagcaaataacttccaaggtgcagatttagaaataacagaaaatgaaaaaaagaaaagaaaagtttctgtaaggcctccatttataacatcgacgatgcagcaatcagcaa

SEQ ID NO: 293361 - DNA, 503 bp, Unknown
  Bacterial polypeptide expressing nucleotide sequence isolated from the Sargasso Sea
catgtcgaaaccattagtaattgtagagtcacctactaaggtaaaaacaatttcaaaaattctaggtgatggttatatagttaaatcaagtgttggacatattagggatctaccaagaaatacaaaatctataccttcagcatttaaaaaagaagacatattatggggtgctgtcaaacctgagaattatgaaaatatttatgttattccagaagatagaaaaaaaattgtaaatgaacttaagggacttgccgacaaagcaccagaggtatatcttgcaactgacgacgatcgagaaggtgaagcaattgcttatcatttaaaagaagcattagagctgaaaaaagaaccaaaaagaataaaattcaatgaaattacaaatacagcagttttaaatgcaattaaaaatccagaaaccattgatatcggtaaattcaaatcgtatgaggcaaggagaactcttgatagaatgattggctacgagatatccccaaaacttagag

SEQ ID NO: 293362 - DNA, 1489 bp, Unknown
  Bacterial polypeptide expressing nucleotide sequence isolated from the Sargasso Sea
aaaagttttgatgaagctagaaaagtagatgataatctggtatcggcttatttagctcgaagaagtttagattatttagcgggatacagtttatctcctgttctatggagaaaaatgccagggagtcgatctgcggggagagtccaatcagtagcagtaagacttatttatgaaaaagagattgagatagaacagtttgaaccagagaaattctataaaataaatgttcacggggaaattaatggggcaaaattagatacttcaatcactagcttagaaggtgaaaaagttgataaacttttctttagagatgaagctttagctaataaagctaaaaattatttgaaatcaaatagttttttcatcagaaaaattgatgaaagaacaatatctagaaaacctaaagcaccttttaatacctcaactttacaacaaactgctaatagtcaactaaactttagtgctagtcaaactatgactattgctcaaggtttatacatgggaatagatataaacaaagaaactatagcccttatcacatacatgagaactgatagcattacactttcaaaaaactcgatagatacaataagagaaaatatatcaaaggattatggagatgagtatttacctaataaacccattgagtataagtctaggaaaaaaaatgctcaagaagctcatgaagcaataagaccaactgatatttctataaaaccagaagatataaaaaactttttaaatgaagaacaatttaaactttatgatttaatttggaaaaggactatagcttctcaaatgacaagtgctgaaactaatcaaaatacactgcaaatagattgtgaagagaaaaatataactttaaaagctacacttggtaagttaatttttgatggatataaaaaagtttataatcttcaagaagatgatgaagagcagattatttcattattagaaaatataaaagaaaatgataaatatattgtaagtgaggttgaagctcttgagtcatttacttctcctccttcaagatacactgatgctagtcttgttaaaaaattagaagagctagaaattggaagaccttcaacatacgcatctataattcaaacaattgttaatagaggttatgttttaaaaagcgggaaatcatttatccttaatgatcgtggtagagtagttaatgtatttttatgtaactactttaaaaaatttcttgaatataagtttacggctgatttagaaaatcaacttgatgatgttgctgaagataaagcagaatggaaaaatatagttttaaatttttggaaagattttgaatttttcatcaatgaagtaatgggcaagcctaatagagaagtcatagacgtaataaatgatgaactatctcccgtaatttttagaaaaatcggtggagacattgatatcaaatgttcatcttgggctaatactgaaaattgtgaaggtaacctaggtgttaaggtaggaa

SEQ ID NO: 293363 - DNA, 172 bp, Unknown
  Bacterial polypeptide expressing nucleotide sequence isolated from the Sargasso Sea
tatgaatcttgtaattgttgaaagtcctgcaaaagctaaaactataaacaaatatctaggttcagattacactgtgttagcaagctatggtcatattagagaccttccttcaaaaaatggttctgtcgatccagaaaattcttttaaaatgatttgggaagtagatagcttt

SEQ ID NO: 293364 - DNA, 1693 bp, Unknown
  Bacterial polypeptide expressing nucleotide sequence isolated from the Sargasso Sea
tatcaagggatagatattgaaggtgatacagttggattaatcacatacatgagaacagatggtactaatatatcaaaagatgcagtagctgattttagagattttataaaaaattcatatggagataattacctacctaatgaacctaacaattattcaggtaagaaagctaagaatgcacaagaggcgcacgaagcaataagaccaacagatattactagaacacctgagtctattaaaaaattcttaagcactgaccaaaaaaaactttatgatttaatttggtctagagctctttcatcgcaaatggaggcagcgaaatttgatagaaaaactattacaataacttcagatgataacttaaaccaatttaaatgctcaggatcaacaataaaatttgatggatatttgaaacttacaagaattgatgaaaatgaagatgaaaagattcttccagatgttattaaagaagaagttttaacaaatgattttatagatgaacaacatttcacacaaccaccacctcgatattctgaggcaagtttggtgaaaaaacttgaagaattagggattggaagaccttctacatatgcaagtattatttctgttatttcgaacagaggttatgctgatgtgataaataaacgtttttttcctacagatagagggaaattattatctgcatttttagaaaaattgttttctaagtatgttgactatggttttacagcaggtctagaagatcaacttgacgatattacaactggaaaagaggaatggataaaagtgcttgatgaattttggaaagatttcaacacaaatgtatcaaatgttaaagaaaagcgtactcgtgaagtattagatttacttaatcaaagtcttggtgaattaatttttgaagcagatgaaaatggtaaggttaatagaaaatgcaaattatgtgatacaggagaattaagcctaaaaaatagttttagaggcggtgcatttatagggtgttctaattatccaaattgtaaatttaccagacctttatctaaatctaaggcaaaggaccaatacgcactagcggaacccaaattaattggtcaaaatgaaaatggtaaggatatatatttaaaaaatggaagatttggaccgtacttacaatatgaaaaaattgaagaagaaatatcaactaaaaagaaaaaaaataaaaaggaaaacgataatttaaaaaatgtatctattccaaagggaataaatattgatgaaattaatttagaaaaagcaaagtatttatgttctttaccaaaaattattggccatcatccagaaaatggaaaagatataacagtaaattcaggtagatttggaccatatttaaaatgtgaaaataaatctgcaagattagaaaatgttgaggaaatttttacaattggtttaaatagagcaataactttaatagcagaggcaaaaccaggtagaatttcatcatctctaataaaagatcttggcgaacatcctgaggataaaaaaccagtaaggataatgaagggtcaatatggaccttatattaaatacaaatcactcaatgctacaatacctgaagagaaagatcctttagaaataaatatggaagatgcattaatattaattgagaaaagaaaagaatacgataaaaataaaaaaagtaaaaaaagaagaaagtaaa

SEQ ID NO: 293365 - DNA, 768 bp, Unknown
  Bacterial polypeptide expressing nucleotide sequence isolated from the Sargasso Sea
aatgaaattggtacttgttgagtcaccagcaaaagcaaaaactattaataagtacttaggttctgactatgacgttatggcaactattggtcatataagaaatcttcccaataaaaatggtgttgacccagaagaaaatttttctatgcaatgggaactcctagaaagaagcaatagattcttgaaggagataaaacaatctttaaaatctgcaaacaaattaattttagctactgatcctgatagggagggagaagcaatttcatggcatgtactggaacttttgaatgaaaaaaaaataaaaataaatatcccaatagagcgagtagtgtttcatgaaataacaaaaatgtcagtgctagacgcaattgacaatcctcgtgaactcgaccaagagcttataaatgctagccttgcaagaaatgcattggattatttaattggatttaagttatcccctgtgctttggcaaaaattacctggtgctaagtcagcaggtagagttcaatctgttgcattacgattaatttgcgaaagagaatttgatattcaatcttttataccacaagaatattggacaattgaaagtgaattacaaaaagactcaaaggaaaaatttaaagcaaggttaatcatttggaaaggtgataaattagagaagcttagccttaataatgaaaagtctgctaaaaaagccataagaagtattgagaattcagatttagaagttgttaagagtgaagagaaaaaagaatttagaaatccaag

SEQ ID NO: 293366 - DNA, 1729 bp, Unknown
  Bacterial polypeptide expressing nucleotide sequence isolated from the Sargasso Sea
gttgtcaaaaaatctagttatagttgagtcgcccactaaggcaagaacacttcaaagattcttaggtaaagagtatttagttgaagcatcaattggtcatatcaataatctacaatcaggatataaagcagaatatacaggtccagttgtgggcttagatcaagactttcagccaatttgggaatacgaaagaggagcaaaaacaagaatagataatctgagcaaaatagcaaaaagttgtgaaaatatttatctagctgctgaccctgatagagaaggagaaggaatagctttccatgttgcaaatgcactaattgaaaaaggccaatcagacgaaaagtttaaaagagttgtttttcacgaaattactgaaaaagctgtaaaagaggcatttgataaagcaggaaaattaaatatggatttagttgatgctcatatcggacgcagattagttgacaggttagttggattctctttaagcggacttacatcatcattattaagacttaaaagactttcagttggaagagttcaatcagttgcggtaagtatcatcaaagacaaagaggatgaaattaaagcatttataccagaggaatactggaatataactaataatttttcaaaaaataaagatcattatcaaggaaaactattcgatataaatggaacttccggaaaaaatcttactataacaaacgaaacagatgcaaaaaatatagaacaagaaatttcaaaattaaattataaaattcattctataaaagcaaatactaggaaaactaagcctaggccaccttttacaactagttctcttcaacaggatgcttcatcaagattaagaatggctccatctaggacaatgtcaatcgctcaacaattatttcaaggaataaacttaggtagtggagaagaaggtttgataacatacatgagaactgactcaaatgtattatcagcagattctttaggtcaaattggaaatttcattcaaacttcatatggtaatgaatatcatagtgaaaaaaaatataaaaccagatctgcaaatgctcaggaagcacatgaggctataagacctacttcaataaatcgaactcctgaatctatagaaaaattcttaagtgaagatcagcttaagttatatgacttaatttggaaaagaactgttgctagccaaatgaaagaaagtgaaaataaaaagacaaccgtaataacatcttcagaagatgaaaagtataaatttctatctgaatatgatgaattagttttcgatggatttaaaaaattattccctcaaaaagaaactgataaattacctaatattgcagaaaatgacaaaatcaatctagaatcggttatcaaagaacaaaaatttacccaacacactccaaggtattctgaggcatcattgattaagactatggaggaactaggagtagggagaccaagtacatacgctagcatattaaatacaattaaggaaaaaaaatatatatgggttataaatagatcaatatatataagcccagttggaaatgcattagtcgaagaattgaaaaaacatttctctgaaagtgtgatggattataagtttactgagaagatggaaaatgatcttgatctgatttcaaatggaagtctaaacagaaacgattttataaaatcgttttggagtaactttgaaccaattaagaataattatgaaaaaattgctgatgaaaaccca

SEQ ID NO: 293367 - DNA, 1198 bp, Unknown
  Bacterial polypeptide expressing nucleotide sequence isolated from the Sargasso Sea
atgttaatagaaaatccttctgatttgaaaaaatatttaagcacagatcaatctaaactttatgagttaatctggaatagagcagtatcttctcaaatgaatccagcagaatttgatagaaaaagtataactattgagtcagaagataaaaaaattcattttaaagcaaacggttcaacgataaaatttgaaggatatttaaaagtatacaagtttgaggaaaaagacgaagatcttaaaaatattttacctgaagtaaaagttggtgacaaagtctcaataaaagaattaatagatgatcaacattttactgatcctccaccaagattttctgaagcaagtttagttaaaaaaatggaagaattaggaattggacgtccttcaacatacgcaagcataatatcagttttatcaacaagaaattatgtagaattgttaaacaaaagattccacccaactgaccgaggtaaattattatctgcatttctcgaaaaattatttagtaaatatgtggattataattttactgcagatttagaaaatcaattagatgaaattactagtggcaaaattgattgggtcaaagttttagatgatttttggaaagatttttattcaaacgttgggcacgttaaagaaaaaagaaccagggaagttctagatttactgaatgaaagtttgggtgacctggtttttgaaagagatgataatgatattattgataggaagtgtaagctttgtaatactggcgaactaagtcttaaaaacagttttagaggtggggcatttataggttgttccaattatccagaatgtaagtttacaaggccactatctaaatcaaaagcatcgcaacaagtccatttggcagaaccaaaattaattggaaaaaatgatttgggtaaagatatctttctcaaaaatggaagatttggaccttatttgcaatttgagattgagcctactgagtcaattgaaaataaaacaaaaaaatctaaaaagaaaaaagaaaacgaaaacttaaaaaatgtttcaataccaaagggtttgcaaattgaaaatgtagatttagaaaaagctaagtatttatgttctttgccaaaaataattggtaggcatcctgagttgaatgacgatataaccgttaatgttggaaggtttggtccttatttaaaatgttcaaataaatctgcaagaa

SEQ ID NO: 293368 - DNA, 918 bp, Unknown
  Bacterial polypeptide expressing nucleotide sequence isolated from the Sargasso Sea
aatgagcacattggtaatcgtagaatcaccgaataaagtaagcaaaatcagtgcaattctcggcgaaggttacaaagtcatggccagcgttggccatgtgcgtgacctaccgccgaaagagctgggtattgaacaaccttctttcaagctgacctataaaccgaccgaacgcgggcaaggtgtgttggccaaactcaaaggggccgtcgcacaagcaagccgtgtgttgctggcgactgaccccgaccgtgaaggggaagcgattgcctggcaccttgcagacgcactgcgcctcaaaaaccccgagcgcgtgacgttcactgcaatcaccaaggaaaaaattcttgcggccttcgcatcgccgcgtccactcgatatgcagcgcgtacacgcccaggaagctcgccgggcgctcgatcggatgattggctaccgcgttagtccggcattgtcagatgccaccgggcaacgccttggcgtggggcgcgtacagtctccggccgttcgccttgttgttgaccgcgaacgggctatcgccacattccaagtcactcagcactacggtgcagagctgatttttctgaacgacgacagcaccaaatggaaggcgcagtgggacacgaaaccgcatttacccgagggcgaaaactacctgctggattccatgctggccaagctcgctgccgctgttcgcaacgtgtcggccgccgaatacgaggatagtcagaaggggcgggcacctgccgcgccgttcaccacctcgacgctgcagcaagccgctggtcaacgtctcaagttgaaaccaaagcgcacgatggagctggcacaacgcctctatgagcaaggcgcgattacctaccaccgcaccgatgctccaacatggacgacgaagggcgtgcagacattaccgcctatgcg

SEQ ID NO: 293369 - DNA, 202 bp, Unknown
  Bacterial polypeptide expressing nucleotide sequence isolated from the Sargasso Sea
atgaatcttgtcatagttgaaagtcctgcgaaagctaaaacaattaataagtacttgggtgttaattatacagttttggcaagttacggtcatataagagatcttccttccaaaaatggttctgtagatcctgaggacaaattcaaaatgatatgggaagttgatagtttttcaaaaaaaatatttaaaagaaataactgat

SEQ ID NO: 293370 - DNA, 1051 bp, Unknown
  Bacterial polypeptide expressing nucleotide sequence isolated from the Sargasso Sea
catggtaaacattaattcaaaacctcttttaattgtagaatctccatcaaaagcaaaaacgatatcaaaataccttggtggagaatataatgtgatagctagtgttggtcatatcaaggatttacctagaaaagagatcggaatcgatattgaaaatgatttttctatggttgaagatgttttagaggacaaaaaagagtttgtcaaagaattgagatctatggccaaaggcacaaacaaggttgttatcgccactgaccctgatagagaaggagaagctatcgccgctcatattgcaagcgaagtagataatgaaaaaataagtagagtacaatttacagagattacaaaagaaggggttgatgagggcatgaacaatccccgtcaaattgataaggatcttgttgaagctcaaactgccagaagaatcatagacagactaataggctataaaatatccccagttctttggagtactttaaaaaagaatatgaaatttgtgagtgtgaacttgtcagctggaagagtgcaatcagcagctcttaaaataatgatagagagagaaagattgcgccaagcattcaattccgcaacatattatgacataattgcttcatttaagagcggtaacaccgaattcaatgctttattgagtaaaattgataataaacgaatagcagttggaaaagattttgatccaaatactggtaaattgaataacgaagatgtaatcctcttgtcagagtcgcaagctagtacgctaattaaagaacttgataatggcaattggactgtaacaaatgttgaagaaaagattgttaactccaacccaaaacctccattcactacttctaccttacagcaggaggcagcaagaaaattaatatcatcagctaaaaagacaatgcgcgatgcacaacaattatatgaaaagggttttattacttatatgaggactgattctacatccctttctgaagaagggataaatggtgcaagaaatttaattttaaaaaaatatggggatgagtatttaccttcaacttcaaaa

SEQ ID NO: 293371 - DNA, 274 bp, Unknown
  Bacterial polypeptide expressing nucleotide sequence isolated from the Sargasso Sea
atgggcaaatcactggtcatagtggagtctccggccaaggccaagaccatcaacaaatatttgggcaaggactacgtggtgaaatccagcgtcggtcacgtgcgcgatctgcccaccagcggcagcgccagcaacgagcccaaaaaacctgtcattcgcggcatcaagctgagcgaagcagagaaggctgccaaggatcgcaatgccctgttctcacggatggggatcaatccgaccgcaggctggcaggccaactaccagattttgcccggca

SEQ ID NO: 293372 - DNA, 205 bp, Unknown
  Bacterial polypeptide expressing nucleotide sequence isolated from the Sargasso Sea
catgggcaaatcgctggtcatcgtggaatccccggccaaggccaagaccatcaacaagtatctgggcagccagtacgtggtgaagtcgagcatcggccacatccgtgacctgcctaccagcggctcggcaagtgccaccaaggagcctgccaagcgcggcaaggctgctgctggtgaagcgcctgcgctgtcgcccaaggaaaag

SEQ ID NO: 293373 - DNA, 1387 bp, Unknown
  Bacterial polypeptide expressing nucleotide sequence isolated from the Sargasso Sea
gcaaaatttgatagaaaaacaataactatatcttctgatgatggcaaaaatatctgcaaagcaagtggatcggttattaaatttgatggttatttaaaattagtaaaaattgatgagggaaatgatgaagaaaaaatactaccagatgtaaaaaaaggaattgttgaaattaatgaatatatagatgaacaacattttactcaaccacttccaagatattctgaggcaagtttagtaaaaaaactagaagaactagggataggcagaccctcaacttatgcaagtataatttcagttatttctaatagaggatatgcagatattaataataaaagattttttcctactgatagagggaaattgttatcagcttttctagaaaaattattcgcaaaatatgtcgattacgattttactgctaaattagaagatcaacttgatgatattacttctggtaaagaagattggataaaagttttagaaaacttttggattgatttccattcaaatgtatcatcagttaaagaaaaaagaaccagagaagttctcgacctattaaatgaaagtcttggatcattaatttttgaaatagacaaagagggtaaagttaatagaaaatgcttaatatgtactaatggagaattaagtttaaaaaatagttttcgtggtggagcttttataggatgctcaaattatccagaatgtaaatttacaagaccgctttctaaagctaaagctgctcaacaattaaatttagctgaacctaaattaattggaaagagtatcaatgatgaggatatttttttaaaaaatggtagatttggaccttacttgcaatttgaatcaaaaaatttagaaatcgataaaaatccaaagaaaaaaaggaaaaataaaaagaaagaagccaatattaagaatgtttcaatacctaaaggtctagaaatagactctatagatttaatgaaagcacaattcttatgctctttaccaataagcttaggtaaaaatcctgatagtgataaagacattactttaaatgttggaagatttggcccatatttaaaatgtgaaaataaatcagcaagaattgaaaatgtagaagaaatattttcaataggtttaaatagagcaataactttaattgcagaagctaaaccaggaagaatttcatcttcaataataaaagatcttggagaacatcctgatgataagaaactagtcagagtaatgaagggacaatatggaccttacattaaatataaatcattaaatgctacaatacctgaggaaaaagacccaacagaattaacaatggaagaagcattaatattaattgagaaaagaagagaatacgataaaagtaaaaagtcaaaaaaaaataaatgaa

SEQ ID NO: 293374 - DNA, 1684 bp, Unknown
  Bacterial polypeptide expressing nucleotide sequence isolated from the Sargasso Sea
gaagcatcaagaaaacttggttttggagtttctagaacaatgagtactgctcaaaaactatatgaagccggacttataacttatatgagaacagatagtgttactatttcaaatgaagcaaaagagtcaataattaataagataaaatcaaaatttggtgacaaatttgtttactcaagagattttcaaaataaaaacaaatctgcacaagaagctcatgaagctgttagacccaccaaaatagatgttgaagaaataacgtctgacttcgaccagcaaagattatataaattaatttggaagagaacaatttcttctcaaatggcggatgctgagatagaaaaaactatagtaaaaatacaatctgataaatacgactataaatttacatcaactggagaagtaataatttttgaaggtttcctgaaagtttatcttgagggcactgatgatgagagtgaagaagagaaagccgtactaccaaaaattactgaaggagaaaagcttgagctagataaaataacttcaaaagagatgttttcaagacctccatctcgatacactgaagcatctttagttaaaaaaatggaagaacttggaattggaagacctgcaacatatgcgacaacaatttcaacaattcaaaaaagaggatatattgaaaaaggaagtaatgaaggttctgagagagattataaattatttgaattttcaaataatgaagtctcagataggattttaaaagaaaaaacaggctcaaacaagggtaggcttattcctactgatattggagtaattgttaatgactttttggttgagaattttagaaatattctagactatgggtttacagctgaggtagagaagaatttcgatgaaattgcatctggaaatgaacaatggtctgaaataatcaaaaggttctataatgattttcattctaatgtaactgaagttaatgaaactgcagagagacaatcaggagaaaaaattctaggaaatgatccaaaatcagggagggttgttaaagtaaggcttggtagatttgggccacttgctcaaattggtaatacagaagatgaagaaaaaccaatctttgctagtttaaccaaagatcaacaacttgaaaatataaccttagaagaagcactggacttatttaagttcccaaaagaaataggtgaatataagaatgaaactattacagttaataatggaagatatggaccgtatattaaattttcatcaaaatctatttcaattccaactaatcttgatcctcatacaatagagatcactgatgcaattaagctaattgatgaaaaactcaaagctgatgaaccaattcatttttatgatgaattacctgtgacaaaaggggttggaaggtttggaccttatataaaatggaatgaagggtttataaatgtaaataagacctatgactttgataatctaactatcgaaaatatagaagaattaattaaaaataaaatccagaaagacaaggataagttaattaaagagtggcctgaacatgaaataaaaattgaaaaaactagatggggtagatctgcaatttctaatccaaagaaaaaagttgagattcctaaagaaattgatccaacaaagatttcactagaagaagcacaaaattatcttaaaacaaaaaagaagaaatgag

SEQ ID NO: 293375 - DNA, 139 bp, Unknown
  Bacterial polypeptide expressing nucleotide sequence isolated from the Sargasso Sea
catgacaaaatctttagtaatagttgagtccccagcaaaagcaaagactatatctaagtacttaggaccagaatatattgttgagtctagtgtgggtcatataagagacttgccaaagaaagctattggagctagcaat

SEQ ID NO: 293376 - DNA, 838 bp, Unknown
  Bacterial polypeptide expressing nucleotide sequence isolated from the Sargasso Sea
tatgaacttacttgttgtagaatcacccgcaaaagctaagacgattaataaatatcttggaaataattttgaagtcatagctacggttggtcattttagagatttagcaaaaaaagatggtgtaaaagtgactgaggactacagtgatgttgagttgaattgggaaactacaactgcaggaatgaaaatgttggatagtatagagaaaaaagcagaaggttatgaaaaaatttaccttgcaactgatccagacagagaaggtgaagcgattacatggcatttagtaaaatctctagaaaaaaaaatagataaaaataaatttgagagaattacattcaatgagattactaaaaatgcagtaataaatagttttaaagagtctaggaaagttgatgataatctagtttctgcatatttagcgcgaagaagtttagattatttagcgggatatagtttatctcctgttctctggaggaaaatgcctggcagtagatctgcaggaagagtgcaatctgtagcagtaagactcatctatgaaaaggagattgagatagaacaatttgagccagagaaattctataaaataaatgtacatggggaaattaacggtgcaaaactcgatacatctattacaagtctagatgggcaaaaagtagacaagctcttctttaaaaacgaggctttagctgaaaaggctaaaaattacttaaataataacaaatttttcattagaaaaattgatgaaaagacaatatctcgaaaacctaaagcaccttttaatacttcaaccttgcaacaaacagcaaatagtcaactaaattttagtgccagtcaaact

SEQ ID NO: 293377 - DNA, 232 bp, Unknown
  Bacterial polypeptide expressing nucleotide sequence isolated from the Sargasso Sea
catgtcgaaaccattagtaattgtagagtcacctactaaggtaaaaacaatttcaaaaattctaggtgatggttatgtagtgaaatctagtgttggacatattagggatctaccaagaaatacaaaatctataccttcagcatttaaaaaagaagacattttatggggtgctgtcaaacctgagaattatgaaaatatatatgttattccggaaggaatagaaaaaaaattg

SEQ ID NO: 293378 - DNA, 1370 bp, Unknown
  Bacterial polypeptide expressing nucleotide sequence isolated from the Sargasso Sea
tagagatttatcactttacgatttaatttggaaaagaactgtagctagtcaaatggcggaagctaggttaacaatgattaatgctgaaattagcgtaggggatggattatttaaatcgagcggtaaaagtattgatttcgcaggattcttcagagcttatgtcgagggaagtgatgatccaagttcatcccttgaacaacaagaaattattctcccaaacttaacaactggaacatgtcttgaagttactaataaggaatctacttttcatgaaactaaacctcctgcaagatatacagaggctgcattagttaaagttcttgaaaaagaagggattggaagaccttctacctatgccagcattattgggaccatagttgatagaggttatgcgaatatatcttccaatactttggctccaacgtttacagcttttgctgttactgcactattagaagaacattttcctgatctggttgatactacttttactgcaaaaatggaatcttcattggatgaaatatcttcaggtaatcttgagtggctaccatacctcgaaactttttataaaggtaaaaatggtttggaggtaaaggttcagaaaacagaaggtgatattgatggtaaagcatatagacaagttgatttcgaagaccttccttgcgtagtcagaataggctctaacggaccttggctagagggtacaaaaattgatgaatctggtaatgaaattcaggctaaaggtaatcttccaatggatattactcctggagatttagacttaaaacaagttgatcaaatcttaagtggcccatcggatcttggcactgatccaaaaactggggaaaaagtctttttaagatttggcccttatggaccttacgttcaattgggaaataatgatcaagataaagctaaaccaagaagagcttcattacccaaagagttgaaaactgatgatctaactctagatgaggctcttgtacttttaagtttgcctagattgttaggagttcatcctgaaggaggagttgttgaggctgatagaggaagatttggcccatatatcaaatggattaaaaatgaaaatgaatctgaaaacagatctttaaagaaagaggatgatgtttttacagttgatataaaacgagcattagaaattcttgcgatgccaaaaatgggtagaggtgggcaagaggtacttaaagactttggaaaaccgaaagaatttaaagaaaaaattcaaatattaaatggaagatatggcatctatttaaaatgtgggaaaactaatgtttcgattgctaaagatactgacatagaaaaattcaccatagatgatgcagtatctcttttagaaaaaaactaaa

SEQ ID NO: 293379 - DNA, 1587 bp, Unknown
  Bacterial polypeptide expressing nucleotide sequence isolated from the Sargasso Sea
atttacctaaagatgctttaaattattctggaaaaaaagcaaaaaatgcccaggaagctcatgaggcaatcaggcccactgatattattagaactcctcaaagtattaaaaaatatttaagtacagatcaaaataaactgtatgacctcatttggagtagagctctatcttcccaaatggagtctgctaagtttgatagaaacaccattactataacatcgaacaataatgatactatttgtaaagctagtggttcagttcttaaatttgatggatttataaagatttataacaatcaaagtaaagacgatgatgaaagcattctaccatctatgtctaaaggaattgtaaatattgaagctttgttagatgaacaacattttacacaaccaccacctagatactctgaagctagcttagttaaaaaacttgaagaactaggtattggaagaccatctacttatgcaagtatcatttctactattgcaaacagaggatatgctgaaatattaaataaaagattttttcctacagatagaggtaaattaatttcagcttttttggaaaaactcttttcaaagtatgtagattataattttacagctggactggaagatcaacttgatgaaatcaccacaggaaaagaaagttggattaaagttttggagcttttttggaaagattttaatagcaatgtctcagaggtaaaagaaaaaagaactagagaagtattagatttacttaatgatagtttaggagatttaatttttgataaagataatcatggaaatatagtcaggaaatgccaattatgtagttctggaacgctaagtttaaaaaatagcttcagaggtggcgcttttattggttgctcaaattaccctgaatgcaagtttacacgaccattatctaaagcaaaagctgctgctcaagtacacttagctgagccaaagttaattggaaaacatgcaaatggaaatgatatatatttaaaaaatgggagatttggcccttatcttcaatacgaaaaaattccaactgaagtagagattgaaataaccactaaaaaaaagaaaaaaactaaaaagtctaaatcagatgttaatgaattattaaaaaatgtttcaatacccaaaggcttagagatagaaagtattgatttagaaaaagctcagtatttatgttcattacccaaatctttaggaataaatcctgataatcaaaaagaaattacattaaacacaggcagatttggtccctatcttaaatgtgagaataagtctgcacgaatagaaaatgtagaagaaatattttcaataggtttaaatagggcaataacactaatagccgaagctaaacctggtagaatatcttcatcaatgataaaagatttaggagaacatcctgaagataaaaaacctgtaagagttatgaaaggacaatacggaccttatattaaatacaaatcactcaatgcaactatacctgaagaaaaagatccaacagaacttactatggaagaagctttaatcttgattgaaaaaagaaaagaatatgacaaaactaagaaaaagaaaaaaaaatgaa

SEQ ID NO: 293380 - DNA, 1013 bp, Unknown
  Bacterial polypeptide expressing nucleotide sequence isolated from the Sargasso Sea
cgcgattactaaatccgacgtccaacgagctttcgaaaatcctcggggtattaacatgcctcgcgtggaagcacagcaggcacggcgaattgttgatcgtattgttggatatcgcgtttccccaattctttggaaaaaggtcgcctccggattaagtgcgggccgcgtacaaagcgtggcttcaaggctcgttgtggaacgtgaaaaacagattcgcgactttactccagatgagtcttgggaacttacaggatatctctcttttgataccgatggtgctgaggctctgcagaccgtctgggacgacttcatgtcacagcgagacgatcgcaaccgaccaccaacaatcaagcaacgtaccgcatggctttctgatcaccgcagcctttctgccgaacttgttgaagttggaggaaagactctgaagattgaggctgacaaaacctctaccgaagaactcgttaatgaagcagtgtctgctgctgaggcagctggactagtcgatatagatatccaacgagaggaaaacagtattggcaagggaagggcaaaaaatattgttcgtctaacaggaaagccggactccaacacgcgctatagcatcgactcaattgatgtgaaacgtacaaagtcgagaccctatccaccattcatcacaagcaccttacaacaagccgcaagtagccgattaagcatgtcaactgatcgaacaatgcgtgtcgctcagcaactctatgagggcatcgatctacccggagagggacgagtcggacttattacatacatgcgaactgactcaacgaatttatcaggcgaagccatccgtctggcacgtcgctatcttgaagaaaaagtcggtgcggagtatctccctgagaaacctcgcttttactcgagtagcaatcagtcagcgcaggaagcccacgaagcaattcgaccgaccgatccctttcgtgacccagacactatcggctcggccttaaacaaagagcaactcaagctctaccggctca

SEQ ID NO: 293381 - DNA, 1230 bp, Unknown
  Bacterial polypeptide expressing nucleotide sequence isolated from the Sargasso Sea
tgtagcttcttttaggaatttcattactcaaaattatggtgaaacatatttgccaccggcccctttaaattattcaggaaaaaaggcaaaaaatgcacaagaagctcatgaagctatcagaccaacggagattagtagagtgcctgaagatatgaaaaaatatttaagcacagaccaatacaaactttataatttgatatggtcaaggtcactatcttcacaaatggagtcagcaaaatttgatagaaaaactataacaattacatctgaagataataaaaatatatgtaaagctagtggatcaactttaaaatttgatggttttttaaaagtttcaagaatagatgaaaataaagatgatgaaaacatattgccagatgttgtaaaaggtgaagtaaagtttaaagactttacggatgagcaacattttactcaaccaccaccaagatattcagaagcaagtcttgttaaaaagttagaagaattaggaattggaagaccttcaacatatgcaagtataatttcagttatttcaaatagaggttatgcagacatagaaaacaaaagattttttccaactgatagggggaaattgctctccgcttttcttgaaaaattattctcaaaatatgtggattatgatttcactgcaaaattggaagatcaattagacgatataacagctggtaaagaaaattggattaaggttttggaagaattttggagagattttaatttgaatgtagcagacgttaaagaaaaacgtactagagaagtcttagatatgcttaacgaaagtttaggatcattaatctttgaagttgataaagatggaaaaataaatagaaaatgtaaactatgtgatagtggtcaattaagtttaaaaaatagttttcgaggtggtgcttttatcggatgttcaaattatccggattgtaagtttactagacctctttcaaagtctaaagctgctcaacaattgactttagcagaaccaaaattaattggtcaaaatgatataggtaaagacatatatttaaaaaatggaagatttggcccctatcttcaatatgaaaaagaatttaatgacgttgaagaaactaaaaagaaaaagaaaaaattaaaaaaagaagataataatatgaaaaacgtatctataccgaaaggaattgatatcaaaagtatagatttagatagagccaagtatttatgctcacttccaattagttt

SEQ ID NO: 293382 - DNA, 1270 bp, Unknown
  Bacterial polypeptide expressing nucleotide sequence isolated from the Sargasso Sea
caatttaaactctatgaattaatttggagtagagccttatcatctcaaatgaacccagcagagtttgatagaaatacgataattatttcttctaatgataataaaataaactttagggcaagtggttcagtagtaaaatttgatggatttttaaaagtttatcaagttcaagaaactgacgaggatgcaaagaatattttgcctgaagttaaggttggagaagaaattagtatacttaagctaaatgacgaacaacattttacagatccaccaccacgatattctgaggctagtttagttaaaaagatggaggaattaggcatagggaggccttccacttatgctagcattatttcagtattatcaacgagaaattatgtcgaattaattaataaaagatttaatccaactgatagaggtaagctaatttcagcttttttagagaaattattttctaaatacgtagattataatttcactgcagatttagaaaatcagctagatgaaatcactagtggaaaaattgagtgggttcaggttttagataatttttggaaggatttttataaaaatgttggaaaggttaaagaaaagagaacgagagaagttttagatttattaaatgaaagtttaggagctttaatttttgaaagagatgataaagacgctatagatcgaaagtgcaagttatgttccaatggagaactaagtctaaagaatagttttagaggtggggcttttataggatgctcaaattatccagaatgtaaatttactagacctttatctaaagctaaagctgcagctcaatataatttagcagagcccaaattactgggtcaaaatgaaaaaggtaaagatatatatttaaagaatggaagatttggcccctacttacaatatgaaaaagaaaaagacgaactagaaaccatcaagaaaaaaggtagaaagaaaaaaaatgaaaatgagcaccttaaaaatgtttcaattccaaaaggtattgatgttgatagtgttgatttggataaagcaaaatatttatgctctcttcctaaagtattaggacagcaccctgaaaatggacaagatataactttaaattctggaagatttggaccatatctaaaatgtgaaaataaatctgctagacttgaaaatgttgaggatctattttctattggaattaatcgagccataacattaattgctgaagctaagcctggaagaatttcatcttcattaattaaagatcttggagagcatcctgaag

SEQ ID NO: 293383 - DNA, 1345 bp, Unknown
  Bacterial polypeptide expressing nucleotide sequence isolated from the Sargasso Sea
caggaagcacatgaagcaattagaccggcgcacaaaatatttttaagcgttgatgaagtaaagtcaacgcttggcgaggaagcatcaaaattgtatgaattaatatggcaaaggacaattgcaagtcagatgttgcccgcaaaattggaacaaacatccgtggtgatttccaatcaagaaactgagttcaaaacgactggccaaataattatttttccaggatatatgaaaatttatgttgaaggtagagataacccagatgcagaactagcaaacaaagaaaaaattcttcctccattatctgtgaaccaagaacttacttgttcgaggattgaatcagttcctcaccaaacaaagccgcctgcgagatttactgaagcatcgttggttaaagaaatggaatccaatggtattggtaggccatctacatttgcatctatacttgatacaatagttcgtagaggatatgtagataaaactaaaagcaacctgtctcccacatatcttggtttggcaattacacagctgttggaaaatcattttactgcactagtagataaagagttcacagcaaaaatggaaaatgagctagatgcaatttcaagaggagaattagacccactaccttttatgaaaaatttctattttggagataaagattttccgggattggaatcaatgcttgatgaaaaagtagatataggaaaagcatgcacaatacccctccccattatggaaggcaatggtattgaagcgcgaattggaaggtttggaccttaccttagaaaagatgatgattcaagatccatccctcaagaaatatatatcggtgatctaaccagcaatatcattgattcactttttcaagaacaaagaaaagatgaatctttaggagaagatccagatacaggcgaagatattttattaaaaaaagggccatatggttattatgtccagcttggagaaacaacaaaacgtaaagcaattccaaaaggtaaagatatcgataccgttgatttagatttgggaattaaactactttctcttccaaggactgttggaacccatccagaaactaaagagacagtaactgctgactatggtaggtacggtccatatcttaaaatggaaaaatcaaatgccagattgatcggagatataaccccattaaatgttactatagaacaagcagttgaaatattaagtaaatctaagaagggacccagcgaacttaaaacccttggtaaacatccagatactggtgaagacctgatcctgaaagaaggcagatatggaccatatatctcagatgggaaagtgaatgctgcactgaaatcggataatg

SEQ ID NO: 293384 - DNA, 745 bp, Unknown
  Bacterial polypeptide expressing nucleotide sequence isolated from the Sargasso Sea
atggcgaaatcactagtcatagtcgaatcaccagcgaaagctaaaaccattaataagtaccttggaaacgattttatcgtcaaatccagcgtcggtcatattcgcgatctgccaacgagcagcagcaaagataaagtcaaagaagacaagaccaagcttagcaaagagcaaaaagagtatcaggctctcgttgaacgtatgggtatagatccaaacaacaactggcaagcccgctacgaaattctgcctggcaaagaaaaggtcgtcaaagagttgaaagctctggctgaaaaagcagataccgtctatctggcaacggacttagaccgtgaaggggaggcgattgcctggcaccttcaggaaattattggtggcgaacatcaaaagtttaagcgggttgtgtttaacgaaatcacccaaaatgccatcaaaaacgccttcgttgaaccaggtgaagtgaatcagcatcgtgtcaatgcgcagcaagcccgtcgctttctggaccgtgttgtgggttttatggtctcgcccttgttatggaaaaaagtggccagagggttatctgctggtcgcgtccaatctgttgctgtgcgtttagtggttgaacgtgagcgtgaaattaaagcttttgtgcctgaagaatactggacagttgctgcggatacacaaaccaaaacgggtgtggcactgcaacttgaggtggctaaacaagccggcaaagcgtttaagcctgagaataaagctc

SEQ ID NO: 293385 - DNA, 892 bp, Unknown
  Bacterial polypeptide expressing nucleotide sequence isolated from the Sargasso Sea
aaaattattttagctactgaccctgatcgtgaaggtgaggcaattgctgggcatgtcaaagagtttttaaatgaaaaaaaacttcttaaagataaaaaagtggaacgtgtggtttttaatgaaataactaaaaaagctgtaacaaacggtatagaaaacccaagaaacatagaaaatgaacttgttgacgcgtatatggcaagaagagcacttgattatttagtaggttttaatatatcgccaattttatggacaaaattaccaggatctaaatcagcaggaagagttcaatctgttgctcttagattgctaactgagagggagcacgaaatagaaatttttaagccagaagaattttggacacttaatttaaatttcttaacgaaggaaaatttagatgtaaatacatctattgctcaactagatggaaaaaagattgataaattctcatttaaaaataaagaagatattaataatgcgttagattttattaaaaataaaaaatataatattacagatataatatctaaaatttatacacgaaacccttctggtccttttacaacttctactttacaacaaacatcttcaagcaaactgggttttggagcctctagaacaatgcaaattgcccaaagactttatcaaggtatagatattgatggcgaaactgtaggattaattacttatatgcgtacagatggaactaatatatcaaaagatgctgtagcttcttttagaaatttcattagtcacaattatggtgaaacatatttaccacactctcctttaaattattcaggtaaaaaggtaaaaaatgcacaagaagctcatgaagctatcagaccaacggaaattagtagagtacctgaagatatgaaaaaatattaag

SEQ ID NO: 293386 - DNA, 1002 bp, Unknown
  Bacterial polypeptide expressing nucleotide sequence isolated from the Sargasso Sea
atctgttgctaaaagcgatgactttggaaaatttgatgttggtttaaaagatgataatattattcaagtagatcaaaaattagcaaaacaaatcaaagaagaatgcaatgctaatgattggttagttaataatattgaaagtaaaccaacttctagctctccagcgccaccgtttactacaagcacactacaacaagatgcttcaagaagatttggattctctccaaaaagaacaatggttgttgcacaaaaactatatgagcaagggtttattacatacatgaggactgattctacccatctttcgtctgaagcattaaatgcttccaaaaaatttgttgaaaacagttttgggtatgattttttatctgaaaaaacgaatatctataaaaataaagttgccaatgctcaagaagctcatgaagctattcgtccagcaggtacagcatttaggaaagttgaagatgttcaaaaaattggtgctgatgaagcaaagttatatgaattaattttaaatagaacagttgcctctcaaatgaagcccgcacaatatattcgaacaaacgttgaaattcataatggaacatctatctttaaagcaagtggaaatgttacagtatttaaaggttatactttagcttatgaacaagctttgacaagaaaagataaaggcagacctgatagcctaccagctttagataaacaatccaaaattcaaagcaaggaagtattgcttgaagaaaaaacaacatctccccctagaagattttcagaggctatgttagttaaagaaatggaaacaagaggaattggaagaccttctacttactctgcaattatagaaaaattgtcacaaaaagaatatgttgtgaaaaaaaataaaactctaataccaacttttgttggaatagctgtatcacaactattagaaaaccattataatgcattattcaatgaaagatttacagctgatatggaaaatcgtttggatgctatatccag

SEQ ID NO: 293387 - DNA, 955 bp, Unknown
  Bacterial polypeptide expressing nucleotide sequence isolated from the Sargasso Sea
gtcatagttgaaagtcctgcaaaagccaaaacaattaataaatacttaggagataattataccgttttagctagttacggtcatattagagatttaccatcaaaaaatggttcggttgatccagatcaaaattttaaaatggaatgggaagttgataacttttcaaaaaaatatcttaaagatattactgatgctgcaaaagaatcatctaaaattattttagcaacagaccctgatcgtgaaggagaagctatagcatggcatgtaaaggaatatttgaatgagaaaaaactactcaaagataaagaggttgaaagagttgtgttcaacgaaattactaaaaaagctgttacttttggaattgaaaatccaaggcaaatcgagcccttgctagttgatgcctacatggcaagaagagcacttgattaccttgttggttttaatatttcaccaatattgtggactaaacttcctgggtcaaagtcagcaggtagagtgcaatctgttgctttaaaattaataacagaaagagagcatgaaattgagttatttaatccagaagagttttggactttaagtttaaaatttcaagatgagaaaaaaaattcaattaccgcaagcatctatcaattagatagcgaaaaaattgaaaaatttacctttagaaaaaaagaagatattgaaaaggcaatctctggattaaagaataaaaaatttaatattagtgatatttcatcaaaaattgttaatagaaatccatctggtccatttacaacttctacactacaacaagttgcttcaagtagattgggatttggtgcctctagaaccatgcaaattgcacaaaaactttatcaaggaattgaaattgagggagatacagttggtttaataacctacatgagaactgatggtacaaacttatcggctgatgctattagtgattttagaaatt

SEQ ID NO: 293388 - DNA, 865 bp, Unknown
  Bacterial polypeptide expressing nucleotide sequence isolated from the Sargasso Sea
tatgaatcttgtaattgttgaaagtcccgcaaaagctaaaactataaataaatatttaggttcagattacacagtgttagcaagttatggacatattagagacctaccttcaaaaaatggttctgttgatccagaaaattcttttaaaatgatttgggaagtagatagtttctcaaaaaaatatttaaaagaaattaccgatacagttaaaaactcagaaaaaattattttagctactgacccagatcgagaaggtgaagcaattgcttggcatgtaaaagagtttttaaatgaaaaaaaacttcttaaagataaaaaagttgaacgagtagtttttaatgaaataactaaaaaagctgtgacgaacggaatagataatccaagaaatatagaaaatgaacttgtcgacgcatacatggcaagaagagcgctagactatttagttggttttaatatatcaccaattctatggacaaaattaccaggatctaaatcagcagggcgagtgcaatctgtagctcttagattgttaactgaaagagaacatgaaatagaaatttttaaaccggaagaattttggacacttaatttaaacttcttaacaaaggaaaatttaaatataaatacatcaatttctcaattagatggtaaaaaaattgaaaaattctcattcaaaaataaagatgatattaataacgcattagatttaatcaaaaataaaaaatataatattacagatataacctctaaaatttacacaagaaacccgtcaggtccttttactacttctactttacaacaaacatcatctagtaaactgggttttggagcatctaggacaatgcaaatcgcccaaagatttatc

SEQ ID NO: 293389 - DNA, 857 bp, Unknown
  Bacterial polypeptide expressing nucleotide sequence isolated from the Sargasso Sea
catggaactagttcaagctcaagaaactagaagaatcctggataggctttttgggtatgaattatctccactactttggaagaaagtagcccctcgattatctgctggtcgagttcaatcagtatcagtaagattgcttgtaagaagagagagagaaagaagatcttttaaaaaagctagttactgggggattaaagcttctttagtaaaagataatattactttcgaaactaaattatttagttttaaaggtcaaagaatttccaatggttctgattttgatgaacagactggcaaattaaaagaaggaaataaatctttgataattggggaagaaaaggtaaaaaatttattaaaggatttttcttcggaggattggatagtatcaaaaattgaaaaaaaaccatcaattaggaagccagtacctccatttacaactagtacattgcaacaagaagcaaacaggaaacttcgtttatctgcaagagaaaccatgagatgcgcacaaggtctatacgagagaggtttcataacatatatgagaactgattcagtccatctttcagaacaagctataagagcagctagagaatgtgtcagttcaaagtatggaaaagaatatttatccaactcaccaagacaatttaattcaactgcaagaaacgctcaagaagcacacgaagctattaggccagcgggtgaggcttttaaaacaccaaaggaaactaaccttacaggcagagacttaactctttacgatttaatttggaaaagaactgtagctagtcaaatggctgaagctaagctaacaatgatcaatgctgaaattagtgtaggggaaggattatttaaatcaa

SEQ ID NO: 293390 - DNA, 616 bp, Unknown
  Bacterial polypeptide expressing nucleotide sequence isolated from the Sargasso Sea
atgaacttagtaattgttgaaagtccggcaaaagcgaaaacaataaataaatatttaggaaaagattatttagttttagccagttatggacatataagagatttaccatcaaagaatggatctgtagatccaaataacaaatttcaaatggaatgggaaattgactctttttcaaaaaaatatttaaaagaaattactaatgctgctgaagactcagacaaaattattttagcaaccgatccagatcgtgaaggtgaagcaatagcttggcatgtaaaagaagttttagaaaaaaaaaagctgttaaaggataaaaatttagaacgagtagtcttcaacgaaataacaaaaaaagcaattcttgatgctattaaaaatcctagagaaatacatttaccattagttgaagcttatttggcaagaagagcattagattatcttgttggatttaatatctctcctatactttggacaaagctcccaggttctaaatctgcaggcagagtacaatcagttgctttaaaacttattactgaaagagaaaaagaaatagagttgtttaaacctgaagaatactggacacttacgtctgatttcacaaataaagataataaga

SEQ ID NO: 293391 - DNA, 346 bp, Unknown
  Bacterial polypeptide expressing nucleotide sequence isolated from the Sargasso Sea
atgaatctagtcatagttgaaagccctgctaaagcgaaaacaattaataaatatttaggtgataactataccgttttagctagttatggtcatattagagatcttccttcaaaaaatggatccgttgatcctgatcaaaattttaaaatggaatgggaaattgatagtttttcaaaaaaatatttaaaagaaattactgatgctgcgaaagattcttcaaaaataattcttgctactgacccagatcgtgagggtgaagcaatagcttggcatgtaaaagaatatttagatgaaaaaaaacttttaaaagacaaagaaattgaacgtgtggtatttaatgaaataa

SEQ ID NO: 293392 - DNA, 1068 bp, Unknown
  Bacterial polypeptide expressing nucleotide sequence isolated from the Sargasso Sea
aatccaagacaaatgaaaccgcttttagtggatgcttacatggctcgaagagccttggattacttggttggttttaatatttcaccaatattatggacaaaacttccaggctctaaatctgcaggtagagttcaatcagtagctttaaaattaataactgaacgagaacatgaaattgaatcttttaagccagaagagttttggactttaagtgtcaaatttaaagatgaaaaaaatcaaaatattctagcaagtattagtcaactagataacaataaagttgaaaagttctcttttagagataaagatgagattaataaggccatatcaagtatcagtcaaaaaaaatttaatattactgatatatctagtaaagtggtaaatcgtaatccatcaggaccatttactacatcaactcttcaacaaacagcttcaagtcggttaggttttggtgcatcaagaactatgcaaattgcccaaaagctttaccaaggaatcgaaattgaaggagaaactataggtttgataacatatatgagaacagatggtactaatttatccaaagatgctgttgtggcttttagagaatatatcaaaaaagaaatcggtaatgaatatttacctgaaagtgctttaaattactcaggtaaaaaggcaaaaaatgcacaagaggcacatgaagcgataagacccacagatgttatcagaacaccccaaagtgtaaaaaagtatctaagcacagatcaaaataaactttatgatttaatatggagtagagctttatcttctcaaatgcaatctgctaaatttgatagaaatactataacgattacatcaaataataatgatacagtatgcaaagcaagtggatcagttctcaaatttgatggatttttaaaaatatataataatcaaagtacggatgatgacgaaaacattctaccctcagtgtctaaaggacttgttaatattgagtccttaatagacgaacagcattttacacaaccccctccaagatattctgaggctagcttagtaaaaaaactagaggaattagggataggaaga

SEQ ID NO: 293393 - DNA, 716 bp, Unknown
  Bacterial polypeptide expressing nucleotide sequence isolated from the Sargasso Sea
tatgaatttggtcattgttgaaagtcctgcaaaagctaaaactattaataaatacttaggagatgattataaagttttagcgagttatggtcatattagagatttaccttctaaaaatggttcagttgatccagaccagaattttaagatggagtgggaaattgatagtttttcaaaaaaatatcttaaagaaatcacggatgcagctaaagactcatctaagattatactagcaactgaccctgatcgtgaaggcgaagctatagcatggcatgtaaaagaatatctaaatgaaaaaaaacttttaaaagataaagaaattgaacgagttgtatttaatgaaataactaaaaaagctgtcatacaaggaattgagaacccaagacaaattgaaccattattagtcgatgcatatatggctagaagagctttggattacctagtaggttttaacatttcacctatactttggacaaaattaccaggctcaaaatctgcaggtagagttcaatctgttgctttaaaattaattactgaaagagaacacgagattgaatcttttaaacctgaggagttttggactttagatataaaatttaaagatcagaacaatcaaaagattactgcaagcattaatatgttagataataataaaattgaaaaattttcctttaaaaataaagatgaaataaacaaagctactgaagctataaata

SEQ ID NO: 293394 - DNA, 895 bp, Unknown
  Bacterial polypeptide expressing nucleotide sequence isolated from the Sargasso Sea
cctgacgatggatggtctgccaattatgaaattatccctgataaagaaaaggtaataaaagatttaaggaaagcttcaaaggaagtagaaaaagtttatcttgctactgatcttgatagagagggagaggctatagcttggcacttgaaagaagctttaggaaaaaataaatttgaatatcaccgagtaagatttaatgaaattacaaaaagttcaatattagaatctttctcagatcctaaggaaatagatcaagatctagtaaatgcccaacaagcaagaagatttcttgatagggtggtaggttttgaactgtctccattattgtggaaaaaaattgctagaggcttgtctgcaggaagagttcaatctgttgcattaagattgctttgcgaaagagaaaaattaatttcacaatttcaaccagaggaattttgggaagtttcagcaactttaaaagattttaatcatgaagaaatcttatttaagttaaatagaaaaaaaagcgaccctcttctaaaagaggatgaagcgaagaaaatagaggagctcgtaggtagttcaagtttagaaatatctgaaatcacaaaaaaacctactacagttaaaccaaaagcaccctttataacatcaactcttcagcaggccgctagctcgaagttgggttttggggtctcaagaacaatgcgagttgcccaaaagctttatgaagctggaagaataacctatatgagaaccgatgctcctagtttaagtaatgattcgattgaagatgcaagactgtttattaaagatactctagctgatgaatacctaacggaaaaacctcgaatatattcagggaaagaaaatgctcaagaggcgcatgaggcaataagaccaacaagtgcaagct

SEQ ID NO: 293395 - DNA, 892 bp, Unknown
  Bacterial polypeptide expressing nucleotide sequence isolated from the Sargasso Sea
gacccagatagagaaggtgaggcaataacatggcacttagttaagtcattagaaaaaaaagtagataaaaataaatttgaaagaattacatttaacgaaattactaaaaacgctgtaataaaaagttttgatgaagctagaaaagtagatgataatctagtatcggcttatttagctcgaaggagtttagattatttagcgggatacagtttatctcctgttctatggaggaaaatgccagggagtcgatctgcggggagagtccaatctgtagcagtaagacttatttatgaaaaagagattgagatagaacagtttgaaccagagaaattctataaaataaatgttaacggggaaattaatggggcaaaattagatacttcaatcactagcttagaaggtgaaaaagttgataaacttttctttagagatgaagctttagctaataaagctaaaaattatttgaaatcaaatagttttttcatcagaaaaattgatgaaagaacaatatctcgaaaacctaaagcaccttttaatacctcaactttacaacaaactgctaatagtcaactaaactttagtgctagtcaaactatgactattgctcaaggtttatacatgggaatagatataaacaaagaaactatagcccttatcacatacatgagaactgatagcattacactttcaaaaaactcgatagatacaataagagaaaatatatcaaaggattatggagatgagtatttacctaataaacccattgagtataagtctaggaaaaaaaatgctcaagaagctcatgaagcaataagaccaactgatatttctataaaaccagaagatataaaaaactttttaaatgaagaacaatttaaactctatgatttaa

SEQ ID NO: 293396 - DNA, 933 bp, Unknown
  Bacterial polypeptide expressing nucleotide sequence isolated from the Sargasso Sea
agcggttcggctagcgccagcaaggagcctgccgccaagcgcggcaaggccgccgcgggcgaaggtccggtactcacgcctaaagaaaaagcgcgcaagcaactggtttcgcgcatgggtgtggacccggaccatggctggaaggccaagtacgaaatccttccgggcaaggaaaaggtcatcgaagagctgcgccggctcgccaaagatgctgacaccatctatctcgcgacggacttggaccgcgaaggggaagccattgcctggcacctgcgcgaagccatcggcggtgatgacagccgctacaagcgcgtggtgttcaacgaaatcaccaagaaagccattcaggaagccttctccaagccgggcgagctggacatcgaccgtgtcaacgcccagcaggcccgtcgcttcctcgaccgcgtcgtcggctacatggtctcgccactgctgtgggcgaagatcgctcgtggtctgtccgccggccgtgtgcaatcggttgcggtgaagctggtggtggaacgtgagcgcgagatccgtgcgttcattcctgaagaatactgggaagtccacgctgacctgggtaccgccaagggcgccaacgtgcgctttgaagtggcccgcgagaaaggcgaggccttcaagccgctgaacgaagcccaggccatggccgcgctggaaaagctcaaggcttccagctacagcatcgtcaagcgtgaagacaaaccgaccagcagcaagccgtcggcgccgttcatcacctccaccctgcaacaggccgcgagcaaccgcctgggcttcggggtgaagaagaccatgatgatggcccagcgtctgtatgaggctggctacatcacctatatgcgtacggactccaccaacctctcgcaagacgcggtggcgatggcgcgtacctatattgaaagcgaattc

SEQ ID NO: 293397 - DNA, 1057 bp, Unknown
  Bacterial polypeptide expressing nucleotide sequence isolated from the Sargasso Sea
aaattttcctttaaaaataaagaagatataaataatgctatagaacttataaaaaaatctaaattcaaaatttcagatattagctcgaaaatatttactagaaatccactaggtccatttactacttctacgcttcagcaaacatcttcaagcaagttaggttttggagcctcaagaacaatgcagattgcccaaagattgtatcaaggaatagatattgaaggtgatacagtaggattaatcacatacatgagaacagatggtacaaacatatcaaaagatactgtggctgattttagagattttataaaaaattcatatggagatatttatttgcctaatgaacctaataattactcaggtaagaaagctaagaatgcacaagaggctcatgaagcaataagaccaactgatattactagaacacctgaatctattaaaaaattcttaagtactgaccaaaacaaactttatgatttaatttggtctagagccctttcgtctcaaatggagtcagcaaagtttgatagaaaaactattacaataacttcagatgataacttgaaccaatttaaatgctcaggatcaacaataagatttgatggatatttaaaacttacaagaattgatgaaaatgaagatgaaaaaattcttccagatgttaataaagaagaagttttaacaaatgattttgttgatgaacaacatttcacacaaccaccacctcgatattctgaagcaagtttagtaaaaaaacttgaagaattaggcattggaagaccttctacatatgcaagtattatttctgttatttcgaatagaggttacgctgatgtaataaataaacgtttttttcctacagatagaggaaaattattatccgcatttctagaaaaattgttttctaagtatgtggactatggttttacagcaggtttagaagatcaacttgacgatattacaacaggaaaagaggaatggataaaagtacttgacgaattttggaaagatttcaacacaaatgtgtcaactgttaaagaaaagcgtactcgagaag

SEQ ID NO: 293398 - DNA, 962 bp, Unknown
  Bacterial polypeptide expressing nucleotide sequence isolated from the Sargasso Sea
tatgtcaaaatcacttgtaattgtagagtcccctgcaaaggcaaagacgatatcaaaatatcttggtaatgaatatattgttaaatcaagtgtaggtcatattagagatttaccaaagggaaaatcgaaagctaaaagacagaatccaatcccaaaagatgctagtcctgaagaaaaggctagattaaaaaaagagcaagaaagaagaaggataattaggagaatgggtgtaaatcctgacgatggatggactgccaattatgaaattattcctgacaaagaaaaagtaataaaagatttaaggaaagcttcaaaggaagtagaaaaagtttatcttgctactgatcttgatagagaaggagaggctatagcttggcacttgaaagaagctttaggaaaaaataaatttgaatatcacagagtaagatttaacgaaattactaaaagctcaatattagaatctttctcagatcctaaggagatagatcaagatctagtaaatgcccaacaagcaaggagatttcttgatagggtggtaggttttgaactttctccattattatggaaaaaaattgcaagaggtttatctgcaggaagagttcaatctgttgcattaagattgctttgtgaaagagaaaaattaatttctcaatttcaaccagaggaattttgggaagtatcaccaactttaaaggattttaataatgaagaaatcttatttaagttaaatagaaaaaaaagcgatcctcttctaaaagaagatgaagcgaagaaaatagaggagctcgtaggtagttcaagtctagaaatatctgaaatcacaaaaaaacctactacagtcaaaccaaaagcaccttttataacatcaactcttcaacaggccgctagctcgaagttaggttttggtgtctcaagaacaatgcgagttgcccaaaagctttatgaagctgaagaatcaccta

SEQ ID NO: 293399 - DNA, 1039 bp, Unknown
  Bacterial polypeptide expressing nucleotide sequence isolated from the Sargasso Sea
aaagctacctggatcaaaatctgcaggaagggttcagtccgttgcattaagattgctcacagaaagagaacatgaaattgagcaatttaaaccagaagaattttggactttaaatgttaattttaaaacatcaaaagaagatattttaaattcaaatattatattgcttaataacattaaagttgaaaaattttcttttaaaaaaaaagctgatataagtaatgcaattgaaataattaaaaaaaataaatataaaatttcagatattagttctaaaatttacacaagaaatccacttggaccatttactacatcaacattgcaacaaacagcctctagtaaactaggttttggagcttcaagaacaatgcaaatagcacaaagattatatcaaggtatagatatcgaaggagatacagttggattaattacttatatgagaacagatggtacaaatatatcaaacgatgcaatttctgattttagaaatttcattcaaaaatcttatggtgaaaattatttacctgaaaatcctaataattattctggtaaaaaagctaaaaacgcacaagaggcacacgaagctataagacctacagatataataagaacaccagagtcaatgaaaaaatatttgagtacagaccaaaataaattgtataacttaatttggtctagagcattatcttcacaaatgcaatctgcgaagtttgatagaaaaacaattacaataatatctgacaataatttaaatcaatttaaatgttctggatctactataaaatttgatggatttttaaaactaacaaaaattgaagaagacgaaaaagaaaaaattcttcctgatgtaaataaagaagaagtttctataaatgactttattgacgaacagcactttacacaaccacctcctcgatactctgaagctagtttagtaaaaaaacttgaagaattgggaattggaagaccttcaacttatgcaagtattatttcggtaatatcaaatagaggatatgcagatattgttaataaacgtttt

SEQ ID NO: 293400 - DNA, 871 bp, Unknown
  Bacterial polypeptide expressing nucleotide sequence isolated from the Sargasso Sea
ctataaagtactagccagttatggtcatataagagatttgccatcaaagaatggctctgttgatcctgataaaaattttgagatgcagtgggagctggattcattctcaaaaaaatatttaaaagaaattactgatgctgcaaaagaaagtgataaaataatactagctactgacccagatcgagagggagaagcaattgcttggcacgtaaaacaagttttagacgataaaaaactattaaaaggaaaaaaacttgaaagagttgtgtttaatgagattacaaaaaacgcagtgcttaatggtataaataacccaagagaaattgaagacactctagtaaaagcttatctagcaagaagagctttggattatcttgtgggttttaatatttcacctattttatggactaaacttcctggttcaaaatctgctggaagagttcaatcagttgctctcaaactgataactgagagagaacacgaaatcgaatcttttaaacctgaagagtactggactatcaatgcaaattttaaaaactcaaaagataaaaatatattctcaaaattaaactttataaatgataaaaaagtcgaaagattcagttttagaaataaaaatgatatcaatacaacaactgaaaatatcaataaatatgaatattttgttaaagatgtaaattcaaaaattgttaaaagaaatccctctgcacctttcacaacatcaactcttcaacaaacttcttctggaaaatttgggttcggtgcatcaagaacaatgcaaatagcacaacggttatatcaaggaattgaaattgatggagaaacaattggtcttatcacttatatgagaaccgatggaacaaatatttct

SEQ ID NO: 293401 - DNA, 869 bp, Unknown
  Bacterial polypeptide expressing nucleotide sequence isolated from the Sargasso Sea
tatgtcaaaatcacttgtaattgtagagtcccctgcaaaggcaaagacgatatcaaaatatcttggtaacgaatatattgttaaatcaagtgtaggtcatatcagagatttaccaaagggtaaatcaaaagctaagagacaaaactcaatcccaaaagatgctagtcctgaagaaaaggctagattaaaaaaagagcaagaaagaagaaggataattaggagaatgggtgtaaatcctgacgatgggtggtctgccaattatgaaattattcctgataaagaaaaagtaattaaagatttaaggaaagcttctaaggaagtagaaaaaatttatcttgctactgatcttgatagagaaggagaggctatagcatggcacttgaaagaagctttaggaaaaaataaatttgaatatcacagagtaagatttaatgaaattacaaaaagctcaatattagaatctttttcagatcctaaggagatagatcaagatctagtaaatgcccagcaagcaaggagatttcttgatagggtggtaggttttgagctctccccactattgtggaaaaaaattgcaagaggtttgtctgcaggaagagtccaatctgtagcactaagattactttgtgaaagagaaaaattaatttctcaatttcaacctgaggaattttgggaagtatcggtaactttaaaggattttaatcaagaagaaatcttatttaagttaaatagaaaaaaaagcgatcctcttctaaaagaggatgaagccaagaaaatagaggagcttgttagtagttcaagtttagaaatatctgaaatcactaaaaaacctactactgttaaaccaagagctccatttataacatcaa

SEQ ID NO: 293402 - DNA, 864 bp, Unknown
  Bacterial polypeptide expressing nucleotide sequence isolated from the Sargasso Sea
attggctacagaccctgaccgtgaaggtgaagcaatagcctggcatgtaaaagaatatttaaatgaaaaaaaacttttaaaagataaagaaattgaaagagttgtatttaatgaaataactaaaaaggctgtcatccatggaattgaaaaccctagacaaattgagccactgctagttgatgcttatatggcaagaagagctttagattacctggttggatttaatatttcaccgatactttggacaaagctaccaggttcaaaatccgcaggaagagtccagtcagtagctttaaaattaattactgaaagagaacatgagattgagtcatttaaaccagaagaattttggactttaagtattaaatttactgatcaaaataatcaaaatattactgccagtattaatcaattagataacaataagattgaaaaattttcatttagaaataaagaagaaataaataaagccaaatcaagtattgaaaaaaaaaagtttagcataactgatatatcaagcaaagtagtaaatcgtaatccttctggacccttcacaacatctacacttcagcaaaccgcttccagcagattgggttttggtgcatcaagaacaatgcaaattgcacaaaaattatatcaaggaattgagatagagggtgaaacaattggtttgatcacctatatgagaaccgatggaactaacttatcaaaagatgcagttttaaatttcagagattatatccaaaaagaaattggtagtgaatatttaccaaaagatgctttaaattattctggtaaaaaagcaaaaaatgctcaagaggcacacgaggcaatcagacctacggatattatcagaacgcctca

SEQ ID NO: 293403 - DNA, 899 bp, Unknown
  Bacterial polypeptide expressing nucleotide sequence isolated from the Sargasso Sea
aaacataaataaaaagaaattcagtatcaacgatatatctagcaaagtaataaatcggaatccctctggaccttttactacctctactctgcaacaaactgcttcaagtagattaggatttggagcgtctagaacaatgcaaattgctcaaaaactttatcaaggcatagaaatagaaggtgaaacaataggattaatcacttatatgagaactgatggaaccaacttgtctaaagatgcagtttcagcattcagagattatattaaaaaagaaatcggtaatgaatatctacctgaaaacgctttaaattactctggaaaaaaagcaaaaaacgcccaggaagctcatgaagcaataagacctactgatatcattagatctcctcagagtgttaaaaaatatttaagtacagatcaaaataaactttatcatttaatttggagtagagctctatcgtctcaaatggagtctgctaagtttgatagaaatactattactataatgtcagataatgaagatactatctgtaaagctactggctccgttcttaaatttgatggatttttaaaaatctacaataatcctaataaagatgatgatgaaaatatacttcctccaatgtcaaaaggtcctgtcaatattgaagctttattagacgaacaacattttacacagccaccaccaagatattctgaagctagtttggttaaaaaacttgaggagcttggtattggtagaccttctacctatgcaagtattatttctacaattgctaatagaggatacgcagagatattaaataaaagattttttcctactgatagaggaaaattaatttccgcttttttagaaaaattattttcaaaatatgttgattataacttcactgcaggttaga

SEQ ID NO: 293404 - DNA, 944 bp, Unknown
  Bacterial polypeptide expressing nucleotide sequence isolated from the Sargasso Sea
gtatattgttgagtctagcgttgggcatattagagatcttccaaagaaaggtggcacagctagaacaagacttgttgtaccaaaagatctcagtccagaggaaaaggccagacaaaaggaaatcaatgctagaaaaagtttagtaagaaggatgggtgttgatcctgataatggatgggatgctgattggcaaataatacctgagaaagagaaggtgctgaaggctttaaaaaaagctgcaaagaatgttgataatatatatttagcaacagatttagatagagaaggtgaagcaattgcttggcaccttaaagaagctttgggacctcaaaaatacaattactcaagagtgagatttaatcaaattacaaaagatgcaattattaagtctttctctgatccaaaagaaatagaccttaatctggttaaagcatacagagctagaagatttttagataaagttattggttttgaattatctccattgctttggaaaaaaattgcacgaggcttatcagcaggaagagttcaatcggttgctttaagacttttagacgaaagagaaaggtctatccaagaatttattccagaggagtattgggaaatttcgttttcagccactactaataatgatgaaacaattacatttaatcttgcaactaaaaaaacagatccattactctcaaaagaaaaagttgaaacaataaaacaacaaatagaatcatgcaatttatcaataaatgagatttctaagaagccagtaaaagttaaaccaaaggctccttttattacatcaacactccaacaatcttctagcacaagattaggttttaacgtaaaaagaaccatgcgagttgctcagaaactttatgaggcaggcttaataacatacatgagaactgatgcccctagtttgagtaaaagaatctataaaagatgctaga

SEQ ID NO: 293405 - DNA, 880 bp, Unknown
  Bacterial polypeptide expressing nucleotide sequence isolated from the Sargasso Sea
tgaaggtgcaacccaactattattggcaactgatgaagatagagaaggagaaagtattagctggcatcttctgcaaatactaaagcctaaaataccaactaagagaatggtttttcatgaaattacaaaaaaggcaattaataaagctttagatcaaacaagagaaattgatatggaacttgttcaggctcaagaaaccagaagaatcttggacaggctttttgggtatgaattatctcctttactttggaagaaggtagcccctagattatctgctggccgtgttcaatcagtttctgtcagacttcttgttagaagagagagagaaagaagatcctttaaaaaagctagttactgggggattaaagcttccctggtaaaagataatattactttcgaaactaaattatttagtttaaagggtcaaagaatttctaatggttccgatttcgatgaacagaccggcaaattaaaacaaggaaataaatctttaataattggagaagataaagtagatgatttattgcagactttttcctccgaggattggttagtctcaaaaatcgaaaaaaaaccatccactcgtaagccagtccctccatttacaacaagtacattgcaacaagaagcaaatagaaagcttcggctgtccgcaagggaaactatgagatgtgctcaaggactctatgagagaggtttcataacatatatgaggactgattcagttcatctttccgaacaagctacaagagctgctagagaatgtgttagttctatgtatggaaaagaatatttatctaattcaccaagacaatttaattcaactgcaaggaatgctcaagaagcacacgaagctattaggccggctggagaggtattt

SEQ ID NO: 293406 - DNA, 751 bp, Unknown
  Bacterial polypeptide expressing nucleotide sequence isolated from the Sargasso Sea
gaaacagtgggtttaattacctacatgagaacagactcggtgagtttgtctgaggatgcggttcgagaccttagagctttcgttcaggaaaaatatggcgaagatcaggtgcctgagactgttagagcttttaaaactaagtctaagaatgctcaggaagctcatgaggctattcgaccaacatctttttttcgttccccagaaaaattgaaaccatatctgaatgaggaacaaagtaagctttatgagcttatttggaaaagagcaacagcaagtcagatgatacatgccaccatagatagtgttacagcagaatttgattgcgggggggtaggtgttttcagagctacgggctcaactgtcaaaaatccaggattcatgaaggtctactctaatgatgaggaaaccactttagattcagaacggttgccgtcccttgttgagggtgaaaaagttgaattcgagtctattgtggcagaccaacactttacagatcctccgcctcgctatggtgaggctagcttggtgaagaccctcgaagaatatggtattggacgaccctctacctatgccaccatcatagctactcttatcaatagggagtatgtggaactggaaaataagcgtttttttccgacggacgtgggaaagctggtttcaggatttttaacaaatcatttttctgtctatgtcgattatgaattcactgcccaaatagaggatgctttggatgctgtttcaagaggcgaga

SEQ ID NO: 293407 - DNA, 721 bp, Unknown
  Bacterial polypeptide expressing nucleotide sequence isolated from the Sargasso Sea
ttgcaacaagaggcaggaagaaaactacgatcttcagcgagaaagacaatgagtaccgcccaacgtctttatgaaaaaggttttattacatacatgcgtaccgattcaactaatttatctgatgaaggaattaatgctgctcgtaatgaaatcaaatcaaggttcggtaaagactatttacctgatcaagctaaaatttattcttcaaaagtaaaaaatgcccaagaagcgcatgaagctattcgaccagctggagttgaatttgtaaagacagaaaaagttagaactgagattgatgaagatgccgcaaacctttatgatctaattcgcaaacgaactcttgcctcgcaaatgacatcagctaaagtgaaacaaatttcagttactattgaaaatcaaaaatcagaatttagggcgaatggaaaggtgattctatttccaggatatatggcagcttatgtcgaaagtacagataaaagaagtggcatcacagaagatcaagagaccatcctccctaacttagctaaagatcaatctcttcaatgcaaccaacttgactctaatgaacattcaactaagcctcctgctagatttaccgaagcttcactagtcaaagaacttgagaacaaaggcatcggaagaccatcaacttgggcaagcataattgagactataataacaagaacttatgttaatagaaaacaagcaaaattaactccaa

SEQ ID NO: 293408 - DNA, 634 bp, Unknown
  Bacterial polypeptide expressing nucleotide sequence isolated from the Sargasso Sea
aatgaaacttgtaattgttgaatcccccgccaaggcaaaaacaatcaacaaatatctagggtctgactataacgttttagccagttatggacatattcgggatttaccagcaaaaaagggatccgtaaacccagagcaagattttatgatgacgtgggagcagagccctagttcaacaaagccgttccgggaaattaaagaagcactaaaaaaatcggacgagcttatcttggctaccgacccagacagggagggtgaagctatttcttggcatgtttggcgaatgcttgacgagcaaaaggtgctaaaagataaaactgttcaccgggtagtttttaatgaaattacgaaaaaagctatattggaagcaatgtcaaacccgcgcgatgtcgatcaagatcttgtggacgcatactttgcaagacgggcgttggactatttagttggatttaatttgtcgcccgtattatggcgtaaactgccgggctcacgttctgccggaagagttcaatctgtagcacttcgacttatcactgaacgggaagcagaaattgaaatttttatacctcaagaattctggactatcgatacgaaactgataactaataaagccgagagcttgcagcaaggctga

SEQ ID NO: 293409 - DNA, 898 bp, Unknown
  Bacterial polypeptide expressing nucleotide sequence isolated from the Sargasso Sea
aatgattcgaaaattgaaaaattttccttttaaaaataaagaggacattaataatgctattgagataataaaaaaatcaaattataaaatttcagatattaattctaaaatttacacaagaaatccaagtggtccctttactacatcaactttacaacaaacagcttcaagcaagttaggttttggtgcttcacgaactatgcaaattgcacaaagattatatcaaggaattgatattgatggagatacagtgggtttaattacttatatgagaaccgatggaacaaatatttcaaaagatgccataaatgactttagaaattttattgaaaagacttatggaaataattatttgccctctgagccaaataattattcaggaaaaaaagctaaaaatgcccaagaagctcatgaagctataagaccaactgatataacaagaactccagaactaatgaaaaaatttttaagcactgatcaagttaaattatacgatttaatatggtgtagatctttatcttctcaaatggaagcagctaaatttgatagaaaaactataacaatagtatctgaaaataatcttaatcaattcaaatgctctggttctacaataaaatttgatggttttttaaagcttacaagaattgacgatgaagatgaaaagataatacccgaggttaacaaagatgaagtttcaattgaagatttcattgacgaacaacattatacacaaccaccacctagattttcagaagcaagtttagttaaaaaacttgaagaactaggaataggtagaccatcaacctatgcaagtataatttctgttatttcaaacaggggatatgctgatattgtaaacaaacgttttttttcaacagatagaggcaaactgctatca

SEQ ID NO: 293410 - DNA, 947 bp, Unknown
  Bacterial polypeptide expressing nucleotide sequence isolated from the Sargasso Sea
tatctgaattaaacggaaaaaaaaatgaaaaatttagttttagaaataaagaagatataaatagcgctatatcaaaaatagaggaaaaaaaatatttaattaaggatataacttcaaaaatatatacacggaacccatcagggcctttcacgacttcaactctacagcaatctgcttcaagtaaattaggttttggtgcatctagaacaatgcaaattgcacaaaggctctaccagggtatcgaaatagatggggatactaaaggtttaataacttatatgagaactgatggtactaatatatctaaagaagctattccattatttagaaaatatatagagaaaaattatggaagcgactatcttcccgagcaagccaataattattctggtaaaaaagcaaaaaatgcacaagaagcgcatgaagcaatcaggccaacggaaataaaaaattctcctgaaagtataaaaaaatatttaagtacagatcagtataaattatatgatcttatttggtctagagcgctatcatcacaaatgcagccagctaaatttgatagaaaaactatattaattgcctctgatgatgggaagaacatattaaaatctagtggctcaactataaaatttgatgggtttttaaaacttcaaaaaattgatgaaaataatgatgaaaaaatattacctgaagtgtttaaaggaccaatcgaaataaaggaattcgttgatgaacagcattttacacaaccacccccacgtttttcagaagcaagtttagttaagaaattagaggaattgggaatcggtcgtccctcaacatatgcaagtataatttctgttatatctaatagaggatatgctgatatagtaaataagaggttttttcctacagatagaggaaaattactctctgcttttttggagaaacttttttcaagaatatgttga

SEQ ID NO: 293411 - DNA, 856 bp, Unknown
  Bacterial polypeptide expressing nucleotide sequence isolated from the Sargasso Sea
atgaatttagtaatagtagaaagcccagctaaggctaaaacaataaataaatacttaggaagtgagttcaatgtacttgcaagctttggtcatgttcgtgatttgccatctaaaaatggctcagtagatccagaaaataattttgcttttgaatgggaagtttcttcaacttcaaagaaacacatgaaagagatttatgatgcaagcgctgatgcatctactctttatcttgcaactgacccagatagagaaggtgaagcaattgcatggcacattgttgagctattaaataagaaaaaattattaaaagataaaactgtcaagagagtcgtctttagtgaaatcacaaagaatgcagtaaaaaatggaattgctaatccaagagatatagatactgatcttgtagacgcctatttagctcgaagagcactggattatctatttggctttaatttatcgccggtattatggagaaagttgccgggagctaagtcagcaggaagagttcaatctgttgctttaagattaatatgtgaacgtgaacttgcaattgagtctttcgaacctgatgagtattggaaaattagaggaaatgtaaaatttgaggatggctttaatatagatgctaacttactttctgtagaaggaaaaaaagtagaaaaatttagctttaagtctgaagatgatgcgaaaaaaattgtaaatttattctcggataataaatttgaaatactagatattacaaaaaaaccagcttcgagaaatccagaaccacctttttctacctcaacacttcaacaaacctcatcaagtatttatggttttggcgcttctcgaacaatgcaaatgcacaaaa

SEQ ID NO: 293412 - DNA, 541 bp, Unknown
  Bacterial polypeptide expressing nucleotide sequence isolated from the Sargasso Sea
tatgaatctagtcatagttgaaagccctgctaaagcaaaaacaattaataaatacttaggtgataattataccgttttagctagctatggtcatattagagatcttccctcaaaaaatggatccgttgatcctgatcaaaattttaaaatggaatgggaaattgatagcttttcaaaaaaatatttaaaagaaattactgatgctgcaagagactcttcaaaaataattcttgctactgacccagatcgtgagggtgaagcaattgcatggcatgtaaaagaatatctagatgaaaaaaaacttttaaaggataaagaaattgaacgtgtggtatttaatgaaataacaaaaaaagccgtcacacatggtattgaaaatccaagacagatagagcccttattggttgatgcatacatggctagaagagcattagattatttggttggatttaatatatcgccaatactttggactaaattacctggttcaaaatcagcaggtagagttcaatctgttgcactaaaattgattactgaaaga

SEQ ID NO: 293413 - DNA, 922 bp, Unknown
  Bacterial polypeptide expressing nucleotide sequence isolated from the Sargasso Sea
catggcatgtaaaggaatatttttgaatgagaaaaaactacttaaagataaagaggttgaaagagttgtgttcaacgaaattactaaaaaggctgttacttttggaattgaaaacccaaggcaaatcgagcccttgttagttgatgcctacatggcaagaagagcacttgattaccttgttggttttaatatttcaccaattttgtggactaaacttcccggatcaaaatcagcaggtagagtgcaatctgttgctttaaaattaataacagaaagagaacatgaaattgagttatttaatccagaagagttttggactttaagtttgaaatttcaagatgaaaaaagaaattcaattactgctagcatctatcaattagatggacaaaaaattgagaaatttacttttaaaaaaaaagaaaatattgaaaaggcaatctctggattgaagaataaaaagtttaatataagtgatatttcatcaaaaattgttaatagaaatccatctggtccatttacaacttctacactccaacaagttgcttcaagtagattgggatttggtgcttctagaactatgcaaattgcacaaaaactttatcaaggaattgaaattcagggagatacagttggtttaataacttacatgagaacagatggtacaaatttatcagctgacgctattagtgattttagaaattttattaaaaaaagttatgggtatgagtatatacctgaaaaagctaataattattcgggtaaaaaagccaaaaatgcacaagaagcacatgaagctattagacccacagatataaacagatctcctgaagatgttaaaaaatatttaagtactgaccaaaataaattgtacaatttaatatggagtagagctctatcatctcaaatgttttctgcaaaattt

SEQ ID NO: 293414 - DNA, 889 bp, Unknown
  Bacterial polypeptide expressing nucleotide sequence isolated from the Sargasso Sea
gcctatagagctagaagatttcttgataaagttattggctttgaattatcacccttgctatggaaaaaaattgccagaggactatcagctggaagagttcagtctgtagcattaagagttttagatgaaagagaaagattaatacaagagtttatcccagaagaattttgggaagtttctatgactcttataaaagataaattaataatacctttttctttgaatagaaaaaaatctcaacctttgctcaaagaggaggaggcaagaaatatttatgaacttattcaaaactcagatctaacaataaatgaaataatacaaaaaccagtaaaggtaaagccaagagctccattcataacatctactttgcaacaggccgcaagtacaaaattaagttttactgttaagagaaccatgcgagttgctcaaaaattatatgaggctggtcacataacatatatgagaactgatgctccaagtttgagcaaagaatcaatacaagatgcaagaaacttcataggagagagagttggtgaaaaatacttaactaacgctcctagaatttattcaagtactgaaaatgctcaagaagcccatgaagccattaggccaactaatgcttatatgacagcagatgatctaatgaatcaaacagaagaagagaaaaggttgtatcaattaatttggcaacaatatatagcttctcaaatgcctgatgcagagtacctatcaacctcagctaaaattaatattgaagaatatactttttctgcaaaggggagagaggttgttttcgatggttatacaaaaatctcgcaatcaataaaatcagatgatgaagatatcttacccccgttgaatgaaggagaaagtcttaatttgaatgaaa

SEQ ID NO: 293415 - DNA, 597 bp, Unknown
  Bacterial polypeptide expressing nucleotide sequence isolated from the Sargasso Sea
tatgaatctagtcatagttgagagtccagcaaaagcaaaaacaattaacaaatatttaggtgataattatactgttttagctagctatggtcatataagagatttgccttctaaaaatggatcagttgatccagatcaaaattttaaaatgaaatgggaagttgatagtttttctaaaaaatatctcaaagaaattattgatgctgcaaaagaatcttctaaaataattctcgctacagacccagatcgtgaaggtgaagctattgcttggcatgtaaaagaatatttagatgaaaaaaaacttttaaaagataaagaaatcgaacgtgtagtttttaacgagataacaaaaaaagctgttacacatggtatagaaaatccaagacaaattgaaccgcttctagtagatgcctacatggcaagaagagctcttgactatctagtaggttttaatatttctccaattttatggactaagttacctggttctaagtctgctggtagagttcagtctgttgctctaaagctaataactgaaagagaacatgagatagagctatttaatcctgaagaattttggactttaagtgttaagtt

SEQ ID NO: 293416 - DNA, 898 bp, Unknown
  Bacterial polypeptide expressing nucleotide sequence isolated from the Sargasso Sea
ggagaagcaatagcttggcacgtaaaagagtttttgaatgagaaaaaacttctgaaggataaagaagtagaaagagttgttttcaatgaaattactaaaaaagcagtaactaatggaatagacaatccaagaaaaatagaaccacacctagttgatgcgtatatggctagaagagctttggattatttagtaggttttaacatctctccaattctatggactaagttgccaggctctaaatctgcaggacgagttcaatcagttgcgttaagactattaactgagagagagcatgaaattgaagtttttcagccagaagaattttggacattgaatataatttttacaaataacaaaaatgaaaaaataaatacaaatatttcacaacttgatagcagtaaaattgaaaaattttcattcaaaaaaaaagaagatattaataatgctttactacaaataaaaaataaaaaatatattattactgacataagttcaaaaatatatagcagaaatccatcagggccatttacaacatctacattacaacagactgcttcgagcaaacttggttttggtgcctcaagaacaatgcaaattgctcaaagattatatcaaggcatagatattgaaggagaaactgtaggtttaattacatatatgagaacagatggaaccaatatttcaaaggacgcaatatcttcttttagagattttattacaaaaaattatggtgataaatatttgccaaaccaacctttaaattacagtggtaagaaagcaaaaaatgcgcaagaggctcatgaagcaatacgtccaacagaaattattagaaaaccagatgaaattaaaaaatacttaagtaatgatcaatataaactttataatttaatatggtcta

SEQ ID NO: 293417 - DNA, 934 bp, Unknown
  Bacterial polypeptide expressing nucleotide sequence isolated from the Sargasso Sea
ttagttatagtagagtcagctacaaaagcaaagacaattgaaaaaatactaggagaagattataaagttgtctcttgtgttggtcatatatctgatctacctgttagtgagataggagtagatgtagataatgattttaaaccaaaatatataataccagatgaaaaaaaacaggttattaaagacctgaaaaaacatgttaaacaatctgaaaaagtttggctagctagtgatgaagatagagaaggtgaggcaattgcttggcatttatatgagaatcttaatctaagtgataaagaatctgatagaattgttttccatgaaattaccaaaaatgctatattaaaagctttagacaatccaagatcaattgattataacctagttaatgctcaacaggctagaagagttttagatagacttgttggatatgaattgtctcctgttttatggaaaaaagttaagactggactatctgcgggaagagttcaatcagtttgcgttagagtaattgtagaaagagaaagggaaatccaaaagcatgaatctaaaagtaccttcaagactcaaggtatttttaataatctagagggaaaatcaatcaaatctgaacttgacactaggtttaatacagatgaagatataagaaactttttaattaaaaatgaaaatgcaacttttcatattaactctttgtctaaaaagccatcaaagagatcaccaactcctccttttacaacttcaactcttcaacaagaagcatcaagaaaacttggttttggagtttctaggacaatgagtactgctcaaaaactatatgaagccggacttataacttatatgagaacagatagtgttactatttcaaatgaagcaaaagagtcaataattaataagataaaatcaaaatttggtgacaaattgtttactcaag

SEQ ID NO: 293418 - DNA, 523 bp, Unknown
  Bacterial polypeptide expressing nucleotide sequence isolated from the Sargasso Sea
tatgaatttggtcattgtagaaagtcctgctaaagctaaaacaattaataaatatttgggagatgattataaagttttagcaagttatggtcatataagagacttaccgtctaaaaatggttcagttgatccagatcaagactttaaaatggaatgggaagttgacagtttttcaaaaaaatatcttaaagaaattactgatgcagcaaaagactcatctaaaattatattagctaccgaccctgatcgtgagggtgaggctattgcctggcatgtaaaagaatatttaaatgaaaaaaaacttttaaaagataaagaaattgaaagagttgtatttaatgagataactaaaaaagctgtcatacaaggaattgaaaatccaagacaaattgaacctcatctagttgatgcttatatggctagaagagctttagattatttagttggttttaatatttcaccaatactttggacaaaactacctggctcaaatctgcaggtagagttcagtctgttgctttaa

SEQ ID NO: 293419 - DNA, 961 bp, Unknown
  Bacterial polypeptide expressing nucleotide sequence isolated from the Sargasso Sea
caaacagatgccaaatcaaacaaacatgttaaagatatcacagacgcattatcccaagccgataaattaatcctcgcaaccgaccccgaccgagagggagaagctataagctggcatgtgcaagagcttgttaaatcgaaaaaatccctgagagatatcccaagtgagcgggttgtttttaatgaaataacaaaatcagcaattttatctgcaatggaacaaccacgcgagattgattatgatctggttaatgcctatcttgcacgccgcgctttagattatttagttggttttaatctctctccggtattatggcgcaagttacctggtgcgaaatctgctggccgtgtgcaatcagtagccttaaggttaatctgcagcagagaagcagagatagaagcgtttgattcaaaagaatattggtcgatagatacaaaatttaaaacagaagataataagcatctctccgctcggctggttggccttaattccaaaaaagttggaaagctcgacattacatctgaggaacaagcaaaacagattgagcaacagataaaggcatcttcatttttgctttcctcggttgatacaaaacgaacaaaacgccagccatctgcgccatttacaacttctacgctacaacaagaggcctctcgcaaactcgggttttctgcgtcacggacaatgcaaatagcccagcgattatatgaaggcgtacaagtagggcgagagaccaccgggcttattacctatatgagaacagatggtgtgcagatgagcaatgaagccattagcgcacttcgtgatgaaattggcaatatttatggcgggcagtatttgcctgaaaagccacgcttctacaaaacaaaagcagccaatgcacaagaagcacatgaagcggtcaggccgacaagttttgcacgacacccaaatgatattcgctcttatctagattattgat

SEQ ID NO: 293420 - DNA, 811 bp, Unknown
  Bacterial polypeptide expressing nucleotide sequence isolated from the Sargasso Sea
caccggtggcgatttcgatgagagcaccggtgccatcaaggccggaaccaaggtcaagctgctcagcgaagccgatgcccaagggttgctgaaggccatcgatggcaaaacctggtcggtggccgacgttgaggaaaaacccaccacccgccggccggcaccgcccttcactaccagcaccctgcagcaggaggccaatcgcaaactgcgcctctccgctcgcgaagcgatgcgcacggcccagggcctttatgagcgcggctacatcacctacatgcgcaccgactcggtgcacctcagcgagcaggcgattacggcagcccgcagctgcgtgagcgataagtacggcgccgatcacctcagcccgcaaccgcggcaatacaccaccaaaagccgcaatgcccaagaggcccacgaggccatccggcccgcgggttctagcttccgcacgccagctgaatccggtctcaagggcctcgatctctctctctatgaactgatctggaagcgcaccgtcgccagccagatggccgatgcccgcctgaccatggtcagtgcccagatcgaggtggagaacgcccgtttccgcgccagtggcaagcgcattgatttcgccggcttcttccgcgcctatgtagagggcagcgatgaccctgatgccgcccttgaaggccaagaggtgctgctgcccaccctgcgcagcggcgattaccccagctgccagagctgcgaaccccacggccaccagacccagccccccgcccgtttcagcgaagcggccttggtgaagatgctcgagaaagagggcatc

SEQ ID NO: 293421 - DNA, 803 bp, Unknown
  Bacterial polypeptide expressing nucleotide sequence isolated from the Sargasso Sea
aatgaacttagtaattgttgaaagtccagctaaagcaaaaactataaataaatatttaggaaaagattatttggttttagcaagttatggccacataagagatttgccttcaaaaaatgggtcggtggatcctgacaataaatttcaaatggaatgggagattgactctttttcaaaaaaatatttaaaggaaattacaaatgctgctgaagactctgacaagattatattagcaacagatccagatcgagaaggtgaagctatcgcttggcatgtaaaggaggttctagagaaaaagaaattactcaaagataaaaatttggaaagagttgtctttaatgaaattactaagaaagcaattcttgatgctataaaaaatccaaggcaaattcatctacctttagttgaagcttacttagctagacgagccttagattatcttgttggatttaatatctctccaattctatggactaaacttcctggatcaaaatcagcaggaagggttcaatctgtagccttaaagcttatcactgagagggaaaaagaaatagagttatttaaaccagaagagtattggacacttacatcagattttacgaacaaagataataaaaatattttttcaaagttaagtttatttaatggagaaaaaattgaaaaattttcttttaaaaataaagaagaaatacaaaaagcagttgatcttatcaataaaacaaaatttaaaattgcagatgtgaacacaaaaatatttagacgaaaccccctagccccttttacaacatcaactttgcaacaaa

SEQ ID NO: 293422 - DNA, 613 bp, Unknown
  Bacterial polypeptide expressing nucleotide sequence isolated from the Sargasso Sea
tatgaatctagtcatagttgaaagtcctgcaaaagccaaaacaattaataaatacttaggagataattatactgttttagctagttacggtcatattagagatttaccatcaaaaaatggttcggttgatccggatcaaaattttaaaatggaatgggaagttgataacttttcaaaaaaatatcttaaagatattactgacgccgcaaaagaatcatctaaaattattttagcaacagatcccgatcgtgaaggagaagccatagcatggcatgtaaaggaatatttgaatgagaaaaaactactcaaagataaagaggttgaaagagttgtgttcaacgaaattactaaaaaggctgttacttttggaattgaaaatccaaggcaaatcgagcccttgctagttaatgcctacatggcaagaagagcacttgattaccttgttggttttaatatttcaccaatattgtggactaaacttcctgggtcaaagtcagcaggtagagtgcaatctgttgctttaaaattaataacagaaagagagcatgaaattgagttatttaatccagaagagttttggactttaagtttaaaatttcaagatgagaaaaaa

SEQ ID NO: 293423 - DNA, 838 bp, Unknown
  Bacterial polypeptide expressing nucleotide sequence isolated from the Sargasso Sea
atgagagttgcacaaaaattgtatgaaggtggccttattacctatatgagaactgatgcaccaagtctaagcaaagaatcgatcaacgaagcaagaaattttgtaaatgataatcttggtgaaaattacctaactaattctccaagaatatattcaggttctgaaaatgctcaagaagctcatgaagcgattagaccaacaaattcattcctaacacctaaagatgtaatgaatctatctgaagaagaatctcgactttatactttaatttgggaaagatttattgcctcacaacttcctgatgctgaatatttatccacatctgcaaaagtttatgttggtgaaaaaatatttgttgctagagggcgagagcttgtctttgatggttttacaagagtacttaagacttcctccaaggaagaagatattttaccttcacttcaagagggccaattaattagcatggatcgtgttgaactagagcaaaaatttacaaaacctccagcaagatattcagaggctgctttagttcgtgagcttgagaaaaagggtattggaagaccttctacttatgcaaacataatttcaacaattcaagatagaggatacgttcaaattgaaaataagagattttttgtaaaaaaaattggacatattgtagctgaaagactgattgaaagttttcatgacattatggattatgattttactgcaaatctcgagaacagtttagatgaggtagcaaatggagaagcagactggagaaatgtattagataatttttataagtcttttcaaaacgatctcatatcagcttcagatgaagattccgggatga

SEQ ID NO: 293424 - DNA, 800 bp, Unknown
  Bacterial polypeptide expressing nucleotide sequence isolated from the Sargasso Sea
tgccctaaaagaagataatgagctgatattagctacagatccagatcgcgagggtgaagccataagttggcatctcgaagaaacactgcgaaaaaagcgcgttataaacagtgacacaccggtgagcagagttgtttttaacgcaatcactaaatcagctgtatcagatgcgatggcgaatcctcgagaaatagatgcaccattagtgcatgcgtatcttgcacggagagctttggattatcttgtcggtttcaatctatcgccagtgttatggcgtaaattgcctggggctaggtcagccggaagggtacagtcagtttgcttgcgattaatcgtagaaagagaaatagaaatagaagctttcaaaccaaaagaatactggtctgtcaaagcatctttaaaaactcctagaggacaagtatttaaaggaaaactaataaactttgcagggacaaaattagataaatatgacttaaaaagtagttcagaagcagagttagcagcagaggcaatcacaacaagagaccttgttgttgcctcagttgaaagcaagccgactagtagaaacccattcgctccattcatgacatctactctccaacaagaagccggaagaaagtatggaatgggtgctagacaaacaatgcaagcagctcagaggttatacgaagctggccatattacatatatgcgaacagacggaattgatatggcaccagaagctgttacctctacaagagaagctataaaagagagatatggtgataaatttcttccagcatcgcccaggttctacaaaa

SEQ ID NO: 293425 - DNA, 898 bp, Unknown
  Bacterial polypeptide expressing nucleotide sequence isolated from the Sargasso Sea
aaaggagatatattaaattcaaatattgttttgataaatagctcaaaagttgaaaagttctcttttaaaaataaagaagatataaatagtgcgattgaattaattaaaaaatcaaaatataaaatttcagatataagctctaaagtgtatacaagaaatccacttggcccatttactacatcaactctacaacaaacttcttcaagcaaattaggttttggagcatcaagaactatgcaaattgcacaaagattgtatcaaggtatagatattgagggtgatacggttggattaatcacttatatgagaacagatggtacaaatatttcaaacgatgcagtaaatgattttagaaaattcataaaaaatttatatggtaataattatttgcctaatgaacctaataattattctggtaaaaaagctaaaaatgctcaagaagctcacgaggccataagaccaactgatataaatagaacacctgaatcgttaaaaaaatttttaagtacagatcaaattaaattatatgatttaatttggtctagatctttatcatcgcaaatggaatctgcaaaatttgatcgaaaaactattacaatagtttcagatgataatttaaaccaatttaaaagctcaggatcaacaattaaatttgatggttttttaaaacttacaagaattgatgaaagtgaagaagaaaaaattcttcctgatgtaaataaagaacaagtttcaataaatgaatttattgatgatcaacacttcactcaaccacctcctagatactctgaggcaagtttggtaaaaaaacttgaagaactaggaattggaagaccttcaacttatgcaagtattatttctgtcatctcaaatagagggtatgctgatattattaata

SEQ ID NO: 293426 - DNA, 884 bp, Unknown
  Bacterial polypeptide expressing nucleotide sequence isolated from the Sargasso Sea
tgcccgggtaaggaaaaggtcgtcagcgagctaaagcgcctggccaagaatgccgaccacatctatctggcaacggatttggacagggaaggggaagccatcgcctggcaccttcaggagaccattggcggcgagccggaaaagtatcgccgcgtggtgttcaacgaaattaccaagcgggccatccaggaagcgttcaaggaccccggtgagctggataccaaccgggtaaatgcccagcaggcgcgccggttcctggatcgcgttgtgggttacatggtttcgccgctgctctgggccaagattgcccggggcctgtctgctggccgggttcagtcggttgccgtgcgcctgatcgttgagcgtgagcgggaaatccgcaagttcgtgccggaggaattctggcagctgcacgcagacctgaccgcagaaggaaccagggacccggttcggttcgaggttacccgctacaacgacaagccctaccgtccggttaatgatgttcagagcaaggaacatgttgaccgtctgaaagccggtagcttcaaggtggccaagcgggaagacaagccaacccgttcacggccctctgctccctttattacctcgacactgcagcaggcggcgagcaaccgcatgggcttcagtgtcaagaaaaccatgatgctggcccagcgcctgtacgaggcgggctacatcacctacatgcgtacagactcgaccaacctgagccaggatgccgtaaccggctgtcgcgagtttattcagaaacagttcggtgatcgctacctgcctgagaagccccgcgtgtacggtagcaaggaaggcgcccaggaggcccacgaggccatccggcctactgacgtatcccgcaggcctaccga

SEQ ID NO: 293427 - DNA, 883 bp, Unknown
  Bacterial polypeptide expressing nucleotide sequence isolated from the Sargasso Sea
aggaaataaatcgataataattggagaaaataaagtgaatgacttattgaagactttttcctccgaggattggttagtctcaaaaattgaaaaaaaaccatccactcgtaagccagttccgccatttacaacaagtacattgcaacaagaagcgaacagaaagcttcgtttgtctgcaagggaaactatgagatgtgcacaagggctttatgagagaggttttattacatatatgaggactgattcagttcatctttctgaacaagctacaagagctgctagagaatgtgtgagttcaatgtatggaaaagaatatttatctaaatcaccaagacaatttaattcaacagctagaaatgctcaagaagcacacgaagctattaggccggcaggtgaggtatttaaaacaccaaaggaaactaatctgactggtagagacttatctctttacgatttgatttggaaaagaactgtagctagtcaaatggccgaagccaggttaacaatgattaatgctgaaattagcgtaggtgatggaatatttaaatcgagcgggaaaagtattgatttcgccggattcttcagagcttatgttgagggaagcgatgacccaagttcatcccttgaacaacaggaaattattctccccaacctatctactggaacaagtcttgaagttactaacaagcaatctacttttcatgaaaccaaaccgcctgcaagatatacagaggctgcattagttaaagttcttgaaaaagaagggattggaagaccttctacctatgcgagcattattgggacaattgtggatagaggttatgcaaatatatcttcaaatactttggctccaacgtttacagcttttgctgttaccgctcta

SEQ ID NO: 293428 - DNA, 970 bp, Unknown
  Bacterial polypeptide expressing nucleotide sequence isolated from the Sargasso Sea
agagcaccatttataacatcaactcttcagcaggccgctagctcaaagttaggttttggggtctcaagaacaatgcgagttgcccaaaagctttatgaagctggaagaatcacttatatgagaactgatgctcccagtttaagtaatgattcaattgaagatgcaagattatttattaaagctactctagctgatgaatacctgaccgaaaaaccacgaatatactcaggtaaagaaaatgctcaagaggcgcatgaggcaataagaccaacaagcgcaagtttgacgcccgaaaaactcactggtcattcagaagaagaagttaaattatatgacttaatttggagacagtttattgcatgtcaaatgcctgatgcaaaatatctatcaattaatgcaaaagttgctcttgaagattatgttttcagtgcaagaggaagagaggtaatttttgatggttatacaaaaatatcttcacaaaatgttaaaaaagcagatgaagaaaatcttccaagtttagaagaaggacaggttttaaaattggttgaagtaaagaacgagaaaaagtttacaaagcctcctgctcgattctctgaggcagcccttgtaaaggagcttgaaagcaaaggaataggaagaccatcaacatatgcagcaattatttctacaatccaggctagaggttatgtcaagcttgaaaataaaagattctttgtaaataaaattggcttgattgtttctgacagactgatagaaagcttcaatgagattatggattatgattttacagctaatctagagaatgagcttgatgaaatagcatctggaaatcttgagtggaaatctgtattaaataagttttatcaaacatttcaagacgatcttaagaatgctagatccgctgaggatggaatgaagccaaatgaaccaactgaaacaaacattatttgtccctcttgcaacaagagta

SEQ ID NO: 293429 - DNA, 796 bp, Unknown
  Bacterial polypeptide expressing nucleotide sequence isolated from the Sargasso Sea
tgttggttttatatatcaccaattttatggactaagcttccaggttcaaaatctgcaggtcgagttcagtctgtagctcttagattggtgactgaacgtgaacatgagattgaacttttcaaaccacaagagttttggacgatttcatgtaattttaaaaatgaagaaaataaaattattaaatctaaactctcattttttaataaagacaaaattgagaagttttcttttaagaaaaaagtggagtcagaaaatgctttgaaagaaatttattctaaatcttatcaaataactgatgtttcatcaaaagtttataaaagaaatccattagcaccttttacaacgtcaactttacaacaaacagcttcaggtaaatttggatttggcgcatcaagaactatgcaaatagctcaaaggctgtatcagggaattgatatcgatggtgatacaattggattaataacctacatgagaacagatgggacccagatttctaaagatgctattgatgattttagaaaatttataaacaatacgcatgggagagaatatcttccagaaaatcccaatagttatactggaaaaaaagctaaaaatgctcaagaggcgcacgaagcaattagacctaccgatgtttcaaaaaaaccaagtgatatgaaaaaatatttaagcacagatcagtcaaaattatatgagttaatttggaatagagcgctttcttctcaaatgacacctgcagaattcgataggaaaagtattataatagagtcatctgataaaaaagtaggatttaagg

SEQ ID NO: 293430 - DNA, 958 bp, Unknown
  Bacterial polypeptide expressing nucleotide sequence isolated from the Sargasso Sea
cataacatatatgagaacagatgctccaagtttgagtaaagaatccattcaagatgcaagaaattacattggtgagaggattggtgaaaaatacttaactaatgctcctaggatttattcaagcacagaaaatgcacaagaggcacatgaagcaataaggccaacaaatgcttaccttactgccgatgatctaatgaatcacaccgaagaagagaaaagactttatcttttaatttggcaacaatatatagcatcacaaatgcctgacgctgagtatttatcgacatcagcaaaaattaatattggtgaatacaccttttctgcaaaaggcagagaaattgtttttgatggatatacaaaaatatcacaaccaagtaaatcagatgacgaagatattttaccgcctcttagggaaggggaagaactaaaacttaatgaagtacatcttgatcagaaatttacaaagccacctgcaagatattctgaagctgctctagtaaaagagcttgaaaagaaaggcattggaagaccttctacttatgcaaatataatttctactatccaagatagaggttatgttgagattcagaatagaagattttttgttaaaaaaattggccatattgttgcagaaagactaattgagagttttgatgacatcatggactatgaatttactgccaatcttgaaaataatcttgatagtgttgctagaggtgagcttgattggagaaatgttctagatgatttctataacgcttttcaaaaagatctagtttctgcttcagaagaaaatggaatgaggggtaatcaaccaacccctacaaacattacttgtccttgtggaaaaacaaatatggttattaggaattcttcaaatggagtttttctaggatgtatgggatatcaaaatgttggagatgataaatgtaaagaaacacttaatttagtatctggt

SEQ ID NO: 293431 - DNA, 862 bp, Unknown
  Bacterial polypeptide expressing nucleotide sequence isolated from the Sargasso Sea
caggctcaagaaacaagaaggatcttagataggctttttggatacgaattgtctccattactttggaagaaagtagcccccagattatctgctggtcgtgttcaatcagtatctgtaagacttcttgtaagaagagagagagaaagaagatcctttaaaaaaggatgttactgggggatcaaagcttctttagtaaaagacaatattactttcgaaactaaattgtttagtttaaaaggtcaaagaatttctaatggttccgattttgacgagcagactggcaaattaaaacaaggaaataaatctttgataattggggaagaaaaggtaaatgatttaatgaaggctttttcttccgaggattggttggtctcaaaaattgaaaagaaaccatctattcggaagccagtccctccatttacaactagtacattgcaacaagaagcaaacagaaaacttcgtttatctgcaagagaaaccatgagatgtgctcaaggtttatatgagagaggtttcataacatatatgagaactgattcggttcatctttctgaacaagctataagagctgctagagaatgtgtaagttccaagtatggaaaagaatatttatctaattctccaagacaatttaattcaaccgcaagaaatgctcaagaagcacacgaggctattagaccagccggtgaggtctttaaaacaccaaaggaaacaaacctaataggtagagacttatctctttacgacttaatttggaaaagaactgttgctagtcaaatggctgaagctaagctaacaatgatcaatgctgaaattagtgttggggatggattatttaaatcgagcgggaaaagtattgatt

SEQ ID NO: 293432 - DNA, 778 bp, Unknown
  Bacterial polypeptide expressing nucleotide sequence isolated from the Sargasso Sea
aaagctgattttgaatcatctaacggtaaaataataaaggcccaatcattaaaaagttttttagattctaatgaagtaaaatcttttttacaaaaaaataaacaatcaaaatttataatttctgaaaaaaacatcaatcctgtaaagaaatcacctactgcaccttttattacgtcaacccttcaacaggaggcatctaggaaactttatttctctgtaagcaagacgatgaatattgctcaaagattatatgaatctggtcttataacttatatgagaacagatagtgttaatatttctaaggaagctcagttatcaattttagaattaataaaaaataaatatggtgaaaaatatgcaaacccaagaaattataaatctaaaagtaaagttgctcaagaagctcacgaggcaattagaccaactgatttttcaaagtcaagtttagatggtgattatgaccaaaagcgcctttacgaattgatctggagaaggactgtgtcatctcaaatgactgactctcaaattgaaagaactaacttaaaaatcaattcagttgatgatgaaaatattttttctgcaaaaggagaagttttaatttttgatggatttttaaaaatttatattgagggagttgataacattgaagaggaatctgaaggaattatacctgatgttaaggtaggggatgaaataaaattaaataaaatagtttcaactgaaaaattttcaagaccaccatacaggtatactgaagcctcgctagtaaaaaaactga

SEQ ID NO: 293433 - DNA, 817 bp, Unknown
  Bacterial polypeptide expressing nucleotide sequence isolated from the Sargasso Sea
tatgaatctagtcatagttgaaagccctgctaaagctaaaacaattaataaatatttaggtgataactataccgttttagctagctatggtcatattagagatcttccctcaaaaaatggatccgttgatccagatcaaaattttaaaatggaatgggaagttgatagcttttcaaaaaaatatttaaaagaaattactgatgctgcaaaagattcttcaaaaataattcttgctactgacccagatcgtgagggtgaagcaatagcatggcatgtaaaagaatatttagatgaaaaaaaacttttaaaagacaaagaaattgaacgagtggtatttaatgaaataacaaaaaaagctgtcacacacggtattgaaaatccaagacagatagagcccttattagttgatgcatacatggctagaagggcattagactatttggtgggatttaatatatcaccaatactgtggactaaattacctggttcaaaatctgctggtagagttcaatctgttgcactgaaattgattactgaaagagaacatgaaattgaattattcaagcctgaagaattttggactttaagtattaattttcaggatataaacaaaagtaagattacagcaagtatttctcaacttgatggagaaaaaattgaaaaattttcatttaaaaataaagagaaaattgaaaaggcaatttcaaatattaagaccaaaaaatttaacataactgatatttcctcaaaagttgttagcagaaatccctcaggggcatttactacttcaacacttcagcaagttgcttctagtaga

SEQ ID NO: 293434 - DNA, 872 bp, Unknown
  Bacterial polypeptide expressing nucleotide sequence isolated from the Sargasso Sea
tgaaaaaaaattacttaaagataaaaaaatagaaagagtagtatttaatgaaataacaaaaaaagcagtaactaatggtatagaaaatcctcgatctatagagccacaactagttgatgcttatatggcacgaagagcattagactaccttgttggttttaatatttccccaatcctctggactaagcttcctggttcaaagtctgctggacgagtgcagtcagttgcattgagacttcttactgaaagagaacatgaaattgaaaattttaagcctgaggaattttggaaactatttgttgacttcaaaaatgatgatggaaatattattaatacatatccttttcaagttaataataaaaagatagaaaagttttcatttagaaataaaaacgatattaatgatatagtagttgatattaaaaaaaaagaatatgagttaacagatattacttcaaaaatttataatagaaatccatctggaccttttaccacttccactctacagcaatcttcatcaagtaaattgggatttggtgcttccagaactatgcaaatagctcaaagactatatcaaggtatagatatagaaggtgaaacagtcggtttaattacttatatgagaacagatggtacaaatatatcaaacgaagctatatctgtatttagaaattacattgaaaaaaattacggtaaaaattatttaccaaatcacgctttaaattattctggtaaaaaagcaaaaaatgctcaagaagcacacgaagctataaggcctacagatattgaaagaaatcctgagagtttaaaaaaatatttgagcacagatcaatttaaattatataatttaatatggtctagagctttatcgt

SEQ ID NO: 293435 - DNA, 966 bp, Unknown
  Bacterial polypeptide expressing nucleotide sequence isolated from the Sargasso Sea
aagataaaaaagttgaaagagttgtttttaatgagatcacaaaaaaagctgtaaccaatggaatagacaatcctagaaaaatagaatcaaatttagttgatgcatatatggcaagaagagctttggattatcttgtgggctttaatatatccccaattctttggactaaattgccaggatcaaaatctgcaggtagagtccaatctgtagcattaagattgttaacagaaagagagcatgaaattgaacaatttaatccagaagagttttggaccttaaatgtaaattttaaaacgttaaaaggatatattttaaactcaaatttagttttacttaataataaaaaagtagaaaaattttcctttataaataaagacgatattaataaggcaatcgaaataataaaaaattctaaatataaaatttcagatattacatctaaaatattcactagaaatccacttggtccatttactacttcaacattacaacaaacatcctctagtaaattaggttttggagcctctagaactatgcaaatagcacaaagattatatcaaggaatagatatcgacggggatactgttggtttaattacctatatgagaacagatggaacaaatatatcaacagatgctatctctgaatttagatcttttattcaaaaatcatatggtgaacaatatgttccaaaagaacctaataattattcaggtaaaaaagctaaaaacgcacaagaggcacatgaagctataagaccaacagatatatcaagaacacccgataatatgaaaaagtttttaagttcagatcaaattaaattatatgatcttatatggtcacgagctctttcgtcacaaatggaggcagctaaatttgatagaaaaacaatcacaattatttctgatgataatttaaatcatttgaaatgttctggatcaacaattaaatttgacggtttttaaa

SEQ ID NO: 293436 - DNA, 661 bp, Unknown
  Bacterial polypeptide expressing nucleotide sequence isolated from the Sargasso Sea
tatggcaaaatcactggtcatagtcgagtcaccagccaaagcgaaaacgataaataaatatctcggtaaggattttatcgtaaaaagttcggttggccacgtgcgagatcttccgacgaaggcattaggtaaagtagagcctaaaaaaccggctaaagaactcaaaactttaagcgaagaagagcgccaagaatatcttcgccggcacgaatatttgaagcttgtagacagaatgggggtggatccagagaaagactggaaagcccactatcaagtgctacagggtaaagagaaagtcgttaacgaacttaaaaagctagctaaagacgctgacaccatctatctcgcgaccgatttggaccgcgagggggaagcgattgcatggcacttacaagagttgttaggcaaaaaggataagacctatcaacgagtagtatttaacgaaattaccaagaacgcgattcaagatgcgttttctgcgcctggtgagctaaacatctctcgcgtaaacgcacagcaagcacgccgtttcctagaccgtgtggtaggtttcatggtatcgccattactgtggaaaaagattgcccgaggcctttcagcaggacgtgttcaatcggtagcagtaaggcttgttgttgagcgtgagcgtgaaattaaagcg

SEQ ID NO: 293437 - DNA, 964 bp, Unknown
  Bacterial polypeptide expressing nucleotide sequence isolated from the Sargasso Sea
gtgttttttaacgagattacaaagaaagcaattcttgacgctattaaaaatccaagagaaattcatttacccttagttgaagcttatttagcgcgaagagctttggactatcttgtgggttttaatatatcaccaatcctttggacaaaattacctggatcaaaatcagcaggaagagttcaatcagtagccttaaagcttattactgaaagagaaaaagaaatagaattatttaaaccagaagaatactggactctttcatcggactttacgaacaaaaataatcaaaatattttttcaaaattaagtttatttaacggagaaaaaattgaaaaattctctttcaaaaataaagaagaaatacaaaaagcagttgatgtaatcaataaaacaaaatttaaaattgctgatgtgaatacaaaaatatttagacgaaaccccctagctccttttacaacatcaactttacaacaaactgcttcgggaagatttgggtttggagcttccagaacaatgcaaattgcacaaagactttaccaaggagtagatatcgagggtgaaacaactggattaattacttatatgagaactgatggaactaatatttcaaaagaggcaattgatgactttaggaaatttattactaaagattatggtgataaatatttaccagaagcaccaaatagttatacgggaaaaaaagcaaagaacgctcaagaggcacatgaagcaattaggccgactaatataagtaggaaaccttctgatataaaaaaatatgtaaatgtagatcaatttaaactttatgaattaatttggagtagagccttatcatctcaaatgactccagcagagtttgatagaaatacgataattatttcttcagatgataacaaaattaacttcagagcaagtggatcagtagtaaaatttgatggttttctgaaagtttatcaggtcaaga

SEQ ID NO: 293438 - DNA, 953 bp, Unknown
  Bacterial polypeptide expressing nucleotide sequence isolated from the Sargasso Sea
aaaaaactttctgaaagataaagaagttcaaagagttgttttcaatgaaataactaaaaaagcagtaattaatggaatagataatccaagaaagatagagccacacttagttgatgcctatatggctagaagagctttagattatttagtaggatttaacatatcccctatcctatggactaaattaccaggatctaaatctgcaggacgtgttcaatcagttgcattaagattattaacagaaagagagcatgaaatagaaatatttaaaccaaaagaattttggactttgaatgtaatttttacaaatagaaaaaatgaaaaaataaatacagcaatttcacatcttgatgccaataaaattgaaaaattttcattcaaaaataaggaagatattaacaatgcactatctcaaataaaaaataaaaaatataatattacagatataagctcaaaaacttatagcagaaatccatctggaccttttactacatcaacattgcagcaaacagcatctagcaaacttggttttggagcatcaagaactatgcaaatagctcaaagattatatcaaggtatagatattgaaggtgaaactgttggcttaattacatacatgaggacagatggaactaacatttcaaaagatgcagttatatcatttagagattttattacaaaaaattatagtgataaatatttaccagaacaaccattaaattatagcggtaaaaaagcaaaaaacgctcaagaagcgcatgaagcaatacgtccgacagaaataattagaaagccagaagatataaaaaaatacctaagcacagatcaatataaactctataatttaatatgggctagatctctatcatcgcaaatgcaatcagcaaaattcgatagaaaaactataacgattaactcatctgataataaaaatatatttaaagccagtggtt

SEQ ID NO: 293439 - DNA, 532 bp, Unknown
  Bacterial polypeptide expressing nucleotide sequence isolated from the Sargasso Sea
tatggctcgttcccttgttatcgtagagtcacctgcgaaagcgaaaactatcaatcgctatctaggatccgactatgtggttaagtctagtgtagggcatgttcgggatctcccgactcgaagtaagccggtagatccgaaagctcgagccgaagaagcaaaaaaaacgaaggcgctcgatccggaaaagcgggcggcttacaaggctaaacgctctcgggatcaattaattcgtaagatgggaatcaatccggacaaggactggcaggcttactatgaaattttaccgggaaaagaaaaggtaattgacgagctaaaaaaatttgctgacaaggctgataaggtttatctggcaactgatctggatagggaaggggaggccatcgcctggcacctcaaagagattattggcggagattcagataagtttcgcagagtcgttttcaacgaaatcaccaagaaagctatcgaagaagcatttatggagcctggtgagatcgacatggatatggttcaagctcaacaggctcga

SEQ ID NO: 293440 - DNA, 635 bp, Unknown
  Bacterial polypeptide expressing nucleotide sequence isolated from the Sargasso Sea
aatgaatttagtaatagttgaaagtccagcaaaagctaaaacgatcaataaatatttagggaaagattatttagttttagctagctatggacatataagagatttgccttcaaaaaatggatcagttgatcctgaaaataaatttgaaatgcaatgggaaattgactccttttcaaaaaaatatctaaaagaaataactaatgcagctgaagactctgataaaataattttagcaaccgaccctgatcgagagggtgaagcaattgcctggcatgttaaaaaagttttagagtcaaaaaaattacttaaaggtaaaaatttagaaagagtagtgtttaatgagataactaaaaatgcaattttagaagcaataaaaaatcctagagaaatacatttaccattagtagaagcttatctagcaagaagagctttggactaccttgtggggtttaatatatctccaatactttggactaaattacctggttcaaaatctgcaggaagagtccaatcagttgccttaaagttaataacggaaagagagaaagaaattgaattatttaaaccagaagaatattggactttaacttcagattttacaaataaaaataataaaaatattttatcaaaattaa

SEQ ID NO: 293441 - DNA, 922 bp, Unknown
  Bacterial polypeptide expressing nucleotide sequence isolated from the Sargasso Sea
gcactgaaaaatataaataaacatgaatattttgttaaagatgtaaattcaaaaatagttaaaagaaatccttccgcacctttcacaacttcaacacttcaacaaacttcttctggaaaatttggattcggagcatcaagaacaatgcaaatagcacaacgattatatcaaggaattgaaattgatggagaaacaattggccttatcacttatatgagaaccgatggaacaaatatttctaatgaagcagtcaaagaatttagatcttttgttgaagatgacctcggtaaaaattatttaccagatactccaaataattataaaggaaaaaaagctaaaaacgcccaagaagcacatgaagcaattagacctacagatattaaaaagaaacctgatgagatgaaaaaatatctaagcacagatcaatttaaattatatgatttaatatggtcaagagctctagcatcgcaaatgaaagctgctgaatttgatagaaacactattcaaattcattcaaaagataacagcgtacagtttacttctagcggttctgtaattaaatttgatggatttttaaaaatttattcttttcaaaacgacgacgaagaaaaaaatatattgccagaagtaaaagttggagaaaaactatctctaggagaattaattgatgaacagcattttacatcacctcctccaagatattcggaggcgagtttagtaaaaaaaatggaagaattaggtattggtagaccatctacgtatgctagcattatatcagttttatcaactagaaattacacagaattattaaataaacgatttcaccctactgacagaggtaaattattatcagcatttttggaaaaattattttctaaatatgttgactataattttacagcaagatttagaaaatcaactt

SEQ ID NO: 293442 - DNA, 862 bp, Unknown
  Bacterial polypeptide expressing nucleotide sequence isolated from the Sargasso Sea
aaatggatctgttgatcctgaaaatgatttcaaaatgatatgggaacttgataacttttcaaaaaaatatttaaaagaaattacagactcagcaaaagattcaacaaaaataatattagcgactgatcctgatagagaaggtgaagcgatagcatggcatgtaaaagagtttttagatgaaaaaaaactacttaaagataaaaaaattgaacgtgtggtttttaatgagattacaaaaaaagctgtaaaaaatggtattgataatccaagagaaattgaacctcaattagttaatgcttatatggcacgaagggctttggattatttagttggttttaatatttctccaatactatggaccaaattacctggatcaaaatctgccggtagagttcaatcagttgctcttagattgctaacagaaagggagcatgaaattgaggtttttaaacctgaagaattttggactttaaatgttatttttaaaacaacagatggtaatgaaataaattctaatatcattcaattagatgagaataaaattgaaaaattttcttttaaaaacaaaaatgatattaaaaatgcaatagattctttaaaaaacaaaaaatataatatcacaaatataagttcaaaaatattctcaagaaacccttctggacctttcacaacatcaacattgcaacaaacagcatcaagtaaattaggtttcggtgcatctagaactatgcaaattgctcaaagattataccaaggtatagatattgagggagacactgttggattaattacttacatgagaacagacggaacaaacatatcaaaagatgccgttgaaacttttagaaaatatatatccaaa

SEQ ID NO: 293443 - DNA, 817 bp, Unknown
  Bacterial polypeptide expressing nucleotide sequence isolated from the Sargasso Sea
aaagaagtagaaaaagtttatcttgcaactgaccttgatagagaaggagaagccatagcatggcatttaaaggaagcgcttggtaaaaataaatttgagtatcacagggtaagatttaatgaaattacaaaaagttcgatattagaatcttttgcagatccaaaagaaatagaccaagatcttgtcaatgctcaacaagcaaggagatttcttgatagggtggttggatttgagctctctccattattatggaagaaaattgcgagaggactatctgcaggaagagttcaatctgtagcattaaaattgctttgtgaaagagaaaaactgatttcccaattccagcctgaggaattttgggaagtttcaacaaccttaaaggattttaataatgaagaaatcttatttaagttaaatagaaaaaaaagtgatcctcttcttaaagaagatgaggcaaaaaaaatagaggagctagtaaatagctcaagtttagaaatatctgaagttactaaaaaacctacatcagtcaagccaagagcaccatttataacctcaactctccaacaagctgctagctcaaaattaggctttggagtttcaagaacaatgcgagttgctcaaaaactttacgaggctggaagaatcacttacatgaggacggatgctcctagtttaagcaatgattcaattgatgatgcaagattatttattaaagatactttagctgatgaatatcttacagataaaccacgaatctattcaggtaaagaaaatgctcaagaggcccacgaggcaattagaccaacaaggcaagctg

SEQ ID NO: 293444 - DNA, 913 bp, Unknown
  Bacterial polypeptide expressing nucleotide sequence isolated from the Sargasso Sea
gaatttcgtgccgcgcgaatactggtcgatcgaggcgctcatggcttcgcccagcggcgccacattcgaggccagattaacccatttgaatggcgagaaactcgacaagatggacctcggggacaattccgcggccatggctgcggtcactgcaattgaagcacgcacattcagtgttcagaagatcgagcgaaagaagacgcggcgccaccctgcaccgcccttcacgacatcaacgcttcagcaggaagcatctcgcaaactgcgttttggtgcgcgtcgcacaatgcaggttgcgcagcggctgtatgaagggatgcaacttgatggtgaaacggtcggtttgatcacttacatgcgtacggatggcgttcagatcgccaacgaagccgtcgctagtagccgtgcattgattggacgagattacggcgaagcctacgtccccggctcgccacgggtctacaaatcaaaagccaaaaacgcccaagaggctcacgaagcggttcgcccaacggacctcaaaaggcggcccgccgatgttgcctcctatttggatgatgaccaaaggcgactttacgagctaatttggaagcgcaccatcgcaagccagatggaatccgccgttctagaccaggtagccgttgagataggcgcctccgacaataaggtggggttgcgcgccacgggatccgtgatcgcttttgacggtttcctccgtttgtaccaggaagggcgcgacgacagcgacaaagaaacaacttcggataccgcatctgtgagcgaagatcggattttgccgccgttgaatgaaggcgatgcggtggaacaccgtcaggtgacaccggaacagcactttacccaaccgccgccacggtattctgaagcctctctggtgaagacgctggaggaactg

SEQ ID NO: 293445 - DNA, 871 bp, Unknown
  Bacterial polypeptide expressing nucleotide sequence isolated from the Sargasso Sea
tctaatattaaaactaaaaaatttaacataactgatatttcctcaaaagttgttagtagaaatccctcaggaccatttactacttcaacacttcagcaagttgcctctagtaaattgggttttggtgcatcaagaacaatgcaaatagcacaaaaactttatcaaggaatagaaattgatggagatacagttgggttaattacttatatgagaacggatggaactaatttatcagctgatgctgtctctgattttagaaattttattaaaaaagaatatggtaacgaatatttgccagaaaatccaaataattactcaggaaaaaaagcaaaaaatgctcaggaagctcatgaagcaataagaccaactgatattaatagaaatccagattctgttaaaaagtatttaagttctgaccagcaaaaattatattctttaatttggtctagagctctatcgtctcaaatggaaacagcaaaatttgatagaaatacaataacaattgagtctgaagacggtaaaactatatgtaaatcaagcggatcggttttgaaatttgatggatttttaaaagtttattcaaatcaaagcaaagatgatgatgagcaaattttacctgagatgtcaaaaggacctattaatatagaagctcttattgatgaacaacattttacccagcctcccccacgttattctgaggcaagtttggttaaaaaattagaagagttaggaattggtagaccttcaacttatgcaagtataatttcaacaatagcaaatagaggttatgcagaaatagttaataaaagatttttcccaactgacagaggtaaattaatttctgcgtttttagaaaaactattttcaaagt

SEQ ID NO: 293446 - DNA, 956 bp, Unknown
  Bacterial polypeptide expressing nucleotide sequence isolated from the Sargasso Sea
ctccaaagatggttcggttaatcctgataacggatttgatatgaaatgggaaattggcgcggatagcaaaaaacatgtaaaagccattgctgatgctctcaaacatgataacgaattaatattagccaccgaccctgatcgtgaaggtgaagctataagctggcatctagaagaaacactacgaaataagcgagttatcactagcgacacacccgtaagtagggtagtttttaacgccattaccaaatcagcagtttcagaagcaatggagaaccccagagaaatagatgcacctttagtgcacgcttatctggccagaagagcactcgattatcttgttggttttaatctgtcgccagttttgtggcgtaaattacccggtgcaaaatcagcgggaagagttcagtccgtttgcttgcggttaatagtagaacgagaaatcgaaattgaagcttttaaaccaaaggaatattggtccgtaaaagcctctctgaagaccccaagaggtcaattgtttgaaggaaagctaataaatttagcgggaactaaattagacaaatatgatttaaaaagtggttcggaagcagaattagccgcgcaagcgatagcaacccgcgaactcctagtttcatccgttgaaagcaaacctgtcagcagaaatccttatgccccgtttatgacctcaacgttgcaacaagaggctagtagaaaatacggaatgggtgctagacagacgatgcaagccgctcagagattatatgaagctggacatataacctatatgaggacagacggtatcgacatggcgcctgaggcagttacttctactcgtgaagccatcaaggaaaggtacggggaaaagttccttccttcatcgcctagattctataaaaataaagcaaaaaatgcgcaggaagcgcatgaatgtatccgtcctacttcgatttctaaagatg

SEQ ID NO: 293447 - DNA, 826 bp, Unknown
  Bacterial polypeptide expressing nucleotide sequence isolated from the Sargasso Sea
tatgactaaatctcttgtaatagttgaatcaccagccaaagctaggacaataaataaatacttaggttcagagtttattgttgaatctagtcgggggcatataagagatttacctcaaaaacctgtatcatcaggtaaaagattagctataccaaaaggcacaagccctgaagataaaatcaaattaaaagaaattaatgccaggaaggcattaattagaagaatgggaattgatcctgataatgagtgggagacagagtgggaaactattcctggaaaagaaaaacagataaaagctttaaagaaggcagctaaatcggttgaccatatttacttggcaactgacttagatagagagggcgaagctattgcatggcatttaaaagaggcattaggaccaaaacatagctattcaagggtgcggtttaatcaaattacaaaaacggcaatattagattcattttctaatgctaacgaaattgatttagatttagtaaaagcttacagggcaagaagaattcttgatagagtaattggttttgagttatctccattgttatggaagaaaatagcaagaggattatctgcaggtagagttcaatcagttgcgctaagacttttagatgaaagagaaagatctattcaggcatttataccagaagagttttgggaaattaaattagatgtgaaatcaagtacagaagaaataataaaatttgatctttttagaaaaaaatcagacccgctattaaaaaaagcagatgctgaagaaattcaaaatcagattaatttggctgaattatcaattaatgagatttcaaaaaag

SEQ ID NO: 293448 - DNA, 905 bp, Unknown
  Bacterial polypeptide expressing nucleotide sequence isolated from the Sargasso Sea
tatgaatctcgttattgtagaaagtccagctaaagcaaaaactattaataaatatttaggtggcaattatactgttttagcaagctatggacatattagagatcttccttccaaaaatggctcggtaaacccagatgataaatttaaaatgatttgggaggttgatagcttctcaaaaaaatatttgaaagaaattaccgatgcagcaaaaaaatctgaaaaaataattcttgctacagaccctgatcgtgagggcgaagcaattgcctggcatgtaaaagaatatttagaagaaaaaaaaattttaaaagataaaaaagttgaaagagtcgtttttaatgaaataaccaaaaaagctgttactaatggaattgataatccaagaaatattgaatctaatttagtaaatgcatatatggcaagaagagctttggactatcttgtaggttttaatatatcaccaattctttggacaaagttacctggatcaaaatctgctgggagagtacagtctgttgcattaagattattaactgagagagaacatgaaattgaacaatttaatccagtagaattttggactttaaatgttaattttaaaacctcaaaaggtgatcttttaaattctaatttagtgctgcttaatgataagaaaattgaaaagttttcatttaaaaataaggaagatattaataatgcaattgaattaattaaaaattcaaaatataaaatttcagatactacatctaaaatttactcaagaaatcctctcgggccatttactacatctacattacaacaaactgcatctagcaaattaggatttggagcatcaagaacaatgcaaatagcacaaagattatatcaaggtatagatatagagggtgatactgttggattaatta

SEQ ID NO: 293449 - DNA, 763 bp, Unknown
  Bacterial polypeptide expressing nucleotide sequence isolated from the Sargasso Sea
atgaatttagtaattgtagaaagtcctgctaaagctaaaactataaataaatatttaggttcagattataaagtattagcaagttatggtcatattagagatttaccatccaaaaatggatctgttgatccagaaaataaatttaaaatgatttgggaaatagatagtttttcaaaaaaatatttaaaagaaatagttgatgtagttaaagattctaaaaaaataatacttgcaacagatcccgatcgtgaaggcgaagctattgcttggcacgtcaaagaatatttggatgaaaaaaaattattaaaagataaaaaaattgaaagagttgtatttaacgaaataacaaaaaaagctgttgctaatggaattgaaaatcctagatctatagaaaatcatttagttgatgcttatatggcaagacgtgcactcgactacctcgtgggttttaatatttctccaattttatggacaaagttaccaggatcaaaatctgctggaagagttcagtcagtagctttgcgtttattaactgaaagagaacatgaaattgaggtttttaaaccagaagaattttggacattaaatatagtctttgaaacaaaagaaaataatcttattacaactaatataaatcaattagatggtaataaaattgaaaaattttcatttaaaaataaaaatgaaattaatatcgccattgaagatataaaaaaaagtaaatatgaaattactgatattacttcaaaaaatttattctaga

SEQ ID NO: 293450 - DNA, 444 bp, Unknown
  Bacterial polypeptide expressing nucleotide sequence isolated from the Sargasso Sea
tatggctaagtcgcttgtaatagttgagtcccctgcgaaggcaaaaaccattaaccgatatctaggaaaagattatgtggttaagtcgagtgtgggccatataagagatctgcccaccgggggggcgacagttgatccaaaagcacgagccgaagaggccaagaagacgagggctcttagcccacaaaagcgcgaaatttataaaagggagagggcacgtagacgtctgataagacgaatgggggtgaatcctgacaataattgggatgccgcctattcgaccttgcccggaaaagagaaggttgttgatgaattgaaaaggctcgcggctgacgctcctttcatatttttagctacggatatggacagggaaggtgaggccattgcgtggcatctaaaagaaacgatcgggggagaggactcacgttttcagagagtagtatt

SEQ ID NO: 293451 - DNA, 913 bp, Unknown
  Bacterial polypeptide expressing nucleotide sequence isolated from the Sargasso Sea
gtatcaacccagggtaactttgttgtcagtgagattaaagaacgtatgacaaatcggaatccaggcgccccttttacaacttcaactattcagcaggaggcttcgcttaagcttggtttttctgttaagcgcaccatggtggttgctcagcagctttatgaggggaattttgatattccagattatagtggaggtcttatcacatatatgagaacggactcggtagcacttgctgaccaggcattgaaacaggcaaaagaggttataaactcagaatatggtaagaaatatattttaaaggaaccaagaaaatacaaaagccgtacagtgaatgcccaggaagctcatgaagcaatcaggccagtggacttctctcaaaaacctgctacggttcagaaacacttgagtcacgatcaatttcgactttacagcttgatttggaagcgtgcacttgcttcccaaatgactgcagcggaaatagcccgtacgaccataaacatcgaagctgggcaggaaaaagaatatttgtttgaagcacagggacagcgtgttatttttcctggatttctaaaagtttatgcggaatcaaacgatgagcaattagatactctcagcgaaaaagatgtgatccttcctaacgtggaacagggaaagatgctcgcacttaaagatccagaagaacctgtagatatggaaaagctgtttacaaaaccaccgcctcgttatacagaagcatccttagtaaaaaaactcgaatcagaaggcattggacgtccatccacttatgcaccaacaatatcaaccatacaggatcgtggttatgttgaattaactgatgaaaagaaattgaaaccgacttcaataggggaagttgttacagatttcctagcagatcattttacaaaaatagtaa

SEQ ID NO: 293452 - DNA, 1000 bp, Unknown
  Bacterial polypeptide expressing nucleotide sequence isolated from the Sargasso Sea
cttatttaagttaaatagaaaaaaaagcgatcctcttctaaaagagggtgaagcgaagaaaatagaggagctcgtaggtagttcaagtttagaaatatctgaaatcactaaaaaacctactacagttaaaccaaaagcaccctttataacatcaactcttcagcaggccgctagctcaaagttgggttttggggtctcaagaacaatgcgggttgcccaaaagctttatgaagctggaagaatcacctatatgagaaccgatgctcctagcttaagtaatgattcaattgaagatgcaagattatttattaaagatactcttgctgaagaataccttacggaaaaaccgcgaatatattcagggaaagaaaatgctcaagaggcgcatgaggcaataagaccaacaagcgcaagcttaactcccgaaaagctcagcggtcactcagaagaagaagtaaaattatacgacttaatttggagacagtttattgcatgccaaatgcctgatgcaaaatatttatcaattaatgcaaaagttgttcttgatgattatgttttcagtgcaagaggaagagaagtaatttttgatggttatacaaaaatatcttcacaaaatgccaaaaaatcagatgaagaaaatcttccaagtttagaagaagggcaagttttaaaattggtcgaagtaaagaatgagaaaaagtttacgaagcctcctgctcgattctccgaggcagcacttgtaaaggagcttgaaagcaaaggaataggaagaccgtcaacatatgcagcaattatttctacaattcaggctagaggttatgtgaagcttgaaaataaaagattctttgtaaataaaattggcttgattgtttctgacaggcttatagaaagtttcaatgaaattatggattatgactttacagccaatttagaaaatgaacttgatgaaatagcgtctggcaatcttgagtggaaatcagttttaaataagttttatcaa

SEQ ID NO: 293453 - DNA, 796 bp, Unknown
  Bacterial polypeptide expressing nucleotide sequence isolated from the Sargasso Sea
tttgtttaatggcgaaaaaattgagaggttttcgtttaagagcaaagaagaaatagaaaaagttgtggacataattaataagacaagatttaaaattgctgacgtcaatagtaaattatatcgaagaaatcccttagcacctttcaccacctctactctccaacaaactgcttctggacggtttggttttggtgcttcaagaacaatgcaaattgcacaacgtctttatcaaggtgtagacatagaaggtgaaacgaccgggctaattacttatatgagaactgatggcactaatatttctaaagaggctatagaagattttagaaaatatataactgaagattatggtaacaaatatttacctaatgagccaaatagttacactggtaaaaaagctaaaaacgcgcaggaggcacatgaagcgattaggcctactaatataaaaagaaaaccttccgatataaaaaagtatgtaaatgcagatcagtttaaactttatgaactaatatggagtagagccctgtcctctcaaatgacaccagctgaatttgacagaaacacaatcataatttcttcggatgataaaaagattaattttagagctagcggttcagttataaaatttgatggatttttaaaagtttaccaagttcaagaaactgacgaagatgcaaaaaatatattacctgaggtaaaagttggagaagaaataagtgttttaaaattaaatgatgaacaacattttacggatccgccgccaagatattcagaagcaagtttagtcaaaaaaatggag

SEQ ID NO: 293454 - DNA, 589 bp, Unknown
  Bacterial polypeptide expressing nucleotide sequence isolated from the Sargasso Sea
tatgaatttagttatagttgaaagccctgctaaagctaaaacaattaataaatatttaggatctgaatacaaggttttagctagctatggtcatattagagatttaccttcaaaaaatggatcggtagatcctgaaaaaaattttgaaatgcaatgggagctggactctttctctaaaaaatatctaaaggagataactgatgctgcgaaagagagtgataaaataattctcgctactgaccccgatcgtgaaggtgaggctattgcatggcatgttaaacaagttttggatgataaaaaacttttaaaaggtaaaaaacttgaacgagtggtattcaatgaaattacaaagaacgctgttttgaaaggaataaataatccaagagaaatagaagatacactggtgaaagcttacttggctagaagagcgttagattatttagttggttttaatatttcaccaatattgtggacaaagcttcccggttctaaatcagctggaagagtacaatctgttgctctaaaactaataacccaaagagagcacgaaattgagtcttttaagccggaagagtattggtcacttaat

SEQ ID NO: 293455 - DNA, 478 bp, Unknown
  Bacterial polypeptide expressing nucleotide sequence isolated from the Sargasso Sea
atgaatcttgtcatagttgaaagtccagcaaaagcaaaaacaataaacaaatatcttggttcagattatactgtcttagcaagttatggtcatataagggatttaccatctaaaaatggatctgtggatcctgaaaataattttaaaatggtatgggaaatagatagtttttcacaaagatatctaaaagaaattactgactctgcaaaagattcttcaaaaattatattagcaacagatcctgatagagagggtgaagctatagcatggcatgtaaaagaatttttaaaggaaaaaaagttactcaaagataaaaaagtcgagcgtgtagtgtttaatgagattacaaaaaaagctgtaactaaaggaattgataatccaagacaaatagagacagaactggtcgatgcatacatggctcgtcgtgcattagattatttggttggttttaatatatctccaaatattatggactaag

SEQ ID NO: 293456 - DNA, 868 bp, Unknown
  Bacterial polypeptide expressing nucleotide sequence isolated from the Sargasso Sea
actgctattgaatctaaaaaaattatattagcaactgaccctgatcgtgaaggtgaagctattgcttggcatgttaaggaatttctaaatgagaaaaaaatcctaaaagataaacaaatagaaagagttgtttttaatgagataacaaaaaaagcagttacaaaaggtattgacaatccaaggcaaatagaacctcttttggtcgatgcttatatggctagaagagctttagattatttagttggttttaatatttcaccaatcttatggacgaaattacctggatctaaatctgcaggtcgtgttcaatctgttgctttaaaattaattactgaaagagaacatgaaattgagtcttttaatcctaaagaatattggtctctaaatataaattttgtagataaaaacaaaaacaaaatatcatcaaacatatcacaaatagattcgaaaaaaattgaaaaattttcattcaataataaagatgaaatcaacaaagctattaatgagcttaaatctaaaaaattttttattacagatctttctacaaaagttgtaaatagaaatcccttgggaccttttacaacatctacattgcaacaaacgtcttctggtagattaggttttggagcttccagaactatgcaaattgcacaaaaattataccagggaatagaaattgaaggagatacggttgggttaattacttatatgagaacggatggtactaacatatctcaagatgcggttacctcttttagaaaatatattaacgatcaatttggacaaaattatttacctaaagaacctccgagctattctggtaaaaaagcaaaaaatgcacaggaggcccatgaagcaattagaccga

SEQ ID NO: 293457 - DNA, 886 bp, Unknown
  Bacterial polypeptide expressing nucleotide sequence isolated from the Sargasso Sea
ctggtcatagttgaaagccctgccaaagcaaaaacaattaataaatatttgggcgataactatactgttttagcaagctatggtcatattagagatcttccttcgaaaaatggatccgttgatcctgatcaaaattttaaaatggagtgggaagttgatagtttttcaaaaaaatatcttaaagaaattacagacgctgcaaaagagtcttctaaaataattcttgctactgacccagatcgtgagggtgaagcaatagcatggcatgtaaaggaatatttagatgaaaaaaaacttttaaaggacaaagaaattgaacgtgtggtatttaatgaaataacaaaaaaagccgtcacatatggtattgaaaatccaagacagatagagcccttattagtcgatgcatacatggccagaagagcattagattatttagtgggatttaatatatcacctatactgtggactaaattacctggttcaaaatcagctggtagagttcaatctgttgcacttaaattgattactgaaagagaacatgaaattgaattattcaaacctgaagaattttggactttaagtattaattttcaggataaaaacaaaagcaaaatcacagcaagtatttctcaacttgatggagaaaaaattgaaaaattctcatttaaaaataaagaggaaattgaaaaggcaatttccaatattaagaccaaaaaatttaacataaccgatatttcctcaaaagttgttagcagaaatccctcaggaccatttactacttcaacacttcagcaagttgcttcaagtagattgggttttggtgcgtcaagaactatgcaaatagcacaaaaactttatcaaggaatagaaattgagggagatacag

SEQ ID NO: 293458 - DNA, 934 bp, Unknown
  Bacterial polypeptide expressing nucleotide sequence isolated from the Sargasso Sea
agttggttatacgttgtctcctctcctatggaagaaagtttcttgggggttatcggctggaagagtccaatcagttgcagtaagattgctagttcagcgagagagagcaaggagagctttcaaaagtggaagttattgggacttaaaggcaaaattagaaaaagaaggtagtgaatttgaggtgaaaatgacctcaattggggggcagagaattgccagtggtagtgattttgatgagtcaactggattattaaaaactggtcggaatgtcaaattactcaaggaagaagaatctagggaacttgctaaacaattaactactgatacatggaaagttattaatgtcgaggaaaaaccgtcaattcgtaaaccagttcctccttttacgacaagcacattacagcaagaagctaatagaaaactgcgattatcagcacgggagaccatgagatgtgcccaaggtttgtatgaaagaggttttattacatatatgagaacagattctgttcatctttccgatcaggcaattaatgcctcacgaaattgtgttgaatcaaaatatggggttgaatatttaagtaaaaaacctcgtcaattctccaataagactagaaacgctcaagaagcccatgaggcaattcgtccctctggtgaaagttttaaaacacccaaagagtcgaaattgcagggaagggacctttcattatatgaacttatttggaaacgtacagttgctagtcaaatggccgatgcaaggttgacaatgcttggagtggaattacaagtatcggatgtgatttttcgggccagtggaaaaagaatagatttccctggcttctttagagcttatgttgaaggtactgatgatcctgatagtgcacttgaaggacaagaagtgcttttgccgaaattactggtaggagatactctagaa

SEQ ID NO: 293459 - DNA, 724 bp, Unknown
  Bacterial polypeptide expressing nucleotide sequence isolated from the Sargasso Sea
tgcgcaaaaacgtaaagacgaagaagagctggaactgccggatgtcaaacctggcgaaaccttaaagctggaacagttagctccggctcagcactttactaaaccaccggctcgttttagcgaagcaagtttagtcaaagagctggaaaaacgcggtataggccgtccttccacttacgcagctattatttcgactattcaggaacgtggttatgtcaaagtggacaaccgccgtttctacgctgaaaaaatgggcgaaattgtgactgaccgcctggttgaaaacttcggcgatttaatgagttacgactttaccgccaatatggaagtgcgccttgatgatattgctcatggtgagctgcaatggcgtaaagtgctggatcagttttatggcgatttctcgcagcagttaaaaactgcggaatcagacccggaacaaggcggcatgcgcaccaatcaatttgtgctgaccgatatcgcttgtccgacttgcggtcgtcaaatgggtatccgtactgcatcgaccggtgtgtttttaggctgttcaggctacaacctgccgccaaaagagcgctgcaccaccactatgaatctgactcctggtgatgatgcagtggaagtagcggatgaagacgaattagaaaccgaaatactgcgccataaaaaacgctgtgctaaatgcggcactgctatggatcattacctgatagatgagcagcgtaag

SEQ ID NO: 293460 - DNA, 703 bp, Unknown
  Bacterial polypeptide expressing nucleotide sequence isolated from the Sargasso Sea
atgaatgtcgtagtagtagagtccccggctaaagcaaagacaatcaataaatatctaggtaccgatttcacggtaattgcaagttatggtcatattagagaccttccttcaaaaaatggttccgttaatcctgaagaaaactttgctatgacttatgaaattgacccaaattctcaaaaacatattaaagcaatagcaaatgcattaaaaaaatctgaaaaactttatctagcaactgacccagacagagagggagaagctatagcatggcatgtcatcaaagctttaagtgaaattaaaggatgtgaaaacaaagaaataaaaagagtagtatttaacgagataacaaaaaacgcagttacttccgctattaaaaacccaagggagattgatatggaccttgttaatgctcaacaagctcgaagagcattagattacttagtagggtttaatctatctcctgtactttggagaaagttacctggcgcaaggtcagcaggcagagtccaatcagtagcgctaagacttatttgcgaaagagagcttgaaatatcaaagtttaaacctgaagagttttggtcaataaacgcaattttcactagagctaatgaatctgatataaaaattaacgcaaagctaattaagctaaataatgataaacttgaaaagttttcgataaaaaatgaaactgatgcaaatttag

SEQ ID NO: 293461 - DNA, 946 bp, Unknown
  Bacterial polypeptide expressing nucleotide sequence isolated from the Sargasso Sea
ataattgagaagataaaagttaatgatttattgaagactttttcctctgaggattggagagtctcaaaaattgaaaaaaagccatccactcgtaagccagttcctccatttacaactagcacattacaacaagaagcaaataggaagcttcgtttgtctgcaagagaaactatgagatgtgcacaaggtctatatgagagaggtttcataacatatatgagaactgattcagttcatctctccgaacaagccacaaaagctgctagagaatgtgtcagttctatgtatggaaaagaatatttatctaactcaccaagagaatttaattcaactgcaagaaatgctcaagaagctcacgaagctattaggccggcaggtgaggtatttaaaacaccaaaggaaactaatctaactggtagagacttatcactttacgatttaatttggaaaagaacagtagctagtcaaatggctgaagctaggctaacaatgattaatgctgaaattagcgtaggggatggattatttaaatcgagcgggaaaagtattgatttcgcaggattcttcagagcttatgtcgagggaagtgatgacccaagttcatcccttgaacaacaagaaattattctcccaaacttaacaactggaacatgtcttgaagttactaataaggaatctacttttcatgaaactaaaccacctgcaagatatacagaggctgcattagttaaagttcttgaaaaagaagggattggaagaccttctacctatgccagcattattgggaccatagttgatagaggttatgcgaatatatcttccaatactttatctccaacgtttacggcttttgctgttactgctttattagaagaacattttcctgatctggttgatactacttttactgcaaaaatggaatcttcattggatgaaatatcttcag

SEQ ID NO: 293462 - DNA, 682 bp, Unknown
  Bacterial polypeptide expressing nucleotide sequence isolated from the Sargasso Sea
atgaatttagtcattgttgaaagtccagccaaagcaaaaacaataaataaatatttaggaaaagattatacagttcttgcaagctacggtcatataagagatttaccatctaaaaatggatctgtagatccagaaaataaattcaaaatgatatgggaagtagatagtttttcgaaaaaatatttaaaagaaattacagatgtagcaaaagattctgataaaattattttagctacagaccctgatcgtgaaggagaagcaatagcatggcatgttaaagaatttttagatgaaaaaaaaatactcaaagataaaaaaattgaaagagtagtatttaatgaaatcacaaaaaaagcagttataaatggcatagaaaatcctagatcactcgaaggtcaacttgttgacgcttacatggcaagaagagctttagattatttagtaggttttaacatttcaccaatattatggactaagttaccaggctctaagtcagctggtagagttcaatcagtagctttaagattgttaaccgaaagagaacatgaaattgaagtatttaatccagaagaattttggacaataaatgtaaattttattacttcttcaaaaaatattttaacctcatcaatatctgaattaaacggagaaaaaattgaaaaatttagttttgaaacaaaga

SEQ ID NO: 293463 - DNA, 377 bp, Unknown
  Bacterial polypeptide expressing nucleotide sequence isolated from the Sargasso Sea
tatgtcaaaatcattagtaatagttgaatcaccagcaaaagccaagactatttcaaagtatcttggatctgaatatattgttaaatcaagtgtgggtcatataagagatcttccaaaaaaagcatcaccaaattctaaaagagcatcgataccaaaggatgtatccccagaggagaaattaagacttaaatctataaacgatagaaatagattaattagaagaatgggtattgatccagataatggatggatagcagactggcaaataattccagaaaaagaaaaagtaataaaatctttaaagaaagctgcaaagggagttgatcatatctatcttgcaactgaccttgatcgagaaggtgaggctatagcatggc

SEQ ID NO: 293464 - DNA, 463 bp, Unknown
  Bacterial polypeptide expressing nucleotide sequence isolated from the Sargasso Sea
atgggcaaatcactggtgattgtggagtcgcctgctaaggcgaagacgatcaataagtatctcggcaaagatttcatcgtaaaatccagtgtcggccacatccgcgacctgcccacttcggggggagcaaccaagtcagatccgaaagaacgtgcccgacaggctgccctgacgcgcaagatgtcacccgacgagaaagccgagtatagaaagaagaaggctcatgatcagttgattaaccggatgggtattgatccggataacgactggaaagccagctacgaagtgctcccgggtaaagaaaaagtcgtcgaagaactgcaacgtctggccaagaatgccgaccagatctatctcgcaacggatttggaccgcgaaggggaagccattgcatggcacctgcgggaagttatcggcagcgaatcaaaaccataccgtcgcgtggtgtttaacgaaatcacca

SEQ ID NO: 293465 - DNA, 793 bp, Unknown
  Bacterial polypeptide expressing nucleotide sequence isolated from the Sargasso Sea
gaaataactgatgcagcaaaagactcgtctaagattatattggctactgaccctgatcgtgaaggtgaagctatagcttggcatgtaaaagaatatttggatgaaaaaaaacttttaaaagataaagaaattgagcgagtcgtatttaacgaaataactaaaaaagctgttatacaaggaattgagaatccaagacaaattgagccactactagttgatgcctacatggcaaggagagctttagattatttagttggttttaatatttctccaatactttggacaaaactaccaggttcaaaatctgccggacgagtccaatctgtagcattaaaattgattacagaaagagaacatgaaattgagtcatttaaaccagaggaattttggactttaagtattaaatttgctgataataaaaatcaaaatgttactgctagcataactcaattagataataataagattgaaaaattctcatttagaaataaagatgagataaataaagctgtatctagtattaacaaaaaaaaatttggtattaccgatatctcaagtaaaatagttaatcgtaatccgtctggaccatttaccacatcaactctacaacaaactgcttcgagtagattaggcttcggtgcatctagaacaatgcaaattgctcaaaaactatatcaaggtattgaaatagagggagaaacaattggtttaataacctatatgagaactgatggaacaaacttatccaaagatgcagttgctgcatttagaaattatattcaaaaaaaaatgg

SEQ ID NO: 293466 - DNA, 1005 bp, Unknown
  Bacterial polypeptide expressing nucleotide sequence isolated from the Sargasso Sea
caaacgtgagcattagtgctgcgagtttaggtgatatggaacgcgatgcacagcgtctttatgagcttatttggcgccagtttgtgccctgtcaaatgactccagctaagtacgacgcaaccacgattaaagtggcagcgggtgattacgagctgacggcgaaaggccgcgtactcaagtttgatggttggactcgcgttcagcctcagcttcgcaaaaaaggcgaagaagagctcatgttgcctgatgtgcaaaaaggcgatgtacttgacttaaaagcgcttgatcctaaacagcatttcaccaagcctgtagcgcgatttaatgaagcgtcgttagtaaaagagcttgaaaaacgcggtattggtcgtccatcgacctacgccagtattatttcgacgattcaagatcgcggctatgtgcgcttagagaacaagcgtttttatgccgagaaaatgggcgaaatagtaaacgatcgtttgatggaaaactttgacgatttaatgagctatgactttactgccaatatggagcaacatcttgatgatattgctgagggcaataaagattggaaagacgtgctcaatgagttctacagcggcttctatgacaaactgctaaacgctgagaaagaccctgaagagggcggtatgcgcctgaatcaggcggtacctgcaggtattgattgcgacaaatgcggccgtgaaatgaacgtaagaaccgcgtcaaccggcgtgtttttgggctgttcaggctacaacttaccaccgaaagagcgctgcactaacaccatgaatttaacgcctggtgatgaagtcgtgaaagtggacgatgaagaagagctcgaaacagaagcgcttcgctctaaaaaacgttgtcctaagtgtggtacggcgatggacagttacctggtcgatgaaacccgtaaacttcacgtgtgtggtaatacgccgacgtgtgatggcacattagtagaggcaggcacattcaaaataaaaggctaga

SEQ ID NO: 293467 - DNA, 940 bp, Unknown
  Bacterial polypeptide expressing nucleotide sequence isolated from the Sargasso Sea
agttggaaatgaaaaggaggcatttgcaattgaatcaagtgttaaggaaggtaattttgttgtaagtgaaatcaaagagcgtttagctaataggaatccaagtgccccttttaccacttcaacgatccagcaggaggcttcgctcaagcttggattttctgttaagaggaccatggttgtggctcagcagctttatgagggaaattttgatattcctgattacagtggaggacttatcacctatatgagaacagactctgttgctattgcggagcaggcattgcgacagatgaatgatgttatagaatcagagtatggccagaaatatggattaaaggaaccaagaaaattcaaaagccgagctgtaaacgcgcaggaagctcatgaagcaatcaggcccgtggacttctctcagaagcctagtatggttcaggcacacttaagtcatgaccagtttaggctctatagtctggtttggaagcgtgcacttggttcacaaatgactgcagctgaaatagcacgtacgacaataaatattgagtcaggaaaggagaatgaatttttgtttgaagcacaaggacagcgagttgttttttcaggattccttcaaatctatgcagaaacaaacgatgagcaaggagacactctaagtgaaaaagatgtgatcctgcctaaagttgaaaagggacagatccttgctcttaaaaatcctcaagaacctgtagaacttgaaaagctttttactaaacctccacctcgttatacggaagcatccttagtaaaaaaactagaatcagaaggtattggtcgtccatccacctacgcgccaacaatttctactatacaagatcgcggctatgttgaattaacagacgaaaagaaactgaaaccgacttccattggagaagttgttacagattttctagcagaacattttaca

SEQ ID NO: 293468 - DNA, 880 bp, Unknown
  Bacterial polypeptide expressing nucleotide sequence isolated from the Sargasso Sea
atgaatttagtaatagtagaaagcccagctaaggctaaaacaataaataaatacttaggaagtgagttcaatgtacttgcaagctttggtcatgttcgtgatttgccatctaaaaatggctcggtagatccagaaaataattttgcttttgaatgggaagtttcttcaacttcaaagaaacatatgaaagaaatttataatgccagcgctgatgcatctactctttatcttgcaactgacccggatagagaaggtgaagcaattgcatggcatattgttgagctattaaataagaaaaaattattaaaagataaaactgtcaagagagtggtctttagtgagatcacaaaaaatgcagtaaaaaaaggaattgccaatccaagagatattgacactgatcttgtagacgcctatttagctcgaagagcactggattatctatttggctttaatttatcaccagttttatggagaaagttaccgggagctaaatcagcaggaagagttcaatcagttgccttaagattgatatgtgaacgtgaacttgacattgagtctttcaaacctgaagagtattggaaaattaaaggcaatgtaaaattagaggatggttttaacatagaagcaaatttactttctgtagaaggcaaaaaagtagaaaaatttagctttaagtctgaagatgatgcgaaaaagattgtaaatttattctcggataataaatttgaaataatagatattacaaaaaaaccagcatcaaggaatccggaaccacctttttctacctcaacactccaacaaaccgcatcaagtatttatggttttggcgcctctcgaacaatgcaaattgcacaaaaattatttcaaggtatgaaattaa

SEQ ID NO: 293469 - DNA, 824 bp, Unknown
  Bacterial polypeptide expressing nucleotide sequence isolated from the Sargasso Sea
aaaatcaaaatacaaaatttcagatataagttctaaaatatatacgagaaatcctcttggtccatttaccacatctacgcttcaacaaacttcttcaagtaaattaggttttggagcctctagaacaatgcaaattgctcaaaggttgtaccaaggaatagatattgagggtgacactgttggattgatcacttacatgagaactgatggtacaaatatatcaagtgatgctgtcactgactttagatattttataaaaaattcttatggcgataattatttacctgaagaacctaataattattcaggtaaaaaagctaaaaatgctcaagaagctcatgaagctataagaccaacggacataactagaactccagagtcaataaaaaaattcttaagtacagatcaaaataaactatatgacttaatttggtcaagagcactatcatcacaaatggaagctgcaaaatttgatagaaaaaccattacgattaattctgataacaacttaaatcaatttaaatgttcgggatcaacagttaaatttgatggttttttaaagctttctaaaatagtcgaaaatgaagatgaaaaaattctccctgatgtaaataaagaggaagttttagctaatgattttaccgatgagcaacactttacacagccacctccacgatattctgaagcaagtttggttaaaaaacttgaagaattaggaattggaagaccttctacatatgcaagtattatttctgttatttcaaacagaggttatgccgatctagttaataaaagattttttccaacagatagaggaaaattat

SEQ ID NO: 293470 - DNA, 916 bp, Unknown
  Bacterial polypeptide expressing nucleotide sequence isolated from the Sargasso Sea
ggaggattttgtgcatttagtagttgttgagtcacctgcaaaggcaaaaacgattgaaggctatttgggttctgattataaagtaatagcttcattaggtcatattagagaccttccatcaagtgaaggatcagtaaagcccgatgaagatttcaagatgatttgggaattaggtgataaaggaaaaaaacaagcaaaaacactgaatgaagctgttaaaaattctgaaagtcttatattggctacagatcctgacagagaaggagaggcaatagcctggcatgttttagaggttcttcaagaaaaaggtagtttggctgataaaaagatttcaagagttacctttaacgcaattacaaaaaaagaaattaatgaagcaattaataatccaagagaaatcgatacagaaatggtacaggcttacttagcaagaagggctttggactatcttgttggatttacattatctcctgttttatggaggaaacttcctggtgctcgttcagcgggacgtgttcaatctgtagcattaagattaatatgtgaaagggaaatagagattgagtcttttattcctcaagaatattggtctattaatggtcatttctcatacgaggataacgatccttttgaagcaaaactaactcattttgataataaaaaattagagcaatttgatattaataatgaggataggtctgaagaaattaaaatagctattcaagaagcaaattttaaaataaccgatatacaagaaaaaaatgtatcaagaaaaccgtcgccaccctttattacatctacattacaaatggaagcctcaagaaaacttaatatgacagcaaaagtaacaatgatgacagcacaaaaactttatgaagctggcttaataacatatatgcgaactgacggtgttcaa

SEQ ID NO: 293471 - DNA, 673 bp, Unknown
  Bacterial polypeptide expressing nucleotide sequence isolated from the Sargasso Sea
aatgagtaaaaatcttgtaattgtagaatcaccggcaaaggccaaaacgatatcaaaataccttggatctgatttcattgttgagtcaagcgttggccatatcagagatttgccaaaaaaagctcctgcaaattctaaaagagcatcaatacctaaagatgtttctccagaagaaaagataaggcttaaatctattaacgatagaaatagactgataagaagaatggggatagatccagacaatggatggaaggcagaatggcaaatcatacctgaaaaagaaaaggtaattaaatcgcttagaaaagctgcaaaaggtgttgaaagaatatatcttgcaactgacctcgatcgtgagggtgaagcgatagcttggcatcttaaggaggctcttggccctgaaaaatatgagtattcaagagttagatttaatcagattacaaaaacatccattgtggattctttcaatgatccaaaagaaatagacttggatctggtaaaagcatatcgagcaagaagatttttggataaagttattggctttgaactatctccattactttggaaaaagattgctagaggcttgtctgctggtagagtacagtctgtagctctgagaattcttgatgaaagagaaaggttaattcaagaatttatacctgaagagttctgg

SEQ ID NO: 293472 - DNA, 625 bp, Unknown
  Bacterial polypeptide expressing nucleotide sequence isolated from the Sargasso Sea
atgtcgaaatcgttagtcatcgttgaatctccagcaaaagccaaaactatcaataagtatttgggcgctgaattcgtggttaaatccagtgtgggtcatatccgggacttaccaacgagcggtaatggcaagccggtagatgctaaggccagagcggcagcggcagcactaactcgaaaaatgaagcctgaagagaaagtgatacataagaaaaagaaggctaaacaacaacttgtcgctcgtatgggggttgatcctgataagggatggaaagcaaattaccaaatattgccaggcaaagaaaaggttgttagcgagctaaaaaaagttgcgaaaaatgctgaaactatctatctcgctacggatttggatagggagggtgaggcgattgcttggcatctgcgtgaggcaatcggtggtgatcagactcgctacaaaagagtcgtatttaatgaaattaccaaaagagcggttgcagaagcattctctgaacctggcgatgtcgacatgcgctacgtggaagctcagcaggcaaggcggtttttagatagagtagttggatttatggtgtctcctttgctttgggaaaaggtcgcacgaggcttatcggcgggtcgggtccaat

SEQ ID NO: 293473 - DNA, 820 bp, Unknown
  Bacterial polypeptide expressing nucleotide sequence isolated from the Sargasso Sea
ggaccttttacaacatcaacacttcagcaaactgcatcaagtagaataggttttggagcctctcgaacaatgcaaatagcacaaaaactttaccaagggattgatatagagggtgaaactataggtttaataacttatatgagaacagatggtacaaatctatctgcagatgcagttactgcttttagaaattatattaaaaaagattttggaaatgaatacttgccagaaaatgctttgaattattctggaaaaaaagcaaaaaatgctcaagaagctcatgaagccataagaccaactgatattactagaacacctcaattagttaaaaaatatttgagtccagatcaaaataaactatacgatttaatttggactcgagctctttcgtcacaaatggaatctgcaaaatttgatagaaacacaattactatatctactaaagacgatgatactatttgcaaagctagtggttcagttttaaaattcgatggatttttaaaaatttataaaaatttaagcaaagatgatgatgaaaatatactaccagaaatgtccaagggaccaattaatatagagtctttattagatgaacaacattttactcaaccaccacctagatattctgaggcaagtttagtaaaaaaacttgaggaactaggaattggaagaccatctacatatgcaagtataatttctacaatagcaaatagaggttatgctgaaattataaataaaaggtttttccctactgatagaggtaaattaatttcagctttcttagaaaaattgttttcaaaatatgtagattataatttta

SEQ ID NO: 293474 - DNA, 964 bp, Unknown
  Bacterial polypeptide expressing nucleotide sequence isolated from the Sargasso Sea
catgaatatttttgtcaaagatgtaaattcaaaaatagttaaaagaaatccttctgcaccttttacaacatctactcttcaacaaacttcttctggaaaatttggattcggtgcctcaagaacaatgcaaatagcgcaacgattatatcaaggaattgaaattgatggagagactattggtcttatcacttatatgagaaccgatggaacaaatatttctaatgaagcagtcaaagaatttagatcttttgttgaaggtgaccttggaaaaaattacttaccagataatccaaatagttataaagggaaaaaagctaaaaacgctcaagaggcacatgaagcaattagacccacagatattaaaaaaaaacctgatgagatgaaaaaatatctaagcacagatcaatttaaattatataatttaatatggtctagagctttagcatctcaaatgaaagctgcggagtttaatagaaacaccattcaaattaactcaaaggacgaaagtgtacaattctcttctagtggttcagtaataaaatttgatggttttttaaaagtttactcttttcaaaccgatgatgaagaaaataatatattaccagaggtaaaaattggagaaaaattaagtataggagaactaattgatgaacaacactttacatcacctcctccaagatattctgaagcaagtctggtcaagaagatggaagagttgggtatagggagaccatctacctatgctagtataatatcagttttgtcaactagaaattataccgaactgttgaataaaagatttcatcctacagacagaggtaaattgttatctgcctttcttgaaaaattgttttctaaatatgttgattataattttacagcagatttagaaaatcaacttgatgaaataactagtggtaagactaattatttgagtgtcttagaaacattttggaaagatttt

SEQ ID NO: 293475 - DNA, 874 bp, Unknown
  Bacterial polypeptide expressing nucleotide sequence isolated from the Sargasso Sea
tttgggaaaaaattatactgttttagccagttatggacatataagagatttgccttctaaaaatggctctgttgatccagatcaaaattttaaaatgatttgggagatcgacagtttttctaaaaaatacttaaaagaaattacagaagttgctaaagattcttcaaaaataatacttgctactgatccagatcgggaaggtgaagcaattgcttggcatgttaaagaatttttaaatgaaaaaaaattactaaaagataagataatagaaagagtagtatttaacgaaataacaaaaaaagcagtaactaagggtatagaaaatcctagatctatagagccacagttagttgatgcttatatggccagaagagctttagactatcttgttggttttaatatttccccaatattgtggactaagttacctggttcaaagtcagctggacgagttcagtcagttgcattgagacttcttactgaaagagaacatgaaattgaaaatttcaaacctgaagaattctggaagttatttgttaattttaaaattaaagatggaaacaatattaatacatacccttttcaaattaataatgaaaagattgaaaagttttcatttaaaaataaaaacgatattaataatataattaatgatattaaaaaaaaagaatatgaaataaccgatattatatcaaaaatttataataggaatccatctggaccctttacgacttccactctacaacaatcttcatcaagtaagttgggatttggcgcttccagaactatgcaaattgcacaaagactttaccaaggaattgatattgagggtgaaacaattggtttaattacttatatgagaactgatggcaca

SEQ ID NO: 293476 - DNA, 874 bp, Unknown
  Bacterial polypeptide expressing nucleotide sequence isolated from the Sargasso Sea
tatcatcgggtcgtcttcaacgagatcaccaagaaagcggttcaggaggcatttgcacacccagggaagctggatgaggatagggtccaggcccaacaggctcgtcgttttctggatcgggtcgtgggcttcatgttgtctccgttgttatgggcgaagattgcccggggcctgtctgccggacgggtccaatcggtggcggtcagtctgctggtggagcgcgagcgtgagattcgcgcgtttgtgccagaagaatactgggagatctttgccgacactcacggcccccagggaagtttgcgtcttgaggtggtcaaacaggctggcgaagcgtttcgcccggtcaatgaggaggaagcccaggctgcggttgccctgctacaggccaatgcttaccaggtcagtgaccgtagtgacaaaaagacgcagtctcgaccgaacccgcctctcatcacatcgacgctgcagcaggcagcaagcacgcggcttggcttttcggtaaaaaagacaatgacgttggcccagcgcctctacgaagccggtttcattacctacatgcgtacggactcaacccatctaagtgcggacgcggtatcggcagcaaggaatcttgttgctcaggcattcggtgatgagtacttgccggcttcgcccaacgtttatgcgagcaaagcggatgctcaggaagctcatgaagccattcggccaacggacgcaaatcgcgccggccagcaattgtcgttggaacgtgatcaggaacgactgtacgatctgattcgaaactatttccttgcctcgcaaatgaccaatgcgcgtttcttgagctccacgatcacggtccgctgcggtgagttcgaattgcgagcgcgggggc

SEQ ID NO: 293477 - DNA, 840 bp, Unknown
  Bacterial polypeptide expressing nucleotide sequence isolated from the Sargasso Sea
attgactccttttcaaaaaaatatctaaaagaaataactaatgccgctgaagactctaataaaataatcttagccactgacccagatcgtgaaggagaagcaattgcttggcacgtaaaaaaagttttggaatcaaaaaaattacttaaaggtaaggatttggagagagtggtgtttaatgaaataacaaaaaaagcaatattggaagcaataaaaaatcctagagaaatacatttgccattagtagaagcttatttagcgagaagagctttggattatcttgttggttttaatatatctccaatactttggactaaattacccggatcaaaatcagctggaagagttcagtctgtcgcattaaaattaataacagaaagagaaaaagaaattgaattatttaaaccagaagagtattggactttaacttcaaattttacaaataaagataataaaaatattttatctaaattaagtttatatgatggtaaaaaaatagaacgatttacatttaaaaataaaaatgaaattgatcaagctataaatataattaataaatcaaaatttacgataaaagatgtcaatacgaaaatatttaagagaaacccattagcaccgttcactacttctacattgcagcagacagcttctggaaagtttggttttggagcatccagaactatgcagatagctcaaagattataccaaggaattgatattgagggagagactacaggattaattacctatatgagaactgatggaacaaatatttctcaagaagctatagatgaattcaggaatgtaattaaaaaagatttggaaatgaatttttacctg

SEQ ID NO: 293478 - DNA, 880 bp, Unknown
  Bacterial polypeptide expressing nucleotide sequence isolated from the Sargasso Sea
aaaaccaagaaaaattaattcagagttggttgaagcctatttggcaaggagagctttagatcatttaattggcttttcaatttctccaatattatggagaaagcttccaggctcaaaatctgcaggtcgagttcaatccgttgcattgaaactcatctgtgaaagagaaattgagattgaaaagtttaatattgaagaatattggtcgatatcttcgatttttttaaataataataatgaaaatttcctagcaaggttgtttatatttgatagtaaaaaattagctaaaatgaatattaaaaatgaagacgaagctaataaagctttagataaaattaacaaatcctcatttaatataactaaaattgttagtaagcgagttaaacggaatcctttagcacctttcactacttcaacacttcagcaagaagcttcaaacaaattaggttttggtgcgtcaagaacaatgagaatagcccagaagttatatgaaggtataaatattgggagtgaaacaactggtttaataacttatatgagaacagatggtgtccaattaagttctcaggctattcgggaattacaagaagaaataataaaccgacatggtaaagattatattcctcaaataccaagagtatataaatctaaagcggctaatgcccaagaagctcatgaagcaattaggccaacatcaatttcacgtgatccagatgatatgtcgcaatacttagatacagagcaatttaaactttatgaattgatttggaaaagaactatttcaagtcaaatgcaatcagctgagctagatgaaacttcagctgatatttcaaataaagatatgagtattgtttttcgagcaaatggatcacaagtttct

SEQ ID NO: 293479 - DNA, 871 bp, Unknown
  Bacterial polypeptide expressing nucleotide sequence isolated from the Sargasso Sea
gcagataaatttaactattccagggttagatttaatcaaataactaaagatgcaatcttagaatcgtttgaagatccaaaagacatagattcgagccttgttgaagcccaacaagcaagaagatttcttgatagagtcgtcggattcgaattatctccacttttgtgggcaaaaattgcccgtaatttatcggcaggaagagttcaatctgttgcattaagacttttggttgaaagagaacatagtattcaaaagtttaagccagaagagttttgggaaatttcatttaaagttaacgctgtaaatgaagaaagtacttcgattgagttcaatctaaatagaaaaaaatcagacttattacttcaagttgaggaggcaaaaaaaattgaagagcttatcaattcttcagatttacttgtaaatgaggttactcaaaaaccagtaaaatcaaaaccgaaacctcctttcattacatcaacattgcagcaagccgcaagtacaaagcttggatttaatgttaaaagaactatgagaactgcccaaaagctctacgaaaatgggctcataacgtacatgagaaccgatgctcctgccttatctcctgaatctattaaagacgccagaatgtatattgagattaatctaggggaaaagtaccttacaaatgctcccagaatttattcttctaatgaaaatgctcaagaggcgcatgaagctataaggcctacaaatgcatccactaaatcggatagtttactctcttccacagatgaagaaaaacgcttatatgaattaatctggcagcaatttatagggtcacaattacctgatgcggaatacttagcaacccaatgcaaaaattcagttagat

SEQ ID NO: 293480 - DNA, 392 bp, Unknown
  Bacterial polypeptide expressing nucleotide sequence isolated from the Sargasso Sea
aatgaacttagttattgttgaaagtccagcaaaagcaaaaacaataaataaatatttaggaaaagattatttagttttagcaagttatggacatataagagatttgccttctaaaaatggatcagttgatccagataacaaatttcaaatggagtgggaaattgactccttttcaaaaaaatatttaaaagagattactaatgcagctgaagattcagacaaaattattttagcaactgatccagatcgtgaaggtgaggcaatagcttggcatgtaaaagaagtattagaaaaaaagaatcttcttaaagataaaaatttagaacgtgtagtcttcaatgaaattacaaaaaaagcaattcttgatgcgattaaaaatccaagacaaatac

SEQ ID NO: 293481 - DNA, 968 bp, Unknown
  Bacterial polypeptide expressing nucleotide sequence isolated from the Sargasso Sea
gtattggcgtcttacgggcatgtttgcgacctgccaagcaaggacggttcggtcctgccggacgaggattttgccatgaaatggcatgtgtccggcggctcggaaaagcgcattggcgaaatctcctcggcgctgaaatcggccgaccggctgatcctcgccaccgaccccgaccgcgagggagaggcgatcagctggcacgttctcgaactgctgcaggatcgcgggctggtcaaggacaagcctgtcgagcgcgtcgtcttcaacgaggttaccaagaacgccatcctcgccgccatggcgcagccgcgtgaactggataccgagctgatcgacgcctacagggcgcgccgcgcactcgactaccttgtcggcttctcgatctcgccggttttgtggcgcaagctgccgggcgcacggtccgccggacgcgtccagtcggtggcgctgcgcctgatctgcgagcgcgaggccgccatcgaggcatttgtcacgcaggaatactggacggtcgaggccgaactcggcaaggccgacgggcgcaatttcaatgcaaggctgacgcatctcaatggcaagaagctcggcaagctggacatcaatttggagaccgaggcatttgccgccgctacggccatcgaggccgaggggctcagcgtcgtcgatattcagaccaagcgcattcgcgagaatccgaaaccgcctttcaccacatcgaccctgcagcaggaagcgtcgcgcaagctgggattttctgccagccgcaccatgcagatcgcccagaaactttatgagggcgtgaatatcggatcggagacgacaggcctgatcacctacatgcggaccgacggcgtgcagctcggcagcgaggcgctggcctcggtacgcggcgagatcggccagcgttttggcacaggtacctgccgaacagcccgcggatctatcgcacagcggccgccaacgcgcag

SEQ ID NO: 293482 - DNA, 790 bp, Unknown
  Bacterial polypeptide expressing nucleotide sequence isolated from the Sargasso Sea
aaagaaacacgagaaatcaatatgtgtgaagttaatgctcaacaatcaaggagaataattgaccgattaattggatttaaattatctccttgtttatggaaacatattcagaccaaagaaacaggattatcagcgggtagagttcaaagtgctcttcttaatttacttgctgaaagagaacaacatatcctaaattatgaacccgaaatttcattagatattacagcctcctttacaaatttagacaatgattgtgattttatattttcaggagaatatgaaatagatgatgaattcattcaactattatttacaatcatttctcgtgatagaaaatttctagtttctaactctactaaaacaaaagataaatcatatccgaagaaaccatttattacatcaactcttcaacaaagtgcacaaaatgaattagggtttccggttggtatgacaatggatattgctcaaaaattatatgaggctggtcatatcacttatatgagaacagattcaacatttatttcagaagaatttcaaactgatttgaaacgaaagattgataaagattatggcgataagatatatcaaaaatcaaaagaaaaaaaagtcaaaggggcacaggaagctcatgaagctattcgtcctacaaatatatttaatatgcctttaattgatgggaatcaaatgaaattatatcaatttattttaaaacgaacaattacatctcatatgaagccagctgaatatgatgtttataaaatacaacttcataatgaactaacaagtaagt

SEQ ID NO: 293483 - DNA, 970 bp, Unknown
  Bacterial polypeptide expressing nucleotide sequence isolated from the Sargasso Sea
gggaagttgatagtttttcaaaaaaaatatttaaaagaaaatactgatgcagcaagaaaatcagaaaaaattattcttgcaacagaccctgatcgtgaaggtgaagctatagcttggcatgtaagagagtatttggaagaaaaaaaacttttaaaagacaaaaaaattgaaagagtagtttttaatgaaatcaccaagaaagctgtaactaatggaatcgataatccaagaaatatagaaaataatttagttgatgcgtatatggcaagaagagcattagattatttggttggttttaacatctcacctattctatggacaaaattaccaggttcaaaatctgcaggtagagttcaatctgttgcattaagattacttactgaaagagagcatgaaatagaacaatttacgcctgaagaattctggacattaaatgtaaattttaaaacctcaaatggagatatattaaattcaaatctcttattgcttaataatgcaaaaatagaaaaattttcatttaaaaataaagaagatataaacattgctatcgaattaattaaaaaatcaaaatacaaaatttcagatataagttctaaaatatacacaagaaatcctcttggtccatttactacatctacacttcaacaaacttcctcaagtaaattaggtttcggagcttctagaacaatgcaaattgctcaaaggttgtaccaaggtatagatattgaaggtgacactgttggattgatcacttacatgagaaccgatggtacaaatatatcaaatgatgctgtcactgagtttaggagttttataaaaagttcttacggtgataattatttacctaaagaagctaataattattcaggtaaaaaagctaagaatgctcaagaagctcatgaagctataaggccaacagacataactagaactccagagtcaataaaaaaattcttaagtacagatcaaa

SEQ ID NO: 293484 - DNA, 928 bp, Unknown
  Bacterial polypeptide expressing nucleotide sequence isolated from the Sargasso Sea
gacaaaatctttagtaatagttgagtctcctgcaaaggcaaagacaatttcgaagtacttaggacctgagtatattgttgagtctagcgttgggcatattagagatcttccaaagaaaggtggcacagctagaacaagacttgttgtaccaaaagatctcagtccagaggaaaaggccagacaaaaggaaatcaatgctagaaaaagtttagtaagaaggatgggtgttgatcctgataatggatgggatgctgattggcaaataatacctgagaaagagaaggtgctgaaggctttaaaaaaagctgcaaagaatgttgataatatatatttagcaacagatttagatagagaaggtgaagcaattgcttggcaccttaaagaagctttgggacctcaaaaatacaattactcaagagtgagatttaatcaaattacaaaagatgcaattattgagtctttctctgatccaaaagaaatagaccttaatctggttaaagcatacagagctagaagatttttagataaagttattggttttgaattatctccattgctttggaaaaaaattgcacgaggcttatcagcaggaagagttcaatcggttgctttaagacttttagacgaaagagaaaggtctatccaagaatttattccagaggagtattgggaaatttcgttttcagccactactaataatgatgaaacaattacatttaatcttgcaactaaaaaaacagatccattactctcaaaagaaaaagttgaaacaataaaacaacaaatagaatcatgcaatttatcaataaatgagatttctaagaagccagtaaaagttaaaccaaaggctccttttattacatcaacactccaacaatcttctagcacaagattaggtttttacgtaaaaaagacccatgcgagttgc

SEQ ID NO: 293485 - DNA, 856 bp, Unknown
  Bacterial polypeptide expressing nucleotide sequence isolated from the Sargasso Sea
tatgaatctagtcatagtggaaagccctgctaaagcaaaaacaattaacaaatatttaggagataactataccgttttagctagctatggtcatatcagagatcttccttcgaaaaatggatctgttgatcctgatcaaaattttaaaatggaatgggaagttgatagcttttcaaaaaaatatttaaaagaaattactgacgctgcgaaagattcttccaaaataattcttgctactgacccagatcgtgagggtgaagcaatagcttggcatgtaaaagaatatttagatgaaaaaaaacttttgaaagacaaagaaattgaacgtgtggtatttaatgaaataacaaaaaaagccgtcacatatggtattgaaaatccaagacagatagagcccttattggtcgacgcatacatggctagaagagcactagattatttagttggatttaatatatctccaatattgtggactaaattacctggttcaaaatctgcaggtagagttcaatctgttgcattgaagttgattacagaaagagagcatgaaattgaattattcaagcctgaagaattttggactttgagtattaattttcaggataaaaataaaagcaatattacggcaagtatttctctacttgatggaaaaaaaattgaaaaattttcatttaaaaataaagaagaaattgaaaaggcaattaataatattaagaataaaaaatttaatataactgatatttcttctaaagttgttagtagaaatccctcaggaccatttactacttccacacttcaacaagttgcgtcaagcagattaggctttggagcatctagaacaatgcaaatagcacaa

SEQ ID NO: 293486 - DNA, 934 bp, Unknown
  Bacterial polypeptide expressing nucleotide sequence isolated from the Sargasso Sea
tatgactacctcacttgtaattgttgaatcaccagcaaaagccaaaactatatctaagtatttgggcaatgaatatattgtcaaatctagcgttggccacataagagatttaccaaaaggcaaatcaaaaaatgtagcaaaaagaattactttaccaaaaaatatttctctagaagaaaaaaaagagctaaaagttaaacaagaaagagataggttaatcagaagaatgggtgttgatcctgataatgcttggtctgttgagtatcaaattattccagaaaaagaaaaggtaataaaagatttaaaaaaagcagcaaaaaatgttgatcatatatatttagctacagatctggatagagaaggtgaggcaatagcttggcatttgaaagaagcattaggaaataagcattcttattctagggtaagattcaatcaaataacgaaaacagcaatattagattctttttctgatccacaggaaattgatcttgatttggtaaaagctcagcaagccagaagatttttagacagagtagtgggttttgaattgtctccgctattatggaaaaaaattgcaagaggcctgtcagctggaagagttcagtcggttgctttaagacttttagctgaaagagaaggccttattcaagaatttattccagaagaattttgggagatttccatgattctagaaaatgatagtaagcaggtaattaatttcaaactttcaagaaagaaatcagatccattattaaaagaaaaagaggcacttgaaatagaatcattaataaaagaatcatctttgaaaattgatgaaatagttaaaaaacctaccagaacaaaaccaagaccgccttttattacatcaacattacaacaatcagcctcaaccagacttggattttatgtaaaaagaacaatgcgagtggcacaa

SEQ ID NO: 293487 - DNA, 883 bp, Unknown
  Bacterial polypeptide expressing nucleotide sequence isolated from the Sargasso Sea
gcaggccacataacatatatgagaacagatgctccaagtttaagtaaagaatccattcaagatgcaagaaattatattagtgagagggttggtgagaaatacttaactaatgctccaaggatttattcaagtacagaaaatgcacaagaagcacatgaagcgataaggccaacaaatgcttaccttactgctgatgatctaatgaatcatactgaagaagagaaaagactttatcttttaatttggcaacaatatatatcatcacaaatgcctgatgctgagtatttatcgacatccgcaaaaattaatattggcgaatacaccttttatgcaaaaggcagagaaattgtttttgatggacatacaaaaatatcacaaccaagtaaatcagatgacgaagatattttaccacctcttagggaaggggaagaactaaaacttaatgaagtacatcttgatcagaaatttacaaaaccacctgcaagatattctgaagctgctctagtaaaagagcttgaaaagaaaggtattggaagaccttctacttatgcaaatataatttctactatccaagatagaggttatgttgagattcagaatagaagattttttgttaaaaaaattggccatattgttgcagaaagactaattgagagctttgatgacatcatggactatgaatttactgccaatcttgaaaataatcttgatagtgttgctagaggtgagcttgattggagaaatgttttagatgatttctataacacttttcaaaaagatctagtttctgcttcagatgaaaatggaatgaggggtaatcaaccaacccctacaaacattacttgtccttgtggaaaaacaaatatggttattaggaattctt

SEQ ID NO: 293488 - DNA, 867 bp, Unknown
  Bacterial polypeptide expressing nucleotide sequence isolated from the Sargasso Sea
aaacttccaggaagtaaatcagctggaagagttcaatctgttgctcttagaattatatgtgaaagagaaaatgaaattgaacattttaaacctgaagaatattggtctattgatgttttattaaaatctaaagacaaccagatatttaaatccactttaaaacaaattaacgataaaaaattaaaaaaactagatattggtacagaggcattaaccaaagaatatatagatataattaattctaaaacttataaagtagatgaattaaaatctaaagaagtaaaaagaaatccgtatgctccctttaccacttcaactcttcaacaagatgcgggtaataaatttggatattctgctgcatcaacaatggggaaagctcaaaaattgtatcaaaatggttttataacttatatgagaacagatagtatagttttatcaaatgatgcaataagccaatctagagaatatataaaaagtaattttggtgataattatttacctaacgaggcaagagtttataaatctaaagcaaaaaatgctcaagaagcccatgaggcaattagacctactaatattagtaattctcctgaaaaaataaaaaatgaaattgggccagatgaatttgaattatataaacttatatggaaaagaactgttgcctctcaaatgagtagcgcaatatttaaacaaataactttaactataaaagcaaatgacaattcagttcttttacaatcaacaggctcctctcctgtctttgatggcatgctaaaagtttataattatgaaaaaaaatcaactggaaaagaggatgaaacaaatatcataccaaatatcaatacaggcgatgaagttgaaatcgaaaaa

SEQ ID NO: 293489 - DNA, 937 bp, Unknown
  Bacterial polypeptide expressing nucleotide sequence isolated from the Sargasso Sea
caccgagtaagatttaacgaaattacaaaaagttcaatattagaatctttctcagatcctaaggaaatagatcaagatctagtaaatgcccaacaagcaaggagatttcttgatagggtagtaggttttgaactgtctccactattatggaaaaaaattgcaagaggtttgtctgcaggaagagttcaatctgttgcattaagattgctttgcgaaagagaaaaattaatttctcaatttcaacctgaggaattttgggaagtttcagcaacgttagaaaattttaatcatgaagaaatcttatttaagttaaatagaaaaaaaagcgatcctcttctaaaagaggatgaagcgaagaaaatagaggagcttgtaggtagttcaagtttagaaatatctgaaatcactaaaaaacctactacggttaaaccaaaagcaccctttataacatcaactcttcagcaggccgctagctcgaaattgagttttggagtctcaagaacaatgcgagttgcccaaaaactttatgaagctggaagaatcacttatatgagaactgatgctcctagcttaagtaatgattcgattgaagatgcaagactgtttattaaagatactctagctgatgaatacctaacggaaaaacctcgaatatattcagggaaagaaaatgctcaagaggcgcatgaggcaataaggccaacaagtgcaagcttaactcctgaaaagctcaccggtcactcagaagaagaagtaaaattatatgacctaatttggagacagttcattgcatgccaaatgcctgatgcaaaatatttatcaattaatgcaaaagtcattcttgatgattatgttttcagtgcaagaggaagagaagtaatttttgatggttatacaaaaaatatcttcacaaaaatgctaaaaaagcagacgaaga

SEQ ID NO: 293490 - DNA, 916 bp, Unknown
  Bacterial polypeptide expressing nucleotide sequence isolated from the Sargasso Sea
ttttcttttaaaaataaagaggatattaacgatgttgctgaacgaattaagaaattaaaatttaatatttctgatatatcttcaaaagttgttagcagaaatccttctggtccttttactacatcaacgcttcagcaagtttcctctggtagactaggcttaggtgcatcaagaacaatgcaacttgctcaaaaactttaccaaggaattgaaatcgatggtgagactataggtttaataacatatatgagaactgacggaacaaatatatcagaagaggctgtctctaattttagaaattatatagaaaaaatatatggagataaatatcttcctaaagatccgttaaactattctggtaaaaaagcaaagaatgctcaagaggctcacgaagcaatacgacccactgatatagaaagatcacctgataaagtaaaaaaatatttaagtcctgagcaacataaattgtatgatctaatttggagtagagctttatcatctcaaatgcaatcagcacaatttgatagaaacacaattacaatttcatcagataacaaagaaactattttgaagaccactggttcggtgattaaatttgatggttatttaaaaatttataaagatcctaaaaaagaagacggtgaaagtattttacctaaaatgtcaattggtcctattaatattgaaagtcttatagatgaacagcattttacacaaccaccacctagatattcagaggcaagtttagtaaaaaaacttgaagaactaggtattggaagaccctctacatacgctagcatcatttctgttatatctaccagaggttatgttgaaactttaaataaaagatttcatcctacagatagaggtaaattaataacagccttttggaaaagttattttcgaaatatgtaga

SEQ ID NO: 293491 - DNA, 904 bp, Unknown
  Bacterial polypeptide expressing nucleotide sequence isolated from the Sargasso Sea
atttctgaaagagagaaagaaattttaaattttaatcctgaatcctcttacaaaacgtctgctgaatttgttaatagtaatggaataaaatttaaatctaaatattccatcaacacaaatgatgacgataattttagttcttttattgaaggttttaaagatgctaagtttagtgtcagtactatcaaaaaaagtcctttaactaagaaaccagctccaccattcacaacctcaacaatgcaacaagaagctgcaagaaagttaggatttaatgtttcaagaacaatgcaaacagcacaaagactttacgaagccgggcacataacatatatgagaactgatagtgtaacactttctgaaactgcacaaaattcaattaaaaatgctattgaagtaaaatttggatctaactatcatcaatccagaaattttagtaataaaagtaagaatgctcaacaagcgcatgaagctgtaagaccaacaaactttttgaataacattcaaaatcttgacgctgatcaatctaaactttatgacttgatttggagaagaactgtggctagtcagatgtcagatgctaaagttgataaaacaactgtaaaaatcaaatcaaataatcatgaaggtcttttccaatctgatggagaggtaataaaatttgatggttttctaaaactttacattgaatcaaaggataatcaaaataatgaagattcccaaaataatgtacttcccaattttattgagggagaaatagttattaaagaaaaagtattggttacacaattctttactaaaccaccttacaggttcactgaggcttctctcgtaaaaaaacttgaggagcttggtataggacgcccgtccacatatgccccaactataacaactgtcagaacagaaa

SEQ ID NO: 293492 - DNA, 892 bp, Unknown
  Bacterial polypeptide expressing nucleotide sequence isolated from the Sargasso Sea
tatctagcaactgacttagatagagagggtgaggctattgcatggcatttaaaagaagttttaggaccaaaatataattattcaagaataagatttaatcaaattacaaaggcagcaattttagactctttttctaatccaaaggaaattgatttaggtttagttaaagcatatagagcaagaaggttcttagataaggttattggtttcgagttgtcgccattgctttggaaaaaaatagcaagaggtttatctgcaggaagagttcaatcggttgcattgagattattagatgaaagagaaagatctattcaggaatttattcctgaagagttttgggatattaaattagatataaaattaaacacagaagaagtaatccaatttagccttgtaagaaagaaatcagatccactattaacaaaagtagaatcagaagaaattcaaaatcaggtcaataatgctgaattatttatcaatgaaatttctaaaaaaccagttaaggttaaacctaaaccaccttttataacctcaacacttcaacaatctgcaagcacaaggttaagttttaatgttaagagaacaatgagggttgcacaaaaattatatgaagcaggttatataacatatatgagaactgatgcacctagtttaagtgaaacatccataaatgatgcacgaaatttcattaaagagaatctaagtgataaatatttgacaagtaatcctagggtatattcaagcaaggaaaatgctcaagatgctcatgaagcaattaggccaacaaatgctcatcttcgagcaatagacttgattaatctatctgatgaagaaacaagattgtaccaattaatctgggaacgttttatagcatctcaacttccagatgcag

SEQ ID NO: 293493 - DNA, 592 bp, Unknown
  Bacterial polypeptide expressing nucleotide sequence isolated from the Sargasso Sea
atgaatcttgtcatagttgaaagtcctgcaaaagctaaaacaattaataaatatttgggtggtgactatacagttttagcaagttacggacatataagagatcttccctctaaaaatgggtctgtagatcctgaagataaatttaaaatgatatgggaagttgatagtttttcaaaaaaatatttaaaagaaattactgatgctgcaaaaaaatcagaaaaaattattcttgcaacagacccagatcgtgaaggtgaagctatagcttggcatgtaagagagtacttggaagaaaaaaaacttttaaaagataaaaaaattgaaagagtagtttttaatgaaattactaaaaaagctgtaaccaatggaatagataatccaagaaatatagaaactaatttagttgatgcttatatggcaagaagggcattggattatttagttggattcaatatctctcctattctatggacaaaactaccaggttcaaaatctgcaggtagagttcagtctgttgcactaagattgcttactgaaagagagcatgaaatagaacaatttaaacctgaagagttttggtctttaaatgtta

SEQ ID NO: 293494 - DNA, 679 bp, Unknown
  Bacterial polypeptide expressing nucleotide sequence isolated from the Sargasso Sea
tatgggcaaatcgctagtaattgtagagtcacctgctaaggctaaaacaattaataaatacttaggtaatgactttatcgtaaagtccagtattggacatgtacgagacttacctacctcaggttcgagcaaagcaaaagtgccggcaactaaaacgccagcagaagtgcgtaaaatgccaccggatgagaaagcagcttataaacagcaacgagattacacaaacttggttgcacgtatggggattgatcctgaaaaaggctggcagcctcattacgaaatcctaccgggtaaagaaaaggttgttcaagaattacaaaagctggccgaaaaagcagaccaaatatacctcgcaacggatttggatagagaaggggaagcaattgcttggcaccttcaagaaatcatcggtggcgaaccagaaaaatacaaacgcgttgtttttaacgaaattactaaaaatgccattcagcaagcgtttgaaacaccgggtgagctaaatactgacatggtatttgctcagcaaactcgtcgctttttagaccgtgttgtgggctttatggtatcgccgcttctatgggcaaaagtagcgcgtggtttatctgcagggcgagtacagtcagttgcagtacgattactcgtagagcgtgagcgtgaaataaaagcgtttatttcagaa

SEQ ID NO: 293495 - DNA, 805 bp, Unknown
  Bacterial polypeptide expressing nucleotide sequence isolated from the Sargasso Sea
tctagtcatagttgaaagtcctgcaaaagcaaaaactataaacaaatatcttggtgatgattatactgttttagcaagttatggacatataagagatttaccatcaaaaaatggatcggttgatcctgatcataattttaaaatggaatgggaagttgatagtttttcaagaaaatatttaaaagaaataactgatgttgctaaggaatccactaaaataatacttgctactgaccctgaccgcgaaggtgaagctatagcttggcatgttaaagagtatcttgatgaaaaaaaacttctgaaagataaagaaattgaaagagttgtttttaatgagataaccaaaaaagctgtaattcatggaattgaaaatcctagacaaattgaacctttgctagtggatgcgtatatggcaagaagagcccttgattacttggttggttttaatatttctccaatactttggactaaactacctggatcaaaatcagcaggaagagttcagtctgtagctttaaaattgatcactgaaagagagcatgaaatagaattatttaatcctgaagaattttggactcttgctattaaatttggtgatagtaataaaaatactatcactgcaagtatcactcaattaaatggaaaaaaaatagaaaaatttacttttagagataagaatagcattgaaaatgcaatcaaagaaataaaagagaaaaaatttcaaataacagatatttcatcaaaagttgtaaaaagaaacccctcaggtccatttacaacttcaacactacaacaagtagcatct

SEQ ID NO: 293496 - DNA, 934 bp, Unknown
  Bacterial polypeptide expressing nucleotide sequence isolated from the Sargasso Sea
tttaatgaaatacaaggggatgcaattttaagagcttttcaaaatcctcgtgatttagatgatgagctagttgaggcatattttgctcgccgagccttagattatttagttgggtttaacctctctcctgttttatggcgtaagttaccgggaagcaaatcagctggaagagtccaatcggttgccctccgtctcatttgtgagagagaaaccgaaatagaaaactttaaaactcaagagtattggactatcaacttcactttcttaacaaaagaaaaccaaaaagtcgccgctaatctgacccacctaaaaggagaaaaaattggaaagctatatttcaagaatgaaactagtgcgcaaaaggcaatagactttattaaaggtaaaaattttaaagttttaaatatcaatcaaaaagaaattcgtaaccatccacggccgccctttacaacctctactttacagcaagaggcatcgcgtaaactcagatttagtgccacaagaaccatgtctgtggctcaaaaattatatgaaggggtgcaagttgatggagaagcagtgggtttaattacatacatgcgaactgatggggttcagatggcaaaaactgccattggtgaagtcagagatctaataaaaaatgaattcggcgcaaattatgttccaaagtcgcctagaatttataaaacgaaagctaaaaatgcccaagaagctcatgaagctattcgtccgactgatgtcagccgttatccaaagcatctaattccttatctggatggagaccaagaaaaactctacaagttgatttgggatcggacaattgcaagtcaaatggagtcagctacgcttgaacaagtcgcagtatccataggttgccaagacgatatagcaatgctgagagctaacggctcagttatcacttttgatggctttt

SEQ ID NO: 293497 - DNA, 412 bp, Unknown
  Bacterial polypeptide expressing nucleotide sequence isolated from the Sargasso Sea
atgaatttagtcattgtagaaagtcctgctaaagcaaaaactatcaataaatatttgggtggtaattataaagttttagcaagttatggtcacataagagacttaccttctaaaaatggttctgttgatcctgatcaggattttaagatggagtgggaaattgatagtttttcaaaaaaatatcttaaagaaataactgatgcagcaaaagactcatcaaaaattatattagctaccgatccagatcgtgaaggtgaagctattgcatggcatgtgaaagagtatttaaatgaaaaaaaacttttaaaagataaagaaattgaaagagtggtatttaatgagataactaaaaaagctgtaatacaaggaattgaaaacccaagacaaattgagccacatttagttgatgctt

SEQ ID NO: 293498 - DNA, 877 bp, Unknown
  Bacterial polypeptide expressing nucleotide sequence isolated from the Sargasso Sea
agcagggcgtgttcatcagttgcagtaagattattggttgaaagagaaagagaaattagggcctttttgactgaaagtagcttcaaaactaaagctctttttaaaacaaaaaacgataaatctatttcttctcagcttgaaaaaattttaaaaaataaagatgaagcctacaaatttttagaaacaaacatatcttctaactttcatgttagtgatataaaaaagcgacccgcaaaaaaagctccagccccgccttttacaacatctacactccagcaagaggcttctaggaaattatatttttcagttagtaaaaccatgaatgttgcacaaagactttatgaagcaggatacataacttatatgagaacagatagtgtaaatttgtctgaagaggcaaaaaacaacataaataatcaaatcaaactttcttatggtgataagtatcttcaaataagacaatttaagacaaaaaataagggtgctcaagaggctcacgaagcaatacgaccaacagatttctcaaagaaaaaactaaatatagattatgatcaagctcgtttatatgaattaatatggcgaagagcacttgcttctcaaatgagagacgcagaacttgaaaaatctcaaatattaattaaaactgatgattataatgagagctttacagccagaggcgagataattacttttgatggatttttaaaactttatttagagggggtagatgatgaagttgacgatgacagtactattttacctcaagtaaaaattggagaggaactccaattagactctatcactgcaacggagcgtttttctagacccccttttagatattcagaggcttctttggtcaaaaaatggaagagttagg

SEQ ID NO: 293499 - DNA, 928 bp, Unknown
  Bacterial polypeptide expressing nucleotide sequence isolated from the Sargasso Sea
atgaatctggtcattgtgaaaagtccagctaaagctaaaactattaataaatatttaggatctgattatacagttttagcaagttatggtcatataagagatcttccttccaagaatggttcagtagataccgataacaaatttaaaatgatttgggaaatcgatagtttttctaaaaagtaccttaaagaaattacagacacagccaaagaatcaaaaaaaataattttagctacagatcctgatagagaaggagaagcaatagcctggcatgttaaggaataccttaatgaaaaaaaacttttaaaagataagcctatagaaagagttgtatttaatgaaataacaaaaaaagctgttatcaatggaattgaaaatccaagaaatattgagcctcttcttgtagacgcatatatggcaagaagagctctagattatttagttggttttaatatttctccaatattatggacaaaactaccagggtcaaaatcggcgggaagggttcaatccgttgccttaaaattattaactgagagagaacatgaaattgaagtttttgtacccgaagagttttggactttaaatatattatttaaaacaaaagaaaatgctctaatcaattcaaatataaatatccttgatggaaaaaaggttgataaatttacatttaaaaataaaaacgatgtaaattcagccatagaaaaaataaaaaaaattaaatatcaaatttctgatattagctcaaaaatattttcaagaaacccacaaggaccctttacaacatcaacattacaacaaacttcatctactaaattaggctttggagcctcaagaactatgcaaattgcacaaagattgtatcaaggtatagacatagatggtgaaactattggcttaataacttatatgagaactgatggtacaa

SEQ ID NO: 293500 - DNA, 730 bp, Unknown
  Bacterial polypeptide expressing nucleotide sequence isolated from the Sargasso Sea
aatgaatctagtgattgtagaaagtcctgcaaaagccaaaacgattaataaatatttgggtgataattttacagttttagctagttatggtcacattagagatttgccctccaaaaatggctcagtaaatccagaagaaaaatttaaaatgatttgggaagttgataccttctcaaagaaatatttaaaagaaataactgatgctgcaaaaaattctaataaaattattttggctactgacccggatcgtgaaggtgaagctatagcttggcatgtcaaagaatacttagatgaaaaaaaactattaaaagataaaaaaattgaaagagttgtttttaatgagattactaaaaaagctgtaacaaaaggaatagacaatccaagaaatatagagcccaacctggttgatgcatatatggcaagacgcgcattagattatttagttggatttaacatatcaccaatcttatggacaaaattacctggctcaaaatctgcaggtagagttcaatctgttgcattaagattgcttacagagagagaacatgaaattgaattatttaaacctgaggaattttggaccttaaatgtaatttttaaaactaaaaatggagatgtgcttaactctaatacagttttaattaataacaaaaaaatagaaaagttttcctttaaaaataaagatgaaataaataaatcaatatctcttattaaagaaaataaatataaa

SEQ ID NO: 293501 - DNA, 883 bp, Unknown
  Bacterial polypeptide expressing nucleotide sequence isolated from the Sargasso Sea
aaaagaatatttagatgaaaaaaaaattttaaaagatttaaaaattgaaagagtagtctttaacgaaattaccaaaaaagctgtaaccaatggaattgataatcctagaaatatagaaccaaatttagttgatgcttacatggctagacgagctctagattatcttgttggatttaacatttcccctattctatggacaaagttaccaggttcaaagtctgcaggacgagtacaatctgttgctttaagattattaactgaaagagagcatgaaatagaacaatttaatccagaagaattttggacattaaatgtaaattttaaaacttcaaaagcagatgttttaaattcaaatatcgtaatacttaacggaaataaagttgagaaattttctttcagaaataaagaagacacaaataaagcgactgaactaataaaaaaatcaaaatacaaaatttcagatataaattctaaaatttatacaagaaatccacttggtccttttaccacttcaactttgcaacaaactgcatcaagtaaattaggctttggtgcgtctagaactatgcaaatagcacaaaggttatatcaaggtatagatattgagggtgactctgttggtttaattacttacatgagaacagatggaacgaacatatcaaaagatgcattatcagactttagaaattttataaaaagttcttatggagataattatctacctaaagaacctaataattattctggtaaaaaagcaaaaaatgcacaagaagctcacgaagcaataagaccaactgatatttctagagctcctggtagtatgaaaaaattcttaagtaccgaccaacttaaattatatgatctaatatggtgtagagcactt

SEQ ID NO: 293502 - DNA, 354 bp, Unknown
  Bacterial polypeptide expressing nucleotide sequence isolated from the Sargasso Sea
tatgaatctagtcatagttgaaagtcctgcaaaagccaaaacaattaataaatacttaggagataattataccgttttagctagttacggtcatattagagatttaccatcaaaaaatggttcggttgatccagatcaaaattttaaaatggaatgggaagttgataacttttcaaaaaaatatcttaaagatattactgatgctgcaaaagaatcatctaaaattattttagcaacagaccctgatcgtgaaggagaagctatagcatggcatgtaaaggaatatttgaatgagaaaaaactactcaaagataaagaggttgaaagagttgtgttcaacgaaattactaaaaa

SEQ ID NO: 293503 - DNA, 880 bp, Unknown
  Bacterial polypeptide expressing nucleotide sequence isolated from the Sargasso Sea
cctgggatcaaaatcagcaggaagagttcaatctgtggccttaaagcttattaccgaaagagaaaaggaaatagaattatttaagccagatgagtattggactcttacatcggactttacaaataaaaataataaaaatattttttcaaaattaagtttatttaatggagaaaaaatagaaaaattttctttcaaaaataaagaagaaatacaaaaagcagttgatgtaatcaataaaacaaaatttaaaattacagatgtaaacacaaaagtattcagacgtaatcccctagccccttttactacttctaccttacagcaaactgcttcaggacgatttggttttggagcttccagaacaatgcaaattgcacaacgactgtatcaaggagtagatatcgagggtgaaactaccggattaattacttatatgagaactgatggaactaatatttcaaaagaagcaattgaagattttaggaaattcattactgatgattatggtgataaatatttgccagaggcaccgaatagttatactggaaaaaaagcaaagaatgctcaagaagctcatgaagcaattagaccaactaatataagtagaaaaccctctgacatcaaaaaatatgtaaatgcagatcaatttaaactctatgaattaatttggagtagagccctatcatctcaaatgacaccagcagaatttgatagaaatacgataattatttcgtcaattgataataaaattaactttagagctagtggctcagtagtaaaatttgatggatttcttaaagttttatcagttcaagaaactgacgaagatgcaaagaatattttgcctgaagtcaaagttggtgaagaaattagcatactttag

SEQ ID NO: 293504 - DNA, 714 bp, Unknown
  Bacterial polypeptide expressing nucleotide sequence isolated from the Sargasso Sea
aatgaatctagtcatagttgaaagcccagctaaagcgaaaacaattaacaaatatttaggtgataactataccgttttagctagctatggtcatattagagatcttccctcaaaaaatggatctgttgatcctgatcaaaattttaagatggaatgggaagttgatagcttttcaaaaaaatatttaaaagaaattaccgatgctgcgaaagattcatcaaaaataattcttgctactgacccagatcgtgagggtgaagcaatagcatggcatatgaaagaatatttaggtgaaaaaaaacttttaaaaaacaaagaaattgaacgtgtggtatttaatgaaataacaaaaaaagcagtgacacatggtattgaaaatccaagacagatagagcccttattagtcgatgcatacatggctagaagagcattagattatttggtgggatttaatatatcaccaatactgtggactaaattacctggctcaaaatctgctggtagagttcaatcggttgcattgaaattaattaccgaaagagaacatgaaattgaattattcaagcctgaggaattttggactttaagtattaattttcaggataaggacaaaagcaagattactgcaagtatttctcaacttgatggagaaaaaattgaaaaattttcatttaaaaataaagaggaaattgaaaaagcaatttccaatattaa

SEQ ID NO: 293505 - DNA, 876 bp, Unknown
  Bacterial polypeptide expressing nucleotide sequence isolated from the Sargasso Sea
aacaaaagataaaactttaatatcatcaaatatagttcaattagatggaaataaagttgaaaaatttacatttaacaataaagatgaagtaaatattgcaattgaaaaaatcaaaaaaaataaatatcaaattaatgatataaattctaaaactatcagtagaaaccctttgggtccatttactacatctacgcttcagcaaacttcttcgagtaaattaggttttggtgcatcacggactatgcaaattgctcaaagattatatcaaggcatagatatagagggtgaaacaattggattaattacatacatgagaacggatggaactaatatatcaaaagacaccatcgaacattttagaaattatattcttgataattatggaaaacaatatttacctcaaaatgcattaaattattccggtaaaaaagcaaaaaatgctcaagaagctcatgaagcaattagacctacggaaatttctagaacgcctgatagtataaaaaaatatttaagcacagatcaattcaagctatacaatttaatttggtcaagagcactttcatctcaaatggaatctgcaaaatttgatagaaaaacaataaatatttcttcatttgatggtaaaaatgtttttaaggctagtggatcttctattaaatttgatggttttttaaaaatattaaaaatagaagatataaaagatgaagaaaaaattttacccgatgttgtagaaggagatgtagaaattaatgaatttaaagatgaacaacattttactcaaccaccaccaagatattctgaagctagcttagtaaaaaaattagaagagttaggaattggaagaccatctacatatgctagtataatttctgttat

SEQ ID NO: 293506 - DNA, 716 bp, Unknown
  Bacterial polypeptide expressing nucleotide sequence isolated from the Sargasso Sea
tatgaatcttgtcattgttgaaagtccagctaaagctaaaactattaataaatatttaggatctgactatacagttttagcaagttatggtcatataagagatcttccttctaaaaacggttcagtagatactgataacaaatttaaaatgatttgggaaatcgatagtttttccaaaaagtaccttaaagaaattacagacatagctaaagattcaaaaaaaataattttagctacagatcctgatagagaaggagaagcaatagcctggcatgttaaggaataccttaatgaaaaaaaacttttaaaagataagcctgtagaaagagttgtattcaatgaaataacaaaaaaagcagttatcaatggaattgaaaatccaagaaatattgagccacttcttgtagacgcttatatggcaagaagagctctagattatttagttggttttaatatttctccaatattatggacaaagctaccaggatcaaaatcagccggaagagttcaatctgttgccttaaaattattaactgagagagaacacgaaattgaagtttttgtacctgaagagttttggactttaaatatattatttaaaacaaaagaaaatgctctaatcaattcaaatataaatatccttgatggaaaaaaagttgataaatttacatttaaaaacaaaaacgatataaaatcagccatagataaaataaaaa

SEQ ID NO: 293507 - DNA, 943 bp, Unknown
  Bacterial polypeptide expressing nucleotide sequence isolated from the Sargasso Sea
aaaaaatataattactcaagagtaagatttaatcaaataacaaaagatgcaattttaaactctttttctgacccaaaagaaattgacctcaatttagttaaagcatatagagctagaagattccttgataaggtaattggctttgagttatctccattgttatggaaaaaaattgcaagaggtttatcagctgggcgagttcaatcagttgcacttagattattagatgaaaaagaaagatcaattcaggaatttgtacctgaagagttttgggagatatcatttactggggcttctaagaatgaagaattaataaaatttaaacttaatattaaaaaaactgatccattacttacagaagagaaagtaaaaagtattgaaaagcaaattgaatcgtgcaatttagaaatcaacgaaattaccaaaaaaccagtcaaaataaaaccaaaggcaccttttataacctcaactcttcaacaatctgctagcacaagattaggttttaatgtcaaaagaactatgagagttgcccaaaagctatatgaagcaggtttaataacctatatgcgaactgatgctccaagtcttagcaaagaatcaattaatgacgcaagaggttttatcaacgaaaatcttggagataaatatctaacaaatgcaccaaaaatatattctagtactgaaaatgcacaagaggcgcacgaggctgttcgcccaacaaatgcgtttttaaaacctcaagatgtgttgcaattatctgaagaagaatcaaaactctataagcttatttgggaaagatttgttgcttctcaactaccagatgctgagtatttatcaacatcagcaaaaattgttatcgaagataatacatttattgctaggggaagagagctagtatttgatggatttacaaaaagtactctaaaagttctcgaaaagaaga

SEQ ID NO: 293508 - DNA, 894 bp, Unknown
  Bacterial polypeptide expressing nucleotide sequence isolated from the Sargasso Sea
aagaaatatcttaaagaaattactgatgcagcaaaagactcctctaaaattatccttgctactgaccctgatcgtgaaggtgaagcaatagcatggcatgtaaaagaatatttaaatgaaaaaaaacttttaaaagataaggaaattgaaagagttgtctttaacgaaattacaaaaaaagctgtgttacatggtattgataatccaagacaaattgaacctttgttagtagatgcttatatggctagacgagctttggactacttagttggttttaacatctcacctattctttggactaaattaccaggctcaaagtctgctgggagagtacagtctgtagcattaaagttaataactgagagagagcatgaaattgagtcattcaatccagaggaattctggactttaagtgttaaatttaaagataaaaaaaatcaaattataactgctagtataagtcaacttgaaaacaacaaaatagaaaaattttcttttaaaaataaagaggaaatcaataaggcaatatcaattattaataaaaaaaaatttagtattacagatatttcaagtaaaattataaatcgaaatccatcagggcctttcacaacatctacacttcaacaaacagcctcaagtagactaggttttggtgcatcaagaacaatgcaaattgcacaaaaactttaccaagggatagaaatagatggagaaactataggtttaattacttacatgagaactgatggaacaaatttgtcaaaagatgcagtctcaacttttagagactatattaaaaaagaaattggtaatgaatatttacctgagagttctctaaactattcaggaaaaaaagctaaaaatgcacaagaggctcacgaagcaattaggccc

SEQ ID NO: 293509 - DNA, 813 bp, Unknown
  Bacterial polypeptide expressing nucleotide sequence isolated from the Sargasso Sea
tttgaactgtctccattattggtggaaaaaaattgctagaggcttgtctgcaggaagagttcaatctgttgcattaagattgctttgcgaaagagaaaaattaatttcacaatttcaaccagaggaattttgggaagtttcagcaactttaaaagattttaatcatgaagaaatcttatttaagttaaatagaaaaaaaagcgaccctcttctaaaagaggatgaagcgaagaaaatagaggagctcgtaggtagttcaagtttagaaatatctgaaatcacaaaaaaacctactacagttaaaccaaaagcaccctttataacatcaactcttcagcaggccgctagctcgaagttgggttttggggtctcaagaacaatgcgagttgcccaaaagctttatgaagctggaagaataacctatatgagaaccgatgctcctagtttaagtaatgattcgattgaagatgcaagactgtttattaaagatactctagctgatgaatacctaacggaaaaacctcgaatatattcagggaaagaaaatgctcaagaggcgcatgaggcaataagaccaacaagtgcaagcttaactcctgaaaagctcaccggtcactcagaagaagaagtaaaattatatgacttaatttggagacagttcatcgcatgccaaatgcctgatgcaaaatatttatcaattaatgcaaaagtcattcttgatgattatgttttcagtgcaagaggaagagaagtaatttttgatggttatacaaaaatatcttcacaaaatgctaaaaaagcagacgaagaaaa

SEQ ID NO: 293510 - DNA, 748 bp, Unknown
  Bacterial polypeptide expressing nucleotide sequence isolated from the Sargasso Sea
tatgaatctagtcatagttgaaagccctgctaaagcaaaaacaattaataaatatttaggagataattataccgtgctagctagctatggtcatattagagatcttccttcgaaaaatggatcagttgatcctgatcaaaattttaaaatggaatgggaagttgatagcttttcaaaaaaatatttaaaagaaattactgatgctgcgaaagattcttcaaagataattcttgcaactgacccagatcgtgagggtgaggctatagcttggcacgtaaaagaatatttagatgaaaaaaaacttttaaaagacaaagaaattgaacgtgtggtatttaatgaaataacaaaaaaggctgtcacacatggtattgaaaatccaagacagatagagcccttattagtcgatgcatacatggctagaagagcattagattatttagtcggatttaatatatcaccaatactatggactaaattacctggttcaaaatctgctggtagagttcagtctgttgcactgaaattgattactgaaagagaacatgaaattgaattgttcaaacctgaagaattttggactttaagtattaattttcaggataaaaacaaaagcaaaattacagcaaatatttctcaacttgatggggaaaaaattgaaaaattctcatttaaaaataaagaggaaattgaaaagacaatatctaatattaagactaaaaaatttaacataactgatatttcctca

SEQ ID NO: 293511 - DNA, 882 bp, Unknown
  Bacterial polypeptide expressing nucleotide sequence isolated from the Sargasso Sea
agatttaatcaaattacaaaagatgcaattattaagtctttctctgatccaaaagaaatagaccttaatctggttaaagcatacagagctagaagatttttagataaagttattggttttgaattatctccattgctttggaaaaaaattgcacgaggcttatcagcaggaagagttcaatcggttgctttaagacttttagacgaaagagaaaggtctatccaagaatttattccagaggagtattgggaaatttcgttttcagccactactaataatgatgaaacaattacatttaatcttgcaactaaaaaaacagatccattactctcaaaagaaaaagttgaaacaataaaacaacaaatagaatcatgcaatttatcaataaatgagatttctaagaagccagtaaaagttaaaccaaaggctccttttattacatcaacactccaacaatcttctagcacaagattaggttttaacgtaaaaagaaccatgcgagttgctcagaaactttatgaggcaggcttaataacatacatgagaactgatgcccctagtttgagtaaagaatctataaaagatgctagaagttacattaatgaaaatattggagagagatatcttaccaatgctcctaaaatttattctagtactgaaaatgctcaagaagctcatgaagcagttagacccactaatgcttatttaaagccacaagatgtaatgtatttatctgatgaagaatcaaaactttacacattgatttgggaaagatttattgcttcacagatgccagacgccgagtatttgtctacatctgcaaaggtctttgttgaggaaaacgtatttattggcagaggtagagaagtagtttttgatgga

SEQ ID NO: 293512 - DNA, 782 bp, Unknown
  Bacterial polypeptide expressing nucleotide sequence isolated from the Sargasso Sea
gatggattatgattttaccgcccgcatggaaggcgagctggatgagattgccgaaggtgaggtggactggaagaaggtcctgaacgacttctacgggaactttcgccagcagctggagaatgccgagagcagcggcgagaaggggatgcgggcaaataccccgactgaaaccgatattccctgtcccagctgcggtcgcaacatgcagattcgtgttgccagtaccggggtgttcctgggctgttccggctattcgctgccgcccaaggaacgctgcaaacagaccattaacctggtttccggggatgaggtggtcagcgccgacgaggatgtggaaggtgaaggtgaaacccgactgctgcgcaaaaagcgccgctgtcccaagtgtggtacagcgatggacagctacctggtcgatgagaaacgcaaactgcatgtgtgcggtaacaacccggactgttccggttacgaggtggaagaaggcactttccgcatcaagggctatgacggcccgacactggaatgcgacaagtgcggcgcggagatgcagctgaaaaccggccgcttcggcaagtacttcggctgcaccaataccgagtgcaagaacacccgtaaattgctgaaaagcggcgagccggcaccccccaagatggatccggtgccgatgcccgagctgcaatgccagaaagtggatgatacctacgtactgcgtgacggtgcctcggggctgttcctggctgccagcaaattccccaagaaccgggaaacccgaccgcccctgg

SEQ ID NO: 293513 - DNA, 970 bp, Unknown
  Bacterial polypeptide expressing nucleotide sequence isolated from the Sargasso Sea
agtggtaagaaagcaaaaaatgcacaagaagcccatgaagctatacgcccaacagaaattgttagaaaacccgaagaaattaaaaaatatttaagtaacgatcaatataagctttataatttaatatggtctagatctttatcttctcaaatgcagtcggcaaaatttgatagaaaaactataacaattaactctgatgataacaaaaatatatttaaagccagtggttcaactttaaaatttgatggttttttaaaactttataaaattgatgaaaatgattcagataatgaaaatattttgcccgacgtcgaaataggtgaagtaaaatttgatgattatattgatgagcaacattatactcaaccaccaccaagattttctgaggcaagtttggttaaaaaattggaggaattaggtattggaagaccttctacatatgcaagcattatatcagttattgctaatagaggttacgcagacataaataataaaagattttttccaaccgataggggtaaattgctttctgcattcttagagaagttatttacaaaatatgtagattacgattttactgcaaagttagaggatcaattagacgacataacatcaggaaaagaaaattggataaaagtcttagaaaatttttggaaagactttaatattaatgtttctggtgtgaaagaaaaaagaactagagaggttcttgatttattgaatgaaagtcttggatctctaatatttgaagttgataaaaatggaaatattaatagaaaatgtcaactttgcaaaacaggtcaattaagtttaaaaaatagctttagaggtggtgcatttataggttgttcaaattaccctgactgtaaatttaccagacctttatctaaatcaaaagctgctcagcaattaacattggctgaaccaaagctaataggaaaaaatgataaagataaagatatttatctaa

SEQ ID NO: 293514 - DNA, 892 bp, Unknown
  Bacterial polypeptide expressing nucleotide sequence isolated from the Sargasso Sea
attggcaactgaccctgatagagagggggaagctattgcttggcacgtaagagagattttagaaagtcgtaagcttttaaaaggaaaaaaagttgaaagagttgtatttaatgaaattacaaaaaaagctgtaactaatggaataaataatcctagagaaattgaatcactcttagtagatgcgtatatggcaagaagggctttggattatcttgttggatttaatatatcaccaattttgtggactaaactcccgggctctaaatctgcaggtcgagttcagtctgtagctcttagattagtgactgagcgtgaacatgagattgaacttttcaaaccacaagaattttggacgatttcatgtgattttaaaaatggagaaaataaaattattaaatctaaactttcactttttaataaagaaaaaattgagaagttttcttttaagaaaaaagtagagtcagaaaatgctttgaaagaaattaattctaaatcttatgaaataactgatgtttcatcaaaggtttataaaagaaatccattagcacctttcacaacctcaacattacaacaaacagcctcaggaaaatttggatttggtgcatcaagaactatgcaaattgctcaaagactttatcaaggaattgatatcgatggtgatacggttggattaataacctacatgagaacagatggaacccagatttctaaagacgctattgatgattttcgaaaatttataaacaatacgcatgggagagaatatcttccagaaaatcccaatagttatactgggaaaaaagcaaaaaatgctcaagaggcgcatgaagctattagacctaccgacgtttccaaaaagccaagtgatatgaaaaaatatttaagtacagat

SEQ ID NO: 293515 - DNA, 676 bp, Unknown
  Bacterial polypeptide expressing nucleotide sequence isolated from the Sargasso Sea
atgaatcttgttattgttgaaagtcctgcaaaagcaaaaactataaacaaatatttgggtgataattataaagttttagcaagttacggtcatataagagacttgccctctaagaatggttctgttgaccctgaacaagactttaagatggaatgggaaattgacagcttttcaaaaaaatatcttaaagaaattacggatgcagcaaaagaatcatcaaaaattatattagctactgaccctgatcgagaaggtgaggctatagcttggcatgtaaaagaatatttaaatgaaaaaaaacttttaaaagataaagaaattgaacgggttgtatttaatgaaataactaagaaagctgtcatacatggaattgaaaaccctagacaaattgaaccattgctagttgatgcttatatggctcgaagagctttagattatttagttggttttaatatttcaccaatactttggactaaactaccaggttcaaaatctgcaggaagagtccaatcagtggctttaaaattaattacagaaagggagcatgaaatagaatcatttaaaccagaagaattttggaccttgagtataaaatttgtagatcaaaaaaatcagaatattactgctagcatcagccaattggataataataagattgaaaaattttcatttagaa

SEQ ID NO: 293516 - DNA, 946 bp, Unknown
  Bacterial polypeptide expressing nucleotide sequence isolated from the Sargasso Sea
acgttaaaagatatggaatctgatgcgcagaaactgtatcagctgatctggcgccagtttgtcgcctgtcagatgacgcctgcgcagtacgactccaccacgctgacggtgaaagccggcgatttcaaactgaaagcccgcggccgtacgctgcgctttgacggctggaccaaagtaatgccagctctgcgtaaaggcgatgaagaccgtactttaccgatggtcaataagggcgacagcctgagcctggtcgagctgacccctgcgcagcactttaccaagccgccggcgcgttttagcgaagcttcgctggttaaagagctggaaaaacgcggcatcggtcgtccgtccacctatgcgtcgatcatttcgaccattcaggatcgcggctacgtgcgggtggaaaaccgccgcttctatgcggaaaagatgggcgaaatcgtcaccgatcgtctggaagagaacttccgcgatctgatgaactatgatttcaccgcgcagatggaagaccgcctcgaccaggtggctaaccatcaggccgagtggaagcaggtcctcgacagcttcttcggagactttacctcgcagctgcagacggcagagaaagatccggaagagggcggcatgcagccgaacccaatggtgctgaccaccatcgactgcccaacctgcgggcgcaagatggggatccgtaccgccagcaccggcgtattcctcggctgctcgggctacgcgctgtcgccaaaagagcgctgtaaaaccaccattaacctggtgccggaaaacgaagtgctcaacgtgctggaaggcgatgacgctgaaaccaacgcgctgcgcgctaaacgccgctgtaaaaaatgcggcacggcgatggacagctacctcatcgatccgaaacgcaagctgcacgtctgcggtaataacccgacctgcgatggctacgaga

SEQ ID NO: 293517 - DNA, 722 bp, Unknown
  Bacterial polypeptide expressing nucleotide sequence isolated from the Sargasso Sea
tatgaacctcgttattgttgaaagtccagctaaagctaaaactataaataaatatttaggagataattataaagtgttagcaagttatggacatattagagatcttccttctaagaatggttcagttgacccagaacaagattttaagatggaatgggaagttgatagtttttctaaaaaatatcttaaagaaattactgatgctgtaaaagactcttccaaaattatacttgctaccgaccctgatcgtgaaggtgaagccatagcttggcatgtaaaggaatatttaaatgaaaaaaaacttttaaaagataaagaaatccaaagagttgtgtttaatgaaataactaaaaaagctgtaatacatggtattgaaaacccaagacaaatcgaacctttgctagtggatgcttatatggctagaagagctttggattacttggttggttttaacatctctcctatactttggacaaaattaccaggatctaaatctgctgggcgagttcaatctgtagctttaaaattaatcactgaaagagaacatgaaattgagtcatttaaaccagaagaattttggactttaagtgttaagtttgtagatgaaaaaaatcagaatattacagctagtattagtcagctagataataataaaatagaaaaattttcatttagaactaaagatgaaataaataaagctgtattgaatataaacaaaaaaa

SEQ ID NO: 293518 - DNA, 511 bp, Unknown
  Bacterial polypeptide expressing nucleotide sequence isolated from the Sargasso Sea
atgaatctagtcatagttgaaagccctgctaaagcgaaaacaattaataaatatttaggtgataactacaccgttttagctagctatggtcatattagagatcttccttcaaaaaatggatctgttgatcctgatcaaaattttaaaatggaatgggaagttgatagcttttcaaaaaaatatttaaaagaaattactgatgctgcgaaagattcttcaaaaattattcttgctactgacccagatcgtgagggtgaagcaatagcatggcatgtaaaagaatatttagatgaaaaaaaacttttaaaggataaagaaatagaacgtgtagtgtttaatgaaataacaaaaaaagccgtcacgcatggtattgaaaatccaagacagatagagcctctgttagtcgatgcttacatggctagaagagcattagattatttagttggatttaatatttctccaatactatggacaaaattacctggttctaaatctgctggcagagttcaat

SEQ ID NO: 293519 - DNA, 894 bp, Unknown
  Bacterial polypeptide expressing nucleotide sequence isolated from the Sargasso Sea
tatgtcaaattcgctagttatcgttgagtctccttcaaaatcaaaaacactcgagagttacttgggcaaggattttaaagtattagcctcctacggccatgttcgagatcttttaccaaaaaaaggtgctgtggatccagataataactttgcaatgatatatgaagcaattgaaagaaatgaaaaagcagttaatgcgataaaaaaagccctcaaaaaagccgacacattatatctagctacagaccctgatagagaaggcgaagctatttcatggcatttgtatgagttattaaaagaaaaaggttgtttagagaataaggaagtgcatagagttgcattttatgaggtcactaaaagcgctgttaaagatgcaattaaaaatccaagagagctgtcaccaaatttaattgatgcgcaacaagctagacgtgctcttgattatctagttggttttaacttatcacctttactatggaaaaaaatacaaaaaggtttgtcagcaggacgcgttcaatcacccgctttaagaatgattgtcgaacgtgaaaaagagatagatgattttaaagctatagagtattggacaatagaatctgatcttgaatttgataattcaaattttttagggagattgacagaatataataacgagaagataaaaaaatttagcattgaaaatacagcaaaagcatccgatataaaatcaagtcttgagcaagcatcgacaggtgaattattggttaaaactgtcacaaaaaaacaaaggaaaagacagcccacagctccatttataacatcaacattgcagcaagaggcaattagaaaactaggttttacggcacaatggacaatgagagtagcacaacaactttatgagggaattgatgtcgg

SEQ ID NO: 293520 - DNA, 876 bp, Unknown
  Bacterial polypeptide expressing nucleotide sequence isolated from the Sargasso Sea
aaaaatcaaaatatcctagcaagtattagtcaactagataacacaaaagttgaaaaattctcttttaaaaataaagatgagataaataaggccatatcaagtatcaatcaaaaaaaatttaatattactgatatatctagtaaagtggttaatcgtaatccatcaggaccatttacaacatcaactcttcaacaaacagcttcaagtcgattaggttttggggcatcaagaactatgcaaattgcacaaaaactttatcaaggagtcgaaattgaaggagaaactataggtttgataacatatatgagaacagatggtactaatttatcaaaagatgctgttatggcttttagagattatatcaaaaaagaaattggtaatgaatatttacctgaaagtgctttaaattactctggcaaaaaagcaaaaaatgcacaagaggcacatgaagcaataagacccactgatattatcagaactccccaaagtgtaaaaaagtatctaagtacagatcaaaataaactttatgatttgatatggagtagagctttatcttctcaaatgcaatctgctaaatttgacagaaatactattacaataacatcaaacaataatgatacaatttgcaaagcaagtggatcagttcttaaatttgatggatttttaaagatatataataatcaaggcaaggatgatgatgaaaacattctaccctctgtatctaaaggacttgtaaatattgagtccttagtagatgagcagcattttacacagcctcctccaagatattctgaggctagtttggtaaaaaaactagaggagttaggaataggaagaccatctacttatgcaagtataatttctacaatagctaaa

SEQ ID NO: 293521 - DNA, 728 bp, Unknown
  Bacterial polypeptide expressing nucleotide sequence isolated from the Sargasso Sea
tttagctagctatggtcatataagagatttaccatctaaaaatggttcagtagatcctgatcaaaattttaagatggaatgggaagttgatagtttttcaaaaaaatatctaaaagaaattactgatgctgcaaaagaatcttctaagattattttagccactgacccagatcgtgaaggagaagcgattgcttggcatgtaaaagaatatctaaatgaaaaaaaacttttaaaagacaaagaaattgaaagagttgtttttaacgaaataacaaaaaaagcagtaactcatggaattgaaaatccaagacaaattgaacccttattggttgatgcttatatggctagaagagcactagactatttagttggttttaatatctcaccaatattatggacaaaacttcctggctctaaatctgccggaagagttcaatctgttgctttaaaattaattactgaacgtgaacatgcaattgaatcttttcaacctgatgaattttggacgttaactgttaattttcaaaatgataaaaatgataagatatcagcgagcatctctcaacttaatggagtaaagatagaaaaattttcttttaaaaataaaaatgatatagatgctgcaatttcagaaatcaaaaataaaaaatttaaaataactgatatttcgtctaaagtagttagtagaaatccatctggtcctttcacaacttctacgcttcaacaag

SEQ ID NO: 293522 - DNA, 802 bp, Unknown
  Bacterial polypeptide expressing nucleotide sequence isolated from the Sargasso Sea
acattacaacaaactgcgtctggaaaatttggttttggggcctcaagaacgatgcagattgctcaaagactttatcagggaatagaggttgacggagatacagttggtcttattacatacatgagaactgatggaacacaaatttctaatgaagctatttctgattttagaaatttcataaacaaagaacatggcaaagaatatcttccagatactcctaacagttatactggaaaaaaagcaaaaaatgcacaagaggcgcatgaggctattagaccaacagatgtgtcaagaaaaccttcggatatgaaaaaatatttaagcactgatcagtctaaactttatgagctaatttggaatagagccgtatcttcgcaaatgaaccctgctgaatttgatagaaaaagtataactatagagtctgataataaaaaaattaattttaaagccaatggttctactgttaaatttgaaggatatttaaaagtctataaatttgaagaaaaagatgaagatcttaagaatattttacctgaagttaaagttggtgacaaggtctctataaaggagttaattgacgatcaacattttacagacccaccaccaagattttcagaagctagccttgttaaaaagatggaagaattaggaataggacgtccatcaacttatgcaagtataatatcagttttatcaactagaaattatgttgaattattgaataagagatttcacccaactgatagaggtaaattattatctgcgtttcttgaaaaattatttactaaatatgtagattata

SEQ ID NO: 293523 - DNA, 385 bp, Unknown
  Bacterial polypeptide expressing nucleotide sequence isolated from the Sargasso Sea
atgaatctagtaattgttgaaagtcccgctaaagcaaaaacaataaataaatatctaggaaatgattatacagtcctcgctagttatggacatattagagatcttccatctaagaatggctcagtagatcctgaaaatgaatttaagatgatttgggaaattgatagtttttctaaaaaatatttaaaagaaatttctgatgtagcaaaagactctaaaaaaataatacttgccacagaccctgacagagaaggtgaagcaattgcatggcatgttaaagaatttttaaatgaaaaaaaactactcaaggacaaaaaaattgagagagttgtttttaatgaaataactaaaaaggcagtcacaaatggaatagaaaatccaagag

SEQ ID NO: 293524 - DNA, 358 bp, Unknown
  Bacterial polypeptide expressing nucleotide sequence isolated from the Sargasso Sea
tatgaatctagtcatagttgaaagtcctgcaaaagccaaaacaattaataaatacttaggagataattatactgttttagctagttacggtcatattagagatttaccatcaaaaaatggttcggttgatccagatcaaaattttaaaatggaatgggaagttgataacttttcaaaaaaatatcttaaagatattactgatgctgcaaaagaatcatctaaaattattttagcaacagaccctgatcgtgaaggagaagctatagcatggcatgtaaaggaatatttgaatgagaaaaaactactgaaagataaagaggttgaaagagttgtgttcaacgaaattacaaaaaaagct

SEQ ID NO: 293525 - DNA, 855 bp, Unknown
  Bacterial polypeptide expressing nucleotide sequence isolated from the Sargasso Sea
accctcgcttgaagtcaatcaacaattaatccttaaagatattgataataaagaaaaatacaccaagcctccggcaagattttcagaggctgcattggttaaagaactcgaaaagaaaggcatcggaagaccatctacttatgcaaatattatttcaacaatacaagatcgaggatatgttgaaattcaaaatagacgattttttgtaaaaaaaattggaatgattgtcacagataggcttgtaagtagttttgatgacatcatggattacagcttcacagctaattttgaagatcagttagatagaattgcaagtggtgagctaaattggaaagaagttttaaattcttattattcagctttccaagatgatctttcttcagcaatggatgaagaaaatggaatgtctcctaatcttcccactatgacaaatattaattgtccagaatgcaaaattaataaacttacaataagaaatgcaagtaatggtgtctttcttggatgtgcaggctatagcttgccagctgaaatgcaatgcaaaaaaacattgaaccttatttcaggcgatgaagcggtaagtattgatgatcaagaggaagcagaacatttagttactaaacgacgttgcccaaagtgcgacaccagcatggataactaccttttagatgaaaatcataagctgcatgtttgctcaaataatcctgactgtgatggatttgaagttgaagagggagcctttaaaatcaaaggatatgatggtcctaccttatcatgtcataagtgtggttcggagatgcaacttaaaacaggcagatttggtaaatactttggttgtatgaatgataattgtggtgc

SEQ ID NO: 293526 - DNA, 914 bp, Unknown
  Bacterial polypeptide expressing nucleotide sequence isolated from the Sargasso Sea
ttgatcctgaaaataaatttcaaatgggagtggggaaatttggactctttttcaaaaaaatatcttaaagaaatcactaatgctgctgaagattctgataaaattattttagcgacagatcctgatcgtgaaggtgaagccatagcttggcatgtaaaagaagttttagaaaaaaagaaattactcaaagataaaaatttggaaagagttgtgtttaatgaaattactaagaaagcaatacttgatgctataaaaaacccaagagaaattcatttacctttagttgaggcttatctagctagaagagctctagattaccttgttggattcaatatttctccaattttatggactaaacttcctggatctaaatctgcaggaagagttcaatctgttgctttaaaactaatcacagaaagagagaaagaaatcgaactttttaaacctgaagagtattggaccttgacatctgattttaccaataaagataataaaaatattttttcaaaattaagtttattcaatagtgaaaaaattgaaagattttcttttaagactaaggatgaaatacaaaaagctattgatgtaattaacaaaacaaaatttaaagttgatgacgtaaacacaaagttatatcgtagaaatccacttgctcctttcactacttctactttacaacaaactgcatccggacgttttggttttggtgcttctagaaccatgcaaatcgctcaacgactttatcaaggtatagacattgagggagaaacgactggtttgattacttatatgagaacagatggcacaaatatatcaaaagaagctatagaagattttagaaaatatatttctgaagattatggtgaaaaatatctgcctaaagaagctaatagttacactggtaaaaagcaaaa

SEQ ID NO: 293527 - DNA, 850 bp, Unknown
  Bacterial polypeptide expressing nucleotide sequence isolated from the Sargasso Sea
tgggaggtggatagtttttcaaaaaaatatttaaaggaaataaccgaagttgccaaaaaatcaaataaaataattcttgcaaccgatcctgatcgtgaaggtgaagcaatagcctggcatgttaaagagtatttgagtgaaaaaaagattttaaaagataaaataattgaaagagttgtatttaatgaaataactaaaaaagctgttacgaacggtatagataacccaagaaatatagaaactaacttagttgatgcttatatggctagaagagctttagactatcttgttggtttcaatatatctcctatattatggactaaattaccaggatctaagtcagctggaagagttcagtctgttgctttaaaattattaactgcaagagaacatgaaattgaacaatttaatccagaagaattttggactttaaatgttaattttaaaactttaagtgaagatattttaaattgtaatttaattttactaaatggtgaaaaggtagaaaaattttcttttcgtaataaggaagatattattaaagcaatcgaattgataaagaaatcaaaattcaatatttcagatgttacatccaaaatattttcaagaaatcctttagggcccttcactacctcaactttacaacaagcggcgtccagtaaattaggttttggagcttcaaggacaatgcaaattgctcaaagattgtatcaaggtatagatgtagaaggtgagactgttggattaattacttatatgagaacggatggaacaaatatatcaaaggatgcagtaagtgaatttagggattttataaaaaattcttatggtaatgattatcttccaaaag

SEQ ID NO: 293528 - DNA, 856 bp, Unknown
  Bacterial polypeptide expressing nucleotide sequence isolated from the Sargasso Sea
ttatacagtattagcaagttacggacatattagagacttgccatcaaaaaatggatcagttgatccagaaaataaatttaaaatgatttgggagattgatagcttttcaaaaaaatatttgaaagaaatagttaatgtagccaaagattctgaaaaagtaatacttgcaacagaccctgatcgtgaaggtgaagctattgcctggcatgttaaagaatatcttgatgaaaaaaaattattaaaagataaaaaaattgaaagagttgtttttaatgagataactaaaaaagctgttactaatggtattgaaaatccaagaaatatagaaactcagttagtcgatgcatatatggcaagaagagctttggattatcttgtgggttttaatatttcaccaatattatggactaagttgccaggctctaaatccgctggaagagtccaatctgttgcactaagattattaactgaaagggagcatgaaattgaaatatttataccagaagaattttggactttaaatgttatttttaaaacaaaaagcaatgacttgattagagcaaatattattcaacttaatggaaataaaattgaaaaattctcatttaaaaataaagaagaaattaatatagcggtcgaaaaaataaaaaataacaaatatgaaatcacagatattacctctaagattttttcaaggaatccattaggtccatttaccacatcaactcttcaacagactgcatcaagtaaattaggatttggtgcctcaagaacaatgcaaatagctcaaaaactttatcaaggaatagatatagatggagatactgttgggttaataacttatatgagaactgat

SEQ ID NO: 293529 - DNA, 787 bp, Unknown
  Bacterial polypeptide expressing nucleotide sequence isolated from the Sargasso Sea
atgaatcttgtcatagtagaaagtcctgcaaaagctaaaactataaataaatacttgggtaaagattataaagttttggcaagctatggacatgttagagaccttccctccaaaaatggttctgtcgatccacaaaataattttaaaatggaatgggaattagatactttttcaaaaaaatacgtaaaagaaattacagatgcagcagccgaatctaatagaattatactggcaactgatcctgatagagagggagaagctattgcttggcatgttagagaaattcttgaaagtaaaaaacttttaaagggaaaaaaagttgagagagttgtttttaatgaaattacaaaaaaagcagttactaatggaattaataatcctagagaaattgagtcacttctagttaatgcctacatggccagaagagctttagactatcttgttggtttcaacatatccccaattttatggacaaaacttccgggctctaaatctgctggacgagttcaatctgtagctttgagattgataactgaacgagaacatgaaattgaactttttaaaccagaagaattctggaccattgagagtaattttcaatacgatgacaaacttattaagtctaaattatctatttactcatcagaaaaagtacaaaaatttacattcaaaaaaaaagtggattctgaaaaggccctaaatgaaataaaaaatcaatcatataaaatagcagatgtctcttcgaaagtttttcgaagaaacccacttgcaccatttactacatcaa

SEQ ID NO: 293530 - DNA, 766 bp, Unknown
  Bacterial polypeptide expressing nucleotide sequence isolated from the Sargasso Sea
tgaaactgttgggttaattacttatatgagaactgatggaacaaatatttcaagagatgcggtttactcttttagagattttattacaaaaaattatggtgataaatatttaccagagaaagctttaaattacagtggtaagaaagcaaaaaatgcgcaagaagcccatgaagcaatacgcccaacagaaattattagaaaacctgaagaaattaaaaaatatttaagtaacgatcaatataagctttataatttaatatggtctagatctttatcttctcaaatggagtcggcaaaatttgatagaaaaactataacaattaactctgatgataacaaaaatatatttaaagccagtggatcaactttaaaatttgatggttttttaaaactttataaaattgatgaaaatgattcagataatgaaaatattttaccagaggtcgaaaaaggagaagtaaagtttgatgattataatgatgagcaacattatacacagccaccgccaagatattctgaagcaagtttggttaaaaaattggaggaattaggtattggtagaccttctacatatgcaagcattatatcagttattgctaatagaggttacgcggacataaacaataaaagattttttccaacagatagaggtaaattgctttctgcattcttagagaagttatttacaaaatatgtagattacgattttaccgcaaagttagaggatcaattagacgacataacatctggaaaagaaaattggata

SEQ ID NO: 293531 - DNA, 928 bp, Unknown
  Bacterial polypeptide expressing nucleotide sequence isolated from the Sargasso Sea
ccttcaaaaaatggatccgttgatcctgatcaaaattttaaaatggaatgggaagttgatagcttttcaaaaaaatatttaaaagaaattactgatgctgcaaaagattcctcgaaaataattctagctactgacccagatcgtgagggagaagctatagcttggcatgtaaaagaatatttagatgaaaaaaaacttttaaaggacaaagaaattgaacgtgtagtatttaatgaaataaccaaaaaagccgtcacacatggtattgaaaatccaaggcaaatagagcctctattagtcgatgcttatatggctagaagagcattagattatttggttggatttaatatctcaccaatactatggacgaaattacctggttctaaatctgcaggtagagttcaatctgttgctctgaaattgattactgaaagagaacatgaaattgaattgtttaaacctgaggagttttggactttaagtattaattttcaggataaaaacaaaagtaacattacagcaagtatttctcagcttgatggagaaaaaattgaaaaattctcatttaaaaataaagaacaaattgaaaaagcaattgctaatattaataacaaaaaatttaatataaatgatatttcttctaaaattgttagtagaaatccctcaggaccattcacaacttcaacacttcaacaagttgcttctagtagattaggttttggtgcatcaagaacaatgcaaatagcacaaaaactttatcaaggaattgaaattgaaggagatacagttggattaattacttatatgagaactgatggaaccaatttatcagctgatgcagtctctgattttagaaattttattaaaaaagaatatggaaacgaatatttgccagaaaatccaaataattactcaggaaaaaaagcaa

SEQ ID NO: 293532 - DNA, 737 bp, Unknown
  Bacterial polypeptide expressing nucleotide sequence isolated from the Sargasso Sea
ttcatggaagccttccgctccacctgccagatatgggagttcttcatggaagccttccgctccacctgccagatatgggagttcttcatggaagccttccgctccgcctgccagatatgggagttcttcatggaagccttccgctccgcctgccagatatgggagttcttcatggaagccttccactccgcctgccagatatgggagttcttcatggaagccttccactccgcctgccagatatgggagttcttcatggaagccttccactccgcctgccagatatgggagttcttcatggaagccttccgctccacctgccagatatgggagttcttcatggaagccttccgctccgcctgccagatatgggagttcttcatggaagccttccgctccacctgccagatatgggagttcttcatggaagccttccgctccgcctgccagatatgggagttcttcatggaagccttccgctccgcctgccagatatgggagttcttcatggaagccttccactccacctgccagatatgggagttcttcatggaagccttccactccgcctgccagatatgggagttcttcatggaagccttccgctccgcctgccagatatgggagttcccgctcctccctcttcctacttccccgcgccttctcaatcgacgcttcccactgctcctcctccctatttgctggtaagaagcaggaggtgggaagcaagcagtagg

SEQ ID NO: 293533 - DNA, 937 bp, Unknown
  Bacterial polypeptide expressing nucleotide sequence isolated from the Sargasso Sea
ttagctacagacccagatcgtgagggagaggcaatagcttggcatgtaaaggaagttttagaaaaaaagaaacttctcaaagataaaaatttagaaagagtagtctttaatgaaataactaaaaaagcaatacttgacgcaataaaaaatccaagacaaattcatttgccactagttgaagcttatttagcaagacgagctttagattatcttgtggggtttaatatttctcctattctttggacaaaacttccaggatctaaatctgctggtagagttcaatcagtggcgctaaaacttattaccgaaagagaaaaggaaatagaattatttaaaccagaggaatactggacacttacatcagattttgcagataaaaataataaaaatattttttcaaaactaagtttatttgatggtaaaaaaattgagagattttcgtttaaaaacaaagaggaaattcaaaaagctatcgatgtaattaataagacaaaatttaagattgcagatgttaacaccaaattatatcgaagaaatccattagcgccttttacaacttccacattacaacaaactgcctcaggacgatttggttttggtgcatctagaacaatgcagattgcccaacgattataccaaggagtagacattgaaggtgaaacaactggattaataacatacatgagaacagatggtacaaatatttcaaaagaggctgtagaagatttcagaaaacacattaaagatgattatggagagaaatatttgcccgatgtaccaaatagttttgcaggtaaaaaagctaaaaatgcacaagaggcacacgaagcaataagaccaacaaatattaaaagaaaacctgcagaaataaaaaaatatgtaaacgcagatcagttcaaactttatgaacttatatggagtagagctctttcatctc

SEQ ID NO: 293534 - DNA, 826 bp, Unknown
  Bacterial polypeptide expressing nucleotide sequence isolated from the Sargasso Sea
tctggttgaccggatgggtatcgacccggcacatggctggaaagcccgttatgaaattctacccggtaaagaaaaagtcgttaaagaactcaagacactggcagaaaaagcagacactgtttatctggcaacggacttagaccgtgaaggagaagccattgcctggcacctgcaacaaattatcggtggcgacgagcagcgttttaaacgtgtcgtgtttaatgaaatcactaaaaatgccatccagaatgcgtttgaagaacccggcgagctgaatgttgacagagtcaatgcacagcaggcgagacgttttcttgaccgtgtggtcggttttatggtttcgccactgctatggaaaaaagtggcccgtggtttatcagcggggcgtgtgcagtcagtggcggtcaggttggtcgtagagcgtgagcgcgagataaaagcttttgtaccggaagaatactggacagtagctgcagatacgcaaaccgcggcgcagcagatgctgcaactggatgttaccaagcagcaaggtaaggcctttaaaccggttaacaaagccgaggcagatgccgcacttaccctgttaaataaagccgtttacaaggtgctggaacgggaagacaaacccagtagcagcaagccgcaggcaccttttattacgtcgacgttacagcaggctgccagcacccgtttaggttatggcgttaaaaagaccatgatgttggcgcagcgcttgtatgaagccggccatattacttacatgcgtacagactcgacgaacctcagtgcagaggcggtttcagcatgtcgtgactatatctcacag

SEQ ID NO: 293535 - DNA, 805 bp, Unknown
  Bacterial polypeptide expressing nucleotide sequence isolated from the Sargasso Sea
atagaggaaaattatggtgatgattatcttcccgagcaagccaataattattctggtaaaaaagcaaaaaatgcacaagaagcacatgaagcaataagaccaacggaaataaaaaattcacctgaaagtataaaaaaatatttaagtacagatcagtataaattatatgatcttatttggtctagagctctatcatctcaaatgcagccagctaaatttgatagaaaaactatattaattacctcagaagatgggaagaacatattaaaatctagtggttcaactataaaatttgatgggtttttaaaacttcaaaaaattgatgaaaatgatgatgaaaaaatattacctgaggtgtctaaaggaccaatcgatataaaggaatttaatgacgaacagcactttacacaaccacctccacgtttttcagaagcaagtttagttaaaaaattagaggaattaggaattggtcgtccttcaacatatgcaagtatcatctctgttatatctaatagaggatatgccgatatagtaaataaaagattttttccaaccgatagaggaaaattactatctgcctttttggagaaacttttttcaagatatgttgactatgattttactgctaaacttgaagatcaattagatgatattacctcagggaaagaaaactggataaaagttttagatcaattttggaaagattttaatgaaaatgtctctaatgttaaagaaaaaaggactagagaagttttagatctacttaatgatagtttaggaagtttaatttttgacaaaaaatagt

SEQ ID NO: 293536 - DNA, 527 bp, Unknown
  Bacterial polypeptide expressing nucleotide sequence isolated from the Sargasso Sea
aatgaatcttgtgattgttgaaagtcctgcaaaagcaaaaactatcaataaatatttaggttctgattatactgttttagctagttatggtcatataagagaccttccttccaaaaatggatctgtagatccagaaaatgactttaaaatgatttgggaaattgatagcttctcaaaaaaatatcttaaagaaataacagattcagcgaaaaactcttcaaaaattatacttgcgaccgaccccgatcgagaaggtgaagcaatagcatggcatgtaagagaatttttagaagaaaaaaaacttttaaaagataaaaaagtggaaagagttgtatttaatgaaattacaaaaaaagctgtcacgtctggtatagacaatccaagacaaattgaatcgcaactagtagatgcctacatggcaagaagagctttagattatcttgttggtttcaatatatctccaatattatggaccaaattacctggttcgaagtctgcgggtagagtccaatcagtggcattaagat

SEQ ID NO: 293537 - DNA, 835 bp, Unknown
  Bacterial polypeptide expressing nucleotide sequence isolated from the Sargasso Sea
aaataaagatgaaataaataaggccatatcaagcatcaatcaaaaaaaatttaatattactgatatatctagtaaagtggtaaatcgtaatccatcaggaccatttactacatcaactcttcaacaaacagcttcaagtcgattaggttttggtgcatcaagaactatgcaaattgctcaaaagctttaccaaggagtcgaaattgaaggagaaactataggtttgataacatatatgagaacagatggtactaatttatccaaagatgctgttgtggcttttagagattatatcaaaaaagagatcggtaatgaatatttgcctgaaagtgccttgaattattctggtaaaaaagcaaaaaatgcacaagaagcacatgaagcaataagacccactgacgttatcagaactccccaaagtgtaaaaaagtatctaagcacagatcaaaataaactttatgatttaatatggagtagagctttatcttctcaaatgcaatctgctaaatttgatagaaatactataacgattacatcaaataataatgatacagtatgcaaagcaagtggatcagttcttaaatttgatggatttttaaagatatataataatcaaggcaaggatgatgatgaaaacattctaccgtctgtatctaaaggacttgtaaatattgagtccttaatagatgagcagcattttacacagcctcctccaagatattctgaggctagtttggtaaaaaaactagaggagttaggaataggaagaccatctacttatgcaagtataatttctacaataacaaatagaggatacgcagagatattaaataaa

SEQ ID NO: 293538 - DNA, 793 bp, Unknown
  Bacterial polypeptide expressing nucleotide sequence isolated from the Sargasso Sea
tttaacataactgatatctcctcaaaagttgttagcagaaatccttcaggaccctttacaacttcaacacttcagcaagttgcttctagtagactgggttttggtgcatcaagaacaatgcaaatagcacaaaaactttatcaaggaatagaaattgagggagatacagttggattaattacttacatgagaacggatggaactaatttatcagctgatgctgtctctgattttagaaattttattaaaagagaatatggtaacgaatacttgccagaaaatccaaataattactcaggaaaaaaagcaaaaaacgctcaggaagctcatgaagcaataagaccaactgatatcaatagaaatccagattctgttaaaaagtatttaagttctgaccagcaaaaattatattctttaatttggtctagagctctgtcgtctcaaatggaaacagcaaaatttgatagaaatacaataacgattgagtctgaagacggtaaaaccatatgtaaatcaagcggatcagttttgaaatttgatggatttttaaaagtttattcaaatcaaagtaaagatgatgatgagcaaattttacctgagatgtcaaaaggaccaattaatatagaaactcttattgatgaacaacattttacccaacctcccccacgttactctgaggcgagtttggttaaaaaattagaagaattaggaattggaagaccttcaacttatgcaagtataatttcaacaatagcaaatagaggttatgcagaaatagttagtaaaagatttt

SEQ ID NO: 293539 - DNA, 818 bp, Unknown
  Bacterial polypeptide expressing nucleotide sequence isolated from the Sargasso Sea
ttttcatttagaaataaagaagatataaataaagcaatatcaagtattaatattaaaaaatttagcattactgatatttcaagcaaaatagtaaatcgtaatccttctggtccattcactacatctacgcttcaacaaacatcttcaagcagattaggttttggtgcatctagaacaatgcaaattgcacaaaaactttatcaaggtatagaaatagagggtgagacaatcggtttaatcacttacatgagaaccgatggtactaacttatctaaagatgcggtatctgctttcagagattatattcaaaaagaaattggtagtgaatatttacccaaagatgttttgaattattctggaaagaaagctaaaaatgctcaagaagctcacgaagcaattagacccacagatattattagaacacctcaaagtattaaaaaatatttaagtacagatcaaaataaactatatgagcttatttggagtagagctttatcgtctcaaatggagtctgctaagtttgatagaaatacaattactataacttcagacaaaaatgacactatttgtaaagctagtggatcagttcttaagtttgatggatttttgaaaatttataacaatcaaagtaaggatgatgatgaaaatattttaccaactgtatctaaaggaccgattaatattgaggctttaatagatgaacagcattatacactgccacctcctagatattctgaggctagcatagttaaaaaacttgaagaactgggtattggaagaccatctacatatgcaagtatcatttctactattgctaa

SEQ ID NO: 293540 - DNA, 761 bp, Unknown
  Bacterial polypeptide expressing nucleotide sequence isolated from the Sargasso Sea
acccgaaagactatgagtgttgcccagaggctttatgaagggttcaatgtaggaggggaatcagtagggctaattacttacatgcgtacagattctgttcaggtaagtgatatagccgtgagtgaagccagaagtcatgtgaaaaatgtctatggtgattcttacatcccaagtagtcctagaatgtataaatctcgcagtaaaaatgcacaagaggctcacgaagctatacgtcctacatcaataaaacgaacgccccagtctttatccgcatacctggatgcggaccaaatgaaattgtatacattgatatggtcccgaatggtagctagtcaaatgtctgacagtgtcactgagtcaacaagagtagagattgatgcagtcagtactactacttacgagttacgatcaaatggttcgaaattgatatttgacgggtttaagaaactttatgaagaatctacggattcagaagaagataataaagattcaaaactattacctaacttgtcagaagatatgatattagactgtaaggaaataactcctattcaacatcatacgcaagcacccccaatgtatacggaggcttcattagtgaaagaaatggaagagaacggaataggcagacctagtacgtacgctcccacgataaacacaatattggatagaaattatgtggaaagagaacaatcaaggctcaaacctactgtgttgggtatgactgtatctgatgaattaattgattattttgggactac

SEQ ID NO: 293541 - DNA, 913 bp, Unknown
  Bacterial polypeptide expressing nucleotide sequence isolated from the Sargasso Sea
agagagggcgaagcaatagcatggcaccttaaagaggcactaggtgcagataaatttaactattctagggttagatttaatcaaattaccaaagatgcaatcttagaatcttttgaggacccaaaagacatagatgcaagccttgtagaggctcagcaagcaagaagatttcttgatagggtggttggttttgagctatcgccacttttatgggcaaaaatagcccgtaatttatctgctggaagagttcaatctgttgcattaaggctcttagtagaaagagagcatagcatccaagagtttaaaccagatgagttttgggagatttcattcaatgcagaaaatgataagaatactggcatcgaatttagtctaaatagaaaaaaatcagatcctttgttgcaggatgaagaagcaaaaaaaattgaagagctggttaagtcctcagatttacttgtaagtgaggttactcaaaaacctgttaaatcaaaaccaaaacctccttttattacatctacattgcaacaagcagcaagtacaaaacttggttttaatgtaaagagaaccatgagaacagctcaaaaactatatgaaaatggtctcattacctacatgagaactgatgctcccgctctttcgcctgaatcaattgcagatgcaagaatgtatattgaaaccaaccttggagataaatatcttaccaatgcaccaagaatatattcctccaatgaaaatgcacaggaggcccatgaagcaatcagacctacaaatgcatcaacaaaatcagaagggttgatctcttcatcagatgaagaaaaaagattatacgaactaatttggcagcaatttatcggttcacagttgccagatgctgaatatttagcaactaatgcaaaaattcatttagatgaat

SEQ ID NO: 293542 - DNA, 895 bp, Unknown
  Bacterial polypeptide expressing nucleotide sequence isolated from the Sargasso Sea
ttgttaaatgatgtaaaagttgaaaaattttcttttaaaaataaagaggatattaataagtcaatagaaattattaaacaaagcaagtataaaatttcagatattagttctaagatatatacaagaaacccgcttggaccatttaccacttctactttgcagcagacggcttctagtaaactaggttttggtgcatcaagaacaatgcaaattgctcagagattgtatcaaggtatagatatcgatggagatacagttggtttaattacatatatgagaactgatggaacaaacatatctagtgacgctattcacgattttagaaattatattcaaaaatcctatggagaagattatcttccaaaagaacctaataattattcaggcaaaaaagctaaaaatgcgcaagaagctcacgaggcaataagacctacagatataaaaagaaaacctaattcaatgaaaaaatttttaagcacagatcaatttaagttatacgacttaatttggtcaagagctctatcctctcagatggaagcagcaaaatttgatagaaaatctattactataatatcagataataatttaaaccaatttaaatgttcaggctctacaataaaatttgatggttatttaaaacttacgagaattgaagataatgaagatgaaaaaattttacctgatgttaataaagaagaagtttttactaatgattttttagatgaacaacattttacccaaccgccaccacgatattcggaggctagcttagtaaaaaaacttgaagaactaggaattggaagaccttctacttatgcaagtattatttcagttatatcaaatagaggttatgcagacattgtcaataaacgtttttttccaaccgatagaggaa

SEQ ID NO: 293543 - DNA, 794 bp, Unknown
  Bacterial polypeptide expressing nucleotide sequence isolated from the Sargasso Sea
cagtccgctcttgtggaccaaggtcgcacgtggcctgtctgcaggtagggttcaatcggtcgcggtgcgcctgattgtagagcgagagcgggagattcgcgcgttcgtgcccgaggaatactgggaagtccacgcactgctaaccgcgggtgatattgagccggtcaggttcatggtgacccatcggggtggcgagaaatttgagccaaagaatcaggcagaggccgaggcagctgtggatgccatgcgcgatgccagcttcagcgttacagatctcgagtcacgtaaaacgagctccaagccgtccgccccctttatcacctcaacgcttcaacaggcggcgagtacgcgcatgggattcagcgtcaagaagaccatgacgcttgcgcagcgtctatacgaggcgggttacatcacctacatgcgaactgactccaccaatcttagcgatgaggcagtgagtgcttgtcgcaatttgattaaaaaagatttcccgtcagagtatttgcctgctgaacccattcgctacggttcgcgcgagggtgctcaggaagcccacgaggcgatccgtccgtcggatgtcacgctgcgcagtagcttgctgtcgggcatggagcccgatgcagagcgtctctacgacctgatctggcgtcagttcgtggcctgtcagatgagccccgcccgctatctttcaaccaccttggtggtcatagccgctgactgccggctcactgccaagggcagggtgattgagtttgatggctttacccgggtgcacccgcccgctgcccgca

SEQ ID NO: 293544 - DNA, 882 bp, Unknown
  Bacterial polypeptide expressing nucleotide sequence isolated from the Sargasso Sea
taaagaaattacagacgcagccaaagattcttcaaaaataatattagctaccgatcctgatcgtgagggcgaagcaatagcttggcatgtaaaagaatatctaaatgaaaaaaaacttctcaaagataaagaaatagaaagagttgtgtttaacgaaattacaaaaaaagcagtaattcacggtattgaaaacccaagacaaattgaaccgcttttagttgatgcttacatggctcgaagagctttagattacttagttggctttaatatttcaccaatattatggacaaaacttccaggctctaaatctgcaggtagagttcaatcagtagctttaaaattaataactgaaagagagcatgaaattgaatcttttaagccagaagaattttggactttaagtgtcaaatttaaagatgaaaaaaatcaaaatatcctagctagtattagtcaactcgataacaacaaggttgaaaaattctcttttagaaataaagatgaaataaataaggccgtatcaagtatcaatcaaaaaaaatttaatattactgaaatatctagtaaagtggtaaatcgtaatccatcaggaccatttactacatcaactcttcaacaaacagcttcaagtcgattaggttttggtgcatcaagaactatgcaaattgctcaaaagctttaccaaggagtcgatattgaaggagaaactataggtttgataacatatatgagaacagatggtactaatttatccaaagatgctgttgtggcttttagagattatataaaaaaagaaatcggtaatgaatatttacctgaaagtgctttaaattactctggcaaaaaggcaaaaaatgcacaagaggcacatgaagcaataagacc

SEQ ID NO: 293545 - DNA, 844 bp, Unknown
  Bacterial polypeptide expressing nucleotide sequence isolated from the Sargasso Sea
gaaaaaattaaaagtaaaaaatatcaaattactgatattacatctaaagttttcactagaaatcctgttggaccatttacaacatctactttacaacaaactgcatctagtaaattaggttttggtgcttcaagaacaatgcaaattgcacaaagattatatcaaggtatagatattgatggagatacaaaaggtttgataacttatatgagaacagacggaaccaatatatcaaaagaagctgtaaatgaatttagatcttatatagatgataattttggtaaagattatttacctgaacagccactaaattattctggcaagaaagctaaaaatgctcaagaggcacatgaagcaataagaccaaccaatattgaaaattcacccgaaaaaatgaaaaaatatttaagctctgatcaaaataaactttataatttaatctggtcgagagctttgtcatctcaaatggagtctgcaaagtttgatagaaaaactataagtatacagtcagatgattccaaaaactttttaagatcaagtggatctgttattaagtttgatgggtttttaaaactttacaagattgatgaagatcaaaatgatgaaaaaatacttccagatgtaaataaaggtccaataaatatcgaaagtttcattgatgagcagcattttacgcagcctccaccaagatactcagaggctagtttagttaaaaaacttgaagaattaggcattggtaggccatcgacgtatgcaagtataatttcagtaattgctaatagaggctatgcagatattgtaaataaaagattttttcctacagatagaggtaaattaatatcag

SEQ ID NO: 293546 - DNA, 922 bp, Unknown
  Bacterial polypeptide expressing nucleotide sequence isolated from the Sargasso Sea
gacagggaaggtgaggcgatttcatggcatctgcttgaggcactggggcttaaaaaaagtttggttaagaggattgtttttcacgaaattactgaatccgcaataatcaatgctctggaaaatccaagggatgtggaccagcagcttgttaatgcacagcaggcaagaagaattctggatcgcgctgtgggttataagttgtcaccattgctttggaaaaaaattaaacctggactttctgcaggcagagtacaaagtgtttcagtttatatcttggtggagagggaaagagagattagaaaatttgttccagaagaatactggaagatcaaagccgagttcaaagatttctcagctgatttgaaaaaaattggaggaaagcctgctaaagttggaaatgaaaaagaggcacttacaatagaatcaagtatcaagcagggcaactttgtagtcagtgaaattaaagaacgtatggcaagtcggagtccaggcgccccttttacaacttcaacgattcagcaggaggcttcgcttaaacttggtttctcagttaagcgcaccatggtggttgcacagcagctttatgagggtaattttgatattccagattatagtggtggtcttattacatatatgagaacagactcggtatcagtagctgaccaggcattgaaacaggcaaaagaggttataaacacagaatatgggaagaaatatattttaaaggaaccaaggaaatacaaaagccgtgcagtgaacgcccaggaagctcatgaagcaatcaggccagtggacttctctcaaaaacctgctatggttcagacacacttgagccacgatcagtttaggctttacagcttgatttggaagagtgcacttgcttccccaaatgactgcagcggaaatagcacgtacgacgata

SEQ ID NO: 293547 - DNA, 479 bp, Unknown
  Bacterial polypeptide expressing nucleotide sequence isolated from the Sargasso Sea
aatgaatcttgtcatagtagaaagtccagcaaaagctaaaactataaataaatatctaggatcaaattatacagttttggctagctatggtcatattagagaccttccttctaaaaatggatctgttgatccagaaaataagtttaaaatgatttgggaagttgatgctttttcaaaaaaatatcttaaagaaatcacagatacagctaaagattcagataaaataattcttgcaactgaccctgatagagaaggagaagctatagcttggcacgtaaaagagtttcttgatgaaaaaaagcttctaaaagacaaaaaagttgaaagagttgtatttaatgaaattacaaaaaaagcagttacaaatgggatagataaccctagatctatagagactcatcttgttgatgcttatatggctagaagagctttagattatctagttggttttaatatttcaccaattctttggacgaaac

SEQ ID NO: 293548 - DNA, 778 bp, Unknown
  Bacterial polypeptide expressing nucleotide sequence isolated from the Sargasso Sea
gttattggttttgaattgtctccattgctttggaaaaaaattgcacgaggcttatcagcaggaagagttcaatcggttgctttaagacttttagatgaaagagaaagatctatccaagaatttattccagaggagtattgggaaatttcgttttcagccagtactaataatgacgaaacaattacatttaatcttgcaactaaaaaaacagatccattactcccaaaagaaaaagttgaaacaataaaacaacaaatagaatcatgcaatttatcaataaatgaaatttctaagaagccggtaaaagtcaaaccaaaggctccttttattacatcaacactacaacaatctgctagtacaagattaggtttcaacgtaaaaagaaccatgcgagttgctcaaaaactttatgaagcaggcttaatcacatatatgagaactgatgctcctagtttgagtaaagaatctataaaagatgctagaagttacattaatgaaaatattggagagaaatatcttaccaatgctcctaaaatttattctagtactgaaaatgctcaagaagctcatgaggcagttagacccactaatgcttatttaaagcctcaagatgtaatgcatttatctgatgaagaatcaaaactgtatacattgatttgggaaagatttattgcctctcagatgcctgatgcggaatatttgtctacatctgcaaaggtttttgttgaggaaaacgtttttgttgcaagaggcagagaaatagtttttgatggattta

SEQ ID NO: 293549 - DNA, 913 bp, Unknown
  Bacterial polypeptide expressing nucleotide sequence isolated from the Sargasso Sea
gcaagagaaaccatgagatgtgcgcaaggtctatatgagagaggtttcataacatatatgagaactgattcagttcatctttccgaacaagccataagagctgctagagaatgtgtaagttccatgtacggaaaagaatatttatctaactcatcaagacaatttaattcaactgcaagaaatgttcaagaagcacatgaagctatcaggccagcaggtgaagtttttaaaacgccaaaggaaactaacctaactggtagagacttatctctttacgatttaatttggaaaagaactgttgctagtcaaatggcggaagctaggctaacaatgataaatgctgaaattagtgtaggggatggattatttaaatcaagtggaaaaagtattgattttgcaggattcttcagagcttatgtcgaaggtagtgatgatcctagttcatcccttgaacaacaagaaataattcttccaaacttaacaacgggaacatgccttgaagttacggataaggaatctacttttcatgaaaccaaaccacctgcaagatatacagaggcagcattagttaaagttcttgaaaaggaagggatcggaagaccttctacctatgcaagcattattgggacaattgttgatagaggttatgcaaatatatcttccaatactttggctccaacatttacagcttttgcagtcacagctctactagaagaacattttcctgatttggttgatactacttttacggcaaaaatggaatcttcattggatgaaatatcctcaggtaatcttgattggctaccatatctcgaaactttctataaaggtaaaaatggtttagaggtaaaagtacagaaaacagagggtgatattgatggtaaagcttataggcaagttgattcgacgacct

SEQ ID NO: 293550 - DNA, 843 bp, Unknown
  Bacterial polypeptide expressing nucleotide sequence isolated from the Sargasso Sea
attagtccaagcgcaagaaacaagaagaattcttgataggctttttggatatgaactttctccattactttggaaaaaagtagctcccagactatctgctggtcgtgttcagtctgtttcagtaagattgcttgttaacaaggaaagagaaaggagagcgtttaaaaaagcctcttactggggattaaaagcctctttgcttaaagataatatttcttttgaatctaagttatttagtctaaatgcccagaaaatctccaatggttctgattttgatgaaaagacaggtaacttaaaaaaaggtaataaatctttaattttgaccgaagacagggcaaagagtcttctcaaaactttatctaaggaaaagtggaaagtcttaaaagtagaaaaaaaaccaacaactaggaagcctgttccaccctttactactagtactttgcagcaggaagctaatcgaaaacttagactatccgcaagagaaacaatgagatgcgctcaaggcttatatgagaaaggttttattacatatatgagaactgattcggtacatctttctgaacaagcgattagagcggcgagagaatgtgtaaattcaaaatatgggaaagaatatttatcaagctcagctcgtcaatttaattcaaatgctaggaatgctcaagaagctcatgaagctatcaggcctgctggagaagtatttaaaactccaaatgatacagacttgtcaggaagagatctctctttatatgaattaatttggaaaagaactgttgccagtcaaatggcggaagcaaaattaacaatgattaatgctgaaatagaagttggggaaggattatt

SEQ ID NO: 293551 - DNA, 907 bp, Unknown
  Bacterial polypeptide expressing nucleotide sequence isolated from the Sargasso Sea
ctatatgcgtaccgactcgaccaacctgtcgaacgacgcggtagagatggtgcgaggtttcatcggcagcgagtacggcgacaagtacctgccgggcaagcccaacctgtattcgagcaaggaaggcgcccaggaggcgcacgaagcgattcgtccgtccgacgtcaatctgcgcccgacccagctgtccggcatggagcgtgatgccgagcgcctgtatgacctgatctggcgtcagttcgttgcctgccagatgccgccggccgagtacctgtccaccagcgtcacagtggctgctggcgatttcgagctgcgcgccaagggtcgcatcctcaagttcgacggttacacccgtgtgctgccgcagcagagcaagccgggcgaggacgacgtcctgccggaaatgaaggaaggcgagggcctcaagctgatccagctcgaccccagccagcacttcaccaagccgccggcgcgctactccgaagccagcctggtcaaggagctggaaaagcgcggtatcggccgcccgtccacttacgcggcgatcatttccaccatccaggatcgcggctacgtcacggtgcacaaccgtcgcttctatgccgagaagatgggtgacatcgtcaccgagcgtctcgacgagagcttcgccaacctgatggattacagcttcaccgccaccatggaagagcatctcgacgatgtggcccagggcgagcgtgagtggaagcacctgctcgacgagttttacggtgacttcaagaagaagctcgaggtggccgaggcgggcgagggcggcatgcgtgccaaccagccgacgctgaccgatattccctgccgcgagtgcggccgtccgatgatgatccgcaccgcctccactggcgtgttcctcggttgctcgggctat

SEQ ID NO: 293552 - DNA, 778 bp, Unknown
  Bacterial polypeptide expressing nucleotide sequence isolated from the Sargasso Sea
tagttctttttctgacccaaaagaaattgacctcaatttatttaaagcatatagggctagacgattccttgataaggtaattggctttgagctgtctccattgttatggaaaaaaattgctagaggtttatcagctggcagagtccagtcagttgcacttagattgttagatgaaaaagaaagatcaattcaggaatttgtacctgaggagttttgggagatatcatttactgggacttctaagaatgatgaattaataaaattcaaacttaatactaaaaaaactgatccattactcacagaagagaaagttaaaagtattcaaaagcaaattgaatcatgcgatttaaaaatcaatgaaattaccaaaaagccagttaaagtaaaaccaaaggcgccttttataacctcaactcttcaacaatctgcaagcacaagattaggttttaacgttaaaagaactatgagagtggctcaaaagctttatgaagcaggtttaataacctacatgcgaactgatgctccaagtcttagcaaagaatcaattaatgatgcaagaagttttatcaaagaaaatcttggagataaatatctaacaaatgcaccaaaaatatattctagtactgaaaatgcacaggaggcgcacgaggctgttcgcccaacaaatgcttttttaaaacctcaagatgtaatgcaattatctgaagaagagtcaaaactttataagcttatttgggaaagatttgttgcttctcaattaccagatgctgaatactta

SEQ ID NO: 293553 - DNA, 619 bp, Unknown
  Bacterial polypeptide expressing nucleotide sequence isolated from the Sargasso Sea
atggctcgttcccttgttatcgtagagtcaccagcgaaagcgaaaactatcaatcgctatctaggatccgactatgtggttaaatctagtgtagggcatgttcgggatcttccgactcgaagtaagccggtagatccgaaagctcgagccgaagaagcaaaaaaaacgaaggcgctcgatccggaaaagcgggcggcttacaaagctaaacgctctcgggatcagttaattcgtaagatgggaataaatccggacaaggactggcaggcttactatgaaattttaccaggaaaagaaaaggtaattgacgagcttaaaaaatttgctgacaaggccgataaagtttatctggcgactgacctggacagggaaggggaggccatcgcctggcaccttaaagagattattggcggagattcagataagttccgcagagtcgttttcaacgaaatcactaagaaagctatcgaagaagcgtttatggagccaggtgatatcgatatggatatggttcaagctcaacaggctcgacgcttccttgatcgagtggtggggtttgagctgtctccgttactttgggcgaaagttgcgaggggtctctcggctggtcgagtgcaaa

SEQ ID NO: 293554 - DNA, 946 bp, Unknown
  Bacterial polypeptide expressing nucleotide sequence isolated from the Sargasso Sea
gagcgcggctacatcacctacatgcgcaccgactcggtgcacctcagcgagcatgcgattacggcagcccgcagctgcgtgagcgataagtacggcgccgatcacctcagcccgcaaccgcggcaatacaccaccaaaagccgcaatgcccaagaggcccacgaggccatccggcccgcgggttccagcttccgcacgccagctgaatccggtctcaagggcctcgatctctccctctatgagctgatttggaagcgcactgtcgccagccagatggccgatgcccgcctgaccatggtcagcgcccagatcgaggtggaaaacgcccgtttccgcgccagtggcaagcgcatcgatttcgccggcttcttccgcgcctatgtggaaggcagcgatgaccctgatgcagcgctggaaggccaagaggtgctgctgcccaccctgcgcagcggcgatcaccccagctgccagagctgcgaaccccacggccaccagacccagccacctgcccgtttcagcgaagcggccctagtgaagatgctcgagaaagagggcattggccgcccctccacttacgcctcgatcatcggcaccatctgcgatcgcggttacgccaccctgcagaacaactccttgacccccagtttcacggccttcgccgtgacagctctgctggaggagcacttcccggatctggtcgatcccagcttcacggcgcggatggagaacacccttgatgagatctccaacggctcagcggagtggcttccgtacctcgatcacttctttcgcggcgacaagggcctggagcaacaggtggccaagcgcgagggagatatcgatccagtggcctcccgcacgatcgagctcgatggcttgccctgtgtggtgcgaatcggtcggtttggtgcctatctcgaggccaagcgcccaggggaagacggcg

SEQ ID NO: 293555 - DNA, 922 bp, Unknown
  Bacterial polypeptide expressing nucleotide sequence isolated from the Sargasso Sea
aatggagaaaaaattgaaaaattttcatttaaaataaaagaagaaattgaaaaagcaattaataatattaagacaaaaaaatttaatataactgatatttcctctaaagttgttagtagaaatccctcaggaccatttacaacttcaacacttcaacaagtcgcctctagcagattgggttttggtgcatcaagaactatgcagatagcacaaaagctttatcaagggattgaaattgaaggagatacagttgggttaattacttatatgagaactgatggaactaatttatcagctgatgcagtctctgattttagaaattttattaaaaaacattatggaaatgaatatttgccagaaaatccaaataattactctggaaaaaaagcaaagaatgctcaggaagcacacgaagcaataagaccaactgatatcaatagaaatccagattctgtgaaaaaatatttaagttcagaccagcaaaagttatataatttaatttggtctagagctttatcctctcaaatggaaacagctaaatttgatagaaatacaataaacattgaatctgaagatagtaaaacaatatgtaaatcaagcggatcggttttgaaatttgatggatttttaaaagtatattcaaatcaaagtaaagatgatgatgaacaaattttacctgaaatgtcaaaaggaccaattaatatagaagctcttattgatgaacagcatttcacacaacctcccccacgttactctgaagcaagtctagttaaaaaattagaagagttaggtataggaagaccttcaacttatgctagtattatatcaacaatagcaaacagaggttatgcggaaataattaataaaagattttttccaactgacagaggtaaattaatttctgcatttttagaaaaactat

SEQ ID NO: 293556 - DNA, 878 bp, Unknown
  Bacterial polypeptide expressing nucleotide sequence isolated from the Sargasso Sea
catggatgttgtcgtagtagaatcaccagccaaagctaaaactattaataagtatctaggtagtgaatatacggttttagcaagttatgggcacgtgcgagacctaccaccaaagaatggttccgttgaccccgaacaagactttaatatgctctggcagacaggtaatgattcagaaaaacatctgaaagctataattgatgcaacacgcggcgcagatcatctttatcttgcaaccgaccctgaccgcgaaggtgaagcaatttcttggcacgtccaagaggtcctcgagagccgaaacgccctcgatggcgtaaatgtacaacggatcgtctttcatgagattacacgtgacgcagttctccaagctttaaaggagccgcgagacctagaccacggattgatcgaagcctacctagcgcgccgggctttagattatttagtagggttcactctatcgccagttctttggcgaaagttaccgggcagccgttccgctggacgagtacagtccgtcgctttgcgattgataagtgaacgggagaatgaaattgaacggtttgttccaaaggaatattggtctctagaagctgactttaagacgcttcaaggcggcgtcatgacgtcacgtatgacgcacttcgaaagtgaaaaactcaaccggttttcgattttgaattctgaaacggcgaaccgcgccgcaaaagcgattaaagatggcgactttagggtcacctctattgaacgtaagtctgttttccggaatccccaaccacccttcacaacatctactctgcagcaagaagcgtcccgaaaactaggttttggtactgcgcgtaccatgcggatagcacaacgtttgtatgaaggagtggaca

SEQ ID NO: 293557 - DNA, 901 bp, Unknown
  Bacterial polypeptide expressing nucleotide sequence isolated from the Sargasso Sea
tcaacaccgtattgggcagttcaggcctttgcctctggaatagattttagagttagatttcatgaaaaagatgaccctaaagtttggaaggatgaaaaaggcaaaattgatattcaccgtacaaatgattcaaatttagcagacaaggcttatgaatatctaaatctagaatcacaaataactcccaaaacagtttctttaaacaattacaaaaggcgacctaagccaccttttactacagatacgttacttcaagcatcaggaagcaaatatagttggagaccaagcaatacaatgcgtatagctcaaggcctctatgaagcaggacacataacatatatgcgaacggattcaacacgtactagtaattcttcacgccaaaaagcaaaggactttattacttctaaatggggttccaatttcgtaggaaaaggagcctttggaggtaaaccaaaatctggagttcaagatgcgcatgaagctataaggccaactaatccactttctgatttaccaaaaggtcttgatgattcacaaaaacgcctgtaccgccttatttgggcaagattcatagctagtcagatgtgtgattcagaatggactagtatgaaaattcaagcaaaaactgaaacttttgataaatttttagatggagatacaaaatggcgtattagtcccggctgggaatctgcttttgaaaaaattgataaaaaaccagctcttactccacctcaacctgagattgctgaggataagaaggtgcctttagataaaaaagaacaaaatccaaaattaattgaagataaaacaaagccccctgcacgttatacacaacatggccttgtggcagtaatgaaatctgaaggaatagggcgcccttcaacttatgcagcaacaatca

SEQ ID NO: 293558 - DNA, 457 bp, Unknown
  Bacterial polypeptide expressing nucleotide sequence isolated from the Sargasso Sea
atgccaaaaactcttgtaattgttgaatcacccgcaaaagctaagactatctcaaaatacttgggatcagagtatatagttaaatcgagcgtcggacatataagagatcttcctaagggtaagtctaaaaaacctttacaaaggaatactattccaaaggatcttcctgaagacgagaaaagaagattaaaacagatcaatgaacgcaaaagactaatcaggagaatgggaatagatccagataatgattgggcagcaaattatgaaatcattcctgaaaaagaaaaagttattaaggagctaaaaaaagctgctaagacagtggaatctatttttcttgcaactgatcttgatagagaaggggaagctatagcttggcatcttaaagaagcattaggcgctgataaatttaactattatagagtaagatttaaccaaattactaaagatgcaatct

SEQ ID NO: 293559 - DNA, 736 bp, Unknown
  Bacterial polypeptide expressing nucleotide sequence isolated from the Sargasso Sea
accttttactacttcaacccttcagcaagttgcttctagtagattgggttttggtgcatcaagaacaatgcaaatagcacaaaaactctatcaaggaatagaagttgagggagatacagttgggttaattacttacatgagaacagatggaactaatttatcagctgatgctgtcgctgattttagaaattttattaaaaaagaatatggaaacgaatacttgccagaaaattcaaataattactcgggaaaaaaagcaaaaaatgctcaagaagcgcatgaagcaataagaccgactgatattaatagaaatcctgattctgttaaaaaatatttaagttctgaccagcaaaaattatattctttaatttggtctagagctctatcctctcaaatggaaacagcaaaatatgatagaaatacaataacgattgaatctgatgacagtaaaacgatatgtaaatcaagtggatcagttttgaaatttgatggatttttaaaagtttattcaaatcaaagtaaagatgatgaagagcaaattttacctgagacgtcagaagggccaataaatattgaagctcttattgatgaacagcatttcacacaacctcccccacgttattcagaggcaagccttgttaaaaaattagaagagttaggtattggcagaccttcaacttacgcaagtataaaaaaaacaatagcaaatagaggttatgcagaaatagttaataaa

SEQ ID NO: 293560 - DNA, 883 bp, Unknown
  Bacterial polypeptide expressing nucleotide sequence isolated from the Sargasso Sea
aaaattttcatttaaaaacaaacaagatattaatgatgcattatctcaaataaaaaacaaaaaatacaaaataacagatataagctcgaaaacttataacagaaatccatcaggaccttttactacatcaacattacaacaaacagcatccggtaaacttggttttggagcatcaaggacaatgcaaattgctcaaagactatatcaaggaattgatattgaaggtgaaacggtaggattaattacttatatgagaacagatggaactaatatttcaaaagatgctataacatctttcagagattttataatggagaattatggtgataaatatttaccagaacaacctctaaattatagtggcaaaaaagcaaagaatgctcaagaagctcacgaagctatacgtccaacagaaataattcgaaaaccagaagatatgaaaaaatacttaagtactgatcaatataaactttataatttaatatggtctagatctttatcatcacaaatgcagtcagcaaaatttgatagaaaaactattaccatcagctcagatgatgataaaaatatattcaaagctagtggttcaacattaaaatttgatggtttcctaaaactttataagatcgatgaaaatgatgatgacaatgaaaatactttgcctgatgttgaaaaaggtgatgtaatgtttgaagatcatattgatgaacagcactatacgcaaccaccgcctagatattcagaggcaagtttagttaaaaaattagaggaactagggattggaagaccgtctacttatgcaagtattatttcagtaatagctaatagaggttatgctgatataaataataaaagattttcccaactgatagaggtaaatact

SEQ ID NO: 293561 - DNA, 877 bp, Unknown
  Bacterial polypeptide expressing nucleotide sequence isolated from the Sargasso Sea
ttcaaagaagtagaaaaagtttatcttgcaactgaccttgatagagagggagaagccatagcatggcatttaaaggaagcgcttggtaaaaacaaatttgagtatcacagggtaagatttaatgaaattacaaaaagttcgatattagaatcttttgcagatccaaaagaaatagaccaagatcttgtcaatgctcaacaagcaaggagatttcttgatagggtggttggatttgagctatctccattattatggaagaaaattgcgagaggactatctgcaggaagagttcaatctgttgcattaaaattgctttgtgaaagagaaaaacttatttctcaattccagcctgaggaattttgggaagtttcagcaaccttaaaggattataataatgatgaaatcttatttaagttaaatagaaaaaaaagtgatcctcttcttaaagaagatgaggcacaaaaaatagaggaactagtaaatagttcaagtttagaaatttctgaagttactaaaaaacctacatcagtcaagccaagagcaccatttataacctcaactctccagcaagctgctagctcaaaattaggctttggagtttcaagaacaatgcgagttgctcaaaaactttacgaggctggaagaatcacttacatgaggacagatgctcctagtttaagcaatgattcaattgatgatgcaagattatttattaaagatactttagctgatgaatatcttacagataaaccacgaatctattcaggtaaagaaaatgctcaagaggcccatgaggcaataagaccaacaagtgcaagcttgacgtcagaaaagctgactggtcactcagaagaagaagttaattatatgacttaat

SEQ ID NO: 293562 - DNA, 841 bp, Unknown
  Bacterial polypeptide expressing nucleotide sequence isolated from the Sargasso Sea
agtaataaaagatttaaggaaagcttcaaaggaagtagaaaaagtttatcttgctactgatcttgatagagagggagaagccatagcttggcatttgaaagaagctttaggaaaaaataaatttgaatatcacagagtaagatttaacgaaattacaaaaagctcaatattagaatctttctcagatcctaaggagatagatcaagatcttgtaaatgcccagcaagcaagaagatttcttgatagggtggtaggttttgaactctccccactattatggaagaagattgcaagaggcttatcagcaggaagagttcagtctgttgcgctaagactgctttgtgaaagagaaaaattaatttcccaatttcaacctgaggaattttgggaaatatcggcaactcttaaggattttaatcatgaagaaatcttatttaagttaaatagaaaaaaaagtgatcctcttctagaaaaagatgaagcgaagaaaattgaggaactcgtaaacagttcaagtctaaaaatatctgaaattactaagaaacctacaacagttaaaccaagagcaccatttataacatcaactcttcagcaggccgctagctcgaagttaggctttggtgtttcaagaaccatgcgagttgcccaaaagctttatgaagctggaagaatcacctatatgagaactgatgctcctagcttaagtaatgattcaattgaagatgcaagattgtttattaaagatactcttgctgaggaatatctaactgaaaaaccacgaatctattcagggaaagaaaatgctcaagaggcccatgaggcaataagaccaacaagcgca

SEQ ID NO: 293563 - DNA, 580 bp, Unknown
  Bacterial polypeptide expressing nucleotide sequence isolated from the Sargasso Sea
atgaatcttgtgatagtagaaagtcctgctaaagctaaaactattaataaatatttgggtagaaattatactgttttagcaagttatggacatataagggaccttccttctaaaaatggttctgtggatcctaatgataaatttaaaatgatatgggaagttgatagtttttcaaaaaaatatttaaaagaaataactgatacagcaaaaaaatcagaaaaaattattcttgcaacagatccagatcgtgaaggtgaagctatagcatggcatgttcgggagtacttggaagaaaaaaaaattctaaaagataaaaaggttgaaagagttgtttttaatgaaattacaaaaaaagctgtaacaaatggaatagaaaatccaagaaaaatagaacctcatttagttgatgcttatatggcaagaagagcattggactatttagttggatttaatatatcgccaatcctatggacaaaattaccaggttctaaatcggcaggtagagttcaatctgttgcattaagacttttgactgagagagaacatgaaatagaaagttttaatcctgaagagtattgac

SEQ ID NO: 293564 - DNA, 814 bp, Unknown
  Bacterial polypeptide expressing nucleotide sequence isolated from the Sargasso Sea
gaagaaaaaaaactacttaaagataaaaaaattgaaagagttgtatttaatgagattacaaaaaaagcagtttctaatggaatagataacccaagaaatatagagtcaaatcttgttgatgcttatatggcaaggagagcattagattatttggttggatttaatatatctccaatattatggactaaacttccaggctctaagtcagctggacgagttcaatctgtagctctaagattgctcacagaaagggaacatgagatagagcaatttaaaccggaagaattctggactttaaatgtaaattttaaaacatcagaaggaaatattttaaattcaaatattgtacttcttgataattcaaaagttggaaaatttttttttaaaacaaaggaagatattaatattgcaataaatttaattcaaaaatctaaatataaaatttctgatataagctcaaaggtctatactagaaatccacttggtccatttacaacttcaactcttcaacaagttgcttctagtaaattaggttttggggcatcaagaacaatgcagatagcacaaagattatatcaaggaatagatatggagggagatacagttggactaataacttatatgagaacagatggaacaaatatttcaaatgaggcagttagtgattttagaaattatattaaaaaatcttatggagataaatatttaccagacattcctaataactattctggtaaaaaagcaaaaaatgcccaagaggcacatgaagctataagacctactgatataactaggaatccagaaattttaaaaa

SEQ ID NO: 293565 - DNA, 924 bp, Unknown
  Bacterial polypeptide expressing nucleotide sequence isolated from the Sargasso Sea
caacaagaagcaaacaggaagcttcgtttgtctgcaagagaaactatgagatgtgcacaaggtctatatgagagaggtttcataacatatatgaggactgattcagttcatctttccgaacaagccactagagctgctagagaatgtgtcagttctatgtatggaaaagaatatttatctaaatcaccaagacaatttaattcaactgcaagaaatgctcaagaagcacacgaagctattaggccggcaggtgaggtatttaaaacaccaaaggaaactaacctaactggtagagacttatctctttacgatttaatttggaaaagaactgtagctagtcaaatggcggaagctaggctaacaatgattaatgctgaaattagtgtaggagatggactatttaaatcgagcgggaaaagtattgatttcgcaggattcttcagagcttatgtcgagggaagtgatgacccaagttcatcccttgaacaacaagaaattattctcccaaacttaacaactggaacattgcttgaagttacgaataaggaatctacttttcatgaaactaaaccacctgcaagatatacagaggctgcattagttaaagttcttgaaaaagaagggattggaagaccttctacctatgcaagcattattgggacaattgttgatagaggttatgcaaatatatcttccaatactttgtctccgacgtttacagcttttgctgttactgctctattagaagaacattttcctgatctagttgatactacttttactgcaaaaatggaatcttcattggatgaaatatcttcaggtaatcttgagtggctaccataccttgagactttctataaaggtaaaaatggtctggaggtgaaagttcagaaaacagagggtgatattgatggtaaagcttat

SEQ ID NO: 293566 - DNA, 799 bp, Unknown
  Bacterial polypeptide expressing nucleotide sequence isolated from the Sargasso Sea
aagatttcttgatcgagttgttggatttgagctctctcctcttctctggaagaaaatagcgaggggtttatcggctggcagagttcaatctgtcgcattaagacttctagacgaaagagaaagattgattcaagaatttataccaaaagaatattgggagatctcgatgaatctccttaatagtaaggatgaaaaaattaatttctcactctctagaaagaaatctgaacctttattaactgctgaagaagcaaaacaaatcgaacaattaatagaaacatcgaatttatccattaccgagatagtaaagacccctactagggtaaaaccaaaagcccctttcattacctctacattacaacaagcagcttcgactaaattaagcttcaatgtaaaaagaaccatgcgtgtcgcacaaaaactctatgaagctggacatataacctatatgagaactgatgctccaagcttaagcaaagaatcaattgatgatgcgagaaattatataaattcatctattggacaagattatttatatgaaacaccaagaatttactcaggtacagagaatgcacaagaagcacatgaggcaattagaccaactagtgcttctgtcacagcaaaagacttggaaaaagccacagaggaagaagttcgattatatgaattgatatggcaacaatatattgcctgtcagatgaaggatgcagaatatctttctacttcagctaaaattatactggaccaatatacattcactgcgaaaggaagagaggttgtattgatggatacacaaaaa

SEQ ID NO: 293567 - DNA, 862 bp, Unknown
  Bacterial polypeptide expressing nucleotide sequence isolated from the Sargasso Sea
attgaaggctatttgggttctgattataaagtaatagcttcattaggtcatattagagaccttccatcaagtgaaggatcagtaaagcccgatgaagatttcaagatgatttgggaattaggtgataaaggaaaaaaacaagcaaaaacactgaatgaagctgttaaaaattctgaaagccttatattagccacagatcctgacagagaaggagaggcaatagcctggcatgttttagaggttcttcaagaaaaaggtagtttggctgataaaaagatttcaagagttacctttaacgcaattacaaaaaaagaaattaatgaggcaattaataatccaagagaaatcgatacagaaatggtacaggcttacttagcaagaagggctttggactatcttgttggatttacattatctcctgttttatggaggaaacttcctggtgctcgttcagcgggacgtgttcaatctgtagcattaagattaatatgtgaaagggaaatagagattgagtcttttattcctcaagaatattggtctattaatggtcatttctcatacgaggataacgatccttttgaagcaaaactaactcattttgatagtaaaaaattagagcaatttgatattaataatgaggataggtctgaagaaattaaaatagctattcaagaaacaaattttaaaataaccgatatacaagaaaaaaatgtatcaagaaaaccatcgccaccctttattacatctacattacaaatggaagcctcaagaaaacttaatatgacagcaaaagtaacaatgatgacagcacaaaaactttatgaagctggcttaataacatatatgcgaactgacggtgttc

SEQ ID NO: 293568 - DNA, 430 bp, Unknown
  Bacterial polypeptide expressing nucleotide sequence isolated from the Sargasso Sea
tatgaatctagtcatagttgaaagtccagcaaaagctaaaacaataaataaatatttaggtgataattacacagtattagctagctatggtcatattagagatttgccatctaaaaatggttctgtcgatcctgaacaaaattttaaaatggaatgggaggttgataatttttcaaaaaaatatcttaaagaaataactgatgctgcaaaagattcttctaaaattattttagctaccgacccagatcgcgaaggagaagctatagcctggcatgtaaaggaatatttgaatgaaaaaaaactgcttaaagataaagaagttgaaagagttgtattcaatgaaattactaaaaaagctgtaatttttggaattgaaaacccagggcaaattgagcccttgttagtcgatgcttatatggcaagaagagca

SEQ ID NO: 293569 - DNA, 541 bp, Unknown
  Bacterial polypeptide expressing nucleotide sequence isolated from the Sargasso Sea
tatgaatcttgtcatagttgaaagtccagctaaagcaaaaacaatcaacaaatatttaggtggtgattatactgttcttgctagctacggccatataagagatcttccttctaaaaatggatcagttgatccagaagataaatttaaaatgatatgggaagtagatagtttttctaaaaaatatttaaaagaaattactgatgcggcaaaaaaatcagaaaaaatcattcttgctactgaccctgaccgtgaaggtgaagctatagcttggcatgttaaagaatacttggatgaaaagaaacttttaaaagataagatagttgaaagagtagtatttaatgaaattacaaaaaaagcagtaactaatggaattgataatccaagaaaaatagagccaaatctggttgatgcttatatggcaagaagagctttggattacttggttggtttcaacatttcgcctattctatggacaaagttacctggttcaaaatcagcaggcagagtacaatcagttgcattaagactgttaactgaaaga

SEQ ID NO: 293570 - DNA, 879 bp, Unknown
  Bacterial polypeptide expressing nucleotide sequence isolated from the Sargasso Sea
agaagacaagtaaatgatttattgaagactttttcatcagaagattggttagtctcaaaaatcgaaaaaaagccatccactcgtaagccagttcctccatttacaactagcacactacaacaagaagcaaataggaagcttcgtttatctgcaagagaaactatgagatgtgcacaagggctatatgagagaggtttcataacatatatgagaactgattcagtgcatctctccgaacaagccacaagagccgccagagaatgtgttagttatatgtatggaaaagaatatttatctaactcaccaagacaatttaattcaactgcaagaaatgctcaagaagcacacgaagctattaggccggcaggtgaggtatttaaaacaccaaaggaaactaatctaattgggagagacttgtcactttatgatttaatttggaaaagaactgtagctagtcaaatggcggaagctaggctaacaatgattaatgctgaaatcagcgtaggggatggattatttaaatcaagcggcaaaagtattgatttcgcaggattcttcagagcttatgtcgagggaagtgatgacccaagttcatcccttgaacaacaagaaattattctcccaaacttaaaaactggaacacgtcttgaagttactaacaaggaatctacatttcatgaaactaagcctcctgcaagatatacagaggctgcattagttaaagttcttgaaaaagaagggataggaagaccttctacctatgccagcattattgggaccatagttgatagaggttatgcgaatatttcttccaatactttggctccaacttttacagcttttgctgtaactgctctattagaagaacattttcctgat

SEQ ID NO: 293571 - DNA, 850 bp, Unknown
  Bacterial polypeptide expressing nucleotide sequence isolated from the Sargasso Sea
gaaaggcggcactactagaacaagacttgttgtaccaaaagacctcagtccagaggaaaaagccagacaaaaggaaatcaatgctagaaaaagtttagtaagaaggatgggtgttgatcctgataatggatgggatgctaattggcaaataatacctgagaaagagaaggtgctcaaggctttaaaaaaagctgcaaagaatgttgataatatatatttagcaacagatttagatagagaaggtgaagcaattgcttggcaccttaaagaagctttaggacctcaaaaatacaattactcaagagtgagatttaatcaaattacaaaggatgcaattattgagtctttctctgatccaaaagaaatagaccttaatctggttaaagcatacagagctagaagatttttagataaagttattggttttgaattatctccattgctttggaaaaaaatcgcacgaggcttatcagcaggaagagttcaatcggttgctttaagacttttagacgaaagagaaagatctatccaagaatttattccagaggaatattgggaaatttcgttttcagccactactaataataacgaaacaattacatttaatcttgcaactaaaaaaacagatccattactctcaaaagaaaaagttgaaacaataaaacaacaaatagaatcatgcaatttatcaataaatgagatttctaagaagccggtaaaagtgaaaccaaaggctccttttattacatcaacactccaacaatctgctagcacaagattaggtttcaacgtaaaaagaaccatgcgagttgctcaaaaactttatgaagcaggcttaatcacatatatg

SEQ ID NO: 293572 - DNA, 886 bp, Unknown
  Bacterial polypeptide expressing nucleotide sequence isolated from the Sargasso Sea
aataaaataattttagcaactgaccccgacagagaaggagaagctattgcatggcatgttaaagaagttttagatcaaaaaaagttattaaaagataagaaagttgaaagagttgtgtttaatgaaataacaaaaaaagctgtaatgaaagggatagaaaatcctagggatattgagccactcttagttgatgcttacatggctaggagagctttagactatttagtaggatttaatatttctccaattttatggactaagttaccaggatccaaatctgcaggacgtgtacagtctgttgctttgaaactaattacagaaagagaacatgagattgaattatttaatcctgaggaattttggactttaaaagtagtctttaaagacaaaaacagcaatataataacatctaatatttcacagcttgaaagaaaaaaaattgaaaaattctcttttaagaataaagaggacattaatgatgctgctcaacaaattaaaaagatgaaatttagtatttctgatatatcgtcaaaaattgtaagcagaaatccttctggtccatttactacatctacacttcaacaggtttcttccggaagactgggtttgggtgcatcaagaacaatgcaaattgctcaaaaactttatcaaggaattgaaatagatggagaaacaatcggtttaatcacttatatgagaactgatggaacaaacatatcggaagaagctgtttcaaattttagagatttcattaaaaatgaatatggtaatgattaccttcctaaaaacccacttaattattctggtaaaaaagcaaaaaacgctcaggaagctcacgaagcaataagacctactgatattgctaaatcacctgaaaaagtaaaaa

SEQ ID NO: 293573 - DNA, 517 bp, Unknown
  Bacterial polypeptide expressing nucleotide sequence isolated from the Sargasso Sea
tatgaatctagtcatagttgaaagccctgctaaagcgaaaacaattaataaatatttaggtgacaactataccgttttagctagctatggtcatattagagatcttccttcaaaaaatggatctgtagatcctgatcaaaattttaaaatggaatgggaagttgatagtttttcaaaaaaatatttaaaagaaattactgatgctgcaaaagactcttcaaaaataattcttgctacagacccggatcgtgagggtgaagcaattgcttggcatgtaaaagagtatttagatgagaaaaaacttctaaaagataaagaaattgaacgagttgtatttaatgaaataacaaaaaaagctgtgacacatggtattgaaaatccaagacaaatagaacctttattagtcgatgcatacatggctagaagagcattagattatttagtgggatttaatatatcaccaatattgtggactaaattacctggttcaaaatctgccggtagagttcaatctgtt

SEQ ID NO: 293574 - DNA, 727 bp, Unknown
  Bacterial polypeptide expressing nucleotide sequence isolated from the Sargasso Sea
agcaaggggccacggcagtacagcaccaaagcgcgcaacgctcaggaggcccacgaagccattcgtccggcaggggagagctttcgcacgccgggggataccggtcttgatggccgtgatctcgcggtttacgagttgatctggaaacgcacggtggccagccagatggctgaagcccgtctgacgatgctctccgtcgatttgagtgcgtctgaggcggcattccgtgccagcggcaagcgcattgactttccaggattctttcgtgcctacgtcgagggcagcgacgatccagatgcggcccttgaagggcaggaagtgctgctgccaaccctggcagtcggcgatgcaccgacgccgaaacaggtggagccgcttggacaccaaacgcagccgccggcccgcttcagcgaggcctcgctggtgaaaatgcttgagaaggaaggaatcggccgtccttccacgtatgcctccatcatcggcacgattgtcgatcgcggttattccaccatgcagggcaatgcgctgaccccgagtttcaccgcctttgccgtcaccgccctgctcgaggaacacttccccgatcttgtcgacaccagcttcaccgcccggatggagaccaccctcgatgagatctctcacggcaaggtgcagtggcttccctatctggagggcttcttcaagggcaatgaaggcctcgagaatcaagtgcagctcaaggaaggcg

SEQ ID NO: 293575 - DNA, 541 bp, Unknown
  Bacterial polypeptide expressing nucleotide sequence isolated from the Sargasso Sea
atgtatctcgtagttgttgaaagtccagcaaaggcaaaaacaataaacaaatatcttggtaaagattataaagttttagcaagttacgggcatataagagatttgccatcaaaaaatggttctgtggatcccgataataattttcaaatgctttgggaaattgattcattttcaaaaaaatatctaaaagatatcactgaagccgcaaagaattcttctaaaattatactagcaactgatcccgacagagaaggtgaagctatagcttggcatgtgaaagaagttttggacgaaaaaaaacttctcaaagataaagcaattgaaagagttgttttcaatgaaattacaaaaaaagcagttactcatggaattgataacccgagacaaattgaaccccttttggtagatgcttatatggctagaagagcgctagactatttggttggatttaatatttctccaattttgtggactaagctacccggatcaaaatctgctggacgtgttcaatctgttgctttgaaattaattactgaaagag

SEQ ID NO: 293576 - DNA, 862 bp, Unknown
  Bacterial polypeptide expressing nucleotide sequence isolated from the Sargasso Sea
aaagccggcgactttaaactcaaagcgcgcggtcgtaccctgcgttttgacggctggaccaaagtgatgccggcgctgcgtaaaggcgatgaagatcggaccttaccggtcgtcaaccagggcgagagcctgagcctggtcgaactgaccccggcacagcactttaccaaaccgcctgcgcgctttagcgaagcatcgctggtcaaagagctggaaaaacgcggtatcggccggccgtctacctatgcgtcgatcatttcgaccattcaggatcgcggctatgtgcgggtggaaaaccgccgcttctacgccgagaaaatgggtgagattgtcaccgatcgtctggaagagaacttccgcgatctgatgaactacgattttaccgcgcaaatggaagaccgcctcgatcaggtggcgaatcaccaggccgagtggcgtcaggtactggaccacttcttcggtgacttcacgactcagctggaaacggcggagaaggatccggaagaggggggcatgcagccgaacccgatggtgctgaccagcatcgactgtccgacctgcggtcgtcagatggggattcgcacggccagcaccggggtgttcctgggctgttcaggctatgcgctgccgccgaaagaacgctgcaagaccaccattaacctggtgccggaaaacgaagtgctcaacgtgctggaaggcgacgatgccgaaaccaacgcgctgcgtgccaagcgtcgttgccagaagtgcggtacggcgatggacagctaccttatcgatcctaagcgcaagctgcacgtatgtggtaacaacccaacctgcgatggctatgagatcgaagagggcgagttccgcatcaagg

SEQ ID NO: 293577 - DNA, 775 bp, Unknown
  Bacterial polypeptide expressing nucleotide sequence isolated from the Sargasso Sea
atgaatcttgtcatagtagaaagtcccgcaaaagcaaaaacaataaataagtaccttggatcagattacacagttttagctagctatggccatattagagatcttccatctaagaatggatcagttgatccagaaaatgattttaaaatgatttgggaaatagatagtttttcgaaaaaatatctcaaagaaataacggatagcgctaaagattcaaaaaagataatattagctactgatccagatagagaaggtgaagctattgcttggcatgtaaaagagtttcttaaagaaaaaaaacttctgaaagataaagaagttcaaagagttgttttcaatgaaataactaaaaaagcagtaattaatggaatagataatccaagaaaaatagagccccaattagttgatgcctacatggctagaagagctttagattatttagtaggatttaacatatcccctatcctatggactaaattaccagggtctaaatctgcgggacgtgttcaatcagttgcattaagattattaacagaaagagagcatgaaatagaaatatttaaaccaaaagaattttggactttgaatgtaatttttacaaatagaaaaaatgaaaaaataaatacagcaatttcacatcttgatggcaataaaattgaaaagttttcattcaaaaataaggaagatattaacaatgcactatctcaaataaaaaataaaaaatataatattacagatataaaatcaaaaacttatagcagaaatccatctggac

SEQ ID NO: 293578 - DNA, 563 bp, Unknown
  Bacterial polypeptide expressing nucleotide sequence isolated from the Sargasso Sea
aatgaatcttgtaattgttgaaagtcctgcaaaagctaaaacaataaataaatatttaggatcgaattatactgtattagctagttacggacatataagagatttgccatcaaaaaatggatctgttgatcctgaaaataaattcaaaatgatatgggaaattgatagtttttcaaaaaaatatctaaaagatatagttgatgttgctaaagattcagaaaaagtaatacttgctactgaccctgatcgtgaaggagaagcaatagcttggcatgttaaagaatatctggatgaaaaaaaattactaaaagataaaaaaattgaaagagttgtgtttaatgaaattactaaaaaagctgttactacaggtatagaaaatcctagatctatagaacctcaattagttaatgcttatatggctcgaagagctttagattatcttgtaggttttaacatttctccaattttatggacaaaacttccagggtcaaaatcagctggccgagttcaatcagttgctcttagattgttaacagaaagagaacatgaaatagaaattttta

SEQ ID NO: 293579 - DNA, 821 bp, Unknown
  Bacterial polypeptide expressing nucleotide sequence isolated from the Sargasso Sea
tttattatggaaaaaaattgcaagaggtctgtcagcaggaagagttcagtcagttgcgcttaggttattagacgaaagagaaaggtcaatccaagaattcgtacctgaagagttttgggaagtaaatatagatgtattatctacagaaaatgaaaaagttaaatttgaactaaatagaaaaaaaagtgatcctcttctaaaaaaagatgatgcagaactcatcaagaatcagttaaacactcatgaattaaaaataaatgaaatttcgaagaagcctgttaaagtaaaaccaaaaccaccttttataacctcaacattgcaacaatctgccagcacaaggttaggatttaatgttaaaagaacaatgagagtagctcagaaactctatgaggcaggttacataacatatatgagaactgatgcacccagtttgagtaaagattcaattaatgatgctagaaactatatttcagagcaattaggtgaaaattatcttacaaatgcacccagaatttattcaggtaatgagaatgctcaagaagctcatgaagctgtaaggcctacaaatacttttttgaaatcctctgatctattaaatctaagcgaggaagaagtaaaattatataaattaatttgggatagatttgttgcatcgcagatgccagatgccgaatatctatcaacatctgcaaagataaaggtaaatgaaaatatattcgttgctcgaggcagagaattggtttttgacggattcactaaagtacaaaaaacatcaacaaaagatgaagaaatgttgccaacattaaatgaaggcgagactt

SEQ ID NO: 293580 - DNA, 799 bp, Unknown
  Bacterial polypeptide expressing nucleotide sequence isolated from the Sargasso Sea
gtaagtgatttacgtgaacgaccttttacacaaaacccgcccgcaccatttataacttcaacattacaacaagaggctggtaggaaattacgttatagcacgcaaagaactatgcaaatcgcgcaacgattatatgaaaatggatacatcacatatatgcgtactgattcaactaatctttcagaacaggcaattaatgctgctcgtgcacaaattaaacaaatgtacggtaacgaatatcttccagcatcagcacgacgtcataaaatatcagcaaaagctgctcaggaggcacacgaagctattcgacctagtggtgaaatttttaggacacccgaaaatataaaaaataatctagatcaagacgccttccaactctatgaattgatttggaagcgaacaatagcttcacaaatgcaaaatgcaaatgggatgcgtacacaagtaaggttaaattatacaagtccagaatacggcgaacttagttttcaatcatcagggaaagttattcttttctctggattcctcagggcatatgttgaaggtagtgacgatccagaagctgcattagacgatcaagaacgaattttacctacattacaacttgaacaggaattacctgtagatgcttctagtccaacttcacatgaaacacaagcaccaaacagatggactgaagctagtttagtgcgagagcttgaagaacgagggataggtagaccatcaacatacgcatccattattcaaaatatccaagatcgcgggtatgtatggaaaaaaaggatctacattgatccca

SEQ ID NO: 293581 - DNA, 913 bp, Unknown
  Bacterial polypeptide expressing nucleotide sequence isolated from the Sargasso Sea
aagcttgaagaattttggactttaagtattaattttcaggataaaaacaaaagcaatattacagcaagtatttctcagtttgatggagaaaaaattgaaaaattctcatttaaaaataaagaacaaattgaaaaagcaattgctaatattaaaaataaaaaatttaatataaccgatatttcatctaaaattgttagtagaaatccctcaggaccattcacgacttcaacacttcaacaagttgcttctagtagattaggttttggtgcatcaagaacaatgcaaatagcacaaaaactttatcaaggaattgaaattgaaggagatacagttggattaattacttatatgagaactgatggaactaatttatcagctgatgcggtctctgattttagaaattttattaaaaaagaatatggaaacgaatatttgccagaaaatccaaataattactcaggaaaaaaagcaaaaaatgctcaagaagctcatgaagcaataagaccgactgatatcaatagaaatccagattctgttaaaaagtatttaagttctgaccagcaaaaattatattctttaatttggtctagagctctttcttcacaaatggagacagctaaatttgatagaaatacaataactatagaatctgaagataataaaacaatatgtaaatcgagcggatcagttttgaaatttgatggatttttaaaagtttattcaaaccaaagcaaagacgatgatgaacaaattttacctgaaatgtcaaaggggcgaattaatatagaggctcttatcgatgaacagcattttacacaacctcctccacgctactctgaggcaagtttggttaaaaaattagaagaattaggaattggaagaccttcaacctacgcaagtataattcaacaat

SEQ ID NO: 293582 - DNA, 886 bp, Unknown
  Bacterial polypeptide expressing nucleotide sequence isolated from the Sargasso Sea
gcttggcatattatagaatcaacaaagctacccgaatcaaaaattaagcgtattatttttaatgagatctcagaaaaagctattaaagcagctatttcagattcacaaaacattaataaaaaccttgtaaatgcgcaacaagctcgtcgtatactagatcgccttattggttataaacttagccctatattatctagaaagattcaaaaaggccttagtgcaggcagggtccaatctgtggctgttaaaatcatttgtgaccgtgaacgagaaatagaatcctttattcctgaagaatattggcttattgatgcctctgtaactgaatctaataaaaacaacacattttctgcgcgattatttgcaaaagatactgttgataataagtatgaagtaaaatcagaaaaagatgcaaaagctgctcaacaatccatagaatcgtcaccgattattgttgaggatattattaaatcccgtattaagcgaaattctccttttccatttattacatctaccttacagcaagaagcctcgcgcaagttaaattggtctgcaaaaaaaacaatgatgattgcccaacgactttatgaaggtttagatattaatggtgaatctactgggcttattacctatatgagaacagattcaactagagtttctgattctgcaattaaagaagcaagagcatttattacaaaaaaataccattctgactatcttggtttcacaaaaaaccctaaaaacaaagcgaaatcatctattcaagatgctcacgaagctattcgccctgtttcaacacagtttccgccgcaaagcatacaaaacatactcgatactgattatctaaaattatacactctaattggaaccgatttatcgcatctca

SEQ ID NO: 293583 - DNA, 879 bp, Unknown
  Bacterial polypeptide expressing nucleotide sequence isolated from the Sargasso Sea
ttagcaagttatggacatattagagatctaccttctaaaaatggttcagttgatcctgaacaagattttaaaatggaatgggaagttgatagtttttctaaaaaatatcttaaagaaattactgatgctgctaaagactctaccaaaattatacttgctaccgaccctgatcgtgaaggtgaagcaatagcttggcatgtaaaagagtatttaaatgaaaaaaaacttttaaaagataaagaaattcaacgagtggtgtttaatgaaataactaaaaaagctgtaatacatggcattgaaaacccaagacaaatcgaacctttgttagtggatgcttatatggctagaagagctttggactacttggttggttttaacatctctcctatactttggacaaaattaccaggatctaaatctgctgggcgagttcaatctgtagctttaaaattaatcacagaaagagaacatgaaattgagtcatttaaaccagaagaattttggacattaagtgttaagtttgtagatgaaaaaaatcagaatattacggctagtatcagtcagctagataataataaaatagaaaaattttcatttagaactaaagatgaaataaataaagctatatctaatataaacaaaaaaaaatttagtattactgatatttctagcaaagtaattaatcgtaatccttctggaccattcactacatctacacttcaacaaacagcttcgagtagattgggttttggtgcatccagaacaatgcaaattgcacaaaaactttatcaaggtatagagatagaaggtgaaacaataggtttgattacttatatgagaactgatggaactaatttatctaaagatgctgtttcattt

SEQ ID NO: 293584 - DNA, 886 bp, Unknown
  Bacterial polypeptide expressing nucleotide sequence isolated from the Sargasso Sea
atagacgttgaaggagatactgttggtttgattacatatatgagaacagatggaactcaaatttctaaagaagcaatttctgattttagaagttttataaccaaaagacacggaaaggagtatcttccagaaagcgctaataattatacggggaaaaaagcaaagaatgctcaagaagctcatgaagcaatcaggccaacagatgtatcaagagagccttctcaaatgaaaaaatatttaagcactgatcaatcaaaactttacgaattaatctggaatagagctatatcttcccaaatgaacccagctgaatttgatagaaaaagtataactatagagtctgaagacaaaaaaattgggtttaaggcaaatgggtctactattaagttcgatggatatttaaaagtctacaaatttgaggaaaaagatgatgatcttaaaaatattttacctgaggttaaaataggagataaagtttctataaaagaactaatggatgatcaacattttacagatccacctccaagatattctgaggctagccttgttaaaaaaatggaagagttaggaattggacgtccatcgacctatgccagtataatatcagtgttgtctacaagaaattatgttgaattattaaataaaagatttcatccgacagaccgcggtaaattactatctgcatttcttgaaaaattgttcacaaaatatgttgattataattttacagcagatttagaaaaccaactagatgagataacaagcggtaaagttgattgggtaaaagttttagacggtttttggaaagatttttattctaatgttggtaaagttaaggaaaaaagaaccagagaagtcctggatcttttaaatgaaagcttaggcg

SEQ ID NO: 293585 - DNA, 892 bp, Unknown
  Bacterial polypeptide expressing nucleotide sequence isolated from the Sargasso Sea
atgcaaattgcacaacgactttatcaaggtgtagatatcgagggtgaaacaaccggattaattacttatatgagaactgatggaactaatatttcaaaagaagcaattgatgacttcagaaaatttattactgatgattttggtgataaatatttaccagaggcaccaaatagttatacggggaaaaaagcaaagaacgctcaagaagctcatgaagcaattagaccgactaatataagcagaaaaccttctgatataaaaaaatatgtaaatgcagatcaatttaaactttatgaattaatttggagtagagccttatcatctcaaatgactccagcagaatttgatagaaatacaataattatttcttcaaacgataataagattaattttagagctagcggctcagtcgtaaaatttgatggatttcttaaagtttaccaagttcaagaaactgacgaagatgcaaagaatattttgcctgaggtcaaagttggagaagaaattagtatacttaagcttaatgatgaacaacatttcacagatccaccaccacgatactctgaggctagtttagtgaaaaagatggaggaattaggcatagggagaccctctacttatgctagcattatctcagtgttatcaactagaaattatgtcgaactaattaataaaaggtttaatccgactgacagaggtaagctaatttcagcttttttagaaaaattattctctaaatacgttgattataatttcactgcagaactagaaaatcagctagatgaaatcactagtggtaaaattgaatgggttcaagttttagataatttctggagagacttttacgaaaatgtggaaaagttaaagaaaagagaactagagaagtattaga

SEQ ID NO: 293586 - DNA, 813 bp, Unknown
  Bacterial polypeptide expressing nucleotide sequence isolated from the Sargasso Sea
gatgggagaaaccactggattaattacatatatgagaactgatggtactaatatttcaaaagaagcaattgatgtctttaggaaattcattgctgatgattatggtgataagtatttaccagaggcaccaaataattatacgggaaaaaaagcaaagaacgctcaggaagctcatgaagcaattagaccaactaatataagtaggaaaccctctgatatcaaaaaatatgtgaatgcagatcaatttaaactttatgaattaatttggagtagagccttatcatcacaaatgactccagcggagtttgatagaaatacgataattatttcttccaaagataataagattaactttagagctagcggttcagtagtaaaatttgatggatttcttaaagtttatcaagttcaagaaaacgacgaagatgcaaagcgtattttgcctgaagtcaaagttggagaagaaattaatatacttaagcttaatgatgaacaacactttacggatccaccgccacgatactctgaagctagtttagtaaaaaagatggaagaattgggcatagggagaccctctacttatgctagcatcatctcagtattatcaacgagaaattatgtcgaattaattaataaaagatttaatccaactgatagaggtaaactaatctcagcttttttagagaaattattctctaaatatgtggattataattttactgcagacttagaaaatcagctagatgaaataactagtggtaaaattgaatgggttcaagttttagaaaatttttggaaagatttttacgaaaa

SEQ ID NO: 293587 - DNA, 1087 bp, Unknown
  Bacterial polypeptide expressing nucleotide sequence isolated from the Sargasso Sea
agactttcttgtaggatttacactctctcctgttttatggagaaaattaccaggatcaaaatcagctgggagagttcaatcagttgctttaagaataataagtgaaagagagcttgagatagaaaaatttgtgcctcaagaatattggtcacttcaaggagaatttagaaataaagaagataaagttattaattcgagactaacattctataatggaaataaagttgataaattagatatcaaaaatgaaaatgaagctacaaaaattttcaatgatattaaaaattctacttttactgttggtagcattactaaaaaggaagctaaaagaaatccctaccctgcttttacaacatctactatgcaaattgagtcgagcagaaaacttggccttagtgcaagtcaaactatgcgtaccgcacaaagattatatgaaggaactgaaattaacggagaaacaacaggtctgattacttatatgagaacagatagtgttataatgtctaatgaagcaatcaatcaagttagaaactttgtaacagataattatggtgctaattatttgcctgatagcccaagagtttataaatcaaaagcaaagaatgctcaggaagctcatgaatgtataaggcctacaaatataaatctaacaccaaaagatattaaacaatatattactcttgaagagttcaaactgtatgaaattatttggcaaagagcagtaagctctcaaatggcaagtgctatattagatcaagtggcagtagatattacaaatgaggaaaaaaagattgttttacgagcaaatggttcaacaattaaatttccaggaatgtatagagtttatcaagaagcgaaagatgatgataaagatgaagaaaaagaaacaatccttccaataatgagtgagggtgaaattttaaatttgaaagaagttgaaaaaactcaacattttacttctcctcctcctcggtatactgaagcaagtttagttaaaaaacttgaggagcttggaataggcaggccctcaacttatgcatcaattattaaagttcttcaagatagagattatgtagttttagataaa

SEQ ID NO: 293588 - DNA, 1201 bp, Unknown
  Bacterial polypeptide expressing nucleotide sequence isolated from the Sargasso Sea
aatgaatctagtgattgtagaaagtccagcaaaagcaaaaactataaataaatacttgggaacagaatatacagtgcttgcaagttatggtcatataagagatctgccttccaaaaatggatcggttgaccctaacgataaatttaaaatgatttgggaagttgatagcttttcaaaaaaatatttaaaagaaattactgatgttgcaaaagagtctaaaaaaattatattagcaactgaccctgacagagagggtgaagctattgcctggcatgtaaaagaatttcttgaagaaaaaaaaatactcaaagataaaaaagttgaaagagttgtattcaatgaaataacaaaaaaagctgttactaatggtattgaaaatccaagagatattcaaacacatttagttgatgcatatatggctagaagagcactagattatcttgttggttttaatatatcacctattctatggacaaaattacctggatcaaaatccgcaggtagagttcaatctgttgccttaaaactactaactgaaagagaacatgaaattgaaatatttaaaccaaaggaattttggactttaaacgttgatttttttacaaaagataaaacaaaaattaaatctacgccttcccaattggataataagaaaatagagaagttttcattcaaaaataaaaatgaaattattaatgctataaataaatttcaagataaaaaattcaaaattactgatttaacttcaaaaatatttactagaaaccctgttggtccatttacaacatcaacactacaacaatcagcatctagtaaattaggttttggagcatcaagaaccatgcaaatagctcaaagactttatcaaggaattgatattgatggagaaactgttggattaataacctatatgagaactgatggaaccaatatttcaaaagatgccatcgaggaatttagaaaatatatagataaagaatttgggaaagattatttgcctgaagtgccattaaattattcaggaaaaaaagctaaaaacgcacaagaagctcatgaagcgatcagacctacagatattgataagtctccagcatttttaaaaaaatacttaagtacagaccaattaaaattgtacaatttaatttgggcaagagctttatcttcacaaatggagtcagcaaaatatttgatcgtaaaacaa

SEQ ID NO: 293589 - DNA, 436 bp, Unknown
  Bacterial polypeptide expressing nucleotide sequence isolated from the Sargasso Sea
tatgaatctggttatagttgaaagtcctgcaaaagctaaaactattaataaatatttaggggataattataaagttttagcaagttatggtcacataagagacctcccttctaaaaacggatctgttgatcctgaccacaattttagaatggaatgggaagttgatagcttttcaaaaaagtatctaaaagaaattacagatgctgctaaagattcttcaaaaattatattagctactgaccctgatcgtgaaggtgaagctatagcgtggcatgtaaaagaatatttaaatgaaaaaaaacttttaaaagataaagaaattgagagggttgtttttaatgaaatcacaaaaaaagcagtaattcatggtatagaaaatccaaggcagatagaaccattgcttgtagatgcttatatggcaagaagagccttagat

SEQ ID NO: 293590 - DNA, 2158 bp, Unknown
  Bacterial polypeptide expressing nucleotide sequence isolated from the Sargasso Sea
ttacttagctagacgagcgttagattatcttgtcggatttaatatctcaccaattctttggactaaattacctggatcaaaatcagcaggaagagttcaatctgtggccttaaagcttattacagaaagagaaaaggaaatagaattatttaagccagatgaatattggactcttacatcagactttacaaataaaaataataaaaatattttttcaaaattaagtttatttaatggagaaaaaatagaaaagttttctttcaaaaataaagaagaaatacaaaaagcagttgatgcaatcaataaaacaaaatttaaaattacagatgtaaacacaaaagtattcagacgtaatcccctagcccctttcaccacttctaccttacagcaaactgcttcaggacgatttggttttggagcttccagaacaatgcaaattgcacaacgactgtatcaaggagtagatatcgagggtgaaactaccggattaattacttatatgagaactgatggaactaatatttcaaaagaagcaattgaagattttaggaaattcattactgatgattatggtgataaatatttgccagaggcaccgaatagttatactggaaaaaaagcaaagaacgctcaagaagctcatgaagcaattagaccaactaatataagtagaaaaccttctgatataaaaaaatatgtaaatgcagatcagtataaactctatgaattaatttggagtagagccttatcatctcaaatgactccagcagagtttgatagaaatacaataattatctcttcaaatgataatcaaattaattttagagctagtggctcagtggtaaaatttgatggatttctaaaagtttatcaagtccaagaaactgacgaagatgcaaagaatattttacctgaagtcaaagttggagaagaaatcagcattctcaagttatatgatgaacagcattttacagatccaccaccacgatactctgaagctagtttagtgaaaaagatggaggaattaggtatagggagaccctccacttatgctagcattatctcggtattatcaacgagaaattatgtcgaattaattaataaaaggtttaatccaacagatagaggcaaattaatttcagcttttttagagaaattattctcaaaatatgtggattataatttcaccgcagatctagaaaatcagctagatgaaatcactagtggtaaaattgaatgggtacaagttttagataatttttggaaagatttttacgaaaatgtgggaaaagttaaagaaaagagaactagagaagttttagacttattaaatgaaagtttaggagctttaatatttgaaagagatgataaagacgcgatcgatcgaaaatgcaagttatgttctaatggagaattaagtttaaagaatagttttagaggtggagcttttataggatgctcaaattatccagagtgtaaatttaccagacctttatctaaagttaaagctgcggctcaatacaatttagcagagcctaaattactaggtcaaaacgaaaaaggtaaagatatatatttaaagaatggaagatttggcccgtacttacaatatgaaaaagaaaaagatgaattagaaacaaaaaagaaaaaaggtagaaagaaaaaaaatgagaatgaacatcttcagaatgtatcaattccaaaaggtatagatgttgacagtgttgatttagataaagcaaaatatttatgttctcttcccagagtattaggtcaacatcctgaaaatggacaagacattactttaaattctggaagatttggtccttatctgaaatgtgaaaataaatctgcaagacttgaaaatattgaagatcttttttctataggaattaatcgagcgattacattaatagctgaagctaaaccaggaagaatttcctcttcattaataaaagatcttggtgaacatccagaggataaaaaaccagtaagaatcatgaaaggtcaatatggaccgtacattaaatataaatctcttaatgcaactataccagaagaaaaagatccaaacgatcttactatggaagaagcacttatattaattgaaaaaagaaaagaatacgataaaaataaaaagaaaggacgaaaaaaatga

SEQ ID NO: 293591 - DNA, 2101 bp, Unknown
  Bacterial polypeptide expressing nucleotide sequence isolated from the Sargasso Sea
aaattctgtaaagagtctgaacttttatatcttgccactgatcccgatagagaaggagaggcaatagcttggcatctaatgagcgattttaatgataagaaattaatcaatgatgtagatgttaaaagagtaacatttacagaaataacctcttctgcaataaaaaaggccattgaatcacctagagaaatagatcaagatttagtagatgcatatttaacaagaagaatcttagaccatttgatcggttttaaagtttcacctcttttatggagacacatatcaagggcgaaatccgccgggagggttcaatctcccactttaagaattctttgtgaaaaggaagatgagagagatttacatattgcagaagaatattggcctttcgaatctagttttgattttttgggtactacatttgaagcaaaattaaccaaaatattagaaagaagcatcaataaagaaccacttcgtgatgagctcgaagttaataatttgataagtgaattggaaagtgcaagtttcaagttaaaagaggtagagtctaaagctcagtcaagcagccccaaaccaccattcagaacctcaacattacagatgtcagctgcaagcggcttgggctttactgctgatagaactatgcaagctgctcaaaaattgtacgaaggaggtttaataacttatctaagaacagatggtatatcgataagtacatctcctaatactggagagccattttctgaggaaaatcctggtccaccccctctgcaggaaataagaaactttatctcttcaaattatgaatcctcttttctttctaaagaacctcgagtttataaatctaaagtacaaaattctcaggaagcacatgaagcaatcagaccaacagatatttcaaagatacctatagatacaagcttatcgggagatgaagaaaagctgtatacgttgatttggaacagaactgttgcaagccagatggaagtctcaaaatatgagaggaaaaccctagtcatatcatcaaaagataataagtatgaatttagagcttcatccagaaagaatatatttaaaggttttgaaattttgatgggcacagaagatgaaaaagttactttattccctgaagggcttgaaaaaggaagtgagcttagtttagtttcaaataaatatgaacaaaaatttacttcacctccaaatagatactcggaagcttcattgatcaaaaagatggaagaggagggtattggtcgtccttcaacatatgcaaccatagtgaagggtttgagaacaaaaaaatatgcttacggggcaaagtcaatcattccctcagatttaggtagagttttaacctcctacctgaaaaaagtttttgaggaattttttatagaaacagaatttacagctcgaatggaagcagatctagataaaattgcttcgggaaataaaaattacgaagaagttctagatggtttttgggctgagcttcaaaactacctcaatagaaagattaatgacattgaaattggtaataaggatgaatttaaaacgagacaagttctagacttacttaatgaagagctaggatctgtaatcttccccaaagatgactctggaaagaatagaaatgaatgcccgaaatgttcaagtcctatcagcttgaaatcaggtgcttggggttatttcgtaggctgctctgaatgtaaatggaccaaaaagccctttgaatttaatacaacctgggaaacctatagagagcttcctaaagacttaggacctcatccagatctgggtaaacccatatacgcagatttaagtgtgaatggcccttgtgtgtggacattaaatgaagaagataagaaactttttggaaccccagatgaagacgaatttatcttagatataggtttgaatagagctatagaattaatagatacaagcaatgctgaaaatatattgtttattgaagttaattcaaatttgccaattgttttaaaaaatggaagatttggagaatatactgaatttgacggattcaataaagcaactaaactaaagcctgaagataaagatccaagtcccaaagtatcttattacgaac

SEQ ID NO: 293592 - DNA, 1449 bp, Unknown
  Bacterial polypeptide expressing nucleotide sequence isolated from the Sargasso Sea
aataaaaaattcaaaatacaaaatttcagatattagttctaaaatttatacaagaaatccacttggtccatttacaacatctactctacaacaaacggcatcaagcaagctaggttttggtgcatctagaacaatgcaaattgctcaaaggttatatcaaggaattgatatagaaggtgatacagttgggcttatcacatatatgaggacagatggaacaaatatttcaaatgatgctttaactgattttagagattttataaaaaaaaattatggagacaattatctccctaaagaaccaaataattattcaggcaaaaaagctaaaaacgcacaagaagcacacgaagcaataaggccaactgatatatcaagaagtccagattcaatgaaaaaatttttgagtactgatcaaattaaattatatgatttaatttggtctagagcactttcttctcaaatggaggcagcaaaatttgatagaaaaactataacaattatatcaactgataatttgaaccagtttaaatgctctggctcaaccattaaatttgatggatttttaaaaattacaagaaccgatgaagatgaaaatgataaaattttaccagatgtaaataaagatgaagttacagcagacaattttattgatgagcagcactttacgcagccacccccgaggtattctgaagcaagtttagttaaaaagcttgaagagttaggaattggcagaccgtctacatacgcaagtattatttcagtaatttctaatagaggatatgcagatatagttaataaacgtttttttcctaccgatagaggaaaattattatcagcatttttggaaaaattgttctcaaaatatgtagattatggttttacagcaggtctagaagaacagctcgatgatattacttctggaaaagaagaatggattaaagttcttaataatttttggaaagatttcaacattaacgtttcaaatgtaaaagaaaaaagaactagagaggtgcttgatcttcttaatgaaagcttgggtgaattaatttttgaatctgatgaaaaaggtaaaattaatagaaattgtaaattatgtaacacaggacagttaagcctaaaaaatagttttcgtggtggtgcctttataggttgttctaattacccagaatgcaaattcacaagaccactatctaaatctaaagcaaatgatcaaattgcactagcagaaccaaagctaattggtcagaatgatactggaaaagacatttttctgaaaaatggaagatttggtccatatcttcaatatgaaatgactgaagatgaaaccatatcaaaaaaaaagaaaaagaaaaaagaaaatgaaaatttaagaaatgtatcgattcctaaaggaatagatataaatcatatagatttagataaagctaaatatttatgtcactcccaaaa

SEQ ID NO: 293593 - DNA, 2479 bp, Unknown
  Bacterial polypeptide expressing nucleotide sequence isolated from the Sargasso Sea
cttggatcacacactagttattgttgaaagtcccaccaaagcaaaaactataagaaagtttttgccttctaattatgaagttcttgcttctatgggacacgtaagagatcttccaaaaggggcggctgaaatacctgctgcagtcaaaaaggaaaaatggtcaaggataggagtaaatacaagggaggattttggaccactttacatagttccaaaagataagaaaaaggttgttaaagagctgaaagatgcattgaaaggtgcgacaaaactattactggcaactgatgaggatagagagggagagagcattagctggcatcttctacaaatacttaagcctaaaataccaactaagagaatggtttttcatgaaattacaaaaaaggcaattaacaaagctttagatcaaacaagagaacttgatatggaacttgtgcaggctcaagaaaccagaagaattttggacaggctttttggatatgaattatctcctttactttggaagaaggtagccccccgattatctgctggtcgtgttcaatcagtttctgtaagacttcttgttagaagagagagagaaagaagatcctttaaaaaagctagctactgggggattaaagcttccctagtaaaagataatgttactttcgaaactaaattatttagcttaaacggtcaaagaatttctaatggttccgatttcgatgaacagaccggcaaattaaaacaaggaaataaatctttaataattggaaaagaaaaggtaaatgatttattgaagattttttcctctgaggattggttagtctcaaaaatcgaaaaaaaaccatctactcgtaagccagttcctccatttacaactagtacattgcaacaagaagcaaacaggaagcttcgtttgtctgcaagagaaactatgagatgtgcacaaggcctatatgagagaggtttcataacctatatgaggactgattcggttcatctttctgaacaagccacaaaagctgctagagaatgtgtcagctctatgtatggaaaagaatatttatctaactcaccaagacaatttaattcaactgcaagaaatgctcaagaagcacacgaagcaattaggcctgcaggcgagctatttaaaacaccaaaggaaactaatctaactggtagagacttatctctttacgatttaatttggaaaagaactgtagcaagtcaaatggcggaagctaggctaactatgattaatgctgaaattagtgtgggggatggattatttaaatcgagtggaaaaagtattgatttcccaggattcttcagggcttatgtcgagggaagtgatgatccaagttcatctcttgaacagcaagaaattattctcccaaacttaacaaccggaacatttcttgaagttactaataaggaatctacttttcatgaaactaaaccgcccgcaagatatacagaggccgcattagttaaagttcttgaaaaagaagggattgggagaccatctacctatgcaagcataattgggacaattgtggatagaggttatgcaaatatatcttccaatactttggctccaacgtttacagcttttgctgttactgctctattagaagaacattttcttgatttggttgatactacttttactgcaaaaatggaatcttcattggatgaaatatcttcaggtaatcttgagtggctaccatacctcgagactttctataaaggtaaaaatggtctggaggtgaaagttcagaaaacagagggtgatattgatggtaaagcttatagacaagttgatttcgaagaccttccttgcgtagtcagaataggctctaacggaccttggttagagggtacaaaaattgatgaatctggtaatgaaattcaggcgaaaggtaatcttccaatggatattactcctggagatttagacataaagcaagttgatcaaattttaagtggcccatctgatcttggaactgatccaaaaactggggaaaaagtctttttaagatttggcccttatggaccttacgtacaattgggaaataatgatcaagatcaagctaaaccaagaagagcttcattacccaaagagttgaaaactgatgatctaactctagaggatgctctagtacttttaagtttgcctagattgttaggagttcatcctgaaggaggtgtcgttgaggctgatagaggaagatttggcccttatattaaatggattaaaaatgaaaatgaatctgaaaacagatcattaaagaaagaggatgatgtttttacagttgatataaaaagagcattagaaattcttgcgatgccaaaaatgggtagaggtggtcaagaggtacttaaagactttggaaaaccaaaagaatttaaagaaaaaatccaaatattaaatggaagatatggggtctatttaaaatgtggcaaaactaatgtttcaattgccaaagatact

SEQ ID NO: 293594 - DNA, 1510 bp, Unknown
  Bacterial polypeptide expressing nucleotide sequence isolated from the Sargasso Sea
aatgaatttagtaattgttgaaagtccagcaaaagcaaaaacaataaataagtatttaggtaaagattatttagttttagctagttatgggcacataagagaccttccttcaaaaaatggatctgtagatcctgaaaataaatttcaaatggaatgggaaatagactctttttcaaaaaaatatttaaaagaaattacaaatgctgccgaagagtctgataaaattattttagctacagaccctgatcgtgaaggtgaagctattgcgtggcatgtcaaagaagttttagataaaaaaaaattattaaaagataaacatctagaacgtgttgtttttaatgagattacaaaaaaagctatcctagatgctattaaaaatccaagagaaattcatttacctttagttgaagcttatttagcacggagagctttggactatcttgtaggatttaatatctcgccaattctttggacaaaattacctggatcaaaatcagcaggaagagtccagtctgtagccttaaagcttataactgaaagagaaaaagagatagagttgtttaaaccagaagaatattggactcttacatcggactttacaaacaaagataataaaaatattttctcaaaattaagtttatataatgaagaaaaaattgaaaaattttcttttaaaagtaaagaagaaatacaaaaagcagtagatgtaatcaataaaacaaaatttaaaattgctgatgtaaacactaaagtatttagacgaaaccccttagccccatttacaacttcaaccttacaacaaactgcttctggaagatttggttttggagcttctagaacaatgcaaattgcacaacgactttatcaaggaatagatatcgaaggtgaaaccactggattaattacttatatgcgaacagatggaactaatatttcaaaagaagcaattgatgattttagaaaattcattattgatgattatggtgataaatatttaccagaagctccaaatagttatacggggaagaaagcaaagaatgctcaggaagctcatgaagccattagaccaactaatataaagagaaagcctactgatataaaaaaatatgtaaatgcagatcaatttaaactatatgaattaatttggagtagagccttatcatctcaaatgactccagcagagtttgatagaaataccataattatttcttcaaacgataataagattaactttagagctagcggctcagtcgtaaaatttgatggatttcttaaagtttatcaagttcaagaaactgacgaagatgcaaagaatattttgcctgaggtcaaagttggagaagaaattaatatacttaagctaaatgatgaacaacacttcacagatccaccaccacgatactctgaggctagtttagtgaaaaagatggaggaattaggcataggcagaccctctacttatgctagcattatctcagtattatcaacgagaaattatgtcgaattaatt

SEQ ID NO: 293595 - DNA, 1651 bp, Unknown
  Bacterial polypeptide expressing nucleotide sequence isolated from the Sargasso Sea
ttggaaagtatcgaataataaaaaatctgtaattgatgatataaaaaaatatacgaaagatgcggatgtaatatattttgcgactgacccggatagagagggcgaagcaatatcaaaacacttatatgatattttagaaaaagcaaaattcttaaaaggtaaagagacgcatcgagttgtttttaatgaaattacaaaaaatgctgtcattgatgctttaaaaaatccacgaacaatatctattagtcagtgggatgcatatttagctagaaggactctagattacttaatgggctatgatatttctgaatttttatggaagaaggtgagtcgtgatgcaagagcgggaagagtccagagtccagcattaagattaatcgtagagcgcgagattaaaataaatgaatttgatccacaagagtattggaatttgtctgcaagtgtttcaaataatgatagaaacatagaaatagaattgatagaaatcaatggagagaaaataaaaaaagataatattacaagtataaatgactctcaaagtgctggagaaataaaatcaaaaatagaaaaatataaaaatgtgaaagtctcaaatataaaaaatggccaaagaaaaaccaaaccaaaggcaccgtttacaacagcatctttacaacaaacctcttacacgagtctggggctttctgttaaacaaacctctgcaatagcacaaagactctatcaaggtatggatatagggagtggacaacctgttggtttgataagttatatgagaacagattcaacaaacttgtcaaaagatgctttatccgatatttcatcatatcgtaaagaaaatcacccaacactagcagaggatcaagtaagaatatacaaaggtaaatcaaaaaatgcacaagaagcccatgaggcaataaggccaacatctatgtcaaatacacctagtgctgtgaaaaagtatctcgaagaaaatgattataagctatatgatttaatctggaaaagaacgttggcatcccaaatgaaagactctatcagcaaaacagtgtcgatagacctatctatggaaaatgattttacattcaaatattctggttcatatctagagtttcctggattcaaagaagtttatagttttagtgataatgatgaaaaagaaaaagaaaataaaaaaatacttgaaagcttgaaaataaatgatgaattgaatctcgatagtgttaatgcggaacaaaagtttactcagcctccttcgagatataatcaagccagtttaatacaagcgctggaagaactaggtatcggaagaccgtcaacatatgtgactattattaataaaataatggaaagtaattatgttgatccagaaaaaagcaattttcagccaacagcactagcgaaggttgtctatgagactctcataagtcattttagagatgacttggttgattatgattttactgcccgacttgaagaagatttagataaaatagcaaatggcgaaaaagaatatatggaatgtgttgaaaaaacatataagccatttaaggaaaatcttgatgaaaaaattaaaactgttgatatctctgaacaaagagaactaaaggacttaggaaaacatccagagacaaaaaggcctgtcaccgtaaga

SEQ ID NO: 293596 - DNA, 451 bp, Unknown
  Bacterial polypeptide expressing nucleotide sequence isolated from the Sargasso Sea
tatgaatcttgtcatagtcgaaagtcctgcaaaagctaaaactataaacaaatatttaggatctaattatacagttttagcaagctatggtcatattagagaccttccgtctaaaaatggatcagttgatccagaaaataagtttaaaatgatttgggaagttgatgcattctccaagaaatatctaaaagaaataacagatacagctaaagactcggaaaaaataattcttgcaactgaccctgatcgagaaggcgaagctatagcttggcatgttaaagagtttcttgatgaaaaaaaacttcttaaagacaaaaaagttgaaagagttgtttttaatgaaattacaaaaaaagcggttacaaatggcatagacaaccctagatcaatagaaacacacctagtcgatgcctatatggctagaagggctttagattatttagtcgggttt

SEQ ID NO: 293597 - DNA, 619 bp, Unknown
  Bacterial polypeptide expressing nucleotide sequence isolated from the Sargasso Sea
atggcaaaatcactggtcatagtcgagtcaccagccaaagcgaaaacgataaataaatatcttggtaaaaattttatcgtaaaaagttcgattggccatgtgcgagatcttccgacgaaggctttaggcaaagtcgagcctaaaaaaccggctaaagaactcaaaactttaagcgaagaagcgcgtcaagaataccttcgccgtcacgaatatttgaaacttgtagacagaatgggcgtagatccggagaaagactggaaagcccactatcaagtgctacagggtaaagagaaagtcgttaacgaacttaaaaagcttgctaaagatgctgacactatctatctcgcgaccgatttggaccgcgagggggaagcaattgcatggcatttacaagagctgttaggcaagaaagataagacctatcagcgagtagtgttcaacgaaattaccaaaaacgcgattcaagatgcgttctccgatccgggcgagttaaatatctctcgcgttaacgcgcagcaggctcgccggttcctagaccgtgttgtaggtttcatggtgtcgccacttctgtggaaaaaattgcgcgaggcctctcagcagggcgcgtaccatcggtagc

SEQ ID NO: 293598 - DNA, 2055 bp, Unknown
  Bacterial polypeptide expressing nucleotide sequence isolated from the Sargasso Sea
ttactgaaagagaacatgaaattgaattattcaaacctgaagagttttggactttaagtattaattttcaggataaaaacaaaagcaaaattacagcaagtatttttcaacttgatggagaaaaaattgaaaaattcacatttgaaaataaagaggaaattgaaaaggcaatttcaaatattaagaccaaaaaatttaacataactgatatttcctcaaaagttgttagcagaaatccctcgggaccctttactacttcaacacttcagcaagctgcttctagtagattgggttttggtgcatcaagaacaatgcaaatagcacaaaaactttatcaaggaatagaaattgaaggagatacagttgggttaattacttatatgagaacggatggaaccaatttatcagctgatgctatcactgattttagaaattttattaaaaaacaatatggtaacgaatacttgccagaaaatccaaataattactcaggaaaaaaagcaaaaaatgctcaggaagctcatgaagcaataagaccaactgacattaatagaaatccagactctattaaaaagtatttaagttctgaccagcaaaaattatattctttaatttggtctagagcactatcgtctcaaatggaaacagcaaaatttgatagaaatacaataacgattgagtctgaagacggcaaaactatatgtaaatcaagcggatcggttttgaaatttgatggatttttaaaagtttattcaaatcaaagcaaagatgatgatgaacaaattttacctgagatgtcaaaaggaccaattaatatagaagctcttattgatgaacaacattttacccagcctcccccacgttactctgaggcgagtttggttaaaaaattagaggagctaggaattggaaggccttcgacttatgcaagtataatttcaacaatagcaaatagaggttatgcagaaatagttaataaaagatttttcccaactgatagaggtaaattaatttctgcgtttttagaaaaattattttcaaagtatgtggattataactttacagctgggctagaggatcagctagatgaaataacttctggaaaagaaagttggttaaaagtcttagaaatgttttggaaagattttaatagtaatgtttcagaagtaaaagaaaaaagaactagagaggttttagatcttttaaatgaaagtttgggagcattgatatttgacactgataaagaaggaaacatagttagaaaatgccagttatgtgaaacgggttcccttagtttaaaaaatagttttagaggaggtgcctttattggatgttcaaattatcctgaatgtaaattcacaagaccactatcaaaagctaaagcagctgctcaatcacaacttgctgaaccaaaatttcttggcaaacacgaaaatggaaatgatatttttctaaaaaatggaagatttggtccttatcttcagtatgagaaagttcttgaagaaaatattgaagaagaaaaacctaaaaaaagaaaaaaaactaagaaaaagaaacctgaagttaatgaactactgaaaaatgtatctataccaaaaggaattgaattagaaagtattgatttagataaagcaaaatttttatgttcgcttcctaaatcattaggtattaatccagaaaatcaaaaagaaatcactttgaacactggtagatttggaccatatttaaaatgtgaaaataaatcagctagaatagaaaatgtcgaagaaattttttctataggattaaatagagcaattacactcatcgctgaagcaaaacctggaaggatgtcttcttcaattataaaagatttaggagagcatcctgaggataaaaagccagtccgaatcatgaaaggtcaatatggaccatacattaaatacaaatctctaaatgcaactatacctgaggaaaaagaccctgtagagctaacaatggaagaggcacttatactaattgagaaaagaagagaatacgataaaaacaaaaaagttaaaaaaaagaaaaaatgaa

SEQ ID NO: 293599 - DNA, 1855 bp, Unknown
  Bacterial polypeptide expressing nucleotide sequence isolated from the Sargasso Sea
ttggatcacacacttgttattgttgaaagtcccaccaaagcaaaaactataaggaagtttttgccttctaattatgaagttcttgcttcaatgggacacgtaagagatcttccaaaaggggcctctgaaatccctgctgcagttaaaaaggaaaaatggtcaaggataggagtaaatacaggggaagattttgaaccactatacatagttccaaaagataagaaaaaggttgttagagagctgagagaagcattaaaaggtgcgacacaactattgttggcgactgatgaagatagagagggagagagtattagttggcatcttatgcaaatacttaagcccaaaataccaactaagagaatggtttttcatgaaatcacaaaaaaggcaattaataaagctttagatcaaacaagagaaattgatatggaacttgttcaggcacaagaaactagaagaatcttggacaggctttttggttatgaattatctcctttactttggaagaaggtagctccccgattatctgctggtcgtgttcaatcagtttctgtaagacttcttgttagaagagagagagaaagaagatcttttaaaaaagcaagttactgggggattaaagcttccctactaaaagataatgttactttcgaaactaaattatttagtttaaatggtcaaagaatttctaatggttccgatttcgatgaacagacgggcaaattaaaacacggaaataaatcattaataattggagaagataaagttaatgatttattgaaggctttttcctctgaggactggttagtctcaaaaatcgaaaaaaagccatccactcgtaagccagtccctccttttaccaccagtacattgcaacaagaagcaaacaggaagcttcgtttgtctgcaagagaaactatgagatgtgcacaagggctatatgagagaggtttcataacatatatgaggactgattcagttcatctttccgaacaagccacaaaagctgctagagaatgtgtcagttcaatgtatggaacagaatatttgtctagctcaccaagacaatttaattcaactgcaagaaatgctcaagaagcacacgaagctattaggcctgcaggtgaggtatttagaacaccaaaggaaactaatctaactgggagagacttatctctttacgatttaatttggaaaagaactgtagctagtcaaatggcggaagctaggcttacgatgattaatgctgaaattaccgtggggaatggattatttaaatcgagcgggaaaagtattgatttcgcaggattcttcagagcttatgtcgagggaagtgatgacccaagttcatcccttgaacaacaagaaattattctcccaaacttaacaaatggaacatgtcttgaagttactaataaggaatctacttttcatgaaactaaacctcctgcaagatatacagaggctgcattagttaaagttcttgaaaaagaaggaattgggagaccttctacctatgccagcattattgggaccatagttgatagaggttatgcgaatatatcttccaatactttggccccaacgtttacagcttttgctgttactgctctattagaagaacattttcctgatctggttgatactacttttactgcaaaaatggaatcttcattggatgaaatatcttcaggtaatcttgagtggctaccatacctcgaaactttctataaaggtaaaaatggtttggaggtaaaggttcagaaaacagagggtgatattgatggtaaagcttatagacaagttgattttgaagaccttccatgcgtcgtcagaataggctctaatggacctt

SEQ ID NO: 293600 - DNA, 1174 bp, Unknown
  Bacterial polypeptide expressing nucleotide sequence isolated from the Sargasso Sea
atgaatctagtcatagttgaaagccctgctaaagcgaaaacaattaataaatatttaggtgataactatactgttttagctagctatggtcatattagagatcttccttcaaaaaatggatcagttgatcctgatcaaaattttaaaatggaatgggaagtagatagtttttcaaaaaaatatttaaaagaaattactgatgctgcgaaagattcttcaaaaataattcttgctactgacccagatcgtgagggtgaggcaatagcatggcatgtgaaagaatatttagatgaaaaaaaacttttaaaagataaagaaattgaacgtgtggtatttaatgaaataacaaaaaaagcggtcacacatggtattgaaaatccaagacagatagagcccttattagtcgatgcatacatggctagaagagcattagattatttggtgggatttaatatatcaccaatactttggactaaattacctggttcaaaatcagcaggtagagttcaatctgttgcactaaaattgatcactgaaagagagcatgaaattgaattattcaagcctgaagaattttggactttaagtattaattttcaggataaaaacaaaagcaacattacagcaagtatttctcaacttgatggagaaaaaattgaaaaattttcgtttaaaaataaagaagaaattgaaaaggcaattgataatattaagaacaaaaaatttaatataactgatatttcctcaaaagttattagcagaaatccctcgggaccctttactacttcaacacttcagcaagttgcttctagtagattaggttttggtgcatcaagaacaatgcaaatagcacaaaaactttatcaaggaatagaaattgagggagatacagttgggttaattacttatatgagaacggatggaactaatttatcagctgatgctgtcactgattttagaaattttattaaaaagcaatatggtaacgaatacttgccagaaaatccaaataattactcaggaaaaaaagcaaaaaacgctcaggaagctcatgaagcaataagaccaactgatattaatagaaatccagactctattaaaaagtatttaagttctgaccagcaaaaattatattctttaatttggtctagagcactatcttctcaaatggaaa

SEQ ID NO: 293601 - DNA, 1586 bp, Unknown
  Bacterial polypeptide expressing nucleotide sequence isolated from the Sargasso Sea
aaaaactattttggataaaccagttgaaagagttgtttttaatgaaataacaaaaaatgctgttttagacgcaatgaaaaaaccaagaaaaattaattcagagttggttgaagcatatttggcaaggagagctttagatcatttaattggcttttcaatttctccaatattatggagaaagcttccagggtcaaaatctgcaggccgagttcaatccgttgcattgaaacttatctgtgaaagagaaattgagattgaaaagtttaatattgaggaatattggtcgatatcttcgatttttttaaataataataatgaaaatttccttgcaaggctgtttatacttgatagtaaaaaattagccaaaatggatattaaaaatgaagacgaagctaataatgctttagacaaagttagaaaatcttcatttaatataactaaaattgttagtaagcgagttaaacgtaatcctttagcacctttcactacttcaacacttcagcaagaagcttcaaacaaattaggttttggtgcgtcaagaacaatgagaatagcccaaaaattatatgaaggtataaatattgggagtgatacgactggtttaataacttatatgagaacagatggtgtgcaattaagttctcaggctattgaggaattacgagaagaaataataaaccgtcatggtaacaattatattcctcaaataccaagagtatataaatctaaagcggctaatgcccaagaagctcatgaagcaattaggccaacatcaatttcacgtgatccagaggatatgtcgcaatacttagatacagagcaattaaaactttatgaattgatttggaaaagaactatttcaagtcaaatgcaatcagctaagctagatgaaacttcagctgatatttcaaataaagatatgagtattgtttttcgagcaaatggatcacaagtatctttcccaggtttttttatttatagggatagagaagatgataaaatattaccaaaattattagaaaatgataaagttgatctacaaaaggctgatggagaacaacatttcacacaacctcctcctagatatacagatgcaagccttataaaaaaaatggaagagttaggtattggaagaccttctacgtacgcatctatcctacaagttcttataaatagaaattatgttgaaaaagaaaaaggtaaacatttacctcaagaacgaggaagaattctcactgcctttttaaataatttctttggacaatatatagaatatgattttaccgctgatttagaaaaaaagttagataaagtctcagatggaaaattaaattacaaaaatttattaaaagagttttgggatggatttaagccacatttaaataaaatgtcggacttagaaagagacaaaattcttgaggctcttgaaaacgaactatcagatttattttttcctaatgaagatttaaataatgatggccaaccaaacaaaatatgtcctacttgctctaatggaaaattaggtttagagcttggaaaatatggcgcttttattggatgttcaaattatcctgaatgtaaattca

SEQ ID NO: 293602 - DNA, 1602 bp, Unknown
  Bacterial polypeptide expressing nucleotide sequence isolated from the Sargasso Sea
agtaaagatgaaattcaaaaagcagttgatgttattaataaaaccaaatttaagattgctgacgtcaatacaaaattatttcgaagaaatcctcttgcgcctttcacaacatctacattgcaacaaactgcttctgggcgatttggttttggtgcctcaagaactatgcaaattgctcaacggctttatcaaggaatagacatagaaggtgaaacgacaggtttaattacttatatgagaactgatggtacgaacatttcaaaagaagctatagaagattttagaaaacatattagtgatgactttggtgataaatatttacccagtgcacctaataactatactggaaaaaaagctaaaaatgctcaagaagctcatgaagccataaggcctactaatattaaaagaaaacctgcagatattaaaaaatatgttaatgcagatcagtttaagctctatgagttaatatggagtagagccctatcctctcaaatgacaccagctgagtttgatagaaacacaattattatctcatcagaaaataagaatattaattttagagcaagtggttctattataaaatttgacggattcttaaaagtttatcaagtacaagaaactgatgaagacgcaaaaaacatacttcctgaagtaaaagtaggtgaagaaataagtattttaaagctaaatgacgaacagcatttcacagatcctccaccaaggtattctgaggctagtctagtaaaaaaaatggaagaattgggtattggaagaccttctacttacgcaagcattatatcagtattatcaactagaaattatgttgaattgatgaataaaaggtttcatcctacagatagaggtaaactaatttcagcctttttagaaaagctattctctaaatatgttgattataattttacagcagatcttgaaaatcagcttgatgaaataacaagtggtaaaattgaatgggtaaaagttttagataatttttggaaagatttttacgcaaatgtaggaaaagttaaagaaaaaagaacaagagaagtgcttgatttattaaatgaaagtttaggtgcattaatttttgaaagggatgaaaaagatgcgatagatagaaagtgtaagctttgcactaacggagaactaagtcttaaaaatagttttagaggtggagcttttattggttgttcaaattatccagagtgtaaatttactagacccctatccaaagctaaagctgctgcacaatataatttagctgaacctaaactattaggtcaaaataataatggtaaagatatatatttgaaaaatggaagatttggaccatatcttcaatatgaaaaagaaaaagatgaacttgaattaaaaaagaaaaaaggaagaaaaaagaaaaacgaaaacgaccatttaaaaaatgtttcaattccaaagggtattgacattgatagtgtggatttagataaagcaaaatatttatgttcattaccaaaagttttgggtcagcatccggaaaacggtcatgacattacattaaattcaggaagatttggtccgtacttaaaatgtgaaaataaatctgcaagactcgaaaat

SEQ ID NO: 293603 - DNA, 1129 bp, Unknown
  Bacterial polypeptide expressing nucleotide sequence isolated from the Sargasso Sea
aatgaatttagtaatagttgaaagtccagcaaaagctaaaacgattaataaatacttaggaaaagattatttagttttagctagctatgggcatataagagatctgccttcaagaaatggatccgttgatcctgaaaataaatttgaaatgcaatgggaaattgactctttttcaaaaaaatatctaaaagaaataactaatgcagctgaagactctgataaaataattttagcaaccgaccctgaccgagagggtgaagccattgcctggcatgttaagaaagttttagaatcaaaaaaattactcaaaggtaaaaatttagaaagagtagtgtttaatgagataactaaaaatgcaatcttagaagcaataaaaaatcctagagaaatacatttaccattagtagaagcttatttggcaagaagagctttggactaccttgtggggtttaatatatctccaatactatggactaaattacctggatctaaatctgcaggaagagttcaatcagttgccttaaagttaataacggaaagagaaaaggaaattgaattatttaaaccagaagaatattggactttaacttcagatttcacaaataaagataataaaaatattttatcaaaattaagtttattcaatggacagaaaattgaacgatttacgtttaaaaataaaaatgaaattgatcaagccattagtattataaataaaacaaaatttacagtaaatgacgtaaatacaaaagtatttagaagaaacccattggcaccatttaccacatctaccttgcagcaaactgcttcaggaaagtttggttttggggcttctagaacaatgcagatagctcaaagattatatcaaggcattgacattgagggagaaactacaggactaattacgtatatgagaactgatggtacaaatatttctaaagaagctataggtgagtttagaaatttaattaagaatgattttggaaatgaatttttgccggcacaacctaatagttacactggaaaaaaagctaaaaatgcccaggaggcccacgaagctataagacctacagatattaaaagaaaacctttagacattaaaaaatacgttaatacagatcaatacaaa

SEQ ID NO: 293604 - DNA, 2638 bp, Unknown
  Bacterial polypeptide expressing nucleotide sequence isolated from the Sargasso Sea
tatgggtaaatcgctagttattgtcgaatcaccggccaaagctaagaccattaataaatatcttggcaaagaattcatcgttaaatcgagcgtaggtcatatccgtgatctgcctacatcttctatatctgacggcacagataaggtgaaacctgccgccgaagtaaagaagatgtcgccagaagaaaaggcgcgatacaaaaagatgaaagatcatcaagcgctggtatcgcgtatgggcgttaaccctgaaaagggctgggcggctaaatatcaaattctaccgggtaaagagaaagtggttaaagagctgcaagccttagccgattctgctgaccaaatttatctcgcaacggacttagaccgtgaaggggaagccatcgcctggcatttgcaagaggtgattggtggcgatccttcacgttatcagcgcgtggtgtttaacgagatcaccaaatctgcgattcaagaagcctttagtaagccttcttccctcgacaccaatatggttaatgcccaacaggcacgacgctttttagaccgtgtcgtcggctttatggtgtcaccactgttgtggaagaaggttgcccgtggtttatccgcaggacgggtgcaatctgtggcagtgcgtctcgtggtggaacgtgaaagcgaaatcaaagcctttgtgccagaagagttttgggatgtgcatgctgagctcaatacgccagccagcgaagcactgcgcatggaagtggttaagtatttagattcagcttttgagccaaccaacgagcaacaagcgttagctgcggtgcaggccttatcttcggccagctttaaagtgattgcccgtgaagacaaagcgactcaaagtaaaccttctgccccctttattacctccaccctgcaacaagcggccagtactcgtttaggctttggtgtgaagaaaaccatgatgatggcgcagcgcttgtacgaagcgggtcacatcacgtatatgcgtactgactcgacaaacctaagccaagaggccttaggcagcgtacgtgagatgattggcaaggaatacggcgccaagtatttacctgccgagcctatccgctacggttctaaggaaggcgcacaagaagcgcacgaagcgattcgtccttcaaatgtcaatgttgaagctgcggccttaactgatatggaacgtgatgcgcagcgcctttacgagttaatttggcgtcagtttgtctcctgccagatgacacctgcccaatacgatgcgactaaactcacggtgaaagcaggcgactacgaacttaaagcaacaggacgcatcctgcgctttgacggttggacccgtgttcaaactgcaatcaagaagaaaaacgaagaagacaatacgctaccggcagtgaacgaaggggatgtattatctctcgttgaactcgagcctaaacaacattttactaagcctccagcgcgatacagtgaagcgtcattggttaaagagttagagaagcgcggtattggccgtccgtcaacctacgccaccattatttcgacgatccaagaacgtggctacgtgaaagtggaaaaccgccgcttctacgctgaaaaaatgggcgaaatagtcagtgaacgcttagtcaatagttttgccgagttgatgagctatgactttaccgccagtatggaacagaccctagacgatgttgccaagggtgagttggattggaaaaaagtgctcgatggtttctatgctgacttcactaaacaattagagaaagcagaattagcaccggaagagggcggtatgcgcctcaatcaaatggtgatgaccaatattaagtgcccgacttgcggtcgtccaatggggatccgtaccggcacaacaggggtattcctcggttgttctggttacgagttgccaccaaaagagcgctgcaaaaccaccatgaacttaacgccaggcattgaagcgatcagcgatagtgaagatgccgaaaccgatgcattgcgtgccaagcaccgctgtggtatttgcggcacggcgatggacagttatcttatcgacgaaaaacgcaaactgcatgtttgtggtaataaccctgtttgtgaggggtatgaagtcgaagaagggcaatttaagattaaaggttacgaaggcccattaatcgaatgtgaccgctgcggtcatgatatggaactgaaaaacggtcgttttggtaagtacttcggttgtacgaatgcggaatgcaagaatacccgtaaattactgaaaaacggtgaagcggcgccaccaaaagaagatcctatttacttaccagagctgaaatgcagtaagtcggatgcgcactttgtgctgcgtgacggggcggcagggatattcttagcggccagtaccttccctaaatcgagggaaacccgtgcgccactggttgaagaattagtgaaataccgtgaactcttatggcctaaatatcagtatcttgcagatgcacctatcgctgatgatgacggcaataaggcggcggtgaagtttagccgtaagaccaaagagcaatatgtggcgactgaagtcgacggtaaagccactggatggtccgcccattatgttagtggtaaatgggtaagtgaatcatcagcgaagaaagcgaagaaataa

SEQ ID NO: 293605 - DNA, 1916 bp, Unknown
  Bacterial polypeptide expressing nucleotide sequence isolated from the Sargasso Sea
tatgaatgtattaattgttgaatcaccatcgaaggcaaagtctattaataaatatttaggctctgacttcaaagttctcgcaagtgtcgggcatgtccgagatttatcagcaaaaaatgatgcgatagatactgaaaatgatttccaaatgaaatgggaaaccagtgatcgtggaaaaaaagtgataaaggaaataacagatgctgcaaaaaaatctgaaaatttatatctagccactgaccccgaccgtgaaggtgaggccatagcttggcatgtagaaaaactacttagagataattcatcactttcaaaattaaatattcaccgagtaacatttaatgaaattacaaaaaatgcagttcttgatagtcttaaagagccaagagaaatagatgaaaatctagttaatgcttatcttgcaagaagagctttagattttcttgttggttttacactttctccagtgctatggagaaagttaccaggatcaaaatcagcaggtagagttcaatctgttgccttaagaataattagtgagagagaacttgaaatagaaaaatttattccacaggaatattggtctttacaaggcgagtttagaaataaagaagataaaattattaattccagacttacagtttatgatgggaataaagtagataaacttgatattaaaaatgagagtgaagcgacaaaaatttttaatgatattaaaaattctactttcactgttggaaatattacgaaaaaagaagctagaagaaatccctaccctgcttttactacatctacaatgcaaattgaatctagtcgaaaacttggtcttagcgcgagtcaaacaatgcgcacagctcaacgcctttatgaaggaacagatattaaaggagaaacaactggcttaataacttatatgcgaacagatagtgtcgtcatgtcaaaagaagctatcaaccaagttcgaggttttgttactgataattatggtgcaaactatttaccagaagtgccaagagtttataaatctaaagctaaaaatgcccaagaagcacatgaatgcattagaccaacaaatatttatctaacaccaaaagatattaagcaatacattactttagaagaatacaagttatatgaaattatatggcaaagagcggtaagttcacaaatggcaagtgctgtattagatcaagtagctgttgatattacaaacgaagataaaaaaattgttttacgagcaaatggatcaacaattaagtttcctggaatgtacaaagtttatcaagaagctaaagatgatgataaagatgaagaaaaagagacaattcttcctgccattagtgaaggagagagtttaaatttcaaagaagttgaaaagacacaacattttacctcccctcctcctcgttacaccgaagcaagcttagttaaaaaacttgaagaacttggtattggcagaccatctacttatgcttctattattaaagttctacaagatagagattatgtaattttagataaaaaacgttttaatcctcatgacagaggaagaatagtatcgatatttttagagaaatatttcaatcaatatgtagaatatgattttactgctgatcttgaaaatcaacttgatgaaatttctgatggtaagcttgattggaaagaagttctaagaaaattttgggaaacatttaaacaactttgcgatgaaactgtaggcaaatcaaatagagaagtgattgatgtgttagatgaagcactaggtccgcatttctttccgccaaacggatcagatgaaaaaagaaaatgcccaacatgtgataatggaagactaggaattaaagttggaaagtttggaggattcattggctgctctaattatcctgattgcaaatatacagttcagtttaatcaattaa

SEQ ID NO: 293606 - DNA, 2194 bp, Unknown
  Bacterial polypeptide expressing nucleotide sequence isolated from the Sargasso Sea
atgccaaaaaatttagtcatagttgaatctgcaacaaaagctaaaacaattgaaaaaattttgggtcaagattttaaggttgtttcttgtgttggtcatatttctgacttaccagtaaaagagcttggagttgatgttaaaaatgattttaaacctaaatatgtaataccaactgaaaagaagccaataattcgggacttgaaaaaatatgttaaggactctgacaaggtttggttagcaagtgatgaagatagagagggtgaagctattgcatggcatctatacgaaaatcttgatttagtcaataaagattatgaaagaattgtctttcacgaaataacaaagaatgcaatattaaatgccctagaaactccaagagacataaactttaatttagttaatgctcaacaagccagaagagtacttgataggttggttggttatgaactatctcctgttttgtggagaaaggttaaggctggattgtcagcaggtagagtgcaatctgtttctgtaagacttattgttgaaaaagaaagagaaattaaaaattttacatcaaaaagttcatataaactaattggagtttttgaaaatgaacagggtgttaagcttaaggctgagttaaatgaaaaatactattctgttaaagaagttaagaatttcttagaaaagaattataattctatttttaatatttcttttgttgataagaaacctgcaaaaaagtccccaactccaccttttaccacttctacgcttcaacaagaggcatcaaggaaattagggtttggagttaccagaacaatgtcaactgctcaaaagctatatgaagctgggctgataacctatatgagaactgatagtgtaactatatcaaatgaagcaaagtcatctatagttcaaaagatagaaagtaaatatggtgaggattatgttaatctcagagattacaaaaacaagaataagtctgctcaagaagcacatgaagctgtaaggccaactgatataaatcttgaggaaattacatctgattatgatcagcaaagactttaccacttaatatggaaaagaacgatctcctctcaaatgtcagatgctcaaattgagagaactgtagttaacataaaatctgattcctacaatgaattctttgttgcaagaggtgaggtaataaaatttgatggttttctaagagtttacaatgaggggacagatgatgaaatagaagaagaaaaaggtgttttaccagcattatctataaatgaaaatctaaacttattaagtatcagctcaagggaatctttttctagacctccttcaagatttactgaagcttctttggttaaaaaattggaagaactaggtattggaaggcctgctacatatgccactactatctcaactattcaaaatagaggctatatagctaaaggagttaatgagggattagatagaaattataatttaattgagttcagtaaaaatggcattaaagaatctcaattaaaagaaaaaaccggctcaaataaaggaaaacttgtccctactgatataggtatgattgttaatgattttttagttaataatttcaataatattttagattatgggtttactgcagaagttgaaaagaattttgataaaattgcaaccggagaccaggattggactgatataataaagcaattttacagcgattttcatgaaaacgtaaatgaggtcaaagataatgctgagagacaatcaggtgaaaaaattttaggatctgatccaaattctggtagagttgttaaagtcaggcttggaaagtttggaccaattgctcaaattggaactattgatgaagaagaaaagccactttttgcgagtttaacaaaagaccagcaattggatactatatctcttgaggaagctcttgaattatttaaatttccaaaagaaataggaaattacaaaggtgaaactgtgactgtaaataacggaaggtatggaccttacatcaaattttcaactaaatctatttcaatttcaaatggaattgaccctcattctgttgatttgaatttagcaattgaattaattgacgaaaaattaaaatctgaagaacccattcacacatacaatgataaaccagttacaaaaggtaagggaagatttggtccttttatcaaatggaacgaaatggtttatt

SEQ ID NO: 293607 - DNA, 2572 bp, Unknown
  Bacterial polypeptide expressing nucleotide sequence isolated from the Sargasso Sea
atgaatttagtaatagtagaaagcccagctaaggctaaaacaataaataaatacttaggaagtgagttcaatgtacttgcaagctttggtcatgttcgtgatttgccatctaaaaatggctcggtagatccagaaaataattttgcttttgaatgggaagtttcttcaacttcaaagaaacatatgaaagaaatttatgatgccagcgctgatgcatctactctttatcttgcaactgacccggatagagaaggtgaagcaattgcatggcatatcgttgagctattaaataagaaaaaattattaaaagataaaactgtcaagagagtggtctttagtgagatcacaaaaaatgcagtaaaaaatggaattgccaatccaagagatattgacactgatcttgtagacgcctatttagctcgaagagcactggattatctatttggctttaatttgtcaccagtattatggagaaagttaccgggagctaaatcagcaggaagagttcaatcagttgccttaagattgatatgtgaacgtgaacttgccattgagtctttcgaacctgaagagtattggaaaattaaaggcaatgtaaaatttgaggatggttttaatatagaagcaaatttactttctgtagaaggcaaaaaagtagaaaaatttagctttaagtctgaagatgatgcgaaaaaaattgtaaatttattctcggataataaatttgaaataatagatattacaaaaaaaccagcatcgaggaatccggaaccacctttttctacctcaacacttcaacaaaccgcatcaagtatttatggttttggcgcctctcgaacaatgcaaattgcacaaaaattatttcaaggtattgaaattaatggtgaaacagttggtttaataacttacatgcgtactgatagtactgatatatctaaagaagccattgaaacgtatagaaactatttgaaaaaaaattttgagaatgggtattgccctaatgaagtaagaacttacaaatcaaaaaaagctaaaaacgctcaagaagctcacgagggaattcgacctactgatattgaattaacacctgatcaggtttcaaaatatttagatacagatagcttaaaattatactcgttaatatggaaaagggcacttgcaagtcaaatgagttctgctgtatttgaaagaacagctattgatatcagctctgaaaagaatgaattaaaactgagagcaaacggttctgtggtaaaatttgatgggtttttgaatatttatagtgagtttaaagtaaaaagtgatgaacaaattaaaaaagatgaaaacgaggaagatgaagatgaggttacattgcccgctatttctaaaggaatgaagatagagtcagtttcaccaacagaaacacagcattttactcttccaccccctagatactctgaggcaagtttagtaaaaaaattagaagaattgggtataggaagaccctcaacttacgcaagtataatatctgttctaaaaacaagaaattatgttgaacttgataaaaataggtttgtacctgttgatagagcaatattgataacagcgtttcttaagggatttttctcaaagtacattgattatgagtttactgctggaatggaagaatcacttgatgaaattacttctggaaaaataaaatggactgaattcttagaaaatttttggaaaaatttttctacaaatgtaggtgatgttactgatttgagaattactaatatattagataatttaaatgaaattcttaagtcccatatatttgagcaaaaagaagaaagtaacggagaaaaggcaatatcaagaagttgtccttctgaaaactgtgaaggtgaactgagtcttaaagtaagtcgatttggagcgttcgtaggctgttccaactatcccgattgtaagtttactagacctatctctcataaaaaaattaaagaagcttttgaagatacaattcttggaaaagatgccgagtcagaacaggatattaaattattgaatggaagatttgggccatacgttcagctaggtgacgtagttgaaaaagaaaaaccaaagagagcctcggtacccaaaggaatttccccctcttcaattgatttagagaaagctcagtatttattaagtttaccaagagagataggtggtcatcctgaaacaggtgaaattattactgtgaattatggccgctatggtggttacattaattgtggtgataaaaatgctagccttgaagataattctgaaatttttgatattggtattaacagagcagtttctctgcttgctaatgcaaaacctggtagacttaaaagttcgtctgaaatcaaaactttaggagagcatcccgatgataaaaaaccaatcaaagtgatgaaagggaagtttgggccctatattaaatataaaagtactaatgccacaattcccgataatattgacccagaggaaattctaatagaagaagctattgatttgattgaaaaaaaactagaaaaaacaggtaagaaaaagaaaaaatcttctaaaaaataaa

SEQ ID NO: 293608 - DNA, 1540 bp, Unknown
  Bacterial polypeptide expressing nucleotide sequence isolated from the Sargasso Sea
atgaacctcgttattgttgaaagtccagctaaagcaaaaactattaataaatatttaggagataattataaagtattagcaagttatggacatattagagaccttccttctaaaaatggttcagttgatccagaacaagattttaagatggaatgggaagttgatagtttttctaaaaaatatcttaaagaaattactgatgctgctaaagactcttccaaaattatacttgctaccgaccctgatcgtgaaggtgaagcgatagcttggcatgtaaaagaatatttaaatgaaaaaaaacttttaaaagataaagaaattcaacgagttgtgtttaatgaaataactaaaaaagctgtaatacatggtattgaaaacccaagacaaatcgaacctttgctagtggatgcttatatggctagaagagctttggactacttggttggttttaatatctcaccaatactttggacaaaattaccaggctctaaatctgctgggcgagttcaatctgtagctttaaaattaatcacagaaagagagcatcaaattgagtcatttaaaccagaagaattttggacattaagtgttaaatttgtagatgagaaaaatcagaatattacagctagtatcagtcagctagataataataaaatagaaaaattttcatttagaactaaagatgaaataaataaagctatatcaaatataaacaaaaaaaaatttagtattactgatatttctagcaaggtggttaatcgtaatccctctggaccattcactacatctactcttcaacaaacagcttcaagtagattaggttttggtgcatccagaacaatgcaaattgcacaaaaactttatcaaggtatagagatagaaggtgaaacaataggtttgattacttacatgagaactgatggaactaatttatctaaagatgctgtttcagattttcgaagttatattaaaaaagaaattggtaatgaatatttgcctgaaaatgctttaaattattctggaaagaaagccaaaaatgctcaggaagctcatgaagcaataagacctacagacattattagaactcctcaaagcgttaaaaagtatttaggtacagatcaaaataaactttatgaattaatttggagtagagcactatcttctcaaatggagacagctaagtttgatagaaatactattactataatatcagataataatgatacagtctgcaaggctagtggctctgtccttaaatttgatggttttttaaaaatttataataatcatagtaaagatgatgatgaaaatattttaccagttatgtccaaaggacctattaatattggggctttaatagatgaacaacattttacacaacctccaccaagatattctgaggcgagtttagtaaaaaaactagaagagttaggcattggaagaccatctacttacgcaagtattatctctacaatagccaacagaggatatgcagaaatattaaataaacgtttttttcctactgatagaggtaaattaa

SEQ ID NO: 293609 - DNA, 2666 bp, Unknown
  Bacterial polypeptide expressing nucleotide sequence isolated from the Sargasso Sea
catgtcgaaaccattagtaattgtagagtcacctactaaggtaaaaacaatttcaaaaattctaggtgatggttatatagtgaaatctagtgttggacatattagggatctaccaagaaatacaaaatctataccttcagcatttaaaaaagaagacatattatggggtgctgtcaaacctgagaattatgaaaatatatatgttattccggaagatagaaaaaaaattgtaaatgaacttaagggacttgccgacaaagcacctgaagtatatcttgcaactgacgacgatcgagaaggtgaagcaattgcttatcatttaaaagaagcactagagctgaaaaaagaaccaaaaagaataaaattcaatgaaattacaaatacagcagttttaaatgcaattaaaaatccagaaaccattgatatcggtaaattcaaatcgtatgaggcaaggagaactcttgatagaatgattggctacgagatatccccaaaacttagagatttaggtggagcttttatatctacaggtagagtccaaggtcctgcaataaggctcattgttgaaagagaagaagagaggttgagcttcgtaaaatcaaaatattttgagataaatgcaagttgtaagagtcaaggttttgaatttgctgcaaatctaaaaacaattggcggaaccaaaattgcctcatcaaaagactttgataaagatggaaagaaaataagtaaggatcgaaaatatctagatgaagatcagtctcgggatattgtaaatatacttagaaattctctggcaaaggtatcaaatatcaaggaatctcaaagaagcggaaaaccgccaaaaccctttaaaaccacaagcttacaaacttcttcaaaaaacaatttaggatttcaaccaagaaaaacgatgagtattgctcagagactatatcaggagggtttgattacttatatgagaacggattcaataagactttcagatgttgcaatcaaagcatccagggaatacatttcgtcaaattttagtagtgagcaccttccatctgaaccaaatttttatggtgatagcaaaaatgctcaggctgctcatgaggctattagaccatccggagagagttttacaacacctcaagagctacttaaaaaatataaagaagatagcgatgaatttaaactctatgaattaattttcaacgtaacaatcgcatcccaaatgtccgaagcaagaggcataacaaaaacaatagatcttgaagtaatagataatatttttggatcaatagttcttggtatctctggtaccacatggacatttggaggatatagagatatcgcaaaaaaccttacagagcaatctcaagagcttcccgatttgcagaagggggataaagtggaaataacaaaatctgattatgagaagaagtacactaatcctccaaatagatactcttctacatcattaataaataagctagaagagcttggtataggaaggccttcaacttatgtttcaattattgaaagtattacatctgtttttataaattctgaatcaagcctgaaaccaagaattattgctcttgcaatgatcaataaattcatgaaaccttattttgacccatatatcaactacaaattttcgaaagagatggaggacaaactagatgagatattagaaagcaatagtccggaagaagcaaaagtaaattttttaaatgaatcgtataaaaaaattcaagatcatgttcgaaaatatggagagcctgatcctgttaatttgacatcatatccactcccttttgatacaagatatgtagttaaaactggtcgagttcaggacaaaattgcatatccatatttacagagagacgataatttctatattggacttccgccagatataacaattgaagaaataaatgagaactatatttacgaacttgaaaaattgcaagaagcaaatttgctaaaagaaagaaaagtttgcgattgtgcagaatgcggaacagcaatatatataaaacttggaccgagtggaggatattatttccaacatggattgaaagaaaaaggtgtaagacaaccaaagtgtatataccgaaatatgattggacctatttttgaagatgaagatccagattcattaaattgtgatgatgcaataaaaagatttaatctatcaacaaagaatcctcgttttgtatgcgaagaagatggttggagttatatgactgctgtaggtccatatggtggatttgccattaaacaaaaaaatagagaggtttttgattttgatgaattagctaaaatgaaaaaaaatgaaatacttgagttgattaattcagaaaaatatcagagtgttttaaatttaattacttttaatccagtaaaaattcctaagagcctaactaaagagttgcttcttgaaaaaattaaagaatcattctttattgacgaaaaaattataaaaaaactttcaaaagatgagcttgtaaatttagcaaaactacttgaaattgttttttacagaggaaggttccgaatgaaagttgatgatgcaactaaaaataatttaataaataaaattacgattgaaaaaaagaataagccacttgatacacctcaaaaagccctaactattcagagtgatgaaatattagatt

SEQ ID NO: 293610 - DNA, 1015 bp, Unknown
  Bacterial polypeptide expressing nucleotide sequence isolated from the Sargasso Sea
atgaatctagtaattgttgaaagtcccgctaaagcaaaaacaataaataagtatctaggaaatgattatacagtcctcgctagttatgggcatattagagatcttccctctaagaatggctcagtagatcccgaaaacgaatttaagatgatttgggaaattgatagtttttctaaaaaatatttaaaagaaatttctgatgtagcaaaagactctaaaaaaataatacttgctacagaccctgacagagaaggtgaagcaattgcatggcatgttaaagaatttttaaatgaaaaaaaattacttaaggacaaaaaaattgaaagagttgtttttaatgaaataactaaaaaggcagtcactaatggaatagaaaatccaagagaaatagaatctgatcttgtaaatgcttacatggcaagacgtgccttagattatttagtaggttttaatatttctcccatactttggactaaactcccagggtctaaatcagcgggtagagtacaatctgttgctctaagacttttaaccgaaagagaacatgaaatcgaaatttttaaacctgaagaattttggtctttaaaagtaaattttaaaacaaatgatggaaatttaattacatcaaatatttttcaaattgataaaaaaaaaattgaaaaatttagtttcagaaataaaaacgatattaatcaagcaatagaaaaaataaaaaacactaaatataaaattacagatattacatccaaaatatattccagaaatccttctggaccttttacaacatcaacattacaacagtcggcatcaagtaagcttggttttggtgcttcaagaacaatgcaaattgctcaaaggttgtatcagggtattgaaattgaaggtgaaactaaaggattaatcacttatatgcgaacagatggcaccaatatttctaaagaagctttgccaatttttagaaattttataactgataactttggtaatgattacttacctgatgaacccaattaat

SEQ ID NO: 293611 - DNA, 1183 bp, Unknown
  Bacterial polypeptide expressing nucleotide sequence isolated from the Sargasso Sea
ttgcgcgagatcatcggcggcgacgacagccgctacaagcgcgtggtgttcaacgagatcaccaagaccgccatccaggaggcgtttgcgcagccatccgagctgaacattcaccgcgtcaatgcccagcaggcccgtcgtttcctcgaccgggtggtgggttacatggtctccccgctgctgtggaaaaagctggcccgcggcctctccgccggtcgggtacagtccgtcgcggtgcgtctcatcgtcgataaagagcgcgagatcaaggcgttcgtgccggtcgagttctgggatctcaacgccgatctgctgaccgccgacaagagcgatctgcggatggaagtggtcagccgcaacggcgtcgacttcaagccggtgacccaggccgagaccttcgccgccgtggccgctctggaaggggtcgactacaaggtagtgaaccgggaagacaagccgaccggctccaagccttccgctcccttcatcacttctaccctgcagcaggcggcctctacccggttgagcttcggggtcaagaagaccatgatgatggcccagcgtctctatgaagcgggttacatcacctacatgcgtaccgactccaccaacctcagcaaagaggcggtcgaggcggtgcgggaatacatcggcgagcagtatggcgccgcctacctgccgagcgatccgaacctgtacggcgccaaggccaatgcccaggaggcccacgaggcgatccgcccctccagcgtgctggtgactgccgagatgctggaagggatggagccggacgccatgcggctgtatgacctcatctggcgtcagtttgtcgcctgtcagatgacgccggcccagtacgactcctccaccctgaccgtcaaggcgggcgagttcgagctcaaggcgcgcggtcgtaccctgcgcttcgccggttggaccaaggcgctgccgcccatgggccgcaagggcgaagacagccagctgccggcggtgaccgtcggcgagatcctcaaactcgtcaagctggatccgcgccagcacttcaccaagccgcctgcacgttttaccgaagcggcgctggtacgggagctggagaagcgcggcatcggccgtccgtctacctacgcttccatcatctccaccatcgtcgatcgtggttatgtgcgggtcgaaagccgcggtt

SEQ ID NO: 293612 - DNA, 376 bp, Unknown
  Bacterial polypeptide expressing nucleotide sequence isolated from the Sargasso Sea
atgaaccttgtcatagttgaaagtcctgcaaaagcgaaaactataaacaaatatttaggtaaagattttactgttcttgctagttatggacatattagagatttaccttcaaaaaatggatccgttgacccagacaatcaattcaaaatgatctgggaaatagatagtttttcaaaaaaatatctaaaagaaataactgatgtcgcaaaagaatctgataaaataattttagcaacagacccagatcgtgaaggtgaagctatagcctggcatgttaaagagtttttagacgaaaaaaaattacttaaaggaaaaaaaatcgaaagagttgtttttaatgaaattacaaagaaggctgttactaacggtatagaaa

SEQ ID NO: 293613 - DNA, 1123 bp, Unknown
  Bacterial polypeptide expressing nucleotide sequence isolated from the Sargasso Sea
aatgagtcaaaaatccttaattgttgtagaatcaccctcaaaagcaaaaaccatagaacagtacctcgaaagcaagtacgaggttattgcatgtgtaggccatgttaaagacctaccatcaaataaaatcggaatagatattgaaaatgatttcgaaatgacactcgatgttctaccgaatcgtaaagattttattaaagaattgaagaaaaagagtcaatcagcagagcgagtttatattgccagcgaccccgatcgtgaaggagaggcaatcgcagcacaccttgctagtgaaatacctaaagaaaaggtagagagggttgaatttactgagattacaaaagcaggaattaagcagggaatgagagaaagtcattccctcaatgataatcttgtcaatgctcaaaaaaccagacgaattattgatcgccttgttgggtataaagtttctcctgtattatgggcgacactacaaaaaaatatgaactttgttagtactacactatcagctggaagggttcaatcagcatgtgtgaaaattttaattgagagagatcgcaaaagacaaaagtatttaaaaaccgaatactatgatctaaaagcaaatttaaatgatgatcaatcagaaacttcatttgcagcgaatttgaataaagttggcaataaaaatattatttcaagtaatgattttgactcagatactggtaaacaaacgaatcccaatgccttaattcttagcaagaaggaagctgagaatctcgcttcaaaacttgaaaaaggatcatggatagtttctagtgtaaacaaaaaaccaagaacttctaatccaaaacccccttttacaactagcactcttcagcaggaagcagcaagaaaactacgattttctgcaaaaaatacaatgagagtggcccagcagctttatgaaaatggttttattacttatatgagaacggactcaacaaacctatctgaagaagctataaatggatcaaggaatattatttctgagctctttggagatgaatatctaccacaaacttcgaattcatatgatactaaagtaaaaaatgctcaggaagcacatgaagcaattagaccggctcacaaaatatttttaagc

SEQ ID NO: 293614 - DNA, 1354 bp, Unknown
  Bacterial polypeptide expressing nucleotide sequence isolated from the Sargasso Sea
atgagcaaactagtcattgtagaatcgccagccaaggcaaaaacaattcagaaatatctgggtggtggctatgctgttttgccaaccattggtcacatcagagagcttccaaaaaaagacgccattgatccgggtaatggttattcgatgaaatatattgtgagtccaggcaaggaagatgcggtgaaaaaaattaaggacgaagcaaagaatgttgagcaagtgattcttgccacggacccagacagagaaggggaagccattgcttggcatgtggcagacattatttcaaatgctaaattcgaacaaccagatattaagcgggctgttttttatgaaataagcgaaaaagcagtaaaggatgctgtcagcaacccgggtgaaatagccatggatctggttcaatcccaagaaaccagaagggcgcttgatcggcactttggttttactttgtcgccattgttgtggcgactatttcctagcaataatcattctgcgggaagggtgcagagccccgcattaaggatgattgtagagcgtgaaagagaaattgaggcctttgttccacaagagtactggaccatttcagcaaaactagaaaaagatggagaatatgacgccaaactatcggcttttaaacaagagcctgtaaaaaagttcacttttgactcaaccacacttgttgagaaggcaagcaaagatctggaagagcaatgcaaaaaaggtcttgtcgcgaagtcgatctctaaaaaaaccattaagcgctcaccaagagagccatttagaacatctgtgctccaacaacaagcatccaacaggtttggttttacgccaaaaagaaccatgcaggtcgcgcaatcactctatgcgcgtgagggtggcggactaatcacctatattagaacagactcaattgaaatcgatgaaggaaaggtaccggccgtaaggtctcaggtagcgagcatgttcggtgaagactttgtccaacctagaaactataaaaacaaaaaagaggccaagaatatccaagaggcccatggtgcaataacccctgttgacataagtcttgtcccagctgatgccaaaaagattttgaaagatgacgagttcaaactctatcagctaatctggcaaagaactgtcgcatcccaaatgaaggatgcaatctttgaaagaacatctatcgagtttgtgcctaccggcgatgagagcttggcaacattttctttttctgaccaggaacttgttttcagtggttatttagaagcgactcaagaagaagttacaaacaataagcctcctttgatcaatgagaatgatgcaattgggtttaaggagcttgtaaaaacccagc

SEQ ID NO: 293615 - DNA, 1178 bp, Unknown
  Bacterial polypeptide expressing nucleotide sequence isolated from the Sargasso Sea
tatgtcaaaatcacttgtaattgtagagtcccctgcaaaggcaaagacgatatcaaaatatcttggtagcgaatatattgttaaatcaagtgtaggtcatatcagagatttaccaaagggaaaatcaaaagctaagagacaaaattcaatcccaaaagatgctagccctgaagaaaaggttagattaaaaaaagagcaagaaagaagaaggataattaggagaatgggtgtaaatcctgacgatggatggactgccaattatgaaattattcctgataaagaaaaggtaataaaagatttaaggaaagcttcaaaggaagtagaaaaagtttatcttgctactgatcttgatagagaaggagaggctattgcttggcacttgaaagaagctttaggaaaaaataaatttgaatatcaccgagtaagatttaacgaaattacaaaaagttcaatattagaatccttctcagatcctaaggaaatagatcaagatctagtaaatgctcaacaagcaaggagatttcttgatagggtagtaggttttgaactgtctccattattgtggaaaaaaattgcaagaggtttgtctgcaggaagagttcaatctgttgcattaagattgctttgcgaaagagaaaaattaatttcacaatttcaaccagaggaattttgggaagtttcagcaacgttaaaagattttaatcatgaagaaatcttatttaagttaaatagaaaaaaaagcgatcctcttctaaaagagaatgaagcgaagaaaatagaggagctcgtaggtagttcaagtttagaaatatctgaaatcactaaaaaacctactacagttaaaccaaaagcgccctttataacatcaactcttcagcaggccgctagctcgaagttgggttttggggtctcaagaacaatgcgagttgcccaaaagctttatgaagctggaagaatcacctatatgagaactgatgctcctagcttaagtaatgattcgattgaagatgcaagattatttattaaagatactctagctgatgaatacctaacggaaaaacctcgaatatattcagggaaagaaaatgctcaagaggcgcatgaggcaataagaccaacaagtgcaagcttaactcctgaaaagctcaccggtcactcagaagaagaagtaaaattat

SEQ ID NO: 293616 - DNA, 2608 bp, Unknown
  Bacterial polypeptide expressing nucleotide sequence isolated from the Sargasso Sea
ttggatcacacacttgttattgttgaaagtcccaccaaagcaaaaactataagaaagtttttgcctcctaattatgaagttctcgcttcaatgggacatgtaagagatcttccaaaaggagctgctgaaatacctgctgcggttaaaaaggaaaaatggtcaaggataggagttaatacaacagaagattttgaaccactttatatagttccaaaagataagaaaaaggttgttaaagagttaaaagatgcattgaaaggtgcgaaccagctattactggcaactgatgaagatagagagggagagagtattagctggcatctcatgcaaatacttaagcctaaaataccaactaagagaatggtttttcatgaaatcacaaaaaaggcaattaataaagctttagaccaaacaagagaaattgatatggaacttgttcaggctcaagaaacaagaagaatcttggacaggctttttggatatgaattatctcctttactttggaagaaggtagccccccgactatctgctggtcgtgtccaatcagtttctgtaagacttcttgttaggagagagagagaaagaagatcctttaaaaaagctagttactgggggattaaagcttccctagtaaaagataatattactttcgaaactaaattattcagtttaaacggtcaaagaatttctaacggttccgatttcgacgaacaaaccggtaaattaaaagaaggaaacaaatctttaataattggagaagaacaagtaaatgatttattgaagactttttcctcagaggattggttagtctcaaaaatcgaaaaaaagccatccactcgtaagccagttcctccatttacaactagcacattacaacaagaagcaaataggaagcttcgtttgtctgcaagagaaactatgagatgtgcacaagggctatatgagagaggtttcataacatatatgagaactgattcagttcatctttccgaacaagccacaagagctgctagagaatgtgtcagttctatgtatggaaaagaatatttatctaactcaccaagacaatttaattcaactgcaagaaatgctcaagaagcacacgaagctattaggccggcaggtgaggtatttaaaacaccaaaggaaactaatctaactggtagagacttatcactttacgatttaatttggaaaagaactgtagctagtcaaatggcggaagctaggttaacaatgattaatgctgaaattagcgtaggggatggattatttaaatcgagcgggaaaagtattgatttcgcaggattcttcagagcttatgtcgagggaagtgatgacccaagttcatcccttgaacaacaagaaattattctcccaaacttaacaactgggacatgtcttaaagttactaataaggaatctacttttcatgaaactaaaccgcccgcaagatatacagaggctgcattagttaaagttcttgaaaaagaagggattggaagaccttctacctatgcaagtattattgggacaattgttgatagaggttatgcgaatatatcttctaatactttggctccaacgtttacagcttttgctgttactgctctattagaagaacattttcctgatctggttgatactacttttactgcaaaaatggaatcttcattagatgaaatatcttcaggtaatcttgagtggctaccataccttgaaactttctataaaggtaaaaatggtttagaggtaaaagttcagaaaacagagggtgatattgatggtaaagcttatagacaagttgatttcgaagaccttccttgcgtagtcagaataggttctaacggaccttggctagaaggtacaaaaattgatgaatctggtaatgaaattcaggcgaaaggtaatcttccaatggatattactcctggagatttagatataaagcaagttgatcaaattttaagtggcccatcagatcttggaactgacccgaaaactggggaaaaagtctttttaagatttggcccttatggaccttacgtacaattgggaaataatgatcaagataaagctaaaccaagaagagcttcattacccaaagagttgaaaactgatgatctaactctagatgaggcgcttgtacttttaagtttacctagattgttaggagttcatcctgaaggaggagttgttgaagctgatagaggaagatttggcccttacatcaaatggattaaaaatgaatctgaatctgaaaatagatccttaaagaaagaggatgatgtttttactgttgatataaaacgagcattagaaattcttgcgatgccaaaaatgggtagaggtggtcaagaggtacttaaagactttggtaaaccgaaagaatttaaagaaaaaattcaaatattaaatggaagatatggtgtctatttaaaatgtggcaaaactaatgtttcgattgccaaagatactgatatagaaaaatttaccatagatgaagcagtatctcttttagaagaaaaactaaaagataaaaaaggcgcaattttaaaaaaaacaaagattagtaataaaaaaactacaaggaaaaagaaaagttaga

SEQ ID NO: 293617 - DNA, 2239 bp, Unknown
  Bacterial polypeptide expressing nucleotide sequence isolated from the Sargasso Sea
cttggatcacacacttgttattgttgaaagtcccaccaaagcaaaaactataagaaagtttttgccttctaattatgaagttctagcttcaatgggacatgtaagagatcttccaaaaggagctgctgaaatacctgctgcagttaaaaaggaaaaatggtcaaggataggagttaatacaacagaagattttgaaccactttatatagttccaaaagataagaaaaaggttgttaaagagttaaaagatgcattgaaaggtgcgactcagctattactggcaactgatgaagatagagagggagagagtattagctggcatctcttgcaaattcttaagcctaaaattccaactaagagaatggtttttcatgaaattacgaaaaaggcaattaataaagctttagaccaaacaagggaaattgatatggaacttgttcaggctcaagaaacaagaagaatcctggataggctttttggatatgaattatctcctttactttggaagaaggtagccccccgattatctgctggtcgtgttcaatcagtttctgtaagacttcttgttaggagagagagagagaggagatcctttaaaaaagctacttactgggggattaaagcttccctagtaaaagataatgttactttcgaaactaaattatttagtttaaatggtcaaagaatttctaatggttccgatttcgatgaacagaccggcaaattaaaacaaggaaataaatctttaataatcggagaagaaaaagttaatgaattattgaagattttttcttctgaggattggttagtctcaaaaatcgaaaaaaaaccatctactcgtaagccagttcctccatttacaactagtacattgcaacaagaagcaaataggaagcttcgtttgtctgcaagagaaacaatgagatgcgcccaagggctatatgaaagaggtttcattacatatatgaggactgattcggttcatctttccgaacaagctacaaaagctgctagagaatgtgtcagctctatgtatggaaaagaatatttatctaactcaccaagacaatttaattcgactgcaagaaatgctcaagaagcacacgaagcaattaggcctgcaggtgagatatttaaaacaccaaaggaaactaatttaactggtagagacttatctctttacgatttaatttggaaaagaactgtagcaagtcaaatggcggaagctaggctaacaatgattaatgctgaaattagtgttggggatggattatttaaatctagtggaaaaagtattgatttcccaggattcttcagagcttatgtcgagggaagtgatgacccaagttcatcccttgaacaacaagaaattattctcccaaacttaactatcggaacatgtcttgaagttactaataaagaatctacttttcatgaaactaaaccgcccgcaagatatacagaggctgcattggttaaagttcttgaaaaagaagggattggaagaccatctacctatgcaagcattattggaacaattgtggatagaggttatgcaaatatatcttccaatactttggctccaacgtttacagcttttgctgttaccgctctattagaagaacatttccctgatttggttgatactacttttactgcaaaaatggaatcttcattggatgaaatatcttcaggtaatcttgagtggctaccatatcttgagactttctataaaggtaaaaatggtcttgaggtaaaagttcagaaaacagaaggtgatattgatggtaaggcttataggcaagttgatttcgaagaccttccttgcgtagtcagaataggctctaatggaccatggcttgaaggtacgaaaattgatgaatctggtaacgaaattcaggctaaaggtaatcttccaatggatattactcctggagatttagataaaaagcaagttgatcaaattttaagtgggccatcagatcttggaactgatccaaaaactggggaaaaagtctttttaagatttggcccttatggtccttacgtacaattgggaaataatgatcaagataaagctaaaccaaggagagcttcattacccaaagagttgaaaactgatgatctaactctagatgaggcgcttgtacttttaagtttgcctagattgttaggagctcatcctgaaggaggtgttgttgaggctgatagaggaagatttggcccttatattaaatgg

SEQ ID NO: 293618 - DNA, 1075 bp, Unknown
  Bacterial polypeptide expressing nucleotide sequence isolated from the Sargasso Sea
gctgccgcctgtgcccaacaccctcgtcatcgtcgagagccccacgaaggcccgcaccatccgcggcttcttgccacgcaccttccgcgtggaggcgtcgatgggccatgtgcgcgacctccccaacaacgccagtgagatcccggcgagccacaaggctgagaaatgggccaagaccggcgtcaacaccgaaaaagatttcgaaccgctttatgtggttcccaaagacaagaaaaagatcgtcaaagagctcaaggacgccctcaaagtggccgatgagttgctgctcgcaaccgatgaagaccgcgaaggggaatcgatcagctggcacctgctgcagctgctgaaccccaaggtgccggtgaagcgcatggtgttccacgagatcaccgaagaggcgatcaagcgcgccttgggccaaacccgcgagctcaacatggagctggtgcatgcccaagaaacccggcgcatcctcgatcggttggtgggctacacggtttcgccgctgctctggaagaaggtggcctgggggctctcggccggccgcgtgcaatcggtggcggtgcggctgctggtgcagcgggagcgggcccggcgtgccttccgcagcggcagctactgggatctcaaggcccagttgaagcacgagggcatcagttttgaagccaagctcagccatctcgctggtgagcgcattgccaccggtggcgatttcgatgagagcaccggtgccatcaaggccggaaccaaggtcaagctgctcagcgaagccgatgcccaagggctgctgaaggccatcgatggcaaaacctggtcggtggccgaagttgaggaaaaacccaccacccgccggccggctccgcctttcactaccagcaccctgcagcaggaggccaaccgcaaactgcgcctttccgcccgcgaagcgatgcgcacggcccagggcctctatgagcgcggctacatcacctatatgcgcaccgactcggtgcacctcagcgagcaggcaattacggcggcccgcagctgcgtgtccgataagtacggcgccgatcacctcagcccgcaaccgcgg

SEQ ID NO: 293619 - DNA, 1048 bp, Unknown
  Bacterial polypeptide expressing nucleotide sequence isolated from the Sargasso Sea
aatgaacttagtaattgttgaaagtccagctaaagcaaaaacaataaataaatatttaggaaaagattatttagttttagcaagttatggtcatataagagatttgccttcaaaaaatggatcggttgatcctgaaaataaatttcaaatggaatgggaaattgactctttttcaaaaaaatatttaaaagaaatcacaaatgctgctgaagattcagataaaattattttagcaacagatccagatcgtgaaggtgaggctatagcttggcatgttaaagaagttctggaaaaaaagaaactactcaaagataaaaatttggaaagagttgtctttaatgaaattactaaaaaagcaatacttgatgctataaaaaatcctagacaaatccatttgcctttagtcgaagcttatttagctagacgagcgttagattatcttgttggatttaatatctctccaattctttggactaaattacctggatcaaaatcagcaggaagagttcaatctgtggccctaaagcttattaccgaaagagaaaaggaaatagaattatttaaaccagatgaatattggactcttacatcgaactttacaaataaaaataataaaaatattttttcaaaattaagtttatttaatggagaaaagatagaaaaattttctttcaaaaataaagaaaaaatacaaaaagcagttgatgtaatcaataaaacaaaatttaaaattacagatgtaaacacaaaagtatttagacgtaaccccctagccccttttactacttctaccttacagcaaactgcttcaggacgatttggttttggagcttccagaacaatgcaaattgcacaacgactctatcaaggagtagatattgagggtgaaactaccggattaattacttatatgagaactgatggtactaatatttcaaaagaagcaattgaagattttaggaaattcattactgatgattatggtgataaatatttgccaggggcaccgaatagttatactggaaaaaaagcaaagaacgctcaagaa

SEQ ID NO: 293620 - DNA, 778 bp, Unknown
  Bacterial polypeptide expressing nucleotide sequence isolated from the Sargasso Sea
atggcaaaatcattagtaatagttgaatctccagcaaaagctaaaactatttcaaagtatttagggtctgattttattgttgaatcaagtgttggtcacataagagatcttccaaaaaaagcctcaccaaacaccaaaagagcatcaattcctaaagatatttccccagaggaaaagctaagactcaaaactattaatgatagaaataggcttataagaagaatgggaatagatcctgataatggctggactgctgactggcaaataattccagaaaaagaaaaagttattaaatcattaaaaaaggctgcaaagagtgtcgagcatatatatcttgcaactgatcttgatagagagggtgaagctatagcatggcatcttaaagaggctcttggtccagaaaaatatgagtattccagagtaaggtttaatcaaattacaaaatcttcaatcgttgattctttcaatgatccaaaagatatagatttagatttagttaaagcttatagagcaagaaggttcttagataaagtaattggatttgagttatctcctttattgtggaaaaaaattgctagaggtctttcggctggaagagtacagtctgttgctttgagagttttagatgagagagaaagattgattcaagagtttataccagaagaattttgggaagtttctatgaacttgttgaaacatcagctaagcattcctttttacttaaatagaaaaaaatcagatcctttgttaaaagaagatgaagcaaaaaagatagaat

SEQ ID NO: 293621 - DNA, 2344 bp, Unknown
  Bacterial polypeptide expressing nucleotide sequence isolated from the Sargasso Sea
aatggcaaataaatctttagtaattgttgaatcaccttcaaaagcaaaaacaataggaaaataccttggctctgaatatttggttaaatccagcgttggccatgttcgaagattaacaagcggaaaaaaagctattgatccaaaagactggtctgtttcatacgaaattgatccaaagaaaacaaaagttgttcaagatttaaaaaaatctgctaaaggaatagatgaagtgtttttggctactgacttggatagagagggagaagcaattgcatggcacttaaaagaaattcttggcaagaaccacaattataaaagagttagatttaatgaaattacaaagtctgcaatcaaaaaagcttttgaagatccaacagatttaaatgaaggtcttatcgatgcacaaaagacaagaagaattttagatagaatcgtaggatatgacttatccagttttctttggaaaaaaattggaagttacggaaagctttctgctgggagagttcaatctgttgcagtaaagcttgtagttgaaaaggagagggaaattaaagccttttctccagaggaatattgggaaattgaagtaaaagtaaaacatgaagaaagaaatattacttttaaattgaatgtaaaaaaatcagatctaaaactttcgaatattgatgaagcaaaacaaatatctgaaaaattacttaataatgaaattgaaattactgataatgataaaactaaacgtaaaattcctataaagccgccctttatcacttcgacacttcaacaaacttcaagctccatgttaggtttcagcctctcaaagactatgaagttagcacaagatttatatgctgctggttacatttcatacatgagaacagactctccaaatctaagcattctctcgcaaaacaattgcaaacaatatcttttagaaaaatttggcgacacttactcagagcctaggaacttttctgctaaaacctctaattcacaagaagctcatgaagcaataagaccaacagatattaatttagaggcagatcaaattacaatgagtgctgatcacgttaaattgtataagttgatttggcagcgttttgcagcttcacagatgcctcaaccggagatagaaaccaatgctatcaaagctgtatgtgatggtttagtttttgaaacttctcttagttctgttacttttgatggcttttataaagttatgccacctccaaaatcatcatatgtcgattacgatttatcttctttaagcatcggtctttcgaagaaaatagatgaggttgaaaagtcacaacattttactaaacctccatctagatattccgaagctagtctagtaaaagagcttgaaaaaaggggcattggaagaccttccacttatcaagaaattattacaaatattcaagatagaggctatgttaaaagtgtaagtaagagactttttgctacaaaaattgcaaatttaatttcagatcgattaaacaaaggattttcacaaattatggactatggatttactgcagatatggaaagaaatttagatgaaatagcgtcagggaacttggtttggagaaatttacttgaaaaattttcagatgaatttgagcaggcaaaagaacaagccgaagaccttatggaaagaaataaacctattgatactcaaattatttgtgattgtggaagaagtaaaagaatgcaattgagaacaaaccaaagtggtcagttcctaggttgcgaggcttttatactagaaggagatgaacagtgtaagaatactctttcacttttagatgaagagttattttcagatagtgatgataaagaagcggaaagtatctttaataaaactaaatgtccaatatgtaattctgctatggatggatacattatagacagtaaaagaaaacttgaaatttgctcaaattcaccaatttgtcctggaacacttcttgttgaaggagaatttattaaaccaaaaaatgacgacgaagagtttatagattgccataaatgtgatggccaaatggaattaaaacttggtagattcggtaaatactttgcttgtcagaaatgtgatgctactcgtcagataatgaaaaatggtgagctcaagccaatctttatggaccctataaaacttgagagtttgcgttgtgaaaagtgtgatgatttttatctgctgcgtgatagtcttaagggcttgttccttgctgcttcacaatttccaaagaatcgtgaaacaagagcaattacagttaatgaattaaaaccagtaacagacaaactaccagagaaatatagtcactttgctaaagcgccagaagtcgat

SEQ ID NO: 293622 - DNA, 692 bp, Unknown
  Bacterial polypeptide expressing nucleotide sequence isolated from the Sargasso Sea
tatgaatcttgtcatagttgaaagtccagctaaagctaaaacaattaacaaatatttaggtggtaattatacagttttagcaagttatggtcatataagagatcttccctctaaaaatggttctgtagatccagaagataaatttaaaatgatatgggaagtcgacagtttttcaaaaaaatatttaaaagaaattaccgatgctgcaaaaaaatcggaaaaaattattcttgcaacagatcctgatcgagaaggtgaagctatcgcttggcatgttagagagtatttagatgaaaagaaacttttaaaagataaaaaaattgaaagggttgtttttaacgaaataacaaaaaaagctgtaactaatggaattgataatccaagaaacattgagactaatttagttgatgcctatatggcaagaagagctttggactatttggttggatttaacatctcacctattctatggacaaaattaccaggttcaaaatctgcaggtagagttcaatctgttgcattaagattgcttactgaaagagagcatgaaatagaacaatttaaacctgtagaattttggtctttaaatgttaatttcaaaaatgcaaaaggtgatattttaaattcaaatattatattattaaataattcaaaaatagaaaaattctcttttaaaaataaagaagatataa

SEQ ID NO: 293623 - DNA, 1236 bp, Unknown
  Bacterial polypeptide expressing nucleotide sequence isolated from the Sargasso Sea
aatggcagataaatcattagtaatagtcgagtcaccggcaaaagcaaaaactattagcaaatatcttggcaaggaatatattgttaaatctagtgttggtcatgtgaggaaattacctaaaggtgaaaaagctattgatcgtaaagattggagcatatcttatgagattgaccccaaaaaaaccaaagtagttaaagaactaaagagtgccgctaaaggtgtggaagatatttttctggcaactgatttggatagagaaggagaatcaattgcttggcatctaaaagaaatcttaggaaaaaaacacaactacattagagtccgtttcaatgagattacaaaaacggctatcaaagatgcctttgacaaccctagcaaattaaatgaagagctcattaatgctcaaaaagctagaagaatcttggacagagtagttggctatgatctttcaggaatgctttggaaaaaaattggaagttatgggaagttatcagctggacgagttcagtctgttgctgttcgtttagtagtcgaaagagagattggcataaaagcatttactccagaagaatattgggaaattgaaattgagatcaaacatgatgataggaatataagatttaaattaaatacaaagaaatcaaacctagagataaaaaatgaaagtaaagctctagaattagcaaataacttccaaggtgcagatttagaaataacagaaaatgaaaaaaagaaaagaaaagtttctgtaaggcctccatttataacatcgacgatgcagcaatcagcaagttcatttcttggttatagtcttaaaaagactaacaagctagcacaagatctttatacaggaggatatataacatatatcagaactgattcgcctagtataagtgttcttgcacaaaataattgtaaacaatatttactagatacttatggtgaagcctatagcactccaagaaactttgcttctaagtcttcaaactctcaggaagctcatgaagctattaggccaacagatgtaactttcaagacagatgagctttcattatccgaagatcataaaaaactttataaattgatatgggatagatttgttgcgtcacaaatgccacaaccagaattaactgtaaatagtattaaagccaagattgataataatatttttgaaacttcattaagtagcattagttttgatggtttttataaggtaatgccgccaagtaaatcaag

SEQ ID NO: 293624 - DNA, 1670 bp, Unknown
  Bacterial polypeptide expressing nucleotide sequence isolated from the Sargasso Sea
tatgccaaaaaatttagtcattgttgagtctgctacaaaagcaaagactattgagaaaattttgggacaagactttaaagttgtgtcttgtgttgggcatatttcagatcttccagttaaagaattaggagttgatgttgaaaatgattttaaaccaaaatatataattcctacagaaaagaaacctgttataaaagacctaaagaagtatgttagtgagtccgataaagtttggttggctagtgatgaagatagagaaggagaggcaattgcctggcacttgtatgaaaatttaaacttgactaataaagactatgatcgaatagtatttcatgaaataactaaaaacgcaattttagctgcattagatagtcctagagagataaactataatcttgtaaatgctcaacaggctagaagagtattagatagattagtaggttatgaattatctccagtattgtggagaaaagttaagacaggcctttctgctggtagagttcaatccgtttccgtaagacttattgttgaaaaggaaagagagattaaaaactttttaacaaatagcacttacaagtcaattggaacttttaaaaattctagaggagttaacctcaaggctgagctaaacaataaatttgattctgctgatgaagttaaagcatttcttcaaaaaaatatcaatagtacatatactgtgtctaatgtagaaaaaaaaccagctaagaaatctcctacacctccttttactacatcaacgcttcagcaagaggcttcaaggaaattaggttttggtgttactaggaccatgtcaactgctcaaaaactctacgaagcaggtttaataacatatatgagaacagatagtgttactatatctgaagaagctaaatcatcaattttatctaaaattgagagtaagtatggagatagttatgtaaatctgagaaattataaaaacaaaaataaatcagctcaagaggctcatgaagctgtaagaccaacagatatttctgttgaagatatatcctcagattatgatcagcaaagattgtatcaacttatatggagaaggacaatttcctcacaaatgtcagatgcacaaatagagagaacagtcgtgaatatcaactctaactcttttgatgaaatattcattgcaagaggtgaggtaattaaatttgatggttttcttagagtttatattgaaggaactgatgatgagacacaagaagaaaaagacactttaccacaattaaatgttaatgaaaatcttgatttaattaatattatatcaagagaatcattctctagacccccctcaaggtatactgaagcatctttagtgaaaaaattggaggaacttggtattggtagacctgcaacttatgctactacaatatcaacaatacaaaacagaggttatgtatcaaaaggtgataacgaaggccaagaaagaatatacaaatccatagaactaaaaaatggaaatataactgagattacttcaactgaaaagactggttctaataaaggtaagcttgtgcctactgatattgggataattgttaatgactttttagttgataattttaataatatccttgattatggatttacagcagaggttgaaaaaagttttgataagatagctgagggaaatcaaaatt

SEQ ID NO: 293625 - DNA, 2197 bp, Unknown
  Bacterial polypeptide expressing nucleotide sequence isolated from the Sargasso Sea
aagaatttcgaaagggttgtttttaatgccgttacaaaagataaagttctagatgcaataaacaatccaaggagtattgatagtgacctcgttgaggcgtataaagctcggaggtccctagattatcttattggctttaaaatttctccaattttatggactaaactgtcaggcgtaaaatcagcaggtagagttcaatcagttgcactaaaaattatttgtgagagagaaattgagatagagaatttcaaaagccagagatattggtccattacttcatcaatgtcagcaaaaaatggtcagaattttacagcatctctggtatctattaatgagaataaattaaacaaatttgatattaagtctgaaaaagaagcaaaagcgataatcaataatctaaataattccattttcactgtatctgaggttaaaaaaacaagtatacttagaaagccccagccaccgtttacaacatcaacattacaacaagaggcgtcgaaaagacttggctttaatccaacccgaacaatgcaagtagctcaaaaattgtatgagggaatagatagtcaaaaaattgaaggtgggctaattacatatatgcgaactgacggagttcaaatagaggataatgtaataaatgagataaggaataatatcgaatttatttttggagcagaacaagtacctcaaaataagaatatttaccagacaaaatccaagaatgcacaagagtcacacgaggctatcagacccacatcaataagaaatacacctgaagagattaaggcacatttaagtgatgaacaattcaaactttatgagcttatttggaaaagaacaatggcaagtcaaatggccaatgcaaaatttgaaaggaccagcattacaattaaagcgattgataatttaggtcagaataatctttttcgagcatccggtgagcatcgattggaggccgggtatcaagtacttttcgatgataaaccaaatgatggtgtggaaaaagatctaaatgaagaaaaattaagtaaccaaaatgtattcggaatactagaaaatgagtctatcagctgtaagaaactcatggataatgcacacgatactgagccaccaccgcgattcaatccagcctcactaattaagctcttggaagacttaggaattggaagaccatcaacttatgcgagcatacttagcgttttgacagagagaaattataccaaactagaacaaaaaagatttaccccaaccagcaatggtagacttttaactgtctttttagaaaattactatccagactacgtaaaatatgattttaccgctgacttagaggaaaaattagatcaaatatcaaatggcgactttacaagaatatctttattggaggatttttacgctaatctagatatgaaaaccaaaaatgttaaggatgttgaacgaatagaagtaatggaaaacctcgtagatacactcgcccctcacatatttggccaacactcagaaaatccaagactatgccctgactgcagcgggggaaaaataaccttaaagtcatttgaaagtggttcattcttatgttgttcaaattatcctgattgtaactttcaacatggtttaggaaaaaatgatgctatcgcaactcagaagcaagtaattgcaattgatccaatgactggcaatgaaattacacttcaaagtggtcgttatggcccttatttagaagtggaagactccagcatagagaatgacaaaccaaagcgtgtctcaataccaagaaacatcaaggtggaagatttgtcagatgaactagcattacagcttatatctctgccgaaatcaattggcaaccatcctgaaacaaatcaagagattactggcgctattggcaggtatggaccctatatcaaacatgaaaatacgtatgtgagtattaagcttgaggatctttttgcaataggactcaaccgagcagtgacgttgattgacgaaaaaaataaagtgtcaccttcaagcccaaatcaaatattgggccaataccccaaaactaagaatgatataattttatcaagtggtagatatgggccatacttaaagtataagaaaaagaattactctgttgggaagaatatttcggttgaaacattaaacctcgaagaggctataaaaattatagatttaaaagataaaaaaaattaaa

SEQ ID NO: 293626 - DNA, 2638 bp, Unknown
  Bacterial polypeptide expressing nucleotide sequence isolated from the Sargasso Sea
atgggtaaatcgctagttattgtcgaatcaccggccaaagctaagactattaataaatatcttggcaaagaattcatcgttaaatcgagcgtggggcatatccgtgacctaccaacttcttcttcatctgacggcaatgaaaaggtgaaatccgccgccgaagtgaagaagatgtcgccagaagaaaaggcgcgatataaaaaggtgaaagaccaccaggcgctggtgtcgcgtatgggcgttaaccctgaaaagggctgggcggctaaatatcaaatcctaccgggtaaagagaaagtcgttaaagagctgcaagccttagccgattctgctgaccaaatctatctcgcaacggacttagaccgtgaaggggaagccatcgcctggcacttgcaagaggtgattggtggcgatccttcgcggtatcaacgtgttgtttttaacgagatcaccaaaactgcgattcaagaagcctttagtaaaccttctgctcttgataccaatatggtcaatgcccaacaggcacgacgctttttagaccgtgtcgtcggctttatggtgtcaccactgttgtggaagaaggttgcccgcggtttatcagccggacgagttcaatccgtggcagtgcgtctcgtggtggaacgtgaaagcgaaatcaaagcctttgtacccgaagagttttgggatgtgcatgcacagctcaatacgcctgcgagcgaagcgctgcgcatggaagtggttaagtacttagactcagccttcgagcccacaaacgagcagcaagcgttagccgccgttcaagccttatcttctgccagctttaaagtgatcgctcgtgaggataaagcgacccaaagtaaaccttcggctccttttattacttctaccctgcaacaagcggccagtactcgcttaggctttggggtgaagaaaaccatgatgatggcccagcgcttgtacgaagcgggtcacatcacttatatgcgtaccgattcgacaaacttaagccaagaagcgttagacagcgtgcgtgagatgatcggcaaggaatacggcgccaagtatttacctgccgaccccattcgctacggctctaaggaaggcgcgcaagaggcgcacgaagcgattcgtccatcaaacgtgaatgtcgaagcggcagctttaaccgatatggaacgtgatgcacaacgtctttatgagttgatctggcgtcagtttgtctcctgtcagatgacaccagctcaatacgatgcgaccaaactcactgtgaaggcgggtgactacgaactgaaagcgacgggacgtatcctgcgctttgacggttggacccgtgttcaaaccgcattgaaaaagaaaaatgaagaagacaataccttgccttcggtgaatgaaggtgatctgttgtctctggtcgaattagagcctaagcaacactttaccaagccacccgccagatatagcgaagcgtcattggtgaaagagttagagaagcgtggtatcggtcgtccttcaacctacgccaccattatttcgacgattcaagaacggggttatgtcaaagttgaaaaccgccgtttctacgctgagaaaatgggcgagattgtcagtgagcgtttagttggtagttttgccgagctgatgagctacgactttaccgccagcatggaacagaccctcgacgatgttgccagtggtgagttggattggaagaaggttctcgatggtttctatgccgacttcactaaacaactagagaaggcggaattggcaccagaagaaggcggtatgcgcctcaatcaaatggtgatgaccaatattaagtgtccgacttgcggtcgcccaatggggatccgtactggcacaactggggtgttcctgggttgttcgggttacgagttaccaccgaaagagcgctgcaaaaccaccatgaacctaacgccaggtatagaagcgattagcgacagtgaagatgccgaaaccgatgcgctacgcgccaagcatcgttgtggcatttgtggtacggcgatggacagctacctaatcgacgaaaagcgcaagctgcacgtttgcggtaataaccccatctgtgagggttacgaggtcgaagaaggccaatttaagatcaaaggttacgaaggtccattaatcgaatgtgaccgctgtggccatgatatggaactgaaaaacggccgttttggtaagtatttcggttgtacgaacgaggaatgtaagaatactcgtaagttactgaagaacggtgaagctgcgccaccaaaagaagatcctatttatctgccagagctgaaatgcagcaagtctgatgcgcattttgtgctgcgtgacggtgcggcggggattttcttagcggccagtactttccctaaatctcgggaaacccgggcgccactggttgaagagttagtgaaataccgcgagctattgtggccaaaatatcagtatcttgccgacgctcctatcgcggatgatgagggaaataaagcagcggtgaagtttagtcgtaagactaaagagcaatatgtagcgactgaagttgacggtaaagcaacgggatggtcggcgcattatgtgaatggtaaatgggtaactgaatcgacggcgaagaaagctaagaagtaac

SEQ ID NO: 293627 - DNA, 1342 bp, Unknown
  Bacterial polypeptide expressing nucleotide sequence isolated from the Sargasso Sea
aagagaggtcgtgtttgatggtttcaccagaatagttaaatcaaaatctgatgacccagatgctaatcttcttcctccgcttgcagttaatcaacaattaactctcaaaaatttagaaaacaaacaaaagtacaccaaacctcctgcaaggttttcagaagcagcattagtaaaggaattagaaaagaaaggaattggcagaccttctacttatgcaaatattatctctacaattcaggaccgcggatatgttgaggttcaaaacagacgattctttgttaaaaaaattggaatgattgttacagacagacttgtaagtagctttgatgacatcatggattatagttttactgctaattttgaaaatgaattggacagaattgcaaatggtgaattaaattggaaagatgttttaaattcttattacgcagcttttcaagatgatctctactcggcaatggacgaggaaaatggaatggttcctaatcttcctacgatgacaaatattaattgtccggaatgcaaaaaaaataaactaacaataagaaatgccagtaatggagtttttcttggatgtgcaggttatagcttgccaggagatgagcaatgtaaaaaaactcttaatctcatctcaggcgatgaagctgtaagtgttgatgatcaagaggaagctgagcatttgatagcaaaacgtcgttgtccaaaatgtgatacgagcatggataattatctattagatgaaaatcataaactgcatgtttgttcaaataatcctgattgtgatggatttgaagtggaagagggcacatttaaaattaaaggatatgatggtcccaccttatcctgtcataagtgtgggtctgaaatgcagttaaaaacaggcagatttggtaaatattttgggtgtatgaatgataattgtggtgcaaccagggcgcttcaaagaaatggagagccaaaacccatagtgatggaacctattattacagaaatcccttgtattaaatttgaagatatttacttattaagagatagcatgaaggggctttttttagcagcgagtaaatatcctaaaaatagagagactcgcgcgccatccgttgaggaatttaatcaagcagttaccgaggaaactttgcttgatgcatgtaagtatctagaagatcaagggaagcatacccatcttttagatgcccctaaaaaagatattgatggaaatacttatgttattagatataacaaggttgaggatactcattatttagcttcagaaaaagatggtaaaaagactggaaacactgccacgcataatggtgataagtgggttgaagtaataaagtaa

SEQ ID NO: 293628 - DNA, 1672 bp, Unknown
  Bacterial polypeptide expressing nucleotide sequence isolated from the Sargasso Sea
tatgaattcattagtcattgttgaatccggagctaaggctgaaaaaattaaaagctttctaaataaaagttttcctgatgaaaattggtcagtagaggcgtgtgtgggtcatgtcagggaccttgctgaaaaagaagatgcagtagacccaaacgattggaaaaatctaaaatgggaattttcaagcaagggaaaaaaagtaatgaaggggcttagaaagctttgcaaggagtctgatgctctatatttggcaactgaccctgacagagaaggagaagcaattgcttggcatatacttaatgatttcgaagaaaagaaattattagaaaaaccaacagtacataggataacttttaatgaaattacgccttctgcagtcgagagtgctgttaagtctcctagggatattgattataatttggtcaatgcttacctagctagaagaatacttgatcaccttataggctttaaagtatcacctcttctttggaggcatgtctcaagagctaaatcagctggtagagttcaatctcccactttaagaattatttgcgaaaaagagaatgaaagggatcggcatatacctgatgaatattggcctttctcggctacatttgattattacggatcttcctttgaggctacattaaataaaatctcagatataaatataaaaaaaggattaaaggatgaagaagaggttagccgaaccaaaatcgatttagatgcgtctaactttcttctgacaaaaatagaaaccaaacttcaaacaagcaatcctcaacctccctttaggacttcttctatgattgcctctgctaacagtcaatttggcatgtctgctaaacaaacaacacaggcagctcagagcctttttcttgctggacacattacttatcctagaacagacaatatatctatagcgggttcaggaatagatgatcaagataaatatcttgcatcgcctttggaagaaattagaaactatatatcggataatttcgaccaaacttttttaagtaatgaagttaggaggtataagaataaattaacaactgcccagatggctcatgaagcaattagaccggctattatttctgtaaaaccttctgatttagatctaccgactaacgaagaaaggctttataggttgatttggaatagaactgttgcaagtcaaatggaaagttctaaatatgaaagaaaatctttaacaatttcttcacaagataagaactttgaatttactgcgtcttcaaggaaaaatatttttgctggatttgaagttctttctccttctgaagaaaacaatattactgagtttccagatggtctagaagaaggatcagagctaaaagttatagatatgcaagccgaacaaaagttctcgtctcctccaaatcgatactcagaagcatcattaataaaaaaaatggaagaggagggaataggaagaccttcaacatacgccacaatattggaaggtcttaaagcaaaaaaatatatttatggcggaaaatcaatgattccatcagatttaggtagaattttgaccgcgtatctaaaaaaagtttttgaagattttttcatagaaactaaatttaccgcaaacctagaagccacccttgatgaaatagcttcaggtaatgaagagtatgagaaagttttaaat

SEQ ID NO: 293629 - DNA, 1824 bp, Unknown
  Bacterial polypeptide expressing nucleotide sequence isolated from the Sargasso Sea
agtggaatccacaacaaaaggaaaaaagacattaaaggaaataagagaactttcaaaagattctgaaggtatttatcttgcttctgatccagacagagagggagaggcaatagcatggcatattttagatcacctgaaagataaaaagctaatggaaggaaggcagattcatcgtatttcattcaatgaaattactccttcagcaataaagtacgcagtagaaaatcccagagatatagatcaatttcttgttgaggcttatttggctagaagagtcttagatcatttaattggatttaaagtcagccctcttttatggaggcacgtacctagagcaaaatcagcaggaagagtccaatctcctaccttaaggatgatttgcgctcgagaagatgaaattgatgctttttgtcctgaggagttttggccgctaaaggttaatttcaagaccaaagagtgcacttttagctcagacttaataagtcaaaatagggcggatctaaaaaaagtacccattatctctgagattgatgctttaaacctaaaaaaagagatagagagttcaaaatttttcattaaagagatcaaagataaggaagtttcatattctcccaaggcgccttttagaacatcgacgcttcaacaagcagcatcaagtaaattattttttaatccagacaggacaatgcaagttgctcaatcattatatgagtctggcttgataacttatatgaggacagatggtataggtattagttccgaggttgtaaatgaaatcagaagtttaatatcttctgaatttggagagaattatcttccggatagcccaaaagtatataaatcaaaggctgcaaatgctcaagaagctcatgaaccaattagaccaaccgatatcagaaagaaacctgaagataatagtggattaaatcaagatcaacaaaatttatacaatttaatttggcgaagaacagtagctagccaattacaaaactcaaggtatctcagaaagacaatcttgattgaagatcaagataaaaaatttcaacttaggacaagcggaagagaaatcatatttgatggttttgaaaaagtgctgaaagacgagacggatacggaggaatcccaaaaattaaaaggtatctatgatgattctctgcttgatataactgatgttattactgaacaaaaatttacttctccgccaagaagattttctgaggcatctataattaaaaatatggaagatgaaggtattgggagaccttcgacttatgccaatactgttaaaaatcttagagacaggaaatatacttttggagctaaaagcattaatccttctgacttaggcagaattttggtttcctatctatcaaaagcatataagtctttctttatagaaatagactttactgcagaattggagaaaagcttggatcaggtatcctcaggttcaatgctatggacaaaggtcttagatgatttttatgccaaattactagaacatatttcaaaaattgaagaatttaggactagagaagtcttagatatgctcaacgagcaaattgggcacagagcttttccaaaaaatatcaaaggtgaggttatagttgattgtcctaaatgtgctaatgaaattagtataaagcatggtagatggggattttttgttggatgtggagaatgtcaatggacaaagccagtttttgagaaatcaatcaaatttgagacatatgcgcagcttccaaaagatcttggtgcccatcccgacacaggtgagcccgtttatgccgatatcagcataaatggcccttgtatatggacttt

SEQ ID NO: 293630 - DNA, 1249 bp, Unknown
  Bacterial polypeptide expressing nucleotide sequence isolated from the Sargasso Sea
atgtcaaaaactctagttatagttgaatcaccagccaaagctaagactatctctaaatacttagggtcagagtacatagttaaatctagtgttgggcatataagagatcttccaaagggtaagtctaaaaaacctttacaaagaaatactattcccaaggatttacctgaagatgagaaaagaagattaaaacagatcaatgaacgtaaaagactgatcaggagaatggggatagatccagataatggatgggccgcaaactatgaaatcattccagaaaaagaaaaagttattaaggaactcaaaaaagctgctaagtcagtagattctatttttcttgcaactgatcttgatagagagggagaggcaatagcctggcatcttaaagaagcattaggtgcagataaatttaactattccagggttagatttaatcaaataactaaagatgcaatcttagaatcttttgaggatccaaaagacatagattcgagccttgttgaagcccaacaagcaagaagatttcttgatagggtcgttggattcgaattatctccacttttgtgggcaaaaattgcccgtaatttgtcggcagggagagttcaatctgttgcattaagacttttggtcgaaagagaacatagtattcaaaagtttaagccagaagagttttgggaaatctcatttaaagcaaaaaatgacgaaaatactccaattgaatttaatcttaatagaaaaaaatcagaaccattacttcaagctgaagaagcaaaaaaaattgaggagcttatcaattcctcagatttacttgtaaatgaagttactcaaaaaccagtaaaatcaaaaccaaagcctccttttattacatcaacattgcagcaagccgcaagtactaagcttggattcaatgtaaaaagaactatgagaactgcccaaaagctttacgaaaatggactcataacgtacatgagaaccgatgctcctgccttatctcctgaatctattaaagatgccagaatgtatatcgagactaatctaggagaaaagtaccttacgaatgctcccagaatttattcttctaatgaaaatgctcaagaggcgcatgaagctataaggcctacaattgcatccactaaatcggaaagtttaatctcttccacagatgaagaaaaacgcttatatgaattaatctggcagccatttataggatcacaattacctgatgcagaatacttagcaaccatgcaaa

SEQ ID NO: 293631 - DNA, 694 bp, Unknown
  Bacterial polypeptide expressing nucleotide sequence isolated from the Sargasso Sea
atgaatcttgtaattgttgaaagtcctgcaaaagctaaaactataaataaatatcttggtgcagattacacagttttagctagctatggtcacatcagagatttaccatcaaagaatggttcggttgatccagaaaattcctttaagatgatttgggaagttgacagtttttctaaaaaatatttaaaagaaataactgatacagccaagaattcagacaaaattatacttgctacagatcctgatcgtgagggtgaagcaatagcgtggcatgtaaaagaatttttagatgaaaaaaaacttctgaaagacaaaaaagttgaaagagtagtcttcaacgaaatcactaaaaaagctgtaacaaatgggatagataatcctagaaatattgagaatgaactggttgatgcttacatggcaagacgtgctttagattatctagtaggttttaatatatcacctattttatggacaaagctacctggatcaaagtctgcaggaagagttcagtctgtagcacttagattgcttactgagagagagcatgaaatagaggtatttcaacctaaagaattttggacacttaatgtaaatttttttacagaagataatttaataataaatacaaatattaatcagcttgatggaaaaaagattgataagttttcatttaaaaacaaagtgggaaattaat

SEQ ID NO: 293632 - DNA, 1124 bp, Unknown
  Bacterial polypeptide expressing nucleotide sequence isolated from the Sargasso Sea
tttggagagagttgtctttaatgaaattactaaaaaagcaatacttgatgctataaaaaatcctagacaaatccatttgcctttagtcgaagcttacttagctagacgagcgttagattatcttgttggatttaatatctctccaattctttggactaaattacctggatcaaaatcagcaggaagagttcaatctgtggccctaaagcttattactgaaagagaaaaggaaatagaactatttaaacctgatgaatattggactcttacatcggactttacaaataaaaataataaaaatattttttcaaaattaagtttatttaatggagaaaaaatagaaaaattttctttcaaaaataaaaaagaaatacaaaaagcagttgatgtaatcaataaaacaaaatttaaaattatagatgtaaacacaaaagtatttagacgtaacccccttgccccttttaccacttctaccttacagcaaactgcttcgggacgatttggttttggagcttccagaacaatgcaaattgcacaacgactgtatcaaggagtagatatcgagggtgaaactaccggattaattacttatatgagaactgatggaactaatatttcaaaagaagcaattgatgattttaggaaattcattactgatgattatggtgataaatatttgccagaggcaccgaatagttattcaggaaaaaaagcaaagaacgctcaagaagctcatgaagcaattagaccaactaatataagtagaaaaccttctgacatcaaaaaatatgtaaatgcagatcaatttaagctctatgaattaatttggagtagagccttatcatctcaaatgatgccagcagagtttgatagaaatacgataattatttcgtcaaatgatagtaagattaactttagagctagtggctcagtagttaaatttgatggatttctaaaagtttatcaagttcaagaaactgacgaagatgcaaagaatattttgcctgaagtaaaagttggtgaagaaattagcatacttaaattacatgatgagcagcactttacagatccaccgccacgttactctgaagcgagtttagtaaaaaagatggaggagctaggca

SEQ ID NO: 293633 - DNA, 2205 bp, Unknown
  Bacterial polypeptide expressing nucleotide sequence isolated from the Sargasso Sea
caaggcaaatcgagcccttgctagttgatgcctacatggcaagaagagcacttgattaccttgttggttttaatatttcaccaatattgtggactaaacttcctgggtcaaagtcagcaggtagagtgcaatcagttgctttaaaattaataacagaaagagagcatgaaattgagttatttaatccagaagagttttggactttaagtttaaaatttcaagatgagaaaaaaaattcaattaccgcaagcatatatcaattagatgggaaaaaaattgaaaaatttacctttagaaaaaaagaagatattgaaaaggcaatctctggattaaagaataaaaaatttaatattagtgatatttcatcaaaaattgttaatagaaatccatctggtccatttacaacttctacactacaacaggttgcttcaagtagattgggatttggcgcctctagaaccatgcaaattgcacaaaaactttatcaaggaattgaaattgagggagatacagttggtttaataacctacatgagaactgatggtacaaacttatcggctgatgctattagtgattttagaaattatattaaaaaaagttatgggaatgagtatatacctgaaaaagctaataattattcaggtaaaaaagccaaaaatgcacaagaggcacatgaagcaataaggccgacggatattaatagatctcctgaagctgttaaaaaatatttaagtactgaccaaaataaattgtataatttgatatggagcagagcactatcctcacaaatggtatctgctaagtttgatagaaatacaataactattgaaactgaagataaaaataccgtttgtaaaacaagtggctcagttttaaaatttgatggttttttaaaagtttataaaaatcctaattcagaagatgacgatgaaatacttccagaagtaaaaaaaggacctattaatattgagtcatttttagatgaacagcattttacacaaccacctccaagatattcggaagcgagcttggtaaagaaattagaggaacttggaattggtcgaccttctacgtatgcaagtattatatctacaatttcaaaccgtggatacgctgagataactaataaaagattttttccaaccgatcgcggaaaattaatttctgcttttttagaaaaattattttccaaatatgttgattataattttactgcaggattagaagaccaattagatgaaattacaactggaaaagaaagttggataaatgttttagaattattttggaaagattttaacaacaatgtatcagaagtaaaagagaaaagaactagagaagttttggatttactaaatgaaagtttgggtacgttaatttttgacaaagatgatagtggtaatgttgtcagaaagtgccaattgtgcgatacaggatcgttaagtttaaaaaatagttttaggggcggcgcatttattggttgctctaattatccagaatgtaaatttactagacctttgtcaaaagctaaggctgcagcacaggctcaattagctgaaccaaaatttttaggcaaacatgataatggaaatgatatctttcttaaaaatgggagattcggaccttatttacaatatgaaaaacttctagaaagcattgaaaaagaaaataagaaaaaaaagaaaaaaacaaaaaaagctaaaaaagatttaaatgaattgttaaaaaatatctccattccaaaaggaattgaattagacagtattgatattgataaagcgagatttttatgttcactaccaaaatctttaggcattaatcctgacaatcaaaaagagatttttctaaacacaggaagatttggaccttatttaaagtgtgaaaataagtctgctagactagaaaatgttgaggagattttttcaataggtttgaacagagcaataacattaatagctgatgccaaaccaggaagaatgtcatcctcaatcataaaagatcttggcgaacatcctgaagacaaaaagcctgtaagaatcatgaaagggcaatacggcccttatataaaatacaaatcccttaatgcaacaattcctgaggaaaaagaccctacagagctaaatatggaagaggctcttatccttattgagaaaagacgtgaatacgataaaaataagaaaactaaaaaaaagaaaaaaaaatgaa

SEQ ID NO: 293634 - DNA, 1281 bp, Unknown
  Bacterial polypeptide expressing nucleotide sequence isolated from the Sargasso Sea
tggatctgtagatccagaaaataaatttaaaatgatatgggaagtagatagtttttcgaaaaaatatttaaaagaaattacagatgtagcaaaagattctgataaaattattttagctacagatcctgatcgtgaaggagaagcaatagcatggcatgttaaagaatttttagatgaaaaaaaaatacttaaagataaaaaaattgaaagagtagtatttaacgaaatcacaaaaaaagcagttataaatggtatagaaaatcctagatcacttgaaggtcaacttgttgacgcttacatggcaagaagagctttagattatttagtaggttttaacatttcaccaatattatggactaaattaccaggctctaagtcagctggtagagttcaatcagtagctttaagattgttaaccgaaagagaacatgaaattgaagtatttaatccagaagaattttggacaataaatgtaaattttattacttcttcaaaaaatattttaacctctttaatatctgaattaaatggagaaaaaattgaaaaatttagttttagaaacaaagaagatataaataatgccatatcaaaaattaaggaaaaaaaatattcaattaaagatataacttcaaaaatatatacaagaaacccattagggccattcacaacttcaactctacagcaaactgcatcaagtaaattaggttttggtgcatcaagaacaatgcaaattgcacagagactctatcaaggtattgagatagatggggatacaaaaggtttaataacttatatgagaactgatggtacgaatatatctaaagaagctattccattatttagaaaatatatagaggaaaattatggtgacaattatcttcccgaacaagctaataattattctggtaaaaaagcaaaaaatgcacaagaagcacatgaagcaatcagaccaacagaaataaaaaattcacctgaaagtataaaaaaatatttaagtacagatcagtataaattatatgatcttatttggtctagagctctatcatctcaaatgcagccagctaaatttgatagaaaaactatattaattacctcagaggatggaaagaatgtattaaaatctagtggctcaactgtaaaatttgatggttttttaaaactccaaaaggttgatgaaaatgatgatgaaaaaatattacctgaggtatctaaaggattaatcgatataaaagattttaatgacgagcagcactttacacaaccacctccacgtttttcaga

SEQ ID NO: 293635 - DNA, 1107 bp, Unknown
  Bacterial polypeptide expressing nucleotide sequence isolated from the Sargasso Sea
actggaaagtgggtcctggaaaatttcagatgttcaagaaaaggtgaaaaaatcaaatccaaaacctccctttacaacttctacgcttcaacaagaagcctcaagaaaacttcgtttttctgctagaaaaaccatgcgagcagcccaaggtctctacgagcaaggattcattacatatatgcgtacggactctacagctttatctgatgaaggaatgaaagcgtcaaggtcagaaatattggatcgttttggcaaagagtatcttccagaaaaagggaatatttattcaacaaaggtgaaaaatgcgcaagaggcgcatgaggcaattcgtccatcagggattaagtttaaatctattgatgaagtaaaaaaatctactgatgatgatggggctaaactctatgatttaattttaaaaagaacattggcctcacagatgaaatctgcaaaaataaatcaagttaccgcaacaattcttaatcaaaaatctgagtttcgcgccaatggtaaaactatacttttcccagggtatatggcagcttatgttgaaagcaatgataaaagaagtggtgtagctgaagataaagaaactgttcttccaaaacttgaagccaatcaatcattagaatgcaattctctaaactctgatgaacattccacaaagccgccggctcgctttaccgaagcttcgcttgttaaggaattagaagaaaaaggaattggaagaccatcaacatttgctaatattattgacaccattgtccgaagaacatatgtcaaccgggagcgaagtaagttaactccaacatttcttggattagctgtaacccaattattagaaaatcattttaattcattagtcgatgataaatttacagctacaatggaagatggattggatgcaatttcaaggggtgaattagaatcactcccatttatgaaagaattttattttggctctgatagccaaagcgggttggtaaatatgcttgatgataaagttgatattggcaaagcatgttctgtacagcttgaggataaggaagattctattgaaatacgcgtcggccaatatgggccatttgtaaggcagggagaaaaccagaa

SEQ ID NO: 293636 - DNA, 1867 bp, Unknown
  Bacterial polypeptide expressing nucleotide sequence isolated from the Sargasso Sea
tatgaatgtattaattgttgaatcaccatcgaaggcaaagtctattaataaatatttaggctctgacttcaaagttctcgcaagtgttgggcatgtccgagatttatcagcaaaaaatgatgcgatagatactgaaaatgatttccaaatgaaatgggaaacaagtgatcgtggaaaaaaagtaataaaagaaattactgatgttgcaaaaaaatctgaaaatttatatctagcaactgaccccgaccgtgaaggtgaagccatagcttggcatgtagaaaaactacttagagataattcatcactttcaaaattaaatattcaccgagttacatttaatgaaattacaaaaaatgcagttcttgatagccttaaagagccaagagaaatagatgaaaatttagttaatgcctatcttgcaagaagagctctagattttcttgtcggctttacgctttctccagtgctatggagaaaattaccaggatcaaagtcagcaggtagagttcaatctgttgccttaagaataattagtgaaagagaacttgaaatagaaaaatttattccgcaggaatattggtctttacaaggtgagtttagaaataaagaagataaaattattaattccagacttacagtttatgatgggaataaagtagataaacttgatattaaaaatgagagtgaagcgacaaaaatttttaatgatattaaaaattctactttcactgttggaaatattacgaaaaaagaagctagaagaaatccctaccctgcttttactacatctacaatgcaaattgaatctagtcgtaaacttggtcttagtgcgagtcaaacaatgcgcacagctcaacgcctttatgaaggaacagatattaaaggagaaacaactggcttaataacttatatgcgtacagacagtgtcgtcatgtcaaaagaagccattaaccaagttcgaggttttgttactgataattatggtgcaaactatttaccagaagcgccaagagtttataaatctaaggcgaaaaatgcccaagaagcacatgaatgtattaggccaacaaatatttacctaacaccaaaagatattaagcaatacattaccttagaagaatataagctatatgaaattatttggcaaagagcagtaagttcacaaatggcgagtgctgtattagatcaagtagctgttgatattacaaacgaagataaaaaaattgttttacgagcaaatggatcaacaattaagtttcctgggatgtacaaagtttatcaagaagctaaagatgatgataaagatgaagaaaaagaaacaattcttcctgccatgagtgaaggagaaagtttaaattttcaagaagttgaaaagacacaacattttacttcccctcctcctcgttatactgaagcgagcttagtaaagaaacttgaagagcttggtattggtagaccatctacttacgcttctattattaaggttctacaagatagagattatgtaattttagataaaaaacgttttaatcctcatgatcgagggcgaatagtatcaatatttttagaaaaatatttcaatcaatatgtggaatacgattttactgctgatcttgaaaatcaacttgatgaaatttctgatggtaaacttgattggaaagaagttctgagaaaattttgggaaacgtttaaacaactttgtgatgaaaccgtaggtaagtctaacagagaggttattgatgttctagatgaagcattaggtccacatttctttccaccaaatggttcaaatgaaaaaaggaaatgtccaacgtgtgataatggaagattagggattaaagttggaaagtttggaggatttattggt

SEQ ID NO: 293637 - DNA, 1108 bp, Unknown
  Bacterial polypeptide expressing nucleotide sequence isolated from the Sargasso Sea
atgaatttagtcattgtagaaagtcctgctaaagctaaaacaataaataagtatttaggtgatgattacaaagttctagcaagttatggtcatataagagacttaccttctaaaaatggttcagttgatccagaccaagattttaaaatggaatgggaagttgacagtttttcaaaaaaatatcttaaagaaattactgatgcagcaaaagactcgtctaaaattatattagctaccgaccctgaccgtgaaggagaagctattgcctggcatgtaaaagaatatttaaatgaaaaaaaacttttaaaagataaagaaattgaaagagttgtatttaatgagataaccaaaaaagctgtcatacatgggattgaaaatccaagacaaattgaacctcatctagttgatgcttatatggctagaagagctttagattacttggttggttttaatatttcaccaatactttggacaaaactacctggctcaaaatcagcaggaagagttcaatctgttgctttaaaattaattacagagcgagaacatgagattgagtcatttaaaccagaggagttttggactttaagtataaactttacagatcaaaataataaaacaattaccgcaagcattagtcaattagataataataaaattgaaaagttttcattcagaaataaagtagaaataaataaagctatagagagtataaataaaaaaaaatttaatattgcagatatttcaagcaaagttgttaatcgaaatccctctggaccatttactacatcaacccttcagcaaaccgcatcaaatagattgggttttggtgcatctagaacaatgcagatagcacaaaagctttatcaaggtatagagatagaaggtgaactaactggcttgattacctatatgagaacagatggaactaatttatccaaagatgcagtttcaacttttagagattacatccaaaaagaaattggtaacgaatacttgcctaaagatgctttgaattattctggtaaaaaagctaagaatgctcaggaggctcatgaggcaattagacctacagatataatcagaacaccccaaagtgtgaagaaatatt

SEQ ID NO: 293638 - DNA, 1879 bp, Unknown
  Bacterial polypeptide expressing nucleotide sequence isolated from the Sargasso Sea
aatattaagaccaaaaaatttaacataactgatatttcctcaaaagtggtaagcagaaatccctctggaccctttactacttcaacacttcagcaggttgcttctagtagattaggttttggtgcatcaagaacaatgcaaatagcacaaaaactttatcaaggaatagaaattgagggcgatacagttgggttaattacttatatgagaacggatggaactaatttatcagctgaagctgtctctgattttagaaactttattaaaaaagaatatggtaacggttacttgccagagaacccaaataattactcaggaaaaaaagcaaaaaatgcacaggaagctcatgaagcaattagaccaactgatattaatagaaatccagactctcttaaaaagtatttaagttctgaccaacaaaaattatattctttaatttggtctagagctctatcttctcaaatggaaacagcaaaatttgatagaaatacaataacgattgaatctgaagataaaaaaactatatgtaaatcaagtggatctgttttaaaatttgatgggtttttaaaaatttattcaaatcagagtaaagatgatgatgaacaaattttgcctgaaatgacaaaaggaccaattaatatagaagctcttattgatgaacaacattttacacaacctcccccacgttactcagaagcaagtttggttaaaaaattagaagagttaggcattggaagaccgtcaacttacgcaagtataatttcaacaatagcaaatagaggctatgcagaaatacttaataaaagattttttccaactgacagaggtaaattaatttctgcatttttggaaaaactattctcaaagtatgtagattataattttacagccggtttagaggatcaattagatgaaattacctcaggtaaagaaagttggctaaaagttttagagatgttttggaaagactttaataacaatgtttctgaagtaaaagaaaaaagaaccagagaagttttggatcttttaaatgaaagtttgggggcgttaatatttgacactgataaagaaggaaagatagttagaaaatgtcagttatgtaacactggttcactaagcttaaaaaatagttttagaggaggtgcttttattggatgttcaaattatccagaatgtaaatttacaagaccattatctaaagctaaagcagctgctcagtcaaaattatcagagcctaaatttcttggtaaacatgaaaatggaaatgatatttttctaaagaatggtaggtttggtccatatcttcagtatgagaaagttcttgaagaaaatattgaagaagaaaaacccaaaaagagaaaaaaaacaaaaaaaaagaaaactgaagtaaatgaactgttaaaaaatatatcaattccaaaaggtattgaattagaaagtatagatttagaaaaagctaaatttttgtgctcacttcctaaatcactaggaattaatccagagaatcaaaaagaaatcaccttaaatacaggtagatttggaccttatttaaaatgtgaaaataaatcagctagaatagaaaatgttgatgaaatattttctataggattaaatagagctattgcgctcatagctgaagcaaaacctggaagaatgtcctcttcgatcataaaagatttaggagaacatccagaagataaaaagccagtacgaatcatgaaaggacagtacggaccatacattaaatacaaatctctaaatgcaacaataccagaagaaaaagacccagtagagctcacaatggaagaggcacttatactaattgagaaaagaagagaatacgataaaaataaaaaattaaaaaaaagaaaaaaatgaa

SEQ ID NO: 293639 - DNA, 1549 bp, Unknown
  Bacterial polypeptide expressing nucleotide sequence isolated from the Sargasso Sea
gttgttgagcgtgaaaaagaaattaaagctttttcaccacaagaatattgggaacttgaagtaagtattcgacatgatgagagagatattacttttaaacttaataccaaaaaatctggattagaaataaactcaaaagaagaagccgaaaaaattgctgctgcatttcaaggcaatgaaatagaaattacaagtaatgaaaaaacaaaacgcaagatagcagtaaagccaccatttattacatctactcttcaacaaacctctagctcgatgctgggttttagtttatctaagacaatgaaattagctcaagatctttatacaggtggttatatttcatatatgagaacggactcacccaacataagcatgttggctcaaaacaactgcaaacaatatcttctagatacatatggagaagcttatagtgcaccgaaaaatttcgcggcaaaagcttcaaactctcaagaggctcatgaggcaataaggcctacagatgttacttttaaagctgaagaactatcgcttagtcaagatcataaaaaactttataacttaatatggtctagatttgttgcatctcaaatgccccaaccagaaataattgtgaacagcatcaaagccaagaaagaaactaatatgtttgaaacatcagttagtagtataagctttgatggtttttataaggtaatgccacctggtaaaaatagtgggtatgtagattatgatttagaaagtctttcagttggtctcatgaaagaagtaaataaagttgagaaatcgcaacatttcacaaaacctccttcaaggtactctgaagcaagcttagtaaaagagcttgaaaaaagaggtattggaagaccatcgacttatcaagagattattacaaatattcaagatagaggttatgttaaaagtgaaaataaaagactttatgctactaagatagcaaatttaatttctgaccgactcattaagtcattcaataatattatggattatggttttacagccaacatggaaaaaagcctagatgatgttgcagaaggtaaggaaagttggaaaaaactgttggaagacttttatgctgaattcgataaagcgaaaaaagttgctgcagagggaatggagcgaaataaaccaatcctcactgaagtaaaatgcgaggagtgcaattctgacagaaaaatgcatttgaggacaaatcaaaacggtcagttccttggctgtgaaggctacttagaagatggtgataagcaatgcaagaagacttattcattattgtcagacgaactctttacagacaacgacgataaggaagcagagagtatattcaataaagctaagtgtgatctttgtggctcaagcatggatggttatattatcgatgaaacgaaaaaattattaatttgtgcaaattcacccatatgttctggaacaaaattcgaaattggaaactttataaagcctaaaaatggagaagaagagctaatagattgtcacaaatgtgattctaagatggagcttaaacttggaagatttggtaaat

SEQ ID NO: 293640 - DNA, 2200 bp, Unknown
  Bacterial polypeptide expressing nucleotide sequence isolated from the Sargasso Sea
atgccagtagtggttgtagagtcaccagcaaaagcaaagacgatcaataaatatctgggctccgattataccgttttagcgtcatttggtcatgttagagatttaccagcgaaagacggatctgtggacccggataagggttttgatatgaaatgggaaattggtgctgatagtaaaaaacatgtcaaagccatagccgatgctctgaaaaaagataatgagttgatattagctacagatccagatcgtgagggtgaagctataagttggcacctcgaagaaacattacgaaataagcgggttataaatagtgacacaccagtaagcagagttgtttttaacgcgattactaaatcagctgtttcagaagcgatggccaatcctcgagaaatagacgcaccattggtacatgcttatcttgcacgaagagctctcgattatcttgtcggtttcaatctatcgccagtgttatggcgtaaattgcccggggctagatcagctggaagggtacagtcagtttgcttgcgattaatcgtagaaagagaaatagaaatagaagctttcaaaccaaaagaatactggtctgtgaaagcatctttaaaaactcctagagggcaagtatttgatgggaaactaataaactttgccggaacgaaactagataaatatgatttgaaaagtagctcggaagcagagttagcagcacaggcaatcacgacacgtgaccttatcgttgcctcagttgaaagcaagccaactagtagaaaccccttcgctcctttcatgacatctactcttcaacaagaggctggaagaaaatatggaatgggtgccagacaaacaatgcaagcagctcaaaggttatacgaggcaggtcatatcacatacatgcgaactgatgggattgatatggcgccagaagctgttacctctacgagagaagccattaggcaaagatatggcgatcaatttttaccagcatctcctaggttctacaaaaataaagctaaaaatgctcaagaagctcatgaatgcattcgacctacttccatttcaaaagatgcaaagcaattaaaactttccgatgctgaccagtttaaactatatgatttaatctggaaaagaacgatatcgtgtcaaatggagtccgcaaagttagagagaacttcagtagatatacaaagcccagacaaggaagttactcttagagctaccgggcaagtggtgttattcgaaggctttctcaaagtttacgaagaaagccgcgatgacgtggagcaatcagacgatgaaaatcgtcttccacaaatgtctaaaggagaaaatattgaaaagctcagtattgatcctgagcagcacttcacccaaccgccaccaagatatacagaagctagtctcgtgaaaaaaatggaagaattgggaataggcagaccttcgacttatgctaatattgtgacaacaattcaggatagagaatacgttagaaaagaaaaaaataggttatttccagaagataagggacgcatagttacaatttttctattgaattttttcaaacggtacgttgagtttgattttacggcaggtttagaaaatcaacttgattctgtgagtgctggaaaagggaactataaagaacttctaggtcaattttgggatgatttttcagaagcaatctctgaaacatcagagcttagaattactgaagttttagacgttttagatgatgcattagcgccccagctttatcccgctaaagaggatggtagcgacccaaggaggtgtccgaaatgtggaaatggtcaactccacttgaaatcatcgcgaactggcgggtttgttggatgtggaaactatccagagtgtaattttacccgtcctatatccggtgaaccagatgaaacagcagagcgtttacttggtgaagataatggagataaaatatttcttaagaatggcaggtacggtccctatattcaacgtggcgaagcctcagaagagaataaaaaaccgccaagggctagcctgccaaaagggtggtcaccgtcagatatagagctcgagaaagcgctaaaacttcttagtttgccaagagaaatagggcctcatcctgaagatggtcagataatagaagcagggattggaagatatggccctttcgtacgtcacgggcggacttacgcaaatttaaaagatcctg

SEQ ID NO: 293641 - DNA, 2128 bp, Unknown
  Bacterial polypeptide expressing nucleotide sequence isolated from the Sargasso Sea
tatgatcctctatattgctgaaaaaccaagccttgggcgcgcaatcgccgatgtgctaccaaaaccccacaaaaaaggtgacgggtttattgaagacgcccaaggaaactgcgtgtcttggtgtgttgggcatttgcttgaacaggccgagcccgatgcctataaccccgagttcaaatcgtggaagtttgagcatttacccatagtgcccgagaagtggcagcttaaacctaaggtcgcgacccgtagccaactcactgtacttaaaaagctggtaaaacaggccgataccatagtgaatgcgggtgatccagaccgtgaagggcagttattggttgatgaagtaatcgcctatttgggcgtgacgggcgataaattacagcaaacgcagcgactccttatcagcgacttaaacccgcaggcggtgaaacgtgccttgtcgcaacttcgtagtaaccgtgagtttattcctttgtctacttctgcacttgcccggagccgtgccgattggctctatggcatgaatatgacacgggcgtacactatccaagggaaaaaggtcggctatcagggcgtgctatccgtcggtcgagtgcaaaccccgctccttgggcttatcgtgcgccgcgatgaggaaatcgcgcgatttcaatctaaacccttttatgaagtcttagcgcatttagtaacggataaacaacaatctttcactgcgaagtggcaacccagtgaagcctgtttaccttatatggacgaagaagggcgagtgcttgctaagggcttagcacaaaatgtggtgcgtcggatcaccgataaacccgccaaagtgacccagttaagcactaaggataaacagcagaatccgccattaccctacagcttgtcggcactgcaaattgatgcagccaagcggtttgggatgagcgctaaggacgtgctcgatacctgccagagtttatatgagcgccataagctgattacctacccgcgctctgacagccgttatttacctacagagcaacatggtctagcaagcagtgtattagcggccattatggggggggggcccgagttagtcgcacacgctgaggcgccgaatcctcggcttaaatctaaggcgtgggatgataaaaaagtcgatgcccaccacgccattattccaacggaaaaacagcccaatttaggcagtttaagccagcgggaaaggcagctttatctacatattgcccgccagtatttggcgcagttttaccccgcctattgctacagtgaaactgcggtcgaagtgaccattgaaggtggtctctttaaaacgaaggctagacaggataaatccctaggttggaaacaactgtttgcacgggaagctgatgaacataaagagtctacggggcgagaatcgcttaaaaacactgatgataaaagtaccgataaggatgcagaagatgaggtgttttgtggcattttaccgcctttggccctaggacaaatccttcactgcaaccaaggtgaattggtcgagaagcaaactcagccccccaaagcctttaccgatgcgaccttgctgagcgccatgacggggattaatcgttatgtgactgaccccgagatccgcaaaattttaaaggaaaccgatggcttagggacggaagcgacccgcgcaggcattattgagctgttgtttaaacggggttttattcagcgtcagggcaagtcaattgtggcaactgaggtgggtaaaggtttaatcaatagcttaccccttagtgccacaacacccgatatgaccgcgctgtgggaggcaagcctaaatggcatctgccataaggaaatctcttatcaaggatttatgcagccactgctggggacgttaaatcacttaatcgaaaatgcgggcgcccaattaccctcagccctcaatggcttaaaaggacagggttttaagcgagcagctaaaaagtccgtctatcgaaaagcgggagccagaggtgctgctggcgggaaaaaagccggaacgggcgctaaaaaaggaaatgctagaaattcagccgaagcatcttccacatccacaacagctaaaccgaccgtccctagacggcgaacgagcaaagcgaccgcccaagcctga

SEQ ID NO: 293642 - DNA, 601 bp, Unknown
  Bacterial polypeptide expressing nucleotide sequence isolated from the Sargasso Sea
atgaatcttgtaatagttgaaagcccagcaaaagcaaaaactataaacaaatatttaggtgatgaatatactgttttagctagttatggtcatattagagatctgccatccaaaaatggatcagttagccctgaagaaaaatttaagatgatatgggaaatagatagtttctcaaaaaaatacttaaaagagattactgatgtagcaaaaatttctaaaaaaattattcttgcaactgatcccgatagggagggtgaggcaattgcatggcatgtaaaagagtatttgaatgaaaaaaaacttttaaaagataaaactgttgaaagagttgtgtttaatgagataacaaaaaaagcagtaaccaatggaattgacaatcctagaaacatagaatcaaatcttgtagatgcatatatggctagaagagcattggattatttagtaggctttaacatttctcctattctttggactaaattacctggatcaaaatcagctggtagagttcaatcagttgcattgagattgttaacagaaagagaacatgaaattgaattatttaagcccagaggaatttggacattaaatgttgtatttaaaa

SEQ ID NO: 293643 - DNA, 2620 bp, Unknown
  Bacterial polypeptide expressing nucleotide sequence isolated from the Sargasso Sea
atgtcaaaatctttagtaatagttgagtcgccggcaaaggctaagacgatatcaaaatatcttggttcagaatatattgttcaatcaagtgtaggtcatattagagacttaccaaagaaaggtactggtacatccaagagatcttcaataccaaaaaatattagtcctgaagaaaaagcaaggcttaaagcagtaaacgatagaaatagattaattagaagaatgggtattgatccagataatggatggaaagctgactggcaaataattccagaaaaagagaaagttataaagagtttaaaaaaagctgcaaaaaatgttgataatatctatttggcaactgacttagatagagaaggagaggcaattgcatggcatttaaaagaagctcttggttcagacaaatataattattccagggtaagatttaaccaaataactaaggatgccatcctagaatcgttttcagatccaaaagaaatagacttaaacctggttaaagcttatagagcaagaaggtttttagataaggtaattgggtttgagttatctcctttattgtggaaaaaaattgcaagaggactctctgctggtagggttcaatcagttgctttaaggttacttgatgaaaaagaaagatcaattcaggaattcattcctgaggaattttgggaaatttatctttacggatcaacagataaaaatgaaaaaattaaattcaatcttttaaccaagaaaaatgatcctttgcttaatcagaatgaagttgaagaaataaaaagacaaatcgaatccaccgaattagttataaatgagattgtaaaaaaaccggtaaaaattaaacccaaagcaccatttattacatccacacttcagcagtcggcaagtacacgtcttggatttaatgttaaaaggacaatgagagttgcacaaaaattgtatgagggcggccttattacttatatgagaactgatgcaccaagtttaagcaaagaatcgatcaacgaagcaagaaattttgtaaatgataatcttggtgaaaattacctaactaattctccaagaatatattcaggatctgaaaatgctcaagaagctcatgaagcgattagaccaacaaattcattcctaacacctaaagatgtaataaatctatctgaagaagaatctcgactttatagtttaatatgggaaagatttattgcctcacaacttcccgatgctgaatatttatccacatctgcaaaagtttatgttggtgaaaaaatatttgttgctaaaggaagagagctagtctttgatggcttcacaagagtgcttaagacttcttccaaggaagaagatattttaccttcactacaagagggccaattaattagtgtggatcgtgttgagctagagcaaaaatttacaaaacctccagcaagatattcagaggctgctttagttcgtgagcttgagaaaaagggtattggaagaccttctacttatgcaaacataatttcaacaattcaagatagaggatacgttcaaattgaaaataagagattttttgtaaaaaaaattggacatattgtagctgaaagactgattgaaagttttcatgacattatggattatgattttactgcaaatctcgagaacagtttagatgaggtagcaaatggagaagcagattggagaaatgtattagataatttttataagtcatttcaaaacgatctcatatcagcttcagatgaagattccgggatgagacctggaaatattccaacaacaacagacatagtttgtgtgtgtggaaaaactaacatggtaataagaaattcatcaaatggagttttccttggttgttcgggttatcaaaatgaaggcaatgacaaatgtaaggaaacattaaatttaatttctggtgacgaagctgtcagtgttgatgactctgaagaagcagaaaatcttctcattaaaaagagatgtccaaaatgtgataccagcatggataattatttaattgatgagtttagaaaattacatgtttgcggaaaaaatccagattgtaacggatacttagttgaggatggtaaatttaaaataaaaggatacgatggtcccaccttagagtgccataaatgtggatctgaaatgcaattaaaaactggaagatttgggaagtattttggatgtttaaatgataattgtggtgcaacaagagcgcttcaaagaaatggtgaacctaaaccaataacaatggaacctatagagatgcctgatcttaaatgcattaaatgtgaagatcattatttgttgagagatagcatgaaaggcttgtttttagcagctagccaatatccaaaaaatagagaaacaagagctcccaaagtttctgaaattaataaacttcataatgaaattgttgaggcttgtagatttttacctaacaaggaaaaacatatgtatttattagaagcacctgagaatgatgttgatggcaatccttatattattagatataacagaacagatgatgttcattatttagcttcagagaaagatggcaaaaaaacaaaatggacagctacatactctgacggagaatggattcaaaatctaaagtcctagt

SEQ ID NO: 293644 - DNA, 1257 bp, Unknown
  Bacterial polypeptide expressing nucleotide sequence isolated from the Sargasso Sea
gatgcccactgaccatactctggtgattgttgaaagtcctacaaaggcaaaaactattagaggttttttgcctaaggactttcaggttcttgcgtcaatggggcacataagagacttgcctaacaatgcatctgagatacctgcgaagcacaaaggcgaaaagtgggcaacgattggagttaatacaactgctgattttgaccctttgtacgttgtacccaaagacaagaaaaaaattgtcaaggaattaaaacaatctttgaagggtgctagtgaattgttgcttgcgactgatgaagatagagaaggagaaagtataagttggcatttaatgaatgtgcttgacccgaaaatccctgtgaagaggatggtctttcatgagataactaaagaagctatttccaaagcactatcgaaaacaagagcaattgatatggaattagttcatgcccaagagacaaggaggatcttagacagattagttgggtacacgctttctcctcttttatggaagaaagtttcatggggtttatctgcaggaagagttcaatcagttgcagtaagattgctagttctgagagagagagcaaggagagctttcaaaagcgggagttattgggacttaaaagcaaaattagagaaagaaggtagtgaatttgaggtgaaaatgacctcaattggtggaaaaagaattgctacaggtagtgattttgatgagtcaacgggattattgaaatctggccgaaatgtcatattactcaaggaagatgagtctaaggaacttgcaaaaaatttaactactgataaatggaaagttgttaatgtggaggaaaagccgtcaatccgtaaaccagttcctccttttacaacaagcacattacaacaagaggctaatagaaaacttcgattatcagctagagagactatgagatgtgctcagggtttgtatgaaagaggttttattacatatatgagaacagattctgttcatctgtctgatcaggcaattaatgcctcacgaaattgtgttgaatcaaaatatggtgttgaatatttaagtaaaaagccccgacaattctccaacaagacgagaaatgctcaagaagcccatgaagcaatacgtccttctggtgagagctttaaaacacccaaagagtcaaacttgcaaggtagggatctttctttatacgaacttatttggaaacggacagttgctagtcaaatggctgatgcaaggttgacaatgcttggagtcga

SEQ ID NO: 293645 - DNA, 2521 bp, Unknown
  Bacterial polypeptide expressing nucleotide sequence isolated from the Sargasso Sea
atgagtcaaaaatctgtaataatagttgaatctccttccaaggcaaagactatttcaaaatatttagatgatcaatatgaggttgttgcttgtgttggtcatgtaaaagatttgcctcgcgggtcattgggtgtagatgttgataacaagtttcaaatggaattagttgttttagatgataaaaaagatttttttaaacaactagcctccaaagcaaaatctgcacctgaaattattttagcaacagacccagatcgggaaggtgaggcgattgcttctcatattgcatcagaggtccctgattcaaagatatctcgtgttcaatttacagaaattaccaattttggtgtaaagaacgggatggaacataaggttaatattgatgaaaatcttgtagaagcacagcgtacacggcgtataatagatcgtttagtagggtataaaatttcaaaagttttatggattacattacagaaaaatatgaattttgttaaacaatcactttcagctggacgtgttcaatctgcagctttaaaaattataattgatagggaaagaaaacgggcaaaatttaaaaaggtaacctattttggactttccgctaaattattaactagtaaaaaagaagcgctaaatgcaaagttatttattatggattcaaaacgcattgcaaaaggacaggattttgatcaagaaagcggaacattaaaaaaagatgggttaatcgcattaagtggttctcaagcaaaggctcttgtaaaagaaataaatccaggtccttgggttgttaccaatattgaagaaaagccaaagacatcaaatccaaagcctccttttactactagcactttacagcaggaagcatcaagaaaattaaaatttagcacacgtatgactatgagtactgctcaaagattatatgaagcaggccttatcacatacatgcgtacagattcaattaatctttctaatgaagctattagtgcatccagagatgtaattaaaaaagattttggttctaattatttgccagacgaacctcgtcaatataagggtaaggtaaaaaatgcccaggaagcccacgaagcaattagacccgcagggcgacaatttaaaactataaaagatataaaagattctatgggcgcaaatgaatctagtttgtatgaattgatatggaagagaacaattgcatctcaaatgaaatctgctaaactaaaacaaacaagtattactattaaaaatcagaatacagaatttagagcaaacgggcaggtgattttatttgcagggtatatggaggtgtatgtagaagatggagatgatcctaaatcaccaaatataaataaagaaaatatattacctgaattgaaagaaaatgatcatttatcatgtgaaaatttatctattgacgaatctacaactaagccgccagctaggtttacagaagcaagtctagttaaagaaatggaggctgatggaattgggagaccttcaacttattctgcaattattaataaaattttacaaaaagactatgttcgtaataacaaagggtctcttactccaacttttctggcatttgcagtaacccaattgcttgaaaaccattttacatcattggtcgatgcaaagtttactgctgaaatggaagattctctagatgcgattgctcgaggtgaacaggaatcattaccttttatgaaagaattttattttggatcagaatcagataacggcttattagcaatgcttgatgaaaagatagatatacctaaggcttgtattattccattaaatggagatgaaaaagaaccaattatagctcgtgtgggaaattatggcccatatattcagaaaggcgatttaagaagaaatatccctgatatacttgctccaggagatatcactattgagaaggcaatggaaatacttaatcatgctccagaaaaagaagataaagagcttgggccagatcctgaaacaggacaaataatcttattaaaagtaggtccatatggaccttatgtgcaattaggtgatactaaaactagaaagtctatacctaaaaatgttgatttagatagtgtcaatatagaatatgctctatctctactttccctcccacgtaatattggggaacatcctgaaagcaaagaaccaatttttgctgattatggtagatatgggccatatataaaaatgggcaaacaaaatgcatcactacggggagatgagactccactggatattacacttgaaaaagctgtcgaacttcttgcaaatagaaataagaaaagctctacattacgatctctaggctcacatcctgatagtaatgaagaaattgtagtaaaagatggaagatatggaccatatgtttctgatggtaagattaacgcttctttaaataactcctttgaacctgatacaatcactcttgagcaggcaactgagttaattaatgaaaaaagagctaaagggcctactaaaagaaaacgcaaaaagaagaaaaagtaat

SEQ ID NO: 293646 - DNA, 1861 bp, Unknown
  Bacterial polypeptide expressing nucleotide sequence isolated from the Sargasso Sea
acaagaagatgtaaaactaataagggataagataaatgataaccaactctcaattaatgaaatcataaaaaaacctgtaaaggttaaaccaaagccaccttttattacctcaacgttacaacaatctgcaagtacaaggctaggattcaatgtcaaaaggacaatgagagtagctcaaaagctttatgaagctggatatataacttatatgaggactgatgcacctagcctgagcaaagactcaattaatgatgcaagaaatttcataaatgagaatctcggcgaaaattatcttacaaatgctccaagaatttattcaagcacagagaatgctcaagaggcacatgaagctgtaaggccaacaaacacttttttacgttcatctgatttaataaatttaagcgaagaagaagtaaaactttataaattaatttgggagagatttgttgcatctcaaatgcctgatgctgaatacttatctacatctgcaaaaacatttgttgatgaacatatttttgttgctaaaggtagagaattagttttcgatggctttacaaaagttctcaaaacctcctcaaaggaggaagatattcttccatcactcaatgaaggagattccctaacagttgaaaatatcaatttagagcaaaagtatacgaagccgccatcaagattttcagaagctgcacttgttagagaactagaaaaaaaaggtattggtagaccttccacatatgcaaatataatctcaactattcaagacagagggtatgttgaaattcagaataaaagattctttgtaaaaaaaattggtcatatcgtagctgaaagattattagaaagtttcgacgacattatggattatgactttactgcaaatttagagaatagtctcgacaaagtagctaatggtaacgcggactggagaaatgttcttgataatttttatgaatcttttcaaaaagatcttcatatagcatccgacgaatcaacaggtatgagacctgggaatatcccaattgaaaccaatatttcttgtccatgtggaaaagcttttatggtaattaggaactcatctaatggagtctttctcggttgttcaggatatcaaaatattggtgatgaaaaatgtaaggagacaataaatcttatttcgggtgatgaagcaataagcattgatgataatgaagaagctgaaaatcttctaatcaaaaaaaggtgtccaaagtgtggtacaagtatggataactatttgatggatgaatcaagaaaactacatgtatgtggcaaaaatcctgattgtgatggatatcttgttgaagaaggtcaattcagaattagaggatacgatggtcctaccctagaatgtcacaagtgtggatcagatatgcaattaaaaacaggcaggtttggtaaatattttcaatgtcaaaatgataattgtaaagctacaagagctcttcaaagaaatggagaaccaaaacctttgacaatggagcctattgagcttcctaatttaaaatgtttaaaatgtgaggaccattatttattaagagatagtatgaaagggctatttcttgccgcaagtcagtatccaaaaaatagagaaacacgagcacctaaagtatctgaaataaaagatttatctaatgaaattgtgcaggcttgtaggtttttacctgataaaaataaacacgagtatcttctcagtgcgcctgtgtatgattcagagggaaatccttatgtgattcgctacaaccgcaatgaagatgttcactatgttgcatctgagaaagatggaaaaaagacaaagtggaccgctgcatatacaaatggcgagtggctagaaacaaaaaaatag

SEQ ID NO: 293647 - DNA, 1060 bp, Unknown
  Bacterial polypeptide expressing nucleotide sequence isolated from the Sargasso Sea
aatgactaacgtagttgtagttgagtccccggccaaggctaaaactataaacaaatatctaggctctgatttcagagttctcgcgacagtgggtcatatcagagatctcataggcagagatgggtcggtaaagcctgactcggactttgaaatggactgggaagtttttccggactcccagaagcaaattaaagaaatagcgaatgcactcaatgaggctgataatctgtatttagcaaccgatcccgatagagagggcgaggcaatatcctggcatctcaaagagattctcaaagaaaaaaacctactttctgatgttaaagtacagcgcgtcgtttttaacgaagtcactgaggcggctgtactagatgcatttaataaccccagggatctagataatcatttggtggaagcttacctcgcacgaagagctttagaccacttggttggctttaaactctcgcctgttctatggagaaaattgccaggaaacaaatctgccggtcgagtgcaatctgtagccttaaggcttatttgtgaacgagagcttgacattgagaaatttgatccacgcgaatactggtcggtgttagtgaacttggaaaattcagagaaaaaatctttctctgccaagcttacacacttggctggcaagaaattaggcgactatgatttaggtaatgaagagctggccaaaaaagctgttgcttcaatagagagccaacctctttttgtattaaaagtcgaaaaaaaacaggtgcgagactacccaaaagctccttttaccacctcaacccttcagcaggcagcagccaacaagttatactttactgcaaagaaaacaatgtctgtggcccaaagtttgtaccagggcgtaaacataaatggtgaaactcttggcctcataacctacatgaggacagatggcgtatccatgtctgcggaagcaattacaagttgcagggacgaaatcaaatcacaatatggtaaggagtatttgccagactctcataatatttacaaggtaaaggcaaaaaatgctcaggaggcccatgaagct

SEQ ID NO: 293648 - DNA, 1852 bp, Unknown
  Bacterial polypeptide expressing nucleotide sequence isolated from the Sargasso Sea
aatgaaaaatttactaatagttgagtctccaacaaaaataaaatctatcgaaaaatttcttggaaaagattataaagtcctagcgtctgtaggtcatgttagggatttaatgcctagttcacgtaaaggcatagatgttgaggataattatgctcctgtttggaaaataacaaaagaaaaaaagattgttatggatgaaataaaaaaagcatcaaaagaagctgagactgtctactttgcaacagacccagatagagagggagaggcaatctccaaacatatatacgacatactggataaagctaaactattaaatggaaaaaatgttcatcgcgtaacattcaacgaaataacaaaaactgctgtaacggaggcgcttgaaaatcctagagaaatttctagcgacctatggcacgcatacctcgctcgaagaacactcgattatctcatgggatatgatatctcagaatttctctggaaaaaagtaagccggcttgcaagaggaggtagagttcaaagtcctgctctccgacttatagtagaacgagagaaagaaatagataaatttgtacctattgagttttggattttgtcactgaatgcatgcaaaaatgccgaatgtattgatgcagaactggtatctattgatggtgagaaagtcaaaaataaaaatatcacaaatattgagaatgaaaccagagcatctgaacttaaaaaggctatagaagagagtaaaacaataactataaaatctgtaaaggaatcagaacgaaaactaaaaccgaaatctcctttcactaccgcatctttacaacaaacagcttattcaagtttgggtttttctgtaaagcaaacctctagtgtagcgcagcgactatatcaaggcgtagcactggatggtgatgaagttgcgggacttatctcgtacatgaggacagactctacgaatctctctgatgagtgtctaaaagacatcaattcatttttggataaaaatcatcctgatttagcatatggtgaagtcagaaaatatcagaaaaaaatcaaaaacgcacaagaagcacatgaagcaatcaggcctacacaaatagatttgacgccagataaaattaaagggtttcttgatgatcaagaatttaaattgtatgagcttatttggaaaagaacagttgcgtctcaaatgaaagatgccgtatataatcaagtgtcaatggaattggaacttaataataaatacttgtttaagtacagtggctcttatttgaaggattatggctttaaaaaaatatatgatctgtctgataattcgcaaaaagaagataacaaaaaaattctagaaaaacttaaaacaaatgatgtgcttgacattaaagaagttaaaactgagcaaaaatttacgcagccgccaccaagatataatcaagctagcttgattcaagcgctggaagaacttggtatcggaaggccttctacatatgtaactataatatctaagattctagatagtaattatgttgatccagaaaagaataacttccaacctacagcgctcgctaaagttgtttgcgatacactcattaaacattttggtaatgacttagttgattttgagttcaccgcacgactagagaattatcttgatgaaattgcaaatggtgaaaaagagacaattaactgcatcaaagatacatatgagccatttagagcaaacttagagaataaacttgaaacggtagatatttctgaactaagagaactgaaagatttaggtgtacatccagatactgggagacctgtaaccgtaagactgacgaagtatggtcctacgatacagatgggaacaagggaagat

SEQ ID NO: 293649 - DNA, 1720 bp, Unknown
  Bacterial polypeptide expressing nucleotide sequence isolated from the Sargasso Sea
tttggacagagtagttggctatgatctttcaggaatgctttggaaaaaaattggaagttatgggaagttatcagctggacgagttcagtctgttgctgttcgtttagtagtcgaaagagagattggtataaaagcatttactccagaagaatattgggagattgaaattgagatcaaacatgatgataggaatataagatttaaattaaatacaaagaaatcaaacctagagataaaaaatgaaagtaaagctctagaattagcaaataacttccaaggtgcagatttagaaataacagaaaatgaaaaaaagaaaagaaaagtttctgtaaggcctccatttataacatcgacgatgcagcaatcagcaagttcatttcttggttatagtcttaaaaagactaacaagctagcacaagatctttatacaggaggatatataacatatatcagaactgattcgcctagtataagtgttcttgcacaaaataattgtaaacaatatttactagatacttacggtgaagcctatagcactccaagaaactttgcttctaagtcttcaaactctcaggaagctcatgaagctataaggccaacagatgtaactttcaagacagatgaactttcattatccgaagatcataaaaaactttataaattgatatgggatagatttgttgcgtcacaaatgccacaaccagaattaactgtaaatagtattaaagccaagattgataataatatttttgaaacttcattaagtagcattagttttgatggtttttataaggtaatgccgccaagtaaatcaagtggttatgttgattataaattaaccggactagatgtaggtattaataaaacaatagagttagtagataagtcacaacattttactaaacctccttcaagatattcagaggcaagcttagtcaaagaattagagaagaaggggataggcagaccttcaacataccaagagactattacaactatccaggataggggttatgtgaggagtgaaaataaaagactttatgctacaaaaatagcgaatcttgttactgatagattacaaaactcttttaaaaatatcatggattacggttttactgctgaaatggagaaaaacctcgacaaagttgctgaaggagaagaagattggaaaaaactgcttgaagactttaataaagtatttgaagacgctaagagcaaggcagatgaatctatggaaagaaatcctccaatagatacagatgttgaatgtccatgcggaaaaggtaagcgcatgcatttaagaacaaaccataatggtcaatttttagggtgtgaaggatacttacttgaaggagatgaacagtgcaaaaagactagctctttaatatctgtagatcttttttcagacgatgacgataaagaagcagaaagtatatttaataaaactaagtgcgatttatgtggttcaactatggatggcttcatcatagatgaaaataaaaagctacatatttgttcaaactccccaatatgtcctggtactaaatttgagaaaggccaatttatcaaacctaaaaatgcagatgaagaattaattgattgtcataaatgtgatgcaaaaatggaaatgaaactaggaagatttggaaaatacttcagctgccaggacgaatgtggtgccactagacaaatcatgaagaatggagaattgaagcctatt

SEQ ID NO: 293650 - DNA, 376 bp, Unknown
  Bacterial polypeptide expressing nucleotide sequence isolated from the Sargasso Sea
atgaatttggtcattgtagaaagtcctgctaaagctaaaactataaataagtatttaggtgatgaatataaagttctagcaagttatggtcatataagagacttaccttctaaaaatggttcagttgatccagaccaagattttaaaatggaatgggaagttgacagtttttcaaaaaaatatcttaaagaaattactgatgcagcaaaagactcatctaaaattatattagctaccgaccctgaccgtgaaggtgaggctattgcctggcatgtaaaagaatatctaaatgaaaaaaaacttttaaaagataaagaaattgaaagagttgtttttaatgagataaccaaaaaagctgtaatacaggggaattgaa

SEQ ID NO: 293651 - DNA, 1729 bp, Unknown
  Bacterial polypeptide expressing nucleotide sequence isolated from the Sargasso Sea
ttcaaatattgaagaaaaaattaaaaactccaatcctaaaccaccatttacaacatcgacactgcaacaagaagcagctcgaaaactacggtcttcggctagaaaaacaatgcgaactgcacaaagactttatgaaaatggtttcattacatacatgcgaactgactctacttttctttctgatgaaggagttaaaggatctcaaaatgagattatatctatgttcggaaaggaatatttacctgaccaacctaaagtttataaaacaaaagtaaaaaatgctcaagaagcccatgaagcaattcgacctgccggaattaattttgcttcagttgaacaagtaaaaaatacaatagatgaagatgcagctaagctttatgatctaattcgtaaaagaactttagcatctcaaatgaaatccgctaaaataaaacaaatcgctatttcgatagaaaatcaacaatcattatttagagctaatggtaaaaaaattatattcccaggatatatggcagcttatgttgaaagcacagataaaagaaatggagttactgaagatcaggagaccattctgccagatatgacaaaaggtcaaagcttaaattgcgatgagcttgtttcagatgaacattttacaaagcctcctgcaagatttaccgaggcatctttagtaaaagaattagaagctcaaggtataggtcgcccatctacttttgcaaatataattgatacaatcgtttaccgaacctatgtccaaagggatcgcggaaaacttaccccaactttccttggtgttgcagtaacacaactattagaaaaccactttacagaactagttaatactcagtttactgcaaatatggaagatgggttagatgcaatttcaagaggagaaaaagatgcgactcctttcatgaaagatttttattttggatctgaaaaccaaacaggtcttgagactatgcttgatgataaagttgatatagggaaagcatgctcagttcaatttgaaaatgacggcgaaccaattgaaattcgtgtaggccaatatggaccatttgttcaacaaggtgaaactagaaaagctattccacaaaatatttttcttggtgatattaatgttgacaaagctttagaaatattaaatgaagaaataaatgaagacaaagaacttggaattgactcagaatctggagaaaaaatatttttaaagagcggcccatatggaccgtatgtccaattaggagaaactagtaaaaggaaagcaatccccaaaggtacagatctatctgaagttaatctagaatttggacaaaaattgattgcacttcctcggacattaggtttacatcctgaaacgaatgaagaagtgaaagccgattatgggcgttttggtccgtatgtcacagccgggaaaggtaaaaatggtcgtatcccaccaaatatgtcgccacttactatagaattaagtgatgctttagaactcataaaaaaacgttcaagtggcccccaagaattaagaactgtaggagatcatcccgaaacaggagaaacactaattctaaaagatggacgttatggaccttatatgaccgatggtaaagtaaatgcatcattgcccagagatgctgatcctgaaaagctctcattagaagaagccgtagaaattattaacaagaaacgagctgctccaccaaggaaaaaaaggaaaagggctaaaaagaaatga

SEQ ID NO: 293652 - DNA, 1749 bp, Unknown
  Bacterial polypeptide expressing nucleotide sequence isolated from the Sargasso Sea
gagaaatccgggaattcgaaccgaaagaatactggaaagtacgggccgattttgagggctttcatgcagaactgagtaaggttgatgggaaagtagtcaaaatccaaaacgatgaagaagcaaaccaggtgactcaatccatcagtgctggggaatgtgtgctcaaggaaatcgatgaaagagaagcctcaagaaatcctgcagcacccttcaccacttcaacactgcaacaggaagcatccaacaaactcggtttttcggtcaaaaagacgatgctcatcgcacagcagctttatgagggtaattttgaaattccggattacagcgggggtttgatcacctacatgcgaaccgattcagtgactctctcgaaagaagcattggcgatggccaacgaagtgatcgaaaaacgcttcggaaatgaattcattttggagaaaccaagatctttccggaaccgcaccaaaaacgcgcaggaagctcacgaagcgattcgtccggtcaacctcgaaatcctgccagatcaggtgatccctcatcttgaacgtgaccaggggaggctttatggcttgatctggaaaaggaccctggcaacccagatgaaagccgccaaaattgcgcgtacaactttccgaatcaatgcaggagaaaaatctgaatgtcagtttgaagcgaaaggtcagcagattctctttccaggatttctcaaagtctacatggattcttccagcgatgcccaatccgtattgggagaaaaggatcttcttctgccccgggttgagcagggtcaacgacttcctctgaaagatctgaatgcggaacagctttttaccaaaccaccacctcggtacagcgaagcgagcctggtgaaaaaattagaatcccagggcatcggcagaccttccaccttcgccccgacgatttccaccattcagaacagaggttatgttgaacttctggaagacaagcggctgaaaccgactgatatgggagaggtggtgaccgattttctcaccaaccactttaacgaaatcgtcaacctcggttttactgccaagattgaaagaaatttcgaccgcatcgcccgtggtgaagagggatggatggatatgatggaaggattctatcatccctttcatggacggattgaagaaaaaaaagaaacggtcacccgcgatgaagcggtaaaacgaagagtactcggaagtgatccggacagtggaaagccggttagcgtaagcattggccgctatggaccgatggttcaaatcgggacaagagaagacgtcgagaaaccaagattcgcatcacttccaaaaggttcaagcctgaccgaaatctctctggaagaagcccttgaatgcttcaaacttcccagaacccttggagagaatgaagagggtgaagagattcaggcgaatattggccgtttcggaccctatgttcggatcggcaaggaattcttttccctgcccaaagacttgggacctatggatgtcgaactggatcaggcactggaaatcattcgtgaaggacgcgaagccaaggcaaagaaaacccttcatcagtttggggagatccaggttttaaatggacgttacggaccttatatcaaaaaaggcaaagacaactaccgcattccaaaaggaactgatgcggaaaccattgatgaggaaacctgtctccagatcatcaaagataaccctcccaccggaaaacgaagaggaagagcaaaaaaaggttcctgat

SEQ ID NO: 293653 - DNA, 1363 bp, Unknown
  Bacterial polypeptide expressing nucleotide sequence isolated from the Sargasso Sea
atggaatgggaaatagacactttttcaaaaaaatatttaaaggaaatatctgatgctgcaaaaaattcatcaaaaatcatacttgctactgatccagatcgcgaaggtgaagctatagcttggcatgtaaaagaatatttaaatgaaaaaaaattacttaaagataaagaaattgagagagttgtatttaatgaaattacaaaaaaggctgttactcatggaatagaaaacccaagacaaatagaacaaatgttggttgatgcttatatggcaaggagagcccttgattatcttgttggattcaatatttcacctatattatggactaaattacctggatctaaatctgctggtagggttcagtcagttgcactaaagttaataacagagagagaacatgaaattgagtcttttaatccagaagaattttggtcattaaatataaaatttagagatggtaataataaatatgttactgctagtattaatttgctagataacaaaaaaatagaaaaattttcctttaaaaataaagaagaaattaataaagctatatcaattttaaataaaaaaaaatttagtgtcacagatatttcgggaaaagtagttaatcgtaatccatctggtccattcacaacatcaacactacaacagacggcttctagtagattaggttttggggcgtcaagaactatgcagattgcgcagaagctttatcaaggtgttgaaattgaaggtgaaactataggattaattacttacatgagaacagatggaacaaatatatcaaatgatgcattaattacttttagggattatattcaaaatgaaatcggtaataaatacctgcctgaaaagtctttaagttactctggtaaaaaagcaaaaaatgctcaagaggctcatgaagcaataagaccaactgatattattagaacacctgaaagtataaaaaaatacttaagtaccgatcaaaataaattatacaatttaatttggtctagagcattatcctctcagatggcttcagctaaatttgatagaaatacaattacaatcacatcagacgataatggcactatttgtaaagctagtggttctgttttaaaatttgatggatttttaaaaatttacaataatgtcagtaaagacgacaacgaagatattttaccagatgtatctaaaggacaaattaatattgaagctataatcgatgagcaacattacactcaaccaccaccgagatattctgaggctagtttagtaaagaaactagaagagttaggtattggtagaccttctacttatgcaagtattatatctacaattgctaacaggggttatgcagaaattttaaataaaa

SEQ ID NO: 293654 - DNA, 1558 bp, Unknown
  Bacterial polypeptide expressing nucleotide sequence isolated from the Sargasso Sea
gactaataaagattatgatcgaatagtatttcatgagataactaaaaacgcaattttgaatgcattagatagtcctcgagaaataaactataatcttgtaaatgctcaacaagctagaagagtcttagacagattagtaggttatgaattgtctccagtactatggagaaaagttaagacaggcctttctgctggaagagttcagtccgtttctgtaagacttattgttgaaaaggaaagagaaattaaaaactttttgacaaatagtactttcaagtcaattggaatttttaaaaattcaagtggagtcaacctgagggctgagttaaacaataaatttgattctagtgaagaagttaagttgttccttcaaaaaaatattaattctacatatactgtatctaacgtagaaaaaaaacctgctaagaaatctccaacgcctccttttaccacatcaacacttcagcaagaggcttcaaggaaactaggttttggtgttacaaggaccatgtcaactgctcaaaaactttatgaagcaggattaataacttatatgagaacagatagtgttaccatatctgaggaagcaaaaacatcaattttatcaaaaattgagagtaaatatggagatagttatgtaaatctgaggaattataaaaataaaaataaatcagcgcaagaggctcatgaagctgttagaccaacagatatttcggttgaagatatatcttcagattatgatcagcaaagattgtatcaacttatatggagaagaacaatttcctcacaaatgtcagatgcacaaatagagagaacagttgtaaatattgactcaaactcttttgatcaaatatttattgctagaggtgaagtaattaaattcgatggttttctaagagtatataatgaaggaactgatgatgaggtacaggaagaaaaagggattctaccacaattaaatgttaatgagaatcttgacttagtcaatattatgtcaagagaatcattctctagaccaccatctagatataccgaagcatctttggtgaaaaaattggaagaactaggtattggtagacctgcaacttatgctaccacaatatcaacaattcagaacagaggttatgtatctaaaggtgagaatgaaggtcaagaaagaacatacaaatccatagaattaaaaaatggagatattattgagagtacttcaactgaaaagactggttctaacaaaggtaagcttgtacctactgatattgggataattgtaaatgactttctagttgataatttcaataatattcttgactatggatttacagcagaagttgaaaagagttttgacaaaatagctgaaggaaatcaaaattggactgatattataaaacaattttatactgattttcatacaaatgtaaatattgtaaaggatacagctgaaaggcaatctggtgaaaaaattttaggagaagatccagtttcaggaagagttgttaaagtgagacttggaaagtttggtccaattgctcagataggaacaattgatgatgaggataaa

SEQ ID NO: 293655 - DNA, 1255 bp, Unknown
  Bacterial polypeptide expressing nucleotide sequence isolated from the Sargasso Sea
catgtcaaaacctttagttattgttgagtcgccaacaaaagtaaaaactatttctaagattctaggttctgaatatatcgttaaatcaagtgttggccacataagggatcttccacgtaatgctaaagctatacctgctagctattccaataaggaaatcttgtggggtgctgttaagcctaagaattttgagaatatatatgtaatacctgaagacagaaaagcaattgttaaagaactaaaagacatagcagatgaagcgtcggatgtatatctagcgactgatgatgatagagaaggtgaagctattgcatatcatttgatggaatcacttgaactcaaaagtgaaccaaagagaattaagttcaatgaaattacagaagcggcagtaacaaacgcaatcaataatcctgaaactattgatattggcaaatttaaatcttatgaggctaggagaactcttgatcggatgattggatatgaaatttcaccaaaagttagggatcttggaggagcattcatctctacaggaagagtacagggtcctgctatcaggttaattgttgagagagaagaagaaagactaaaatttgtaaaatcaaaatattttgaaatcaaggcattatgtaaaagtaatgattatgaatttacagcaaatcttaaaagagttagtggaaagaggttggcttcatcttcggattttaatgaaaaaggaaataagactagtaaggataaaaaatacctagatgaaaatgaagctaacgaaatagttagtatattaaaaaatcaaactgcatcaatctcatccattaaagagtcgtctcggagtggtaagcctccaaagccatttaaaacaacaagtttacaatcttccgcaagaagtaatttaggttttcagccaagaaaaactatgagtgtggcccagcgactttaccaagaaggtttaattacatatatgagaactgattcaattaggttatcagatgtcgcaattaaagcctcaagagcgtatattaaggataatttttctgaaaaacacttacctgattctccaaatctatatggtgacagcaaaaatgcgcaagcagctcatgaagcaattaggccttctggtgaaagctttactactcctcaagaattactgaaaacacataaagaggacagcgatgagtacaagctttacagtttaatttttaacacaacagtcgcatctcagatgactgatgctcaaggaattacgaaaactattgaaata

SEQ ID NO: 293656 - DNA, 2073 bp, Unknown
  Bacterial polypeptide expressing nucleotide sequence isolated from the Sargasso Sea
gctgccgcctgtgcccaacaccctcgtcatcgtcgagagccctacgaaagcccgcaccatccgcggtttcttgccgcgcaccttccgtgtggaggcttcgatggggcatgtgcgcgatctccccaacaacgccagcgagatccccaccagccacaaggctgagaaatgggccaaaaccggcgtcaatacagagaaagactttgaaccgctttatgtggttcccaaagacaagaaaaagatcgtcaaggagctcaaggacgcgctgaaagcggctgatgagctgctcctggcgactgacgaagaccgggaaggggaatcgatcagctggcatctgctgcaactgctgaaccccaaggttccggtcaagcgcatggtgttccacgagatcaccgaagaggcgatcaagcgcgccttgggcgaaacccgtgagctcaacatggagctggtgcatgcccaggaaacccggcgcatcttggatcgcctggtgggttacacggtttcgccgctgctctggaagaaggtcgcctgggggctctcagcgggccgcgtgcaatcggtggccgtgcgactgctggtgcagagagagcgggcccgacgggctttccgcagcggcagctactgggatctcaaggcccagttgaagcatgagggcatcagttttgaagccaagctcagccatctcgctggcgaacgcatcgccactggtggcgatttcgacgaaagtaccggtgccatcaaggctggtaccaaggtcaagctgctcagcgaagccgatgctcaagggctgctgaaagccatcgatggcaagacctggtcggtggctgaggtggaggaaaagcccaccaccaggcggccggcgcctcccttcaccaccagcaccctgcagcaagaggccaatcgcaaactgcgcctctcagcccgcgaggcgatgcgaaccgcccagggcctctatgagcgcggctacatcacctacatgcgcaccgactcggtgcatctcagcgagcaggccatcaccgctgctcgcagttgtgtttccgataagtacggggccgaccacctcagcccgcaaccacggcaatacaccaccaaaagtcgcaacgcccaggaagcgcacgaagccattcgtccggctggctccagcttccgtaccccggctgaatcaggcctcaaggggttggatctctcgctctacgaactgatctggaagcgcaccgtggccagccagatggccgatgcgcgtctgaccatggtcagcgcccagatcgatgtggagaaggcccgcttccgggccagcggtaagcgcatcgatttcgctggtttcttccgcgcctatgtcgagggcagcgatgacccagacgcggcgctggaaggtcaggaggtgctgctgcccaccttgcgtagcggcgatcaccccagctgccagagctgtgaaccccacggtcaccaaacccagccccccgcacgctttagcgaagcggccctggtgaagatgctggaaaaagagggtattggtcgtccctccacctacgcctcgatcatcggcaccatctgcgatcgcggttacgcgaccctgcaaaacaattccctcactcccagctttacagcctttgccgtgacggcgttgttggaggagcacttccccgacctggtggatcccagcttcacggcgcggatggagaacaccctcgatgagatctccaatggctcggctgaatggctgccgtacctcgaccacttcttccgcggagagaaggggctcgagcagcaggtcgccaaacgcgagggggatatcgatccggtggcttcccgcaccatccagcttgatgacctgccttgcgtggtgcgcattggccgctttggtgcctatctcgaagccaagcgtcctggtgaagacggtgaagaggagctgatcaaggccaccctccctcaggatttgacaccagcggatctagacagcgatcaggccgaactgctgctcaagcagaaggccgatggtcccgaaagcctcggtgaggatccagccaccggcgaggcgatttatctgctctttggccagtacggcccctatgtgca

SEQ ID NO: 293657 - DNA, 1673 bp, Unknown
  Bacterial polypeptide expressing nucleotide sequence isolated from the Sargasso Sea
tatcaccagtactctggcgaaattgcctggctcaaagtctgcaggtagagttcaatctgtagcattaagaataattagtgaaagagaattagaaatagagaaatttgatcctgaagaatattggtctatccaaggtaaatttttaaataaagataaaaaagacattaatgctcgtttaactgtatttgaaggaaataaaattgataagcttgatattaaaaatgaaaaacaagctactaatatttatgacacaattaaaaattcaaaatttaaagttggtaatattataaaaaaagaagcaaaaagaaacccttacgctgcttttacaacttctacgatgcaaattgagtcaagtcgtaaattaggcttaagtgctagccaaacaatgcgtactgcacaaagactttatgaaggtactgaaatcaatggtgatactacaggtttaatcacttatatgagaacagacagtgtaataatgtctaatgaggctattaatcaagtgcggagttttgtaagtgaaaactatggagctgaatatcttccagataatcctagaatttataaatctaaagcaaaaaatgcacaagaagcccatgaatgcataagaccaactaatattcaattaactccaaaagatattaagcattatatcacaggagaagagtttaaattgtatgaaataatttggcaaagagcagtgtcttcgcaaatgtctagtgccattttagatcaagtagcagttgatataatgactcaagatcaacaaatcagtttaagagcaaatggctcaactataaaatttccaggtatgtacaaggtttatcaagaagcaaaagatgatgacaaagatgaagaaaaagaaacaatacttcctgcaatgaatgaaggggaagaattggatctaaagaaagtaaataaaaatcaacattttacaatgccccctcctcgttacacggaggcgagtttagtaaaaaaattagaagaattaggaattggcagaccatcaacatatgcttcaattattaaagttttacaagatagagactacgtcatgttggataataagcgatttaatccccatgatagaggtcgtatcgtatctatatttttagaaaaatattttaaccaatatgtagaatatgacttcaccgcagatctagaaaatcaattggatgagatttctgatggaaaattagattggaaagaagttttaagtaaattctgggaaacttttaaaaaactatgtgatgacactgtaggcaaatcaaatagagaagtaattgatgtacttgatgatgcattaggtgctcatttctttcctccagaaggcaaggatgaaagtagaaaatgcccaacttgtgaaaatggtaggctaggcattaaagttgggaagtttggaggatttgttggttgttctaattatcctgattgtaaatatactgttcaatttaatcaattaaatgacaaagatggagcggctttaagtggtccaaaagaaattggcatttatcctgaaactaatgaaatgattactcttcgaaagggtccgtatggttattatatgcaggtgggagaaggaacacctgaaaaaaaacctaaaagagtatcaatcccaaaaaattttgaaccagatgaaataggtttaaatacagctatacaattattaggattgc

SEQ ID NO: 293658 - DNA, 2116 bp, Unknown
  Bacterial polypeptide expressing nucleotide sequence isolated from the Sargasso Sea
tatgatcctctatattgctgaaaaaccaagccttgggcgtgcaattgccgatgtgctgcctaaaccccacaaaaaaggtgacgggtttattgaagacgcccagggcaactgcgtgtcttggtgtgtgggacacttgctcgaacaggccgagcccgatgcctataatcccgagtttaaatcgtggaaatttgagcatttacccatagtacccgagaagtggcagcttaaacctaaggccgcgacccgcagccaactcacagtgcttaaaaagctggtgaaacaggccgatacgctagtgaacgctggcgatcccgaccgcgaagggcagttattggttgatgaagtgatcgcctatttgggtgtgactggcgataaattacagcaaacgcagcgactccttattagcgacttaaacccacaggcggtgaaacgtgccctgtcgcagttacgcagtaaccgtgagtttattcctttgtcgacctcggcgcttgcccgaagccgcgccgattggctctatggcatgaatatgacgcgggcctacaccatccaagggaaaaaggtcggctatcagggcgtactatcagtcggtcgagtacagacaccactgcttgggcttatcgtgcgccgcgatgaggaaatcgcgaacttccaatctaagcctttttatgaggttctggctcacttagtgacggacaaagatcaggctttcacggcgaagtggcaacccagtgaagcctgcttaccctatatggatgaagaggggcgcgtgctcgctaagggtttagcgcaaaatgtggtgcgccggatcaccgataaacccgccaaagtgacccagttaagcactaaggataagcagcagaatccgcctttaccctacagtttatcggcgctgcaaatcgatgccgccaagcgctttggtatgagcgcgaaggacgtgctcgatacctgccaaagcttatacgagcgccataagctaatcacctatccacgctcagacagtcgttatttgcccacggagcagcatgcgcttgcaagcggggtattagcggccatcatgggcggtgcgcccgagttagtcgctcacgctgaggcgccgaatcctcggcttaaatctaaggcgtgggatgataaaaaagtcgatgcccatcacgccattattccaacggaaaaacagcccaatctagctggtttaagccagcgggaaagacagctttatctgcatattgctcgccagtatttggcacagttttaccccgcctattgctacagtgaaactgcggtcgaggtgacgatcgaaggtggcctttttaaaactaaggcaaaacaggataagtccctcggttggaaacaactgtttgccagagaagagaacgaacgaaaagacgcatcatccacagcgaattttgcgcaaggcgataaggacgcagatgaaggggaatatgttggtcagttaccgccgcttaccttagggcaagtgcttcattgtcaccaaggtgaattagtcgagaagcaaactcaaccacccaaagcctttactgatgcgaccttgctgagtgcgatgacgggaattaaccgttatgtgactgacccagagatccgcaaaattttaaaggaaaccgatggcttaggtacggaagcgactcgcgcaggcattattgaactgctatttaaacggggctttattcagcgtcagggcaagtcgattgtggccactgaggtgggcaagggcttgatcaatagcttaccccttagcgccacaacgcccgatatgacggcgctgtgggaggcaagtctaaacggtatctgccataaagaaatctcatatcaaggctttatgcaaccactgctggggacgctaaataacttaattgaaaatgcaggcgctcaattaccctcagccctcaatggcttaaagggacagggctttaagcgtgccgcgactaaaaagtccggttatcgaaaagccggaaccagaggcgctgcaggcgtgaaaaaagccggcactgggcctaaaatagggaatgctagcaattcagccgcagcatcttccacctccacgacagctaaaccgacggctcctaggcggcgaacgagcaaagtgcctgcccaagcttga

SEQ ID NO: 293659 - DNA, 1674 bp, Unknown
  Bacterial polypeptide expressing nucleotide sequence isolated from the Sargasso Sea
tttaagcataaactttatagatcaaaataatcaaaaaattacagcaagtattagtcaattagatgataataaaattgaaaaattttcattcagaaataaagaggaaataaacaaagctatagctagtgtaaataaaaaaaaatttagtatttcagatatttcaagcaaaactgtaaatcgaaatccatctggaccatttactacatctacacttcagcaaactgcatcaagtagattgggttttggtgcatcaagaacaatgcaaattgcacaaaaactttatcaaggtatcgagatagaaggtgaaacaattggcttgattacttatatgagaacagatggaactaatttatccaaagatgcagtgtcagcttttagagattatatccaaaaagaaattggtaacgaatacttgcctaatgatgctttaaattattctggaaaaaaggctaagaatgctcaagaagctcatgaagcaattagacctacagatataattagaacaccccaaagtgttaaaaaatatctaagtacagatcaaaataaactatatgatcttatttggagtagagctttatcttctcaaatggagtctgctaagtttgatagaaacaccattacaataacttcagataataatgatactatttgtaaagctagtggatcagttctcaaatttgatggatttttgaaaatttataacaatcaaagtaaagatgatgacgaaaatattttaccaactgtttctaaaggaccaattaacatagaagcattattagatgaacaacattatacgcaacctccgccaagatattccgaagctagtttagttaaaaaacttgaggaattgggtattggaagaccatcaacttatgcaagtattatttcaactattgctaatagaggatatgcggaaattttaaataaaaggttttttccaactgatagagggaagttaatttcagcttttttagaaaaactattttcaaaatatgtagattataattttacagctggcctagaagatcaacttgatgaaattacaactggaaaagaaagttggattaaagttttagaacttttttggaaagattttaataataacgtttcagaggtaaaagaaaaaagaactagagaggttttagatttactcaatgatagcttaggtgaattaatttttgataaagataatgatggaaatgtagttagaaagtgccaattatgcaattcaggaacactaagtttaaaaaatagctttagaggtggtgctttcatagggtgttcaaattatcctgaatgtaagtttacccgaccattatctaaggcaaaagctgcagcacaggcacaattagctgaaccaaaattgattggaaagcatgaaaatggtaatgacatatatttaaaaaatggaagatttggcccatatcttcagtatgaaaaaattcaaacagaagaagaaattgaaaaaactaataagaaaaagaaaaaaactaaaaaatctaaatcggatgttaatgatcttttaaaaaatatttctatacctaaagggcttgagttagatagtattgatttggaaaaagccaaatttttatgttcattaccaaaatctttaggaataaatcctgataatcaaaaagaaataacattaaatacaggaagatttgtccttattaa

SEQ ID NO: 293660 - DNA, 644 bp, Unknown
  Bacterial polypeptide expressing nucleotide sequence isolated from the Sargasso Sea
aatgccatcaagtcttgtaatagtagagtcaccagcaaaagcaaagactatttctaaatatttaggtgatgaatatatcgttaaatcaagtgtcggccatattcgtgaccttcctaaaaaaggtattaaatcaggcgccaaaagaaatgttattcctaaagacctgccagctgatgaaaaggcaagattaaaaaaaatcaatgaaagaaaaagattaataaatcggatgggagttgatcctgatagtaattggaaagctacgtatcaaattattcctgaaaaagagaaagtaattaaagagcttaaaacctctgctaagaaggttgaaaatattctactagctacagacttagatagagaaggggaagccattgcttggcatttaaaagaggcgctaggtccagaaaaatataattttcaaagagtaagatttaatgcgattaccaaggattcaatccttgaagcattttctgatccaaaggagatcgatcagaaccttgtcaatgcacagcaagccagaagatttcttgatagagtggtgggatttgagctttctcccttactttgggcaaaaattgcaaggaatttatctgccggaagagttcaatcagttgcactaagattattggctgaaaaagaaaaga

SEQ ID NO: 293661 - DNA, 466 bp, Unknown
  Bacterial polypeptide expressing nucleotide sequence isolated from the Sargasso Sea
aatgaatctcgtcattgttgaaagtcctgcaaaagctaaaactataaataaatatttgggtgaaaattataaagttttagcaagctatggccatattagagatcttccatcaaaaaatggctccgttgatccagatcaaaactttaaaatggaatgggaagttgacagtttttctaaaaaatatcttaaagaaattacagatgcagcaaaaaattcatctaagattatattggctaccgaccctgatcgtgaaggtgaagctattgcttggcatgtaaaggagtatttaaatgagaaaaaacttttaaaagataaagaaattgagagagttgtctttaatgaaataactaaaaaagctgtaatacatggaattgaaaatcctagacaaattgaaccactattggtcgatgcttatatggctagaagagcattggattatttagttggttttaatatttcaccaata

SEQ ID NO: 293662 - DNA, 1369 bp, Unknown
  Bacterial polypeptide expressing nucleotide sequence isolated from the Sargasso Sea
atttcatcaaaaattgtaaacagaaatccatctggtccttttactacatcaacacttcaacaaactgcatctagcagattaggttttggtgcttctagaacaatgcaaatagctcaaaaactttatcaaggtgttgaaatcgatggagatacagttggtttaattacatatatgagaacggatggtactaatttatctgtagatgcagtgtctgatttcagaaattttattgaaaaagaatatggaaggcaatatttaccaaaaaatccaaataattattcaggtaaaaaagcaaaaaatgctcaagaagctcacgaagcgataagaccaacagatattaatagatcacctgatatagttaaaaattatttaagctctgatcagctaaaattgtacaatttaatatggagtagagccctatcttctcaaatgcaaactgcaagatttgatagaaacactataacaataacatctgatgacaacctaactatctgtaaagctagtggatctgtattaaaattcgatggttttttaaaagtatatcctagcccaagtaaggatgaagatgaagaaattttacctgaaatgtctaaagggccaattaatattgaatcgttaatagatgaacagcattttactcaaccaccaccaagatattctgaagctagtcttgttaaaaaattagaagaacttggaattggaagaccttcaacatatgcaagtattatttctacaatttcaaatcgtggctatgctgaaatattaaacaaaagattttttcctactgatcgtggaaaattaatatctgcttttttagaaaaattattttctaaatacgtagattataattttacggcaagtttagaagatcagttagatgaaattacaagtggaaaagaaagttggataaaagttttagaaatgttctggaaagattttaataacaatgtttcagaagttaaagaaaaaagaactagagaagtattagatttattaaacgaaagtttaggtgcattaatttttgataaagataatgatggaaaaatagttagaaaatgtaaattatgtgaaacaggttctctaagtttaaaaaatagttttagaggaggtgcttttataggttgttctaattaccctgaatgtaaatttactagacctttatccaaagcaaaggctgcttctcaagcgcaattagctgaacccaaattcttaggaaaacacgagaatggaaacgatatatttctaaaaaatggaagatttggtccttatctccagtatgagaaaattttagatgataaaattgaaaatattattactaagaaaaaaaagaaagctaaaaaaaataaatcaaatgtaaatgaacttttaa

SEQ ID NO: 293663 - DNA, 1378 bp, Unknown
  Bacterial polypeptide expressing nucleotide sequence isolated from the Sargasso Sea
aattcatttagatgggtatatattttctgcacaggtcgagaggttgtatttgatggtttcacgagagttgttaaagcaaaatcggatgataaagaatctaatatcttaccctcgcttgaagtcaatcaacaattaatcctcaaagatattgataataatcaaaaatacacaaagcctccggcaagattttcagaggctgcattagtaaaagaactggagaagaaaggcattggaagaccgtctacttacgcaaatattatttcaacaatacaagatcgtggatatgttgaaattcaaaatagacgattttttgtaaaaaaaattggaatgattgtcacagataggcttgtgagtagttttgatgacatcatggattatagcttcacagctaattttgaagatcagttagatagaattgcaaatggtgagctaaattggaaagaagttttaaattcttattattcagctttccaagatgatctttcttcagcaatggatgaagaaaatggaatgtctcctaatcttcccactatgacaaatattaattgtccagaatgcaaaattaataaacttacaataagaaatgcaagcaatggtgtttttcttggatgtgcaggctatagcttgccagctgaaatgcaatgcaaaaaaacattgaatcttatttcaggcgatgaagcggtaagtattgatgatcaagaggaagcagaacatttagttactaaacgacgttgcccaaagtgcgacaccagcatggataactaccttttagatgaaaatcataagctgcatgtttgctcaaataatcctgactgtgatggatttgaagttgaagagggagcctttaaaatcaaaggatatgatggtcctaccttatcatgtcataagtgtggttcggagatgcaacttaaaacaggcagatttggtaaatactttggttgtatgaatgataattgtggtgcaactagagcgcttcagcgaaatggtgagcctaaaccaatagttatggaacctattactacagagattccttgtattaaatttgaagatatatatttgttaagagatagcatgaaggggctgtttttagctgctagtaagtatccaaaaaatagagaaacccgagcgccatctgttgaggagttcaataaagttgtaactgaggaaatattgctagatgcttgtaagtatcttgaagatcaagaaaaacatacacatttactatttgctcctaagcatgatactgacggaaatccatatattattcgatataacaaggtagaagatactcattatcttgcttcagaaaaggacggaaaaaagactggcaacactgcatcgcataatggtgaaaaatggatcgaagtttctaagtagc

SEQ ID NO: 293664 - DNA, 2563 bp, Unknown
  Bacterial polypeptide expressing nucleotide sequence isolated from the Sargasso Sea
atgaatcttgtaattgttgaaagtcccgcaaaagctaaaactataaataaatatctaggttcagattacacggttttggcaagttatggtcatattagagacctgccttcaaaaaatggttcagttgatccagaaaactcttttaaaatgatctgggaaatagacagtttctcaaaaaaatatttaaaagaaatcacagatactgcaaaaaactcagaaaaaattattcttgctactgaccctgatcgagaaggtgaggcaatagcttggcatgtaaaagagtttttaaatgaaaaaaaacttcttaaagataaaaaagtagaacgtgtagtttttaacgaaataacaaaaacagctgtaacaaacggtatagacaatccaaggaatatagaaaatgaacttgttgatgcatatatggcaagaagagcgctagactatttagtaggttttaatatatcaccaattttatggacaaaattaccaggatctaagtcagccggaagagttcagtctgttgctcttagattattaacagaaagagaacatgaaattgaagtttttaaaccagatgagttttggacacttaacttaaattttttaacaaaagaaaatctaaatataaatacatctattactcaactagatgataaaaaaattgaaaaattttcatttaaaaataaagaagatattaataatgctttagatttaattaaaaataaaaaatataatattacagatataatatctaaaatttatacacgaaacccatctggtccttttacaacttctactttacagcaaacttcatcaagtaaactgggttttggagcctctagaacaatgcaaatcgcccaaagactttatcaaggtattgatattgatggagaaactgttggattaattacttatatgcgtacagatggaactaatatatcaaaagatgctgtagctacttttagagatttcattactcaaaattatggtgaaacatatttgccacctgcccctttaaattattcaggcaaaaaagccaaaaatgcgcaagaagctcatgaagctatcagaccaacagaaattggtagagtccctgaagatatgaaaaaatatttaagcacagatcaatacaaactttataacttaatatggtcaagatcattatcctcacaaatggaatcagcaaaatttgatagaaaaactataacaataacatctgaagataataaaaatatatgtaaagctagtggttcaactttaaaatttgacggttttttaaaagtttcaagaatagatgaaaataaagatgatgaaaatatattaccagaagttggtaaaggtgaagtagagtttaatgactttacggatgaacaacatttcactcagccaccaccaagatattcagaagcaagtcttgttaaaaagttagaagaattaggaattggacgaccttcaacatatgcaagtataatttcagttatttcaaatagaggttatgccgacatagaaaataaaagattttttccaacagatagaggtaaattgctctctgcttttcttgaaaaattattctctaaatatgttgattatgattttactgctaaattagaagatcaattagacgacataacgtctggtaaagaaaattggattaaagtcttagaggaattttggagagattttaatttaaatatatcagatgttaaagaaaaacgcacaagagaagtcttggatatgcttaacgaaagtttgggctcattaatatttgaagtagacaaagatggaaaaattaatagaaaatgtaaactttgtaatagtggtcaattaagtttaaaaaatagttttcgtggtggtgcttttattggatgttcaaattatccagattgtaaatttacacgacctctttcaaagtctaaagcagctcaacaattgactttagcggaaccaaaattacttggtcaaaatgataatgggaaagacatatatttaaaaaatggaagatttggtccctatcttcaatatgaaaaagaattaaatgatgttgaaaaaactaaaaagaaaaagaaaaaaataataaaagaagataataatatgaaaaacgtatctatacctaaaggaattgatattaaaagtatagatttagatagagctaaatatttatgctcacttccaattagtttaggtaaaaaccctgaaaatgataaagatattacagtaaatgttggtcgttttggtccttatttaaagtgtgaaaataaatctgcacgtttagaaaatgttgaagaaatatttagcattggtcttaatagagccgtaactctaatagctgaggcaaaacctggaagaatttcatcatctttgattaaagatctcggtgaacatccagaggataaaaaaccagtaagaataatgaaaggtcaatatgggccttatattaaatacaaatctttaaacgctactatacctgaggaaaaagacccaattgaattaacaatggaagaagctcttattttaattgagaaaagaaaagagtacgataagaataaaaagaaaaagaaaggtaaataat

SEQ ID NO: 293665 - DNA, 439 bp, Unknown
  Bacterial polypeptide expressing nucleotide sequence isolated from the Sargasso Sea
aatgaacttagtaattgttgaaagtccagccaaagcaaagactataaataaatatttaggaaaagattatttagttttagctagttatggtcatataagagatttgccttcaaaaaatggatctgtcgatcctgagaataaatttcaaatggaatgggaaattgactccttttcaaaaaaatatttaaaagaaattacgaatgctgctgaagactcagataaaattattttagcaacagacccagatcgagaaggagaagctatagcttggcatgtaaaagaagttttagaaaaaaagaaattactcaaagataaaaatttggaaagagttgtatttaatgaaatcactaagaaagcaatacttgatgctatcaaaaacccaaggcaaattcatttacctttagttgaagcttacttagctagacgagcattagattat

SEQ ID NO: 293666 - DNA, 1297 bp, Unknown
  Bacterial polypeptide expressing nucleotide sequence isolated from the Sargasso Sea
gcagcaaaaaattcatcaaaaattatattagctaccgaccctgaccgtgaatgtgaagctattgcttggcatgtaaaagaatatctgaatgaaaaaaaacttttaaaagataaagaaattgaaagagtagtgtttaatgagataaccaaaaaagctgtcatacaaggaattgaaaacccaagacaaatagaacctcatctagttgatgcttatatggctcgaagagctttagattacttagttggatttaatatttcaccaatactttggacgaaactaccaggctcaaaatctgctggaagagttcaatctgttgctttaaaattaattactgaaagagaacatgaaattgaatcttttaaaccagaggagttttggactttaagtataaactttattgatcaaaaaaatcaaaaaattattgcaagtatcagtcagttagatggtaataaaattgaaaaattttcattcagaaataaagatcaaataaacaaggctatcgcaaatataaataaaaaaaaatttaatattacagatatttcaagtaaaattgttaatagaaatccatctggaccattcactacatctactcttcagcaaactgcatcaagtagattaggttttggtgcatctagaacaatgcaaattgcacaaaaactttatcaaggtatagagatagaaggtgaaacaattggtttgattacttatatgagaactgatggaactaatttatccaaagacgctgtgtcagctttcagaaaatatattcaaaaagaaattggtaatgaatatttgcctaaagatgcgttaaattattctggtaagaaagctaaaaatgctcaagaagctcacgaagcaatcaggcctacagatgttatcagaacacctcaaagtgttaaaaagtatttaagtacagatcaaaacaaactatatgaccttatttggagtagagctttatcttctcaaatggaatcagctaagtttgatagaaacactattactataacttctgataataacgacactatttgtaaagctagtgggtcagttcttaagtttgatggatttttaaaggtatacaacaatcaaagcaaggatgatgatgaaagtattttaccagatgtatctaaaggtcctatcaatattgaggcattactggatgaacaacattatacacaaccaccaccaagatactcagaagctagtttagttaaaaaactggaggaattaggtattggaagaccatctacttatgcaagcatcatttctactattgcaaatagagggtatgcagaaa

SEQ ID NO: 293667 - DNA, 1225 bp, Unknown
  Bacterial polypeptide expressing nucleotide sequence isolated from the Sargasso Sea
agataaaatcaaattaaaagaaattaatgccaggaaggcattaattagaagaatgggaattgatcctgataatgagtgggagacagagtgggaaactattcctggaaaagaaaaacagataaaagctttaaagaaggcagctaaatcggttgaccatatttacttggcaactgacttagatagagagggcgaagctattgcatggcatttaaaagaggcattaggaccaaaacatagctattcaagggtgcggtttaatcaaattacaaaaacggcaatattagattcattttctaatgctaacgaaattgatttagatttagtaaaagcttacagggcaagaagaattcttgatagagtaattggttttgagttatctccattgttatggaagaaaatagcaagaggattatctgcaggtagagttcaatcagttgcgctaagacttttagatgaaagagaaagatctattcaggcatttataccagaagagttttgggaaattaaattagatgtgaaatcaagtacagaagaaataataaaatttgatctttttagaaaaaaatcagacccgctattaaaaaaagcagatgctgaagaaattcaaaatcagattaatttggctgaattatcaattaatgagatttcaaaaaagcccattaaagttaaaccaaaaccaccatttattacttcaacattgcaacaatcagcaagtacaagattgagctttaatgtaaagagaaccatgctagttgctcagagattatatgaagctggatatataacttatatgagaactgatgcaccaagcttaagcaaggagtctataaatgatgcaagaaactatattaaagaaaatataggtgataaatatcttaccgatgctccaagaatatactcaagtacggagaatgctcaagaggctcatgaagcaataagaccaacaaacgcatatcttcaagtaaaagatttaatcaatttatctgatgaagaaaataaattatatcaattgatttgggaacggtttatagcatcccaacttccagatgcagaatatttatcaacttcagtaaagataaatgtaaatgataatatttttgtcgctaaaggaagagaagtcgtttttgatggctatacagcagttctgaaaaatacaacaaaagaagaagatattctgccatctttgtctgagggcgataaagtaggaaaagaaaaaatccatctt

SEQ ID NO: 293668 - DNA, 1771 bp, Unknown
  Bacterial polypeptide expressing nucleotide sequence isolated from the Sargasso Sea
atgtcaaaacctttagtaattgtagagtctcctacgaaagtaaaaactatatcaaaaatacttgggtctgaatatattgttaaatcaagtgttggtcatattagggatctacctagaaatacaaaatctattcctgctcaatatacaaaagaagaaatactttggggagctgtaaagcctaatgaattcgaaaatatttatgttatacctgaagacagaaaaaaagtagttaaagaattaagagaactagcagacaaagctcctgatgtttatctagcaactgatgatgatagagaaggagaagctatcgcttatcacttaaaagaagctcttgaacttaaaaaagaacctaaaagaataaaatttaacgaaattactgaacccgcggtattaaatgcaatcgaaaatcctgaagttatagatataggaaaatttaaatcctacgaggcaagaagaacccttgatcgaatgattggatatgaaatatcaccaaaattaagagaccttggtggtgcttttatatctacaggtagagttcaagggcctgctataagactcatcgttgagaaggaagaagaaagattaagatttgttaaatcaaagtattttgaaattgaagcaacatgtaaaacttcagatattgaatttgttgctaatttaaaaagtgtaaaaggaaagaggatagcttcgtcaaaagattttgataaaaacggtataaaaataaataaagataaagaatacatttcagaaaaagattgcgatgaagtattgaaaatactaaataatggttctgctaaaacatctaagataaaagagactccaagaagtggtaagccacctaagcctctgaaaactacaagcttacaatcttcagcaagaaacaatctaggatttcaaccgagaaaaacaatgagtgtagctcaaaagctttaccaagaaggattaattacttatatgagaacagactctatccgcctctcagacatcgcaattaaagcggctagaaaatatatatctgaaaactttacgaaagaccatctaccaactgagccaaatttatatggagataataaaaacgctcaagcagcacatgaagctattaggccttctggagatatttttactgagccaaaagaattgcttggaaaatataaagaagatagtgatgagtttaaactttattctttaatttttaatatatctgtggcttctcagatgacagaagccaagggagtaacaaaaagcatagaaatagaagtagaagatgacacttttggcccaatcattcttggaatttctggaacaacatggatttttggaggctatagagacttaattaaggatttaagtgaaaagtctcaagaattaccagatcttgctgaaggtgatttgataaatataataaattccaaatcagaagaaaaatttacgacacctccaaatagatactcatctacttcattgattaacaagcttgaagagctaggaataggtaggccatcaacatatgtttcaattattgaaagtattacttctgtgtttattaattctgaatctagtttaaaaccaagaattcttgcaattgcaatgattaataattttatgaaaccttattttgatttatacatagattatgaattttcaaaactaatggaagatgaattagacaaaatacttgaaagtaaaaatccagaagaggcaaaagtaaaatttttagaagaatcttacaataaaataaaaaaacatattgaaggatacgaaaatgcctgat

SEQ ID NO: 293669 - DNA, 2620 bp, Unknown
  Bacterial polypeptide expressing nucleotide sequence isolated from the Sargasso Sea
aatgacaaaatctttagtaattgttgagtctcctgcaaaggcaaagaccatttcgaagtacttaggacctgagtatattgttgagtctagcgttgggcatattagagatcttccaaagaaaggcggcactactagaacaagacttgttgtaccaaaagacctcagtccagaggaaaaagccagacaaaaggaaatcaatgctagaaaaagtttagtaagaaggatgggtgttgatcctgataatggatgggatgctaattggcaaataatacctgagaaagagaaggtgctgaaggctttaaaaaaagctgcaaagaatgttgataatatatatttagcaacagatttagatagagaaggtgaagcaattgcttggcaccttaaagaagctttaggacctcaaaaatacaattactcaagagtgagatttaatcaaattacaaaagatgcaattattgagtctttctctgatccaaaagaaatagaccttaatctggttaaagcatacagagctagaagatttttagataaagttattggttttgaattatctccattgctttggaaaaaaattgcacgaggcttatcagcaggaagagttcaatcggttgctttaagacttttagacgaaagagaaagatctatccaagaatttattccagaggaatattgggaaatttcgttttcagccactactaataataacgaaacaattacatttaatcttgcaactaaaaaaacagatccattactctcaaaagaaaaagttgaaacaataaaacaacaaatagaatcatgcaatttatcaataaatgagatttctaagaagccggtaaaagtcaaaccaaaggctccttttattacatcaacactccaacaatctgctagcacaagattaggtttcaacgtaaaaagaaccatgcgagttgctcaaaaactttatgaagcaggcttaatcacatatatgagaactgatgctcctagtttgagtaaagaatctataaaagatgctagaagttacattaatgaaaatattggagagaaatatcttaccaatgctcctaaaatttattctagtactgaaaatgctcaagaagctcatgaggcagttagacccactaatgcttatttaaagccacaagatgtaatgcatttatctgatgaagaatcaaaactgtatacattgatttgggaaagatttattgcctctcagatgcctgacgcggaatatttgtctacatctgcaaaggtttttgttgaggaaaaagtttttgttgcaagaggcagagaaatagtttttgatggatttacaaaaattcttaagagttcatcaaaggaggaggatattcttccaaatcttcaagagggcgattctctcaaaagagaaactattgacctcgaacaaaaatttactaagcctccctcaagattttctgaagcagcccttgttagagagttagaaaaaaaaggtataggcagaccatcaacttatgcaaacattatttcaaccattcaagacagaggatatgtagcaattgaaaataaaagattttttgtcaaaaagattggtcatattgttgcggaaaggcttatggagagctttgatgacatcatggactatgactttacagcaaaccttgaaaataatttagataaagttgcaaatggagatgctgattggcggagcattctagataatttttacagagcatttcaaaatgatcttaattcagcttctgatgaatatggtggaatgagacccggaaatattccaacagaaacaaatattacatgtccttgtgggaaaactaacatggtaataagaaattcttcgaatggtgtttttctgggatgttcaggttatcaaaattctggtgatgagaaatgcaaagaaacccttaatttgatttcaggcgatgaagcaataagcattgacgataatgaagaagtagaaaatttattaataaagaagagatgcccaaaatgtgaaactagtatggataattatttgattgacgaaaacagaaagcttcatgtatgtggaaaaaatcctgattgtgacggttatcttgtagaagatggtcaatttagaataaaaggatatgacggtcctacacttgaatgtcataagtgtggatcagagatgcaacttaaaactggaagatttggaaaatactttggatgcttaaatgacaattgtggggctacaagagcacttcaaaggaatggtgaaccaaaacctatcacaatggagccaatagaaattaaagatctaaaatgcataaaatgtgaggatcattatttactaagagacagcatgaaaggtttgttccttgctgcaagccagtatccaaaaaatagagaaaccagagctccgaaggtttcagaaataaatagtctgcgtgaagaaattattgaagcatgtaggtttttaccagataaagaaaaacatttatatctattagatgctcctgagaccgacaaggatggaaatccatatgtaattagatataacagaacagaagatactcattatgttgcttctgaaaaagacggaaaaaaaacaaaatggactgccacatattccaatgggcaatgggttgaaaatctaaagagttag

SEQ ID NO: 293670 - DNA, 648 bp, Unknown
  Bacterial polypeptide expressing nucleotide sequence isolated from the Sargasso Sea
tatgaatcttgttatagttgaaagtcctgcaaaagctaaaactattaataaatatttgggtgataactacacagttttagcaagttatggacatataagggaccttccctcaaaaaatggatctgtggatccagatgataaatttaaaatgatatgggaagttgatagtttttcaaaaaaatatttaaaagagataacagatgctgcaaaaaaatcagataaaattattcttgctactgatcctgatcgtgaaggagaagctattgcttggcatgtaagagaatatttgggagaaaaaaaactcttaaaagataagaaaattgaaagagttgttttcaatgaaattactaaaaaagctgtaactaacggaattgataatcctcgaaatatagaatctaatttagttgatgcatatatggcaagaagagctttggactacttggttggatttaatatttcacctatattatggacaaaactaccaggatcaaaatccgcaggcagagttcagtctgttgctctcagattgcttacagaaagagagcacgaaatagaacaatttaagcctgaagaattttggactttaaatgtaaattttaaaacctcaaatggtgaaactttaaattcaaaatattatattattaaata

SEQ ID NO: 293671 - DNA, 1832 bp, Unknown
  Bacterial polypeptide expressing nucleotide sequence isolated from the Sargasso Sea
taatttggctgaattatcaattaatgagatttcaaaaaagcctgtaaaagttaaaccaaaaccaccatttattacttcaacattgcaacaatcagcaagtacaagattgagctttaatgtaaagagaaccatgcgagttgctcagaaattatatgaagctggatatataacttatatgagaactgatgctccaagcttaagccaggagtctataaatgatgcaagaaactatattaaagagaatataggcgacaaatatcttaccgatgctccaagaatatactcaagcacagagaatgctcaagaggctcatgaagcagtaagaccaacaaacgcataccttcaagtaaaagatttaattaatttatctgatgaagaaaataaattatatcaattgatatgggaacggtttatagcatcccaacttccagatgcagaatacttatcaacttcagcaaagataaatgtaaatgataatacttttgtagctaaaggaagagaggttgtttttgatggttatacaacagttcttaaaaacacagctaaagaagaagatattctgccatctttgtctgagggcgataaagttcaaaaagaaacaattcatcttgaccaaaaatataccaaaccgccatctagattctctgaggcagcattggttagagagttagaaaagaagggaattggaaggccttccacatacgcaaatataatttctactatccaggataggggatatgttgaaattcaaaataaaaggttctttgtcaagaaaattggtcatatcgttgctgagaggctgctagagagttttgaaaatattatggattatgatttcacggctaattttgaaaatgaccttgataaggtggctaatggtgaagctgaatggaaaaatgttttagataccttctataaatcatttcaaaacgatctcattactgcttcagatgtaaatacgggtatgaggccaggtaatattccaatagaaactgatattacttgtccatgtggtaaaactaatatggtaataagaaattcttcaaatggagttttcttaggttgctcaggctatcaaaatataggtgatgataaatgcaaagaaactcttaatttaatatctggtgatgaagcagtaagtgttgatgataacgaagaagcacaaaatcttttaataaagaaaagatgcccaaaatgcggaaccagtatggataattatcttattgatgaaaatagaaagcttcatgtatgtggtaaaaatcctgattgtgacggctatctaatagaagatggtcattttagaattagaggttatgacggaccaactcttgaatgtcataagtgcggatcagacatgcaattaaatacaggtagattcggaaaatattttctctgtcaaaatgataactgtagagcaacaagagctttgcaaagaaatggcgaacccaagccgattactatggagccaattcaacttgaaaatttaaaatgtttaaagtgtgaagattattacttattaagagatagcatgaaaggactatttttagcagctagccaatacccaaagaacagagagaccagagctccaaaagtctttgaaattaataaattagaaaatgaattaagagaagcatgcaagtttctaccgaataaagaaaaacacttatatctattaacagcacctgaagaagacactgatggaaatccttatgttattcgatataacagaacagatgatgtccattatcttgcttcagaaaaagatgggaagaaaacaaaatggacagctacctatactaatggagagtgggttcaaaacttaaagagttagt

SEQ ID NO: 293672 - DNA, 1003 bp, Unknown
  Bacterial polypeptide expressing nucleotide sequence isolated from the Sargasso Sea
atgaatcaaaagtctctcttaattgttgaatcaccaacaaaggtcaaaacaatacagcaataccttggtaaggaatatgatgtgatttcttgtgtaggtcatgttaaagatcttccaaagaatgatctgggaattgaccttgaaaatgattttaaaataaaacttgccgtgctgccagataaaaaagattttatagctgagctaagaaaaaaatcaaaaactgcagatagggtattagttgcaacagatccagatagggaaggtgaggcaattgcctctcaccttgcaacagagattcctgaagaaaaattagatagagtccagtttacagaaataacgaaagccgggattaatgaaggcataaataatgttcgggatataaaccatgacctggtagcagcacaaactgctcgaagagtaatcgatcgccttgttgggtacaaggtttcgccagtattatgggctactttgcaaagtaatatgaattttgtttcaacaaatttatctgcaggtcgagttcaatcagcagcagttaaaatgattgtagatcaagatagattaagagcgaaatttatatcgactaactattttgacttaaaagcagacttgagaaaagtaaacagcaaagaaaacttcaatgcaactttattaaaggtagatggattgaaagttgcgagtagcaacgactttgattctaaaacgggtgaattaaaaaacaaggatgttcttctcttaactgaatcacaatcagatgagttagtgaaagaactcaaatcaggaaactggattgtaaccgatataaagaagaaacctcgtacctcaaaccctaaaccgcctttcacaacaagcactcttcaacaagaagcatcaagaaaattgagaagctccgcaagacagaccatgagcatagcacaaaagttatatgaaaatggattcattacttacatgaggactgattctactcatttatctgatgaggcaatctctggatctagaaagtaat

SEQ ID NO: 293673 - DNA, 1449 bp, Unknown
  Bacterial polypeptide expressing nucleotide sequence isolated from the Sargasso Sea
tcaaaaaatgaaaaactattaattattgtagagtctccatcaaagacaaaaacgatatcaaaatatgtagataatgcatcagttattgctagcgtaggtcattttaaagatctcccaaaaaaagatatgggaatagatattgataatgattttgctatgcaaatagaaagtatgcctgataagaaaaagtttctatctcaattaaaaaaagaggtgaaaatcgctgatcgcattttaattgccactgacccagaccgtgaaggtgaagcaattgcagctgatattgcatctgaaatcaaaggagatattgaaagagttgaattcactgaaataacaaaacaagctgtgttagaagcagtaaataattctcgaaaaataaattatgatttggtagatgctcaacgtgcaagaagagctattgaccgtattgttggtttctcattttctccagtactttggaaaacattaagatctttaaaaaataaaggactatcagctggtcgcgtacagtcagttgctctaaaactattggttgatcgtgaaaagcttagaaataagtttattgaaaataaattttatgcaattgatgcaaatatttcggaagagaaaagcggtgaaattttcaaggcatcattagtctcatataacggaaaacctgttgctaaaagcgacgactttggaaaatttgatattggtttaaaagatgataatattattcaagtagatcaaaaattagcagaacaaataaaagaagaatgcaatgctaatgattggttagttaatagtattgaaagtaaaccaacttccagctctccagcgccgccgttcaccacaagcacgctacaacaagatgcttcaagaagatttggattttctccaaaaagaacaatggtagttgcacaaaaactttatgaacaagggtttattacatacatgaggactgattctacccacctttcatctgaagcattaaatgcttccaagaaatttatagaaagcagttttgggaatgattttttatctgaaaaaacgaatatttataaaaataaagttgccaatgctcaagaagctcatgaagctattcgtccagcaggtacagtatttagaaaagttgaagatgttcaaaaaattggtgctgatgaagcaaagctatatgaattaattttaaatagaacagttgcctctcaaatgaaacctgcacaatatattcgaacaaacgttgaaattcataatggaacatctatctttaaagcaagtggaaatgttacagtatttaaaggttatactttagcttatgaacaagctttgacaagaaaagataaaggcagacctgatagcctaccagctttagataaacaatccaaaattcaaagcaaggaagtattgcttgaagaaaaaaccacatctcctcctagaagattttcagaggctatgttagttaaagaaatg

SEQ ID NO: 293674 - DNA, 2527 bp, Unknown
  Bacterial polypeptide expressing nucleotide sequence isolated from the Sargasso Sea
atgaagttagtacttgttgaatcaccagcaaaagcaaaaaccattaataaatacctaggacctgattttgatgttatggcgacaattggccatataagaaacttgcctaacaaaaatggtgtaaatcctgataataattttcaaatggaatgggaactaattgacagaggtaataaatttttaaaagacataaaagcatctcttaaatcagcaaataaattaattcttgcaacagaccctgatagagaaggtgaagctatatcttggcatgtattggagctattgaatgataaaaaaattaaacttgatatcccagtagaacgagttgtttttcacgaaattacaagaaactctgtattggaggcaataaataatcctagaactcttgatcaagaattaattaatgcaagtttagccagaaatgctttggattacttaataggcttcaaactctcacctgtgttatggcaaaaattacctggagccaagtctgcaggaagagttcaatcagttgctctaagattaatttgtgaaagagagtttgaaattcaatcttttgttccagaagagtactggactgttgaaagtaatttgaaaaataaagctgaagaaactttaaaatcaagactaatttcccttaaagggaaaaaattagataaattaagcttaaagagtgaatctgatgcaattgaagcaataagatgtattgaaaattcagatttagttgtaaatagtaatgaagagaaaaaagaatttagaaatccaaagccgccctttacaacctctacactacaacaagaggcaagtagaaaactaaatttttcagcatctagaacgatgaaagcagctcaaaaactctatgaaggacttaatgtgggttctgaaaccactggacttataacttacatgcgcacagatagtgtccaattatctaaagaaagtgtaaatgaaattcgaaaaaagataattttagattatgggaacaaatattgccctgaaaaattaaaagtttataaatctaaggttgctaatgcacaagaagcacacgaagccataagaccaacatcagtaaatagaaatcctaaagaaataaaatctttcataagtgaagactgctttaaattatacgatttaatctggaaaagaacagtttcatcacagatgtcttcggctatactaaataaaactattattgatattgagagtgctaatacttctgacataaaaaatcatgttgtactaagagctaatggttcaaggatcgtttttgatggtttccttaaaacctacaatgaaggcgtagatgaaaaaaatgaaaatgaaattgaagataacttgttaccaaaagtctctattggagagaaacttgatgttattaagaatacaaaggatcaacatttcactcaaccacttccacgatacactgatgcaagtcttattaaaaaacttgaagaattaggtataggaaggccatcaacatatgcaagtatattagagaaactacaaaatagaggctatgttttcaaagagggttctagatattttgcagatgacataggaagaattgtaaccagttttttagaaaattattttgagcaatatgttgaatactcatttactgctgaactggagaaaaaactagatttagtatctgaaggaaaattagattggagaaaattacttgaagaattttgggaaaattttaagattgctattaataatacaactgaaatacagcgaactgaagtaattgaaaaaatagatttagctctagaaaatcatttttttaatcaaaatgaaaatggcactataaatagggaatgcccgacatgtacaaatggaaagttatcacttaagattggtaaatttggatcatttatagcttgctccaattatccagattgtaaatactcaaggaaattatccgaacagaataccgatgaaaatgaaatgggatttgatggggaaaaatcttttggtattgatcaaatttcaaatgaagaggttcttttaaaaaaagggccttacggtatttatttacagcttggcaatgacaaaaaacccaaaaggaccagtatacccaaacttataaaagttgaagaccttaacttagaaacagctttatcactgttaagtttaccaagagatctcggtaaaccgcctggagaagataaatcaatttatgctgggattggaagatttggtccctatttacgatttggcacaacttatgtctctcttccacatgatcatacagtgcttacaattggattgaaccatgctaatgatttaatgcaagaaaaattgagtaaatcccctcccattattaatcttggagaacatcctgatggaggtccaattgaaattaaatctggtcgctttggttcctatgcacagtataaaaaattgcgcgctagcatacccaagaaacaaaatttagatgattttacacttgagatgggaattgagttaattaatgaaaaaggcaaggaacctaaaaccagaacttctcgatcaaaaaaataga

SEQ ID NO: 293675 - DNA, 1322 bp, Unknown
  Bacterial polypeptide expressing nucleotide sequence isolated from the Sargasso Sea
tgatggctttacaaaaatacttaaaacttcgtctaaagatgaagatatcttaccctctttacatgaaaatcaactcatcaccacagatggtattgaattagaacaaaaatttaccaaacctccagcaagatactctgaagctgctttagttcgtgagcttgagaagaaaggaataggcagaccttctacttatgcaaatataatttcaactattcaagatagaggatatgttcaaatcgaaaacaaaagattttttgtaaaaaaaattgggcatattgtggctgaaagacttattgagagttttcatgacattatggactatgactttactgcaaatctagaaaatagcctagatgaggttgctaatggagatgcagattggagggaagtattagataatttttataagtcttttcaaaatgatttaatctcagcctctgatctaaactcagggatgaggccaggaaatatacctacagaaacaaatattgtttgctcatgtggaaaaactaatatggtaataagaaattctgctaatggtgttttcttgggttgttctggttatcagaacgagggtagtgataaatgtaaggtaacacttaatttaatttcaggagatgaggcagtaagtgttgatgattccgaagaagcagaaaatcttctcactagaaagagatgcccaaaatgcgaaactagcatggataattatctaattgatgaatatagaaaattgcatgtttgtggcaagaacccggactgtgatgggtatttagttgaggatggtaaatttaaaataaaaggatatgatggcccaactttggaatgccataaatgtggttcagaaatgcagttaaaaactggtagatttggtaaatattttggatgtttaaatgataattgtggggcaacaagagcattacaaagaaatggtgagcctaaacctataacgatggaaccaatcgaaatgcctgatctcaaatgtgtaaaatgtgaggaccattatttattgagagatagtatgaagggtttgtttttagcagccagccaatacccaaaaaacagggaaacaagagctcctaaggtatctgaaattaataaacttcatgacaaaattattgaggcatgtagatttttgccaaacaaggagaaacatatgtatttattggatgctcccgaaaaagatgccgacggaaatccgtatgtgatcagatacaatagaacagatgatgttcattacttagcatcagaaaaagatggtaaaagaacaaaatggacagcaacatactctaatggagagtgggttcagaatctaaagtcttagt

SEQ ID NO: 293676 - DNA, 1660 bp, Unknown
  Bacterial polypeptide expressing nucleotide sequence isolated from the Sargasso Sea
tttcacccaatattatggactaaattaccaggctctaagtcagctggtagagttcaatcagtagctttaagattattaactgaaagagaacatgaaattgaagtatttaatccagaagaattttggacaataaatgtaaattttattacttcttccaaaaatattttaacttcatcaatatccgaattaaatggagaaaaaattgaaaaatttagttttagaaacaaagaagatataaataatgccatatcaaaaataaatgaaaaaaaatattcaattaaagatataacttcaaaaatatacacaaggaacccatcagggcctttcacaacttcaactctccaacaatctgcatcaagtaaattaggttttggtgcttcaagaacaatgcaaattgcacaaagactatatcaaggtatagagatagatggagatacaaaaggtctaataacttatatgaggactgatggtaccaatatatctaaagaggcaattccattatttagaaaatatatagaggaaaattatggtggtgattatctacccgagcaagcaaataattattctggtaaaaaagcaaaaaatgcacaagaagcacatgaagcaataagacctacggaaataaaaaattcacctgaaagtataaaaaaatatttaagtacagatcagtataaattatatgatcttatttggtctagagctctatcatctcaaatgcagccagctaaatttgatagaaaaactatattgattacctcagaagatggaaagaacatattaaaatctagtggctcgactataagatttgatggatttttaaaacttcaaaaaattgatgaaaatgatgatgaaaaaatattaccagaggtgtctaaaggaccaatcgaaataaaagaatttaatgacgagcagcactttacacaaccacctccacgtttttcagaagcaagtttagttaaaaaattagaagaattaggaattggtcgcccctcaacatatgcaagtattatctctgttatatctaatagaggatatgctgatatagtaaataagagattttttccaaccgatagaggaaaattactatctgcctttttggagaaactattttcaagatatgttgactatgattttactgctaaacttgaagatcaattagatgatattacctcagggaaagaaaactggataaaagttttagatcaattttggaaagattttaacgaaaatgtctctaatgttaaagagaaaaggactagagaagttttagatctacttaatgatagtttaggaagtttaatttttgacaaaaatagtaatggtaaggtggatagaagctgtaaattatataataaagattgtaagttttcagttgaaggaacattaagcttaaaaaatagctttagagggggcgcatttattggttgttctaattatccagactgtaaatatacaagaccattatcaaaagcaaaagctgctgctcaagcaaatctgtcagaacctaaattaataggaaaaaatgatataggcaaggatatttatttaaaaaatggaagatttggaccttatttgcaatacgaactaagcgatgaagaaatagaaaatattaaaaaaccaaaaactaaaaccaaaaagaaaaaaaaaagaagaaagtaac

SEQ ID NO: 293677 - DNA, 1030 bp, Unknown
  Bacterial polypeptide expressing nucleotide sequence isolated from the Sargasso Sea
cttgttaggagagagagagaaagaagatcctttaaaaaagctagttactggggggattaaagcttccctaataaaagataatattactttcgaaactaaattattcagtttaaacggtcaaagaatctctaacggttccgatttcgacgaacaaaccggtaaattaaaagaaggaaacaaatctttaataattggagaagaacaagtaaatgatttattgaagactttttcctcagaggattggttagtctcaaaaatcgaaaaaaagccatccactcgtaagccagttcctccatttacaactagcacattacaacaagaagcaaataggaagcttcgtttgtctgcaagagaaactatgagatgtgcacaaggtctatatgagagaggtttcataacatatatgagaactgattcagttcatctctccgaacaagccacaagagctgctagagaatgtgtcagttctatgtatggaaaagaatatttatctaactcaccaagacaatttaattcaactgcaagaaatgctcaagaagcacacgaagctattaggccggcaggtgaggtatttaaaacaccaaaggaaactaatctaactggtagagacttatcactttacgatttaatttggaaaagaactgtagctagtcaaatggcggaagctaggttaacaatgattaatgctgaaattagcgtaggggatggattatttaaatcgagcgggaaaagtattgatttcgcaggattcttcagagcttatgtcgagggaagtgatgacccaagttcatcccttgaacaacaagaaattattctcccaaacttaacaactggaacatgtcttgaagttactaataaggaatctacttttcatgaaactaaacctcctgcaagatatacagaggctgcattagttaaagttcttgaaaaagaagggattgggagaccttctacctatgccagcattattgggaccatagttgatagaggttatgcgaatatatctttcaatactttggctccaacgttt

SEQ ID NO: 293678 - DNA, 1282 bp, Unknown
  Bacterial polypeptide expressing nucleotide sequence isolated from the Sargasso Sea
atgagcaaattagtcatcgtagaatcgccagctaaggcaaaaacaatccagaaatatctgggtgatggctatgctgttttgccaacaattggtcatatcagagagcttccaaaaaaagatgcgattgatccgagtaatggctattcaatgaaatatatagtgagcccgggcaaggaagatgcggttaaaaagattaaaggtgaggcaaaaaatgttgagcaggtcatccttgcaacagacccagacagagaaggcgaagccattgcttggcacgtggcagatatcatttcaaattctagatttgaacaaccagatattaaacgcgctgttttttatgaaataagtgaaaaagcagtcaaggatgctgtgggtaaccctggtgaaatagccatggatctggttcaatcccaagaaaccagaagagctcttgatcggcactttggttttactttgtcacctttgctctggcgactatttcctagcaacaatcattctgcgggaagagttcaaagccctgcattaaggatgattgtagagcgtgaaagagagattgaggcctttgatccacaagagtactggaccatttcagtaaaactagaaaaagatggagaatatgacgccaaactatcggtttttaaacaagagcctgtaaaaaagttcacgtttaactcaaccaggcttgtcgaggaggctagcaaaggcctggaagaacagtgccaaaaaggtcttgtcgcaaagtctatctccaaaaaaagcattaagcgctcgccaagggagccatttagaacatctgtactacaacaacaagcatccaataggtttggttttactccaaaaagaaccatgcagatcgcacaatcgctctatgcgcgagagggcggcggactaatcacttatattagaacagactcaattgaaatcgatgaaggaaagatccctgctgtaaggtctcaggtagcgagcatgtttggggaagagtttgttcagcctagaaactataaaaacaagaaagaggccaagaacatccaagaggcacatggagcgataacccctgttgatataagccttgccccaactgatgcaaaaaagattctaaaagatgatgaattcaaactctatcagctaatctggcaaagaactgttgcgtcccagatgaaagatgcaatctttgaaagaacatctatcgagttcgttcctaccggcgatgagagcttggctacattttctttttctgaccaagagcttattttcagcggttatttagaagcgacacaggaagagg

SEQ ID NO: 293679 - DNA, 1240 bp, Unknown
  Bacterial polypeptide expressing nucleotide sequence isolated from the Sargasso Sea
atggctagaagagccctagactaccttgttggtttcaatatatcacctatactttggactaaattacctggatctaaatctgctggaagagttcagtctgttgctttaagactattaacagagagagaacatgaaatagagcaatttatacctgaagagttttggactttaaatgtgaattttaaaactttgaacggaaatattttaaattcaaatttagtattattaaatgagaataaagtcgaaaaatttacatttaaaaaaaaagaagatattaataaagcaatagaaataattaaaaaatcaaaatataagatttctgatataacatctaaggtatatacaagaaatccaccaggaccatttactacttcaaccttacaacaaacagcatctagtaaattgggatttggcgcatctagaacaatgcaaattgcacaaagattatatcaaggtatagatattgagggtgatactcttggtttgataacctatatgagaactgatgggacgaacatatcgcaagatgctatttcagattttagaaattttatacaaacttcatatggagacaattatcttcctcaacaacctaacaatttttcaggtaaaaaagcaaaaaatgcacaagaggctcatgaagcaataagacctactgatatttctagaactccagatagtatgagaaaatttttaagtacagatcaaattaagttatatgatcttatttggtcaagagcgctttcctcacaaatggaaacggcaaaatttgatagaaaaacaataactattgtttctaatgacaatttgaatcattttaagtgttcaggatctacacttaaatttgatggttttttaaaactaacaagaattgaagatgaggatgaaaaaattttaccagatgttggtaaggaagatgtttcaactgatgaatttattgatgaacaacattttactcagcctccacctagatattcagaagcgagcctagttaaaaagcttgaggagctaggtattggtaggccatctacctatgcaagtattatttcagttatatctaatagaggatatgctgatgtagtaaataaacgtttttttccaactgatagaggtaaattactatcagcgtttttggagaaacttttctctaagtatgttgattatggatttactgctggtctagaggagcaacttgacgatattacctcaggtaaagaagagtgggttaaagttcttgaca

SEQ ID NO: 293680 - DNA, 724 bp, Unknown
  Bacterial polypeptide expressing nucleotide sequence isolated from the Sargasso Sea
tatgtcaaaatcacttgtaattgtagagtcccctgcaaaggcaaagacgatatcaaaatatcttggtaacgaatatattgttaaatcaagtgtaggtcatatcagagatttaccaaagggaaaatcaaaagctaagagacaaaattcaatcccaaaagatgctagtcctcaagaaaaggctagattaaaaaaagagcaagaaagaagaaggataattaggagaatgggtgtaaatcctgatgatggatggtctgccaattatgaaattatccctgataaagaaaaggtaataaaagatttaaggaaagcttcaaaggaagtagaaaaagtttatctagctactgatcttgatagagagggagaggctatagcttggcacttgaaagaagctttaggaaaaaataaatttgaatatcaccgagtaagatttaatgaaattacaaaaagttcaatattagaatctttctcagatcctaaggaaatagatcaagatctagtaaatgcccaacaagcaagaagatttcttgatagggtggtaggctttgaactgtctccattattgtggaaaaaaattgcaagaggtttatctgcaggaagagttcaatctgttgcattaagattactttgcgaaagagaaaaattaatttcacaatttcaaccacaggaattttgggaagtttcagcaacgttaaaagattttaatcatgaaagaaatcttatttaa

SEQ ID NO: 293681 - DNA, 1030 bp, Unknown
  Bacterial polypeptide expressing nucleotide sequence isolated from the Sargasso Sea
catttagttgatgcttatatggcaagaagagctctagattatctagtaggttttaatatctcccccattctatggacaaaattaccaggttctaaatctgctggtcgagttcagtctgtagctctaagacttttaactgaaagagaacaggaaatagaagtttttcaaccaaaagaattttggactttaaatataatttttaaaaataacaaaaatgaaaaaataaatacaactatttcacaattagatggaaataaggttgagaaattttcatttaaaaacaaacaagatattaacgacgctttatcaaaaataaaaaataaaaaatataatataacagatataagttcaaaaacttataacagaaatccatcaggaccttttactacatcaacattacaacaaacagcatcgagtaaacttggttttggagcatcaaggacaatgcaaattgctcaaagactatatcaaggaattgatattgaaggtgaaaccgtaggattaattacttatatgagaacagatggaactaatatttcaaaagatgcgataacatctttcagagattttataatgcagaattatggtgataaatatttaccagaacaacctctaaattatagtggcaaaaaagcaaagaatgctcaagaagctcacgaagctatacgtccaacagaaataattcgaaaaccagaggatatgaaaaaatacttaagtactgatcaatataaactttataatttaatatggtctagatctttatcatcacaaatgcagtcagcaaaatttgatagaaaaactattaccatcaactcaaatgaagataaaaacatattcaaagctagtggttcaacattaaaatttgatggttttcttaaactttataagatcgatgaaaatgatgatgacaatgaaaatattttgccagatgttgaaaaaggtgatgtaatgtttgaagatcatattgatgaacagcactatacacaaccaccacctagatattcagaggcaagtctagttaaaaaattag

SEQ ID NO: 293682 - DNA, 1172 bp, Unknown
  Bacterial polypeptide expressing nucleotide sequence isolated from the Sargasso Sea
tatgaatttggtcattgtagaaagtcctgctaaagcaaaaactattaataaatacttaggtgataattataaagttttagcaagttatggtcatataagagatttgccgtcaaaaaatggttctgtcaatccagatcaagattttaaaatggaatgggaagttgatagtttttcaaaaaaatatttaaaagaaataactgatgcggctaaagactcatctaaaattatattagcaactgaccctgatcgtgaaggcgaggccattgcttggcatgtcaaagaatatttgaatgaaaaaaaacttttaaaagataaagaaattgaacgagttgtatttaatgaaataaccaaaaaagctgttattcaaggaattgaaaatcctaggcaaattgagccattactagtcgatgcgtatatggctagaagagccttggactacttggttggttttaatatatccccgatcctctggacgaaacttccaggttcaaaatctgcaggaagagttcaatctgttgctttaaaattaattactgagagagaacatgcaattgagtcttttaaacctgaggaattttggactttaagtattaaatttgctgatactgcaaatcaaaatttcactgctagtattagtcaacttgacaacaataaaattgaaaaattttcatttagaaataaagaagagataaataaagccatatcaagtattaataaaaaaaaatttagtataactgacatttctagcaaaatagtaaatcgtaatccctctggaccatttacaacttcaactcttcaacaaaccgcatcaagtcgactaggttttggtgcatctagaacaatgcaaattgcccaaaaactttatcaaggtatagaaatggaaggtgaaacaattggcttaattacttatatgagaactgatggaactaatttatctaaagatgctgttacaagtttcagaaattatatccaaaaagaaattggtaatgaatacttgcctaaagatgttttgaattattcaggcaaaaaagctaaaaatgcgcaagaagctcacgaagcaatcagacctactgatattataagaactcctgaaagtgttaaaaaatatctaagtacagatcaaaataaactttatgatcttatctggagtagagctttatcttctcagatgg

SEQ ID NO: 293683 - DNA, 1141 bp, Unknown
  Bacterial polypeptide expressing nucleotide sequence isolated from the Sargasso Sea
aatgtttcagtagacccaaaagatagatttaaaatgatttgggaaatagatagtttttcaaaaaaatatttaaaagaaatcactgatgtagcaaaaaaatcaaaaaaaattattcttgctacagacccagaccgtgaaggtgaagctatagcatggcatgtaaaagaatatttaaatgaaaaaaaaattttaaaagataaaaaagttgaaagagttgtattcaacgaaattaccaaaaaagctgtaacaaatggaattgataatccgagaaatatagagcctaatttagtggatgcttatatggcaagaagagctttggattatcttgtaggatttaatatttcaccaatactttggaccaaactgccaggttcaaagtctgctggaagagttcaatctgtagctctaagattattaacagaaagagaacatgaaatagaacaatttaatcctgaagaatattggtcattaaatgtaaactttaagaccttaaaaggaaatatattaaactctaaccttgcaatacttaaagaaaataaaattgataaatttttttttaaaaccaaagatgatataaataacgctgtagaacagattaaaaaatcaaaatataaaatttcagatatcagttcaaaaatttatacaagaaatccaaatggtccatttactacttcaacaatgcaacagacagcttcaagtaaactgggatttggtgcatcaagaaccatgcaaattgctcaaagactttatcaaggaattgatatggaaggagatacagtaggcttaattacctatatgagaacagatggtacaaatatatcaaaagatgcagtgtccgactttagatcatttataaaaagttcttatggtgataattatctccccaccgaacctaataattattctggaaaaaaagcaaaaaatgcacaagaagctcatgaagctataagaccaactgatatttcaagaacaccggagagcatgagaagattcttaagtactgatcaaaataaattatatgaactaatatggactagagctctttcatcacaaatgatggcagcgaaatttgatagaaaaactattacaattgtatctgatgataatttgaaccaatttaagtgttctggttcactataaa

SEQ ID NO: 293684 - DNA, 1093 bp, Unknown
  Bacterial polypeptide expressing nucleotide sequence isolated from the Sargasso Sea
atgaatcttgtcatagtagaaagtcctgcaaaagctaaaaccataaataaatatttgggtaaagattataaagttttggcaagctatggtcatgtcagagatctaccttctaaaaatggttctgttgatcctgaaaataattttaaaatggagtgggaactcgatacattctcaaaaaaatatgtaaaagaaatcactgatgcagcagctgagtctgaaaaaataatattagcaactgaccctgatagagagggagaggctattgcctggcatgttcgtgaaatactcgaaagtaaaaaacttttgaaaggtaaaaaagttgaacgagttgtttttaatgaaattacaaaaaaagcagttacaaatggaattaataatccacgggaaatagagtctctgttagttgatgcttatatggctagaagagcattagattatcttgttggttttaatatatcgccaattttatggacaaaacttccaggatcgaaatctgcaggacgagtacaatcagttgctcttagattgataactgaaagggagcatgaaattgaactttttaaaccagaggagttttggacaattgctagtaactttcaatatgatgacaaacttattcaatccaagctgtttgtatttaacgaaaaaaaaatagaaaaattctcttttaagaaaaaaacagactcagaaaaagctttaaatgcaataaaagatcaatcatataaaataactgatgtttcctctaaagtttttcgaagaaatccacttgcaccgtttacaacatcaacactacaacaaacggcatctggtaaatatggttttggagcttctagaactatgcaaattgcacaaagactttatcaagggatagatttagagggagatactattggtttaatcacttatatgagaacagatggaactaatatttcaaaagaggccataactgattttagaaattttataaataaagagcatggcaaagaatatattccagaggttccgaataattactcaggaaaaaaagcaaagaatgctcaggaagcacatgaagcgataagaccgacggatgttaatagaaaatccttctgat

SEQ ID NO: 293685 - DNA, 2521 bp, Unknown
  Bacterial polypeptide expressing nucleotide sequence isolated from the Sargasso Sea
aatgagcaataaaccattattgatcgtggagtcaccaacgaaagtaaaaacaatacaacaatacctaggtagtgaatatgatgtgctatcatgtgtggggcatgtgaaagatctaccaaaaaatgatctaggaatcaatatcgatgatggatttaaggttgaactttctgtcctgcccgataaaaaacagttcatatccgaactaagaaaaaagtccaaaactgctgagcgcgtattaatagcaacagatccagaccgtgaaggagaagcgatcgcagcgcatcttgcaacagaggttcctgaagaaaagatagaacgcgtccaatttacagagatcacaaaagcaggaatcgctgaaggaataaataatattcgagagatcgataaagatcttgtagacgcacagactgcccgtcgtgttattgatcgacttgtaggctataaagtatcacccgttctctgggcaacgttgcaaagcaacatggattttgtaaaaacaaatctttcagcaggtagagtgcaatcagcagcagttaaaataattgtggatcgggaccgcttgagagcaaaattcattaggtccgtttattttgatctaaaatcgctactgaccaaaacaggagaaacaaattcatttaatgcaactctagtaaaactagatggtgcaaaaattgctagtagtaatgattttgattctgagactggagaattaaaaaataacaatgtaattctgttatcggaatctcaagctgaagaactcgtaaaagaattaaaaccggcagactggacagtaaccgatattaaggaaaagccaagaacctctaaccctaaaccaccctttacaacaagtaccttgcagcaagaagcagcacgtaaattaagaagttcagcgcgacagacaatgagtacagcacagcaactttatgagaatgggttcattacatatatgcgaaccgactcaacccatctttctgaagaggcattggccggctctcgaaaaataataaaagaactttatggagaagaatatctaccagaagaggtaaaagagtatgcaacaaaggttcgcaatgctcaggaggcccatgaagcaattaggcctgctcatcgtgattttagatctgtggaagaagtcaaaaagtctctaggagacgacgcatcaaaattatatgatcttatatggaagcgaacagttgcaagtcagatgaggtctgccaaattgatgcaaacagcggtcactattcaaaaccaaaaagcagagtttcgagcgaatggacaggtagttcttttcccaggctatatgaaggtttatgttgaaggaagagataatcccgataaagacctagcgaataaagaaagaattctaccatcatttaatgtaggtgaaaagcttacttgtgaatcagttgaagcagaatcacatcaaacaaaaccacctgcgcgctatactgaggcttccctggtaaagtcattagaagaaaatggtattggtaggccctccacttttgcatccattctagccactattgttagaagggggtatgtagatcgaaaaagtggaaaactctcacccacttatcttggtctagctgttacgcaactccttgaaaatcattttaccaatctagttagtaaagaattcacagctaaaatggaagatggactagatgaagtatcaagaggtgaattggatgcgataccatttatgacaaatttttatagaggcggagggcgatttgcaggcctggagaatatgctcggagaaaaagttgatataccaacagcctgttcaattgcaatgcctgaaaagatcgctgagacaactgaaggaaggatcggcagatacggcccctaccttcgacgcggtgatgatacaaggtcgattcctgaagacatatatatgggtgacctcacattagatacaattgaaaatatatttagccaagaaacaaaagaagacgagcccttaggcaatgatccagattcaggggaatcaatttggatcaaaaaggggccctatggtcactatgtacaattaggcgatacaaaaacacgtaaagggataccaaaaaactatgatctgaacgctgttgatctggaatacgccttgaaactattatctttaccaagagatgttggaatgcatcctgatactaatgaaatggttacagcagattatggtagatatggtccatacataaagtgtgggaaacaaaatgccgctataaaaggtacagaaactcctttggatataaccctagagcgagcgatcgaattattagcaaatcgaaataaaacaagttcagaactaaaaaacttaggtaagcaccctgaaaccggcgaggatctggttgttaaagatggcagatatggtccgtacattagtgatggtaaagtaaacgctgcattaaaaggcgaactatcaccagagaccattactttggatgaggcagtagaccttattaacaaacgaagactagctcctcctaaaaaaagaagatctaaaaaaaagaaaaaatga

SEQ ID NO: 293686 - DNA, 2467 bp, Unknown
  Bacterial polypeptide expressing nucleotide sequence isolated from the Sargasso Sea
atgagtaaattagtgatagttgagtcgcctgcaaaggcaaaaacgatccagaaatatctgggcgatggttttactgtcttgccaaccattggtcatattagggaacttccaaaaaaagatgcgattgatccaaacaatggttattccatgaaatacatagtcagcccaggaaaggaagacgcggtaaaaaaaattaagagcgatgcaaaaagtgcggaacaagtaatactcgcaacagacccagatagagagggagaagctattgcttggcatgttgctgacattatttcaaatgcaaaatttgagctgccagatattaagcgagctatattttatgaaataagcgaaaaagcagttaaagatgctgtgggcaatcctggtgagatagctatggatctagttcagtcccaagaaaccagaagggctctagatagacactttgggttttctttatctcctttgctgtggcgactatttcctagcaacaatcactcagctggaagagttcaaagtcctgcgctaaggatgatcgttgagcgtgaaagagaaattgaagcttttgttccgcaagaatactggaccatttcagcgaaactagaaaaagatggtgaatacgatgcgaagctatcagtttttaaagaagagactattaaaaagttcacatttgattcaaccgcactcgttgaagaagcgagcaaggctttggagggcagttgtaaaacaggtcttgttgccaagtctatcaccaaaaaaaccataaagcgttcaccgagagagccttttagaacctctgtgcttcagcagcaagcatccaataggtttggttttacaccaaaaaggactatgcagatcgctcaatcgctctatgctcgtgagggtggcggtctaatcacatacattagaacggattcgattgaaattgatgaaggaaaacttccttctgtaagagaccaggttgctttcatgtttggggatgattttgttcagccaaggaattataaaaataaaaaagcggccaaaaatattcaggaagcgcacggtgccataactcccgttgacataagccttattccaactgaagccaaaaaggttcttaaggatgatgagctcaaactttaccagctaatctggcaaagaacagttgcgtcccaaatgaaggatgcgctctttgagagaacctctattgaatttgtgcccattggagatgaaggtctggcgacgttttctttttctgatcaagaacttatttttagtgggtatttggaggctacccaagaagaagttacaaacaataagcctcccttaatcaatgaaaatgactcaatagagttcaaggggcttataaaaacccaacatttcacagacccgcctcctcgttacaatgacgcaagcatgattaaggcgctcgaagaaaaaggcattggaaggccctcaacatatgcagacatactctctaagcttacagatagaaattatgtttggttgaagcaaaaaagatatgagccctctgatatgggcaggcttgtaagcaatttcctgaacgagcgatttggtggatatatcagtgatgagtttacctcaaatatggaaaacaacttagatgaaatctctagtggaaaaaagagcaaggaagatgttctgaatgacttctggtctccgttgatagatacggtggatgaggtcagcgatgtagttacgagaaaagatgtaaacccacaaaggcctttaggcaatcatccagaaacaggccgtcctgtattcgctagaatgacaaaaaacggcccagcagttcaagtgggagacatggataaagacgaaaagcttgagtgggctgctataaaagagggtcagtcgctgttttcgattgatcttgagattgcttgtgagcttctcaacaagccgagcgaaaacatacttggttaccaccctgaaactagtgagccagtgattgttagagaggcaaggtacggtccgaccgttcagcttgggtcgaaggaaggtggcaataaaccaaggtacgttggcttgctgaaaacagattctattgatgaaatcacatttgaaagggccttagattatttaagtttgccaaaagagttgggtgttgatcctgagtcaggggaaaaggttcttgtgactatcggtccttatggtccttatttcaaacgtggttcaaaaaactttaggggccgaaaaggtcttgatccgttttcagttgagcttgaggaggctcttttaagcatatcaagctcgaaaggctctggcgctcttaaaacctttgatgacagtcccgttaaaattgttgatggaagatggggtgcctatgtcacagacggtaaaaagaatgcctcggtacccaaagacaaagacccagagagcctagaacttcaggattgtttggaactactagaaaaggctcctgccaaaaaaagaggtaagagaaaatcaaagaaagcagccaagtagt

SEQ ID NO: 293687 - DNA, 1735 bp, Unknown
  Bacterial polypeptide expressing nucleotide sequence isolated from the Sargasso Sea
tggagcatcaagaacaatgcaaattgcacaaagattatatcaaggtatagacatagatggtgaaacagttggtttaattacttatatgagaactgatggtacaaatatttcaaaggatgctgtagcctcatttagaaatttcattgctcagaactacggaaatgattatttgccaccatcaccattaaattattcaggaaaaaaagcaaaaaatgctcaagaggcccatgaagcaattaggccaacagagataagtagagttccagatgatatgaaaaaatatctaagtacagatcaatataaattgtataatttaatttggtcaagatccctgtcctcacaaatggaatctgcaaaatttgatagaaaaactattactatctcatctgatgatgaaaaaaatatatttaaagcaagtggctccactttaaagtttgatggttttttaaaagtttcaaatttagatggaaataaagatgaggaaaatattttaccagatgtaagtaaaggagaagtatcttataaagattttaatgatgaacaacactttactcaacccccaccaagatattctgaagctagtcttgttaaaaaacttgaagaattaggaattggtagaccgtctacttatgctagtatcatatctgttatttcaaacagaggatatgctgatatagaaaataaaagattttttccaacagatagaggaaaattgctatctgcgtttttagaaaaattattttcaaaatatgttgattatgattttactgcaaaattagaagatcaattagatgacataacatcaggtaaagagaattggattaaggttttagaggaattttggagagactttaatttaaatgtaacagatgttaaggaaaaaagaacaagagaagttttagacttacttaatgaaagtctgggatcattaatttttgaagtagataaagatggaaatataaatagaaaatgtagactttgtgatagtggccaattaagcttaaaaaatagtttcagaggtggtgcatttattggatgctcaaattatcctgaatgtaaatttaccagacctctatctaaatctaaggctgctcagcaattaacattggcagaaccaaagctaatcggtcaaaatgatcatggtaaagatatatatttaaaaaatggaagatttggcccttatttgcaatacgaaaaagaaaaagaggaagaggaagcaaaaaagaaaaaaagaaaattgaaaaaagaggaaaataacatgaaaaatgtctcaataccaaaagggattgatataaaaagtatagatttagagagagcaaaatatttgtgctcattgccattgagcttaggtaaaaatcctgaaaatgataaagatataacagtcaatgttggaagatttggtccatatttaaaatgtgagaataaatcagctcgtttagagaacgtagaagaaatcttcagtattggattaaatagagctgtaaccttaatcgctgaagcaaagccagggagaatttcatcttcattaattaaagaccttggagaacatcctgaggataaaaagccagttaggataatgaaaggtcaatatgggccatatatcaaatataaatcattaaatgccacaattcctgaagagaaagatcctattgaattaacaatggaagaggcacttattttaattgagaaaagaaaagagtacgataagaataaaaagaaaaaaaagggtaaataa

SEQ ID NO: 293688 - DNA, 1039 bp, Unknown
  Bacterial polypeptide expressing nucleotide sequence isolated from the Sargasso Sea
atgaatcttgtgattgtcgaaagtcctgcaaaagcaaaaactattaacaaatatttaggttctgattatactgttttagctagttatggtcatataagagaccttccttcaaaaaatggatctgtagatcctgaaaatgattttaaaatgatttgggaaattgatagtttctccaaaaaatatcttaaagaaataacagactcagccaaaaattcttcaaaaattattcttgcaactgaccccgatcgagaaggagaagcaatagcatggcatgtaagagaatttttagaggaaaaaaaacttttaaaagataaaaaagtagaaagagttgtttttaatgaaattactaaaaaagctgtcacgtctggcatagacaatccacgacaaattgagtcacagcttgtagatgcctacatggcaagaagagctttagattatcttgttggtttcaacatatctccaatattgtggaccaaattacctggttcgaagtctgcgggtagagtccaatcagtagcattaagattactgactgaaagagaacatgaaattgagatatttaagccagaagaattttggactttaaatgttattttcgaagacaaaaataaatctaaaatcacatcaaatttaaatcagttgaatggtaagaaaacagaaaaatttacattcaaatcaaaagacgatgttaataaggcaataaatgaaataaaaaaaaaagagtatcaaatctcagatattagttcaaaaatttatacaagaaacccatctggtccatttacaacatctacattacaacaaaccgcatcaagtaaacttggttttggtgcttcacgtactatgcaaatagcacaaagattgtatcaaggaattgacattgaaggagatactataggtttgattacttatatgaggactgatggaactaatatttcaaaagatgcaattgaaacatttagaagctatataagtgataattttggaaagaattatctaccacaatcatcatttaattattctggaaaaaaagcaaaaaacg

SEQ ID NO: 293689 - DNA, 2563 bp, Unknown
  Bacterial polypeptide expressing nucleotide sequence isolated from the Sargasso Sea
aatgaatcttgttattgtagaaagtcccgcaaaagcaaaaaccataaataaatacctaggaaaaaattataaagtattagcaagttatggtcatgtaagagatctgccctctaaaaatggctctgtagatccctctaataattttaaaatggaatgggaactagatacattttcaaaaaaatatgtaaaagagattgcagatgcagctgctaattcagaaaaaattatactagcaactgatcctgatagagagggagaggctattgcttggcacgtaagagaaattttagagagtcgaaagcttttaaaaggaaaaaaagttgaaagagttgtatttaatgaaattacaaaaaaagcagttactaacggaataaataatcctagagaaatagaatctcttcttgtgaatgcatatatggcaagaagagctttagattaccttgttggattcaatatatctccaattttatggacaaaacttccaggttcgaaatcagcaggccgagttcaatcagtggctctaagactagtgactgagcgcgaacacgagattgaactttttaaaccacaagaattttggacaatttcgtgtgactttaaaaaccacgacaaaattataaaatctaaactttcaatttttaataacgagaagattgaaaagttttcttttaagaaaaaagctgattcagaaaatgcgttaaaagagataaaatctaaatcttataaaataacagatgtttcatctaaagtttataaaagaaacccattggcacctttcacaacatcaactttacaacaaactgcgtcgggtaaatttggatttggtgcgtcaagaactatgcaaatcgctcaaagactttaccaaggaattgatattgagggggatgctgttggacttataacatatatgagaacagacggaactcagatttctaaagatgctattgaagattttagaaactttattaacaaaattcatgggaaagaatatcttccagaaaatcctaatagttacattggaaaaaaagctaaaaatgctcaggaggcacacgaggctataagacctaccgatattactaaaaagccaagtgatatgaaaaagtatttaagcactgaccagtcaaaactatatgaattaatttggaatagagctctttcatctcaaatgacaccagcagaattcgatagaaaaagtatccaaatagagtcccctgataaaaaaattggatttaaagctaatggatcaaccattaaatttgaagggtttttaaaagtttataaatttgaagaaaaggatgaagatcttagaaatattttacctaatgtaaagattggagatcaaattgatataaaggagctaattgatgatcagcattttacagatcctccaccaagatattctgaagccagtttggttaaaaaaatggaagaactagggataggtagaccatctacctatgcaagtataattacagttttgtctacacgaaattatgttgaattattaaataaaaggtttcatccaactgatagaggaaaattattgtctgcttttctagaaaaattattcacaaagtatgttgattataatttcactgcagatttagaaaatcaactagacgagattacaagtggaaaagttgagtggataaaagttttagatggtttttggaaagatttttactcaaatgtaggtaatgtaaaagaaaaaaggacaagagaagttttagacttattgaatgatagtttaggcgatttagtatttgaaagagatgataatgatattatagacagaaagtgtaaagtttgtgacaaaggtgaactaagccttaaaaatagttttagaggaggcgcttttattggatgttctaactatccagaatgtaaatttacaagacctttatcaaaatcaaaagcatctcaacaaattaatttatctgaaccaaaactgattggtcaaaatgatttaggtaaagatatatttctcaaaaatggaagatttggaccttatttacaatttgagattgatttagatacatcaattgaaaataaaaaaaagaagggtaaaaagaaaaaagagaatgaaaacttaaaaaatgtttctatacccaagggtctaccgattgaaaatgttgatttagaaaaagccaaatacttatgctctttaccaaaagttttaggtaaacatccagatttaaacgatgacataacaattaacattggtagatttggtccatatttgaaatgctcaaataaatcagcacgaatagaaaccgtggatgagctttttacaataggtcttaatagagcgataactttaatttccgaagcaaaacctggaagaatgtcttcttcggaaattaaaaatcttggagagcatcctgaagataagaaaccagtaagaatcatgaaagggcaatacggaccctacattaagtataaatctcttaatgccaccattccagaagacaaagatccaacagaattgacaatggaagaagcattaatattaattgaaaaaagaaaagaatacgataaaaccaaaaaaaagaaaaaaagatga

SEQ ID NO: 293690 - DNA, 1114 bp, Unknown
  Bacterial polypeptide expressing nucleotide sequence isolated from the Sargasso Sea
aaaaactttagcgaaaaaagccaaaactatttggttggcgtcagatgaggacagggaaggtgaagcaatagcttggcatttatctcaacagctagatttagattcaaataaaacaaaaagaatagttttccacgagataactaaaaatgcaatccaagaagcaataaaatctccaagagtaattgatgaaaatttagtaaatgcccaacaggctagacgagtattagatcggttggtagggtataaactttctccagtattatggactaaagtaaaaggaggattgtctgccggaagagttcaatcagttgctgttagattaattgttgagaaagaaaggttaattcaaaattttgttcccaaagaattatttaaaactaatgctgtttttgaaacaaaaaatggaaaaaaaataaacgcacagctaatcaaagtttttgatagtaaagaaagtgctaaaaaatttttaatagatagtattgaatcagaatattttattagtagtattgataaaaaacctgctaaaaaatcacctgtagcaccttttactacctcaacccttcaacaagaggcatcaagaaaattatatttttcagtaagtaaaacaatgacattagctcaaaaactatatgaatctggtttaataacatatatgagaacggatagtgttaatttatcaaaagatgcacaacagtctgcaataattcaaatcgaaacactttatggcagtgaatatgctcaagaaagaaatttcaaaacaaaaaataaatctgctcaagaagcgcatgaagcaatcagacctacggatatgtcaaaaattaaaatatcagctgattatgatcaaatacgtctttatgaattaatttggaaaagaacaatatcttctcagatgaaagatgctaaattagaaagaactcagcttagaattaaatcttctaaacagaacgaacttttttcagcaaatggagaagtaataatttttgatggttttttgagggcttatatagaaggaactgatgatgagataaatgaaaacagtggaattttacctaatgtcgaaaataaagattctgtatctatcaaagatttaaagtgtattcaaaagtttcaaaac

SEQ ID NO: 293691 - DNA, 1160 bp, Unknown
  Bacterial polypeptide expressing nucleotide sequence isolated from the Sargasso Sea
aatgaatttagtaattgttgagagtccagcaaaagcaaaaacaataaataaatatttaggtaaagattatttggttttagctagttatggtcacataagagatcttccttctaaaaatggatctgtagatcctgaaaataaatttcaaatggaatgggaaatagactctttttcaaaaaaatatttaaaagaaatcactaatgctgctgaagattctgataaaattattttagctacagaccctgatcgtgaaggtgaagctatcgcatggcatgttaaagaggttttagataaaaaaaagttattaaaagataaacaccttgagcgtgttgtttttaatgagattacgaagaaagcaattctagatgctattaaaaatccaagagaaattcatttacctctagttgaagcctatctggcacgaagagccttagactatcttgtgggatttaatatttcaccaatcctttggacaaaattacctggatcaaaatcagcaggaagagtacagtctgtagccttaaaacttattactgaaagagaaaaagaaatagaattatttaaaccagaagaatactggactcttacatcagactttacaaacaaagatgataaaaatattttttcaaaattaagtttgtttaatggagaaaaaattgaaaaattttctttcaaaaataaagatgaagtacaaaaagcagttgatgtaatcaataaaacaaaatttaagatcactgatgtgaatacaaaagtgtttagacgtaaccccctagcaccttttacaacatcaactttacaacagactgcttcgggacgatttggttttggagcttccagaacaatgcaaattgcacaacgactttatcaaggtgtggatatcgagggtgaaacaaccggattaattacttatatgagaactgatggaactaatatttcaaaagaagcaattgatgattttagaaaatttattactgatgattatggtgataaatatttaccagaagcaccaaatagttacacagggaaaaaagcaaagaacgctcaagaagctcatgaagcaattaggccgactaatataagtaggaaaccttctgatataaaaaaatatgtaaatgcagatcaatttaaactttatgaattaatttggagtagagccttat

SEQ ID NO: 293692 - DNA, 433 bp, Unknown
  Bacterial polypeptide expressing nucleotide sequence isolated from the Sargasso Sea
atgaatcttgtcatagttgaaagtcctgcaaaagctaaaactattaataaatatttaggtgatgactatacagttttagcgagttatgggcatataagagatcttccttcaaagaacggctccgtagatccagatgataaatttaaaatgatatgggaagttgatagtttttcaaaaaaatatttaaaagagataactgatgctgcaaaaaaatcagataaaattattcttgcaacagatccagatcgtgaaggtgaagctattgcttggcatgtaagagaatatttggaagaaaaaaaactcttaaaagataagaaaattgaaagagtagtttttaatgaaattactaaaaaagctgtaacaaacggaatagataaccctagaaatgtagaatctaatttagttgatgcatatatggcaagaagagctttgg

SEQ ID NO: 293693 - DNA, 2524 bp, Unknown
  Bacterial polypeptide expressing nucleotide sequence isolated from the Sargasso Sea
atgacaaaatctttagtaatagttgagtctcctgcaaaagcaaagaccatttcaaagtacttaggacctgagtatattgttgagtctagtgttgggcatattagagatcttccaaagaaaggtggcacaactagaacaaggcttgttgtaccaaaagatctcagtccagaggaaaaagtcagacaaaaggaaatcaatgctagaaaaagtttaataagaaggatgggtgttgatcctgataatggatgggatgcaaattggcaaataatacctgagaaagagaaggtgctgaaggctttaaaaaaagctgcaaagaatgttgataatatatatttagcaacagatttagatagagaaggtgaagcaattgcttggcaccttaaagaagctttaggacctcaaaaatacaattactcaagagtgagatttaatcaaattacaaaagatgcaattattgagtctttctctgatccaaaagaaatagaccttaatctggttaaagcatacagagctagaagatttttagataaagttattggttttgaattatctccattgctttggaaaaaaattgcacgaggcttatcagcaggaagagttcaatcggttgctttaagacttttagacgaaagagaaagatctatccaagaatttattccagaggagtattgggaaatttcgttttcagccactactaataatgacgaaacaattacatttaatcttgcaactaaaaaaacagatccattactctcaaaagaaaaagttgaaacaataaaacaacaaatagaatcatgcaatttatcaataaatgagatttctaagaagccagtaaaagtcaaaccaaaggctccttttattacatcaacacttcaacaatctgctagcacaagattgggtttcaacgtaaaaagaaccatgcgagttgctcaaaaactttatgaagcaggcttaatcacatatatgagaactgatgctcctagtttgagtaaagaatctataaaagatgctagaagttacattaatgaaaatattggagagaaatatcttaccaatgctcctaaaatttattctagtactgaaaatgctcaagaggctcatgaggcagttagacccactaatgcttatttaaagccacaagatgtaatgcatttatctgatgaagaatcaaaactgtatacattgatttggcaaagatttattgcctctcagatgcctgacgcagaatatttatctacatctgcaaaggtttttgttgaggaaaacatatttattgcaagaggtagagaagtagtttttgatggattcacaaaaattcttaagagttcatcaaaggaagaggatattcttccaaatcttcaagagagcgattctctcaaaagagaaactattgatctcgaacaaaaatttactaagcctccctcaagattttctgaagcagcccttgttagagagttagaaaaaaaaggtattggtagaccatcaacttatgcaaacattatttcaactattcaagatagaggatatgtagcaattgaaaataaaagattttttgttaaaaagattggtcatattgttgcggaaaggcttatggagagcttcgatgacatcatggactatgactttacagcaaaccttgaaaataatttagataaagttgcaaatggagatgctgattggcggagtattctagataatttttataaagcatttcaaaatgatcttaattcagcttctgatgaatatgttggaatgagacccggaaatattccaacagaaacaaatattatatgtccttgtgggaaaactaacatggtaataagaaattcttcgaatggtgtttttctgggatgttcaggttatcaaaattctggtgatgagaaatgcaaagaaacccttaatttgatttcaggcgatgaagcaataagcattgacgataatgaagaagtagaaaatttattaataaagaagagatgcccaaaatgtgaaacaagtatggataattatttgattgacgaaaacagaaagcttcatgtatgtggaaaaaatccagattgtgacggttatattgtagaagatggtcaatttagaataaaaggatatgacggtcctacacttgaatgtcataaatgtggatcagagatgcaacttaaaaccggtagatttggaaaatactttggatgtttaaatgataattgtggagctacaagagcacttcaaaggaatggtgaaccaaaacctatcacaatggagccaatagaaattaaagatctaaaatgcataaaatgcgaggatcattatctactaagagacagcatgaaaggtctgttccttgctgcaagccagtatccaaaaaatagagaaaccagagctcctaaggtttcagaaataaatagtctgcatgaagaaattattgaagcatgtaggtttttaccagataaagaaaaacacttatatctattagatgctcctgagaccgacaaggatggaaatccatatgtaataagatataacagaacagaag

SEQ ID NO: 293694 - DNA, 1348 bp, Unknown
  Bacterial polypeptide expressing nucleotide sequence isolated from the Sargasso Sea
atgtcaaaatcacttgtaattgtagagtcccctgcaaaggcaaagacgatatcaaaatatcttggtaacgaatatatcgttaaatcaagtgtgggtcatatcagagatttaccaaagggaaaatcaaaagctaagagacaaaattcaatcccaaaagatgctagtcctgatgaaaaggccagattaaaaaaagagcaagaaagaagaaggataattagaagaatgggtgtaaaccctgacgatgggtggactgccaattatgaaattattcctgataaagaaaaggtaataaaagatttaaggaaagcttcaaaggaagtagaaaaagtttatcttgctactgatcttgatagagaaggagaggctatagcttggcatcttaaagaagctttaggaaaaaataaatttgaatatcaccgagtaagatttaacgaaattacaaaaagttcaatattagaatctttctcagatcctaaggaaatagatcaagatctagtaaatgctcaacaagcaaggagatttcttgatagagtagtaggttttgaactttctccattattgtggaaaaaaattgcaagaggtttgtctgcaggaagagttcaatctgttgcattgagattgctttgcgaaagagaaaaattaatttcacaatttcaaccagaggaattttgggaagtttcagcaactttaaaagattttaatcatgaagaaatcttatttaagttaaatagaaaaaaaagcgaccctcttctaaaagaggatgaagcgaagaaaatagaggagctcgtaggcagttcaagtttagaaatatctgaaatcactaaaaaacctactacagttaaaccaaaagcaccctttataacatcaactcttcagcaggccgctagctcgaagttgggttttggggtctcaagaacaatgcgagttgcccaaaagctttatgaagctggaagaatcacctatatgagaaccgatgctcctagcttaagtaatgattcaattgaagatgcaagattatttattaaagatactcttgctgaagaatacctaacggaaaaacctcgaatatattcagggaaagaaaatgctcaagaggcgcatgaggcaataagaccaacaagcgcaagcttaactcccgaaaagctcagcggtcactcagaagaagaagtaaaattatacgacttaatttggagacagtttattgcatgccaaatgccagatgcaaaatatttatcaattaatgcaaaagtcattcttgatgattatgttttcagtgcaagaggaagagaagtaatttttgatggctatacaaaaatatcttcacaaaatgccaaaaaagcagacgaag

SEQ ID NO: 293695 - DNA, 751 bp, Unknown
  Bacterial polypeptide expressing nucleotide sequence isolated from the Sargasso Sea
atgaatcttgtaattgttgaaagtcctgcaaaagcaaaaactataaacaaatatttaggttctgattacacagtattagcaagttatggtcatataagagaccttccatcaaaaaatggttctgttgatccagaaaattcttttaaaatgatttgggaagtagacaatttctcaaaaaaatatttaaaagaaattacagatactgcaaaaaattcagaaaaaattattttagctactgacccagatcgagaaggtgaagcaattgcttggcatgtcaaagagtttttaaatgaaaaaaaacttctaaaagataaaaaagtagaacgtgtagtttttaatgaaataacaaaaaaagctgtaacaaacggaatagacaatccaagaaaaatagaaaatgaacttgtaaatgcctacatggcaagaagagcactggactatttagtaggttttaatatatcgccaattctatggacaaaattaccaggatctaagtcagcaggtagagtacagtcagttgctcttagattgttaactgagagagaacatgaaatagaagtttttaaaccagaagaattttggacacttaacctaaatttcttaacaaaagaaaatctaaatataaatacatctattactcaattagatggtaaaaaaattgaaaaattttcatttaaaaataaagaagacattaataatgctttagatttaattaaaaataaaaaatataatataacagacatacaatcaaaag

SEQ ID NO: 293696 - DNA, 394 bp, Unknown
  Bacterial polypeptide expressing nucleotide sequence isolated from the Sargasso Sea
atgaatcttgtcatagtagaaagtcccgcaaaagcaaaaacaataaataagtaccttggatcagattacacagttttagctagctatggccatattagagatcttccatctaagaatggatcagttgatccagaaaatgattttaaaatgatttgggaaatagatagtttttcgaaaaaatatctcaaagaaataacggatagcgctaaagattcaaaaaagataatattagctactgatccagatagagaaggtgaagctattgcttggcatgtaaaagagtttcttaaagaaaaaaaacttctgaaagataaagaagttcaaagagttgttttcaatgaaataactaaaaaagcagtaattaatggaatagataatccaagaaaaatagagc

SEQ ID NO: 293697 - DNA, 1276 bp, Unknown
  Bacterial polypeptide expressing nucleotide sequence isolated from the Sargasso Sea
aatgaatcttgtagtcgtagaaagtcctgctaaagcaaaaacaataaataagtacctaggaaaagattataaagtgttagctagttatggacatattcgtgatctaccttcgaaaaacgggtcggtcgatcctgaaaataattttcatatgctttgggaaattgattctttttcaaaaaaatatttgaaagaaatcacagatacagcggcagaatcaaacaaaataattttagcaactgaccctgatcgtgagggcgaggctattgcttggcatgttaaggaagtattgaatcaaaaaaaattattaaaagataaaaagatagaaagagttgttttcaatgaaattaccaaaaaagctgttacgaaaggtatagagaaccctagagatatagaaccacttttggttgatgcttacatggcgagaagagcattggactatttagttggattcaatatttctcctattttgtggaccaaactgcctggatcaaaatctgctggtcgtgttcagtcagttgctttaaagctaattactgaaagagaacacgagattgaattatttgatcctaaagagttttggaccttaaaggtaaaatttaaagataataacaataacataataacttctaatatttctcaactagaaggaagcaaagttgaaaagttttcttttaaaaataaagaagaaataaatgatgctgctgaacgaattaaaaagatgaaatttagtatttccgatatatcatcgaaaattgttagtagaaatccatcaggtccttttacaacatcaacactacagcaagtgtcctctggaagattaggtttaggtgcatcaagaacaatgcagattgctcaaaagctttatcaaggaattgaaattgaaggtgaaactataggattaatcacatatatgagaactgatggtacaaatatatcagaagaagctgtaataaattttagaaattttattaaaactaagtatggaaatgaatatcttcctaaagatcctttaaattattctggtaaaaaagcaaagaatgcccaggaagcccatgaagcaatacgacctacagatatcgatagaacgcccgataaaataaagaaatatttaagcccagaacaacataaattatatgatctaatttggagcagagctttgtcttcacaaatgcaatcagcgcagtttgatagaaacactattacaattacatctgataacaaagatacaattttaaaaactactggttctgtaattaaatttgatggttatttaaaa

SEQ ID NO: 293698 - DNA, 1450 bp, Unknown
  Bacterial polypeptide expressing nucleotide sequence isolated from the Sargasso Sea
gctgaacgcgtattgatcgcaacagacccggatcgagaaggagaggcaatagcggcacaccttgcgactgaagtccctgaagaaaaaatagaacgggtccaattcactgagatcacaaaagcgggtatctctgaaggaataaataacattcgtgaaatagataaagatctagtggctgcacagactgcacgtagagttatagatagacttgttggctataaggtttcaccagttttatgggcaaccctgcaaagcaatatgaattttgttaagaccaatctttcagcagggcgagtgcaatcagcggcagtaaaaataattgttgaccgagatcgcttaagggcaaagttcataagatctaatttttttgacctaagatctgaactgaccaaagctggtgagacaaatatattcaatgcaaccttaagaaagatagacggtgtcaaaatagcaagtagtaatgattttgattctcagactggcgaattaaagaatagtgatgtattactgctatcagaatcacaagctgacgaactagttaaagagctgcaatcagcaccttggaccgttactgatattaaagaaaaaccaaggacatctaatcccaagccaccattcacaacaagcacattacaacaagaagcctcaagaaaattaagaagttcagcaagacaaacaatgagcactgcacaaaaactctacgagaatggttttattacatatatgagaactgattcaactcatctttctgaagaagccattgctggttctagaaatgttataaaaaaactttatgggaaagactatttgccagataaagctattgagtattccacaaaggtacgtaatgctcaagaggcacacgaggcaattagacccgctcaccgtgagtttaggtctgttgatgatgttcaaaaagttcttggcgatgatgcatcaaaattatatgatctaatttggaaacgtaccgttgcaagccagatgaaatcagcaaagctaatgcagacagccgtaaccattgaaaatcaaaaagcagaattccgagcaaatggacaggttatcttattcccaggatatatgagggtctatgttgagggtagagacaaccctgataaagacctagctaataaggaaaaaattctgccagcgttggatgttggtgaaaagcttaattgtaaatcgcttgagtcagaatcgcataatacaaaaccacctgcacgttttactgaagcttcacttgtaaaatcattagaagagaatggtattggtaggccctctacttttgcatctattttagccactattgttcgtaggggctatgtagaccgaaaaagtggaaaactttcacctacatatcttggtttagccgttacgcaactgttggagaatcattttactaatttagttagtaaagaattcacagctaaaatggaagatggattggatgagg

SEQ ID NO: 293699 - DNA, 1600 bp, Unknown
  Bacterial polypeptide expressing nucleotide sequence isolated from the Sargasso Sea
tttaatcatgaagaaatcttatttaagttaaatagaaaaaaaagcgaccctcttcttaaagaggatgaagcgaagaaaatagaggagctcgtaggtagttcaagtttagaaatatctgaaatcacaaaaaaacctactacagttaaaccaaaagcaccctttataacatcaactcttcagcaggccgctagctcgaagttgggttttggggtctcaagaacaatgcgagttgcccaaaagctttatgaagctggaagaataacctatatgagaaccgatgctcctagtttaagtaatgattcgattgaagatgcaagactgtttattaaagatactctagctgatgaatacctaacggaaaaacctcgaatatattcagggaaagaaaatgctcaagaggcgcatgaggcaataagaccaacaagtgcaagcttaactcctgaaaagctcaccggtcactcagaagaagaagtaaaattatatgacttaatttggagacagttcatcgcatgccaaatgcctgatgcaaaatatttatcaattaatgcaaaagtcattcttgatgattatgttttcagtgcaagaggaagagaagtaatttttgatggttatacaaaaatatcttcacaaaatgctaaaaaagcagacgaagaaaatcttccaagtttggaagaagggcaagttctaaaattggtcgaagtaaaaaatgagaaaaagtttactaagcctccagcgcgattctctgaggcagcacttgtaaaggagcttgaaagcaaagggataggaagaccgtctacgtatgcagcaattatttctacaattcaggctagaggctatgtaaagcttgagaataaaagattctttgtgaataaaattggcttaattgtttctgacagactgatggaaagtttcaatgaaatcatggattatgactttacagccaatttagaaaatgaacttgatgaaatagcttctggcaatcttgagtggaaatcagttctaaataagttttatcaaacatttcaagatgatcttaataatgcaggatcagctgaagatggaatgaagccaaacgaaccaactgaaacaaacattatttgtccctcttgcaacaagagtaatatgttaattagaaattcagctaatggtgttttcttaggttgcgcaggctatttcaagtctggtgatgaacaatgtaagcatactatgaaccttataagtggtgatgaggcagtaagtgtcgatgatcaagaggaagcatcaaatctcttcattaaaaaacgatgtcatatttgtggaactagtatggataattacctaatagatgaaaataggaaaattcatgtgtgtgcaaataatcctgagtgctctggatttcttcttgaagaaggtcaatttaaaattagaggatacgatggaccaacccttgaatgtcataaatgtgggtccgatatgcaattgcaaactggaagatttggaaagtattttctttgtcaaaatgataattgcagagcaactagacaattaatgaggaatggagaacccaagccaattgttatggatccaataaaaacaaacattgcatgtgagaaggtcgaag

SEQ ID NO: 293700 - DNA, 2551 bp, Unknown
  Bacterial polypeptide expressing nucleotide sequence isolated from the Sargasso Sea
aatgaatttagttattgttgaaagtcctgcaaaagccaaaacaattaataaataccttggtaatgaatttaatgtccttgcaagctttggtcatgttcgagatttgccttcaaaaaatgggtcagttgatccagaaaacgatttttcattcgaatgggaagtttcaaatacatcaaaaaaacatattaaagagatatacgaagcagcagaatcttcttctcatatatttcttgccactgacccagaccgagaaggtgaagccatcgcctggcacataattgaattattaaataaaaaaaagcttataaaagacaaatctgtaaaaagggtagtgtttagtgagatcaccaaatcagcggtaaaaaacggtattgataatccaagggaacttgaccgctcattggttgatgcttatttagcaagaagagccctggattacttattcggttttaatttatctcctgttttatggagaaagcttcctggagctaaatctgcaggaagagtacaatcagttgcactcagactaatttgtgaaagggaagttgaaattgagtcttttgaccctcaagaatactggaaaataaaagctaatatagatgtcttggaaaatactattgagtcaaacctcactcattttaataatgagaaaatagataaattcacttttaaaaatgagagtgaagctaaaaaagttactgagtctttcaaaggaaaaaattttaaatttacagacattacgaaaaaacctgcttctagaaacccagacgctccatttagtacatctactcttcagcaaactgcctcaagtatttttggatttggggcctcaagaacaatgcaaattgctcagcgtcttttccaaggtgtcgaaataaacggtgaaacaactgggttgataacttacatgaggacagatagcactgacttatcaaaagaggccatagactcatataggagatttataaaagataactttgatccagcgtaccttccaaaagaaattaggagttttaaaagtaaaaaagcaaaaaatgctcaggaagcccatgaaggcattaggccaactgacgtgttaagaaaacctgaagatatgaagaagtatctagatacagatggctttaagctttatgacttaatttggaaaagatcactggctagtcaaatgaattcagcagcatttgaaaggactgcaattacgatttcaagtgaagatgaatcattaaaacttagagcgaatggctcaatccaaacatttgatggtttcttaaacatatatagtgaatttaataaaaaatcagatgacactgatttagatgagaatgaggaagataaggaccttcccaacattaagctggaagacaaaattgaaaatgttgatcctttaagcactcaacactttactcttcctcctcctagatattcagaggcaacattggttaaaaaacttgaggaacttggaattggaaggccgtcaacctatgcaagtataatatcagttttaaaaatgagaaattatgttgaagtagagaaaaatcgtttcattcctgaagacagagctattctcatcacaggttttcttaagggctttttctcaaaatacgttgactatgaattcacagctgaaatggaagaatcacttgatgaaataacgtctggtcaaatagattggaaagaatttctagaaaagttttggaagaatttctcgtcaaatataggagaggtaactgatttaagaattacaaatgttctggatcatctaaatgatagccttaaaaatcatatttttgttgaaccagagggaaaaaatattacacgctgttgcccatcttgtgaaggtgaactgagcttaaaagttagtagatttggtgcattcgttggctgttcaaattatcctgaatgtaagtttacaagacctatttctccaagaaaaataaaagaagtggttgaagatacaattcttggagtagacacggaaacaaataaagaaattaagcttttaagtggcagattcggaccctacatacagcttggtgacaatgatcaaaaagaaaaaccaaaaagagcaagtattcctaaaggaataccagcttcagaaatagatcttgataaagccaattatcttttaagccttcctcgagaaattggcactcatcctgaaaatggtgaaatgataagcgtaaattatggtcgctatggtggatacattacttgcagtgacaaaaatgcaagccttgaggataattcagaaatatttgaaattggaattaatagagctgtaacacttttagcaaacgctaagccaggaaggctaaaaagttcatctgaaatcaaaactcttggtgaacatcctgaggataaaaagccaataaaagttatgaaaggtaagtttggtccctatataaaatataagacagtaaatgccacaattcctgacaacattgatccagaagaaatagaaattgaagttgccattgatctaattgagaaaaagatggaaaaaatggggaaaaaaaagaagataccgaagaaaaaatcttcaaaaaaataa

SEQ ID NO: 293701 - DNA, 1175 bp, Unknown
  Bacterial polypeptide expressing nucleotide sequence isolated from the Sargasso Sea
tatgaatctagtcatagttgaaagccctgctaaagctaaaacgattaataaatatttaggcgataactataccgttttagcaagctatggtcatattagagatcttccttcaaaaaatggatctgttgatcctgatcaaaattttaaaatggaatgggaaattgatagcttttcaaaaaagtatttaaaagaaattactgatgcagcgaaggattcttcaaaaataattcttgctacagacccagatcgtgagggcgaagcaatagcatggcatgtaaaagaatatttagatgaaaaaaaacttttaaaggataaagaaattgaacgtgttgtatttaatgaaataacaaaaaaagctgtcacacatggtattgaaaatccaagacagattgagcccttattagtcgatgcatacatggctagaagagcactagattatttggtgggatttaatatatcaccaatactttggactaaactacctggttcaaaatctgctggtagagttcaatctgtagcgctgaaattgatcactgaaagagagcatgaaattgaattattcaacccagaagaattttggactttaagtattaattttcaggataaaaacaaaagcaatattacagcaagtatttctcaacttgatggagaaaaaattgaaaaattttcatttaaaaaaaaagaagaaattgaaaaggcaattgataatattaagaacaaaaaatttaacataactgatatttcctcaaaagttatcagcagaaatccctcaggaccttttactacttcaacacttcagcaagttgcttctagtagattgggttttggtgcatcaagaacaatgcagatagcacaaaaactttatcaaggaattgaaattgagggagatacagttgggctaattacttatatgagaacggatggaactaatttatcagctgatgctgtcactgattttagaaactttattaaaaaagaatatggtaaagaatacttgccacaaaatccaaataattactcaggaaaaaaagcaaaaaacgctcaggaagctcatgaagcaataagaccaactgatattaatagaaacccagattctgttaaaaagtatttaagttctgaccagcaaaaattatattctttaatttggtctagagctctatcgtctcaaatggaaa

SEQ ID NO: 293702 - DNA, 1384 bp, Unknown
  Bacterial polypeptide expressing nucleotide sequence isolated from the Sargasso Sea
cctggagatcttgatgagggtctcattgacgcgcaaaaaacaagaagaatcttagatcgtatcgtaggttatgatttatcaagtttattgtggcaaaaaattggaagttacggaaaactatcagctggaagagtccagtcagttgcagtgagattagttgtcgagcgtgaaaaggaaatcaaagctttctctcctcaagaatattgggaattcgaagttagcgtaaggcatgatgaaagagatatagccctcaaacttaatactaaaaagtctgggttagaagtaaactcaaaagaggaagcagaaaaaattgcttctgcattaaaagagcatgaaatagaaatcattagcaatgaaaaaactaaacgtaagatcccagtcaaaccaccatttataacatctacccttcagcaaacctccagttcaatgctgggttttagcttgtctaaaacaatgaaattggctcaagacttatatacaggtggatatatttcatatatgagaactgactcacctaatattagtgtgttggcccaaaacaactgtaaacaatatcttctagatacatatggtgaggtatatagcgcacctaaaaatttcgcggcaaaagcatcaaattctcaagaggcacatgaagctataagaccaacagacgtaactttcaaagcagatgaattatctctaagccaagaccataaaaaactttacaacttaatatggtctagatttgtggcatcacaaatgccccaacctgaaatagttgttaacagcatcaaagctcaaagtgagactaatatttttgaaacctcagtaagtagcataagctttgatgggttctataaagtaatgcctcctggaaaaaatagtggatatgttgattacgatcttgaaagcctttcggtcggtttgatgaaaaaaattaataaagttgaaaaatcccaacatttcacaaaacctccatcaagatattctgaggctagcttggtaaaagaattggaaaaacgaggtataggacgaccatcaacctatcaagagattattacaaatatacaagatagaggttatgtcagaagtgagaataaaagactttatgcgaccaaaatagctaatttaatctctgaccgactaatcaaatccttcactaatattatggattatggttttacagcaaatatggaaaagagcttagatgaagtagcggagggcaaagaaagttggaaaaaattactagaagaattttatgctgaattcaatgaagctaaaaaagttgcagttgatggcatggaaagaaataacccaatttctaccaaggttagatgcgctgaatgcgattgcgacaaagaaatgattctaaggactaatcaaacaggccaattcctcggat

SEQ ID NO: 293703 - DNA, 2181 bp, Unknown
  Bacterial polypeptide expressing nucleotide sequence isolated from the Sargasso Sea
tcaatgaaattacaaaaaatgctgttctggatagtttaaaatcaccgagagaaatcgatgaaaatttagttaatgcttatctggcaagacgtgctttggactttttagtaggctttacactatctccagttctgtggagaaaattacctgggtcaaaatctgctggaagagttcaatcagttgctcttcgaattattagtgagcgagagttagaaatagaaaaatttaatcctgaggaatactggtccattcaaagtaattttaaaaataatgaagataaacttataaattcacgtcttactgtttatgaaggaaaaaaagttgataagcatgatattaaaaatgagaaacaagctactgatatttatgatcaaatacaaaactcaaaattcaaagttagcaacatcacaaaaaaagaagctaaaagaaatccctaccctgcttttaccacttccaccatgcaaatcgagtctagccgaaaattaggtttaagtgcaagtcaaactatgcggacagcacaaaaactttatgaaggtactgaaataaacggtgagacaacaggtttaatcacttatatgagaacagacagtgtagtgatgtctaatgaagcgattaatcaggtacgcaattttgtaagtcagaattatgggaatgaatatcttcctgaaaaaccaagagtttataaatctaaagctaaaaacgctcaagaagctcatgaatgcataagaccaactgatattaacttaactccaaaagatattaagcaatacattactggtgaagaatttaaattgtatgaaattatttggcaaagggcagtatcttcacagatggctagtgccgtattagatcaaatggcagttgatattgttgatgaagataaaaaaataacacttagggcaaatggctcaactataaaatttcctggaatgtataaagtttatcaagaagcaaaagatgatgacaaggatgaagaaaaagaaacgatactaccaatgatgaatgaaggtgaaacattagatttaaaggaggtaatcaaaaatcaacattttacaatgccccctcctcgctacacagaagcaagtttagttaaaaaactagaagagcttggtattggcagaccttccacttatgcttccattataaaagtcttacaagatagagattatgtaattttagataagaaacgttttaatcctcatgatagaggtcgtattgtatctatattccttgaaaaatattttaatcaatatgttgaatatgattttactgctgatcttgaaaatcaattagatgaaatttctgatggtaaattagattggaaagaagttttacgaaaattttgggaaacttttaaacaattatgtgatgatactgttggaaaatcaaatagagaagtaattgatgtacttgatgatgctttaggagcgcatttttttccaccagagggaaaggatgaaagtagaaaatgtcctacatgcgataatggcagacttggaataaaagtaggaaaatttggaggatttattggctgttcaaattacccagattgtaaatatacagttcaatttaatcaattaaatgacaaagatggcactactttaagtggcccaaaagaaattggtaattatccagaaacaaatgagatgattacactccgaaaaggtccttatggtttctatatgcaagtaggtgaaggtactccagaaaagaaaccaaaaagagtttcgatacccaaaaattttgaacctgaagaaattggtcttaatactgcaatacagttgttaggcttgccaagaaaattaggatttcatcctgagacgaataaaacagtcagtgcaggaattggtatgtacggaccatacattcttcatgataaaaaatataaagctctagaaaaaacagataatatattggatattgaattagaaagagcaatcgaattaattgccaaacctactcaaagaggtaatgcaacactcaaaacttttggcgaacatccaggtgaaaaaaagaatattacagctcatgatggaaagtttggaccgtatgtaaaatgtggtaaaatcaatgcttcacttcttggagatcaaacaattgatagtttaactcttgcagaagctataaaacttatcgatgatagaaagcaaaaaataggtttaaagaaaaagaaaaaataaa

SEQ ID NO: 293704 - DNA, 1462 bp, Unknown
  Bacterial polypeptide expressing nucleotide sequence isolated from the Sargasso Sea
aatgtcaaaatcactcgtaattgttgaatcaccagcaaaagctaaaacaatatccaagtatttgggacctaattatattgtcgaatcgagtgttggacatataagggatcttccaaaaaaagcttcatctgatgtgaaacgttttacaacacctaaaaacataagtcctgaggaaaaggcgagattaaaatctataaatgaaagaaaaagacttatcagaaggatgggaattgatccggataatggatgggaagcagtttggcaaattattccagagaaagaaaaagttataaaaaatcttaaaaagatagctaaaaattgtgagcatatatatcttgcgacagacttagatagagaaggtgaagcaattgcttggcatcttaaagaagctctaggatctgaaaaatacaattattcaagagttagatttaaccagataacaaaagatgcaatcaatgaatcatttttagaccctaaagaaatagaccttgatttagtaaaagcatacagagctagaagatttttagacaaagtaattggtttcgaattatcaccattgttatggaaaaaaattgcaagaggtctatcagcaggaagggtccagtctgtagctttgagacttcttgatgagagagaaagatctattcaagaatttattccagaagagttttgggaaattgatttggatgttgtatctaaacaaaacgaaaaacttaaatttattcttaatagaagaaaaaatgatcctttgcttaaacaagaagatgtaaaactaataagggataagataaatgataaccaactctcaattaatgaaatcataaaaaaacctgtaaaggttaaaccaaagccaccttttattacctcaacgttacaacaatctgcaagtacaaggctaggattcaatgtcaaaaggacaatgagagtagctcaaaagctttatgaagctggatatataacttatatgaggactgatgcacctagcctgagcaaagactcaattaatgatgcaagaaatttcataaatgagaatctcggcgaaaattatcttacaaatgctccaagaatttattcaagcacagagaatgctcaagaggcacatgaagctgtaaggccaacaaacacttttttacgctcatctgatttaataaatttaagcgaagaagaaataaaactttataaattaatttgggagagatttgttgcatctcaaatgcctgatgctgaatacttgtctacatctgcaaaaacatttgttgatgagcatatttttgttgctaaaggtagagaattagttttcgatggctttacaaaagttctcaaaacctcctcaaaggaggaagatattcttccatcactcaatgaaggagattccctaacagttgaaaatatcaatttagagcaaaagtatacgaagccaccatcaagattttcagaagctgcacttgttagagaactagaa

SEQ ID NO: 293705 - DNA, 1831 bp, Unknown
  Bacterial polypeptide expressing nucleotide sequence isolated from the Sargasso Sea
atgaatctagtaattgttgaaagtccagcaaaagcaaaaacaattaataaatatttaggatcagattatacagttcttgcaagctatggacatataagagatctaccttcgaaaaatggttctgttgatcctgaaaatgattttaaaatgatttgggaagtagatagtttttcaaaaaaatatttaaaagaaattacagatagtgctaaagattcaaaaaaaattattctagctactgaccctgacagagaaggtgaagcaatagcttggcatgtaaaagagtttcttgaagaaaaaaaattattaaaagataaagaagttgaaagagttgttttcaacgaaataacaaaaaaagcagttacaaatggaatagataatccaagaaaaatagagccacatttagttgatgcttatatggcaagaagagctctagattatctagtaggttttaatatctcccccattctatggacaaaattaccaggttctaaatctgctggtcgagttcagtctgtagctctaagacttttaaccgaaagagaacaggaaatagaagtttttcaaccaaaagaattttggactttaaatataatttttaaaaataacaaaaatgaaaaaataaatacaactatttcacaattagatggaaataaagtcgaaaaattttcatttaaaaacaaacaagatattaatgatgctttatctaaaataaaaaataaaaaatacaatataacagatataagctcaaaaacttataacagaaatccatcaggaccatttactacatcaacattacaacaaacagcatcgagtaaacttggttttggagcatcaaggacaatgcaaattgctcaaagactatatcaaggaattgatattgaaggtgaaaccgtaggattaattacttatatgagaacagatggaactaatatttcaaaagatgcgataacatctttcagagattttataatgcagaattatggtgataaatatttaccagaacaacctctaaattatagtggtaaaaaagcaaagaatgctcaagaagctcacgaagctatacgtccaacagaaataattcgaaaaccagaagatatgaaaaaatacttaagtactgatcaatataaactttataatttaatatggtctagatctttatcatcacaaatgcagtcagcaaaatttgatagaaaaactattaccatcaactcagatgatgataaaaatatattcaaagctagtggttcaacattaaaatttgatggtttccttaaactatataagatcgatgaaaatgatgatgacaatgaaaatattttgccagatgttgaaaaaggtgatgtaatgtttgaagatcatattgatgaacagcactatacacaaccaccacctagatattcagaggcaagtctagttaaaaaattagaggagctaggaattggaagaccatctacttatgcaagtattatttcagtaatagctaatagaggttatgctgacataaataataaaagatttttcccaactgatagagggaaattactttctgcttttttagaaaaattatttaccaaatatgttgattatgattttactgcaaaattagaagatcaattagatgatataacatcaggtaaagaaaattggataaaagttctagagaacttttggaaagactttaattctaatgtttcaggtgtgaaagaaaaaagaaccagagaggtattagatctattaaatgaaagtcttggatcactaatatttgaggtcgataaggatggaaatattgatagaaaatgcaagctttgtgagtctgggcaattaagttaaa

SEQ ID NO: 293706 - DNA, 396 bp, Unknown
  Bacterial polypeptide expressing nucleotide sequence isolated from the Sargasso Sea
tatgaatcttgtcatagttgaaagtccagctaaagctaaaacgattaataagtatttgggaccaaattatacagttttagctagctacgggcatattagagaccttccttccaaaaatggttctgtagatccagaagataaattcaaaatgatatgggaagtagatagtttttccaaaaagtatttaaaagaaattgtagatgctgcaaaaatatctaaaaaaattattcttgcaactgatcctgatcgagaaggtgaagcgatagcttggcatgttaaagaatatctggaagaaaaaaaacttttaaaagataaagaaattgaaagagtagtatttaatgaaattacaaaaaaagcggtaactaatggaatagataatccaagaaatattgagtc

SEQ ID NO: 293707 - DNA, 1147 bp, Unknown
  Bacterial polypeptide expressing nucleotide sequence isolated from the Sargasso Sea
aagggtgcggatcagctgctgctggccacggacgaagatcgcgaaggggaaagcatcagctggcacctgctgcaactgctggcccccaaggttccggtgaaacggatggtgttccacgagatcaccaaagaagccatcggcaaagccctggaccagacccgtgatctggacatggagctcgttcatgcccaggagacgcgccggatcctggatcgtctggtgggttacaccctctcgcctctcctgtggaagaaggtggcatggggactgtctgctggccgggttcaatcggtcgctgttcgtctgctggtgcagcgggaacgggcccggcgggccttccgcagcggtagttactgggacctcaaagcccagctcgagcatgccggcagcgggtttgaggccaagctgacccatctggatggccgccgaatcgccaccggtaacgacttcgacgaaagcaccggtggcctgaaggaaggcagcgaggtgcggctgctgacggaagaggaggcccgctccctggcgcaaacggttcagaccgctgcctggtccgtggatgcggtggaggagaaaccaacggtccgtaagccggtgccgccgttcaccaccagcaccctgcagcaggaggcgaaccgcaagctgcgcctctcagcgcgggaaacgatgcgctgcgcccagggcctttacgagcgcggtttcatcacctacatgcgaaccgactcggttcacctttccgatcaggcgatcagcgcctcccgcagctgtgtggagggcctttacggcaacgagtatctgagcaaggggccgcgtcaattcagcaccaaggcacgcaatgcccaggaggctcatgaggcgatccgcccctccggcgagagcttccgcacccctggggacaccgggttggagggccgtgatctggcggtctatgacctcatctggaaacgcaccgtcgccagccagatggcggaagcacggctgaccatgctgtcgatcgatctcagctctggagaggccagcttccgagccagcggcaagcggatcgatttccccggcttctttcgcgcctacgtcgagggcagtgatgaccccgatgcggcccttgagggccaggaagtgctcctgcccgctctggcggtgggtgatgccc

SEQ ID NO: 293708 - DNA, 1723 bp, Unknown
  Bacterial polypeptide expressing nucleotide sequence isolated from the Sargasso Sea
ttagaaaaaattaaaaaaaaaaaatataaaattgttgatataagttcaaaaacctacacaagaaatccgcaaggaccttttacaacatctacgttacaacaaacagcatccagtaaattagggtttggtgcttcaagaacaatgcaaattgcacaaagattatatcaaggtattgatatttcaggtgatactgtaggtctaattacgtatatgaggactgacggaacaaatatttcaaaagatgcaatagaagattttagagattttattcaaaattcttacggagaaaattatttaccaaaagaagctaataattattccggtaaaaaagctaaaaatgcacaggaagcccatgaggctataagacctacagatataaaaagaaccccagaggaaatgaaaaagtttctaagcacagatcaaataaaactttatgacttaatatggtctagagctttatcatcacaaatggagccagcaaaatttgacagaaaaacaataactatagcttctgaggacaatttagatcaatttaaatgttctggctctacattaaaatttgatggatttttaagagtaattaaacagaacgaaaatgaagatgaaacaatacttcctaatgttaaagaagagaaagtagaaattaataattttgtagatgaacaacattttacacaaccacctccaagatactcagaggcaagtcttgtgaaaaaattagaggaacttggcataggaagaccctctacttatgctagtataatatctgtaatatctaatagaggttatgcggatattgtaaacaaacgtttttttcctactgacagaggtaaattgttatcagcatttttggaaaaattatttacaaaatatgtagactacggatttactgcagatttggaagatcaactcgataatattacctctggtaaagaagactggattaaagtgttagaaaaattttggaatgactttaatattaatgtatctaatgtcaaagaaaaaagaacaagagaagttcttgatcttttaaatgaaagtttaggggaacttatttttgagtcaaatgatggggagatcgacagaaaatgcaaattatgcaacaacggtgagttaagcttaaaaaatagttttcggggtggtgcatttattggttgctctaattatccagaatgcaagtttaccagacctctatctaaagcaaaggctaaggatcaaattgctttatctgaaccaaaattaatcggatctaacgatagcggtaaagaaatatttttaaaaaacggaaggtttggtccatatttacaatacgaaatcgatgacgatagtgatgtattaaagaaaaaaaagaaaaaaaaagaaaacgacaacctaaaaaatgtatctattccaaaaggtatagacattgaaactatagacttagataaagcaaaatatttatgctcattgccgaaaattttaggtcagcatcctgatagtgggaaggatataactgtaaattcaggtagatttggtccatatcttaaatgtgaaaataaatctgctagattagaaaatgtggatgaattatttactattggtttaaatagagcaataacattaatagctgaagctaaacctgggagaatatcgtcatcattaattaaagatttaggagagcatcctgaagataaaaaaccagttcgaatcatgaagggtcaatatggtccatacataaaatata

SEQ ID NO: 293709 - DNA, 2137 bp, Unknown
  Bacterial polypeptide expressing nucleotide sequence isolated from the Sargasso Sea
gaaattgatagtttttctaaaaaatatttaaaagaaatttctgatgtagcaaaagactctaaaaaaataatacttgccacagaccctgacagagaaggtgaagcaattgcatggcatgttaaagaatttttaaatgaaaaaaaactactcaaggacaaaaaaattgagagagttgtttttaatgaaataactaaaaatgcagtcacaaatggaatagaaaatccaagagaaatcgaatctgatcttgtaaatgcttacatggcaagacgtgccttggattatttagtaggttttaatatttctcctatactttggactaaactcccgggatctaaatcagcaggtagagtacaatctgttgctctaagacttttaaccgaaagagaacatgaaattgaaatttttaagcctgaggaattttggtctttaaaagtaaattttaaaacaagtgatggaaatttaataacatcaaatatttttcaaattgaaaataaaaaaattgaaaagtttagtttcaaaaataaaaacgatattaatcaagcaatagaaaaaataaaaaaagataaatataaaattacagatattacatcaaaaatatattctagaaatccttctggaccttttacaacttcaacattacaacagtcagcttcaagtaagcttggttttggtgcctcaagaacaatgcaaattgctcaaaggctgtatcagggtattgaaattgaaggtgaaactaaaggattaatcacttacatgcgaacagatggtaccaatatatctaaagaagctttgccagtttttagaaacttcataagtgataactttggtaatgaatatttacctgatcaaccaattaattactcgggtaaaaaggcaaaaaatgcgcaagaggctcatgaggctataagaccaacagaaataagtaatacacctgaaaaaatgaaaaaatatttaagctcagatcaaaataaattatataacttgatttggtcaagagctctatcttcacaaatgacaccagcaaaatttgatagaaaaacaattattattgagtcaaataacaaagaacatatctttaagtcgtcgggttcaacgatagtgtttgatggtttcatgaaggtaattaatttagatgatgataataatgatgaaaatattttaccaaaagtagaaaaaggagaagtgaatatatctgattttatagatgaacaacattttacacaaccacccccaagatattctgaagctagtttagttaaaaaattagaggaattaggtatcggtcgtccttctacatacgcaagtattatttcagtaatatctaatagaggttatgcagacgttgttaataaaagatttttcccaactgatagaggaaaacttttatctgcctttcttgaaaaactttttgcaagatatgttgattatgactttactgcaaaattagaagatcaattagatgacataacctcaggaaaagaaaattggctaagtgtattagatcaattttggcaggattttaataaaaatgtctcatctgtaaaagagataagaactagagaagttcttgatatgttaaatgaaagtttgggtaatttgatattttatacaaatgatgatggtaaaatcgacagatcttgtaagttatgcgccaatggtacactaagtttgaaaaatagctttagaggaggtgcgtttattgggtgttccaactatccagaatgtaaatttacaagacctctttcaaaaattaaagcatctcaacaaataaatttagcagagcctaaattaattggtaaaaacgataatgataaagaaatttatttaaaaagtggaagatttggtccttatttacaatacgaattattagaagatgaaatagtaaaaacaaaaaaaagaaaaacaaagaaagaggaaaataatttaaaaaatgtatcaattcctaaaggcctagatatagaaaatatagatttagaaaaagcaaaatatctatgctctctacctaaaattttaggtactcacccagatattggtaaagaaattacagtcaacgttggtagatttggaccgtacttaaagtgtgaaaacaaatcagcaagaattgaaagtgtagatgaattattttttttggtttaaa

SEQ ID NO: 293710 - DNA, 1612 bp, Unknown
  Bacterial polypeptide expressing nucleotide sequence isolated from the Sargasso Sea
cctgaagagttttgggacgtacacgcagatttaactagccagcaaaaagcggcactgcgcatgctggtagcaaagcaccagggcaatgcgttcaagcctaaaaacaaggccgaatcagataaagcgcttgctgacttagaaggcgctaactacacggtagaaagccgcgagtcaaagcctacgcaaagtcgtccttctgcaccatttattacctcaacgctacaacaagcggcaagtactcgattgggctttggtgttaagaaaaccatgatgatggcacagcgcctttatgaggcgggctacatcacctatatgcgtacggattcaaccaatttaagccaagaggcgctggacagtgctcgtgcgtatatttcagataattttggtgacaagtacctgcctgattcgccaaatcgctacggcagtaaagaaggtgcgcaagaggcgcacgaagcgatccgtccttcaaacgtgagcataagtgctgcaagtttgggcgatatggagcgcgatgcacagcgactttatgagcttatttggcgccagtttgtggcttgtcaaatgactccagctaagtacgatgcaaccactatcaaagtggcggcgggtgattacgagctgacggcgaagggccgcgtacttaagttcgatggctggactcgcgttcaacctcagcttcgtaaaaaaggcgaagaagagctcatgttgcctgatgtacaaaaaggcgatgtgcttgacttaaaagcgcttgatcctaaacagcacttcaccaagcctgtagcgcgatttaatgaagcttcgttggtaaaagagcttgaaaaacgcggtattggtcgtccatcgacctacgccagtattatttcgacgattcaagatcgcggctatgtgcgcttagagaacaagcgtttttatgccgagaaaatgggcgaaatagtaaacgatcgtctgatggaaaactttgacgatttaatgagctatgactttactgccaacatggagcagcatcttgatgatattgctgaaggcaagaaagattggaaggacgtgctcaacgacttttacagcggcttctacggaaaactgttaaacgctgagaaagaccctgaagagggcggtatgcgcttgaatcaggcagtgcctgcaggtgttgagtgcgataaatgcggccgtgaaatgaacgtgagaaccgcgtcaactggcgtattcttgggctgttcaggctacaatttaccgccgaaagagcgctgcacaaacaccatgaatttaacgcctggtgatgaagtcgtgaaagtggacgatgaagaagagctcgaaacagaagcgcttcgttctaaaaagcgttgtcctaagtgcggcacggcgatggacagttacttggttgacgaaacccgtaaacttcatgtgtgtggtaacacaccaacatgtgatggcaccttagttgaaacaggcacattcaagataaaaggctatgacggccccattattgagtgtgataaatgtggcagcgatatggagcttaaaaacggtcgatttggtaaatacttcggctgcaccaacgaagagtgtaagaatactcgcaagctacttagaaacggtgaagctgcgccgcaaa

SEQ ID NO: 293711 - DNA, 1171 bp, Unknown
  Bacterial polypeptide expressing nucleotide sequence isolated from the Sargasso Sea
aaaactatttcaaaatatcttgggtctgaatatattgttgaatcaagtgttggtcacataagagatcttccaaaaaaagcatcaccaagttctaaaagagcatcaattcctaaagatgtttctccagaggaaaagctaaggcttaaaaccattaatgatagaaataggctaataagaagaatgggaatagatccagataatggttggactgcaaactggcaaataatcccagaaaaagagaaagtaataaagtcattaaaaaaagcagccaaaggagttgatcatatatatcttgcaactgatcttgatagagagggtgaagctatagcatggcatcttaaggaaatacttggtccagagaagtatgaatattctagggtaagatttaaccaaataacaaaatcatcaattattgattcatttaatgatccaaaagaaatagatttagatttagttaaggcttatagagcaagaaggttcttagataaagtaattggatttgagttatctcctttattgtggaaaaaaattgctagaggtctctcagctggaagagttcaatctgttgccttaagagtcctagatgaaagagaaagattaattcaagaatttattcctgaagaattttgggaaatttctatgtatttattgaaaaatgaattgaaagtacctttctatcttaatagaagaaaatcggaacccttattaaaagaagatgaagctagatctatagaaaaacttatccagaatgcagatttatccatagatgaaattataaaaaaacctgttaaaacaaaaccaagggctccattcataacctccacacttcagcaagctgcaagtactaaattaagttttaatgtaaaaagaaccatgagagttgcacagaaactttatgaagctggtcatataacatacatgagaactgatgctccaagcctaagcaaagaatcaattcaagatgctaggaatttcatcggtgaaagaattggtgaaaactatttaactaatgcacctagaatttattcaagcactgaaaatgctcaagaggcacatgaggcaataagaccaacaaacgcatacatgactccagatgatcttttaaatcaaacagaggaagaaaaaagactttatcaattgatatggcagcaatatatagcatgtcaaatgc

SEQ ID NO: 293712 - DNA, 1150 bp, Unknown
  Bacterial polypeptide expressing nucleotide sequence isolated from the Sargasso Sea
ctgtttagaagcagttaataattctcgaaaaataaattatgatttggtagatgctcaacgtgccagaagagctattgaccgcattgttggtttttcattttctccagtactttggaaaacattaagatctttaaaaaataaaggcctatcagctggtcgtgtacaatcagttgctctaaaactattggttgatcgtgaaaagcttagaaacaagtttattgaaaataaattttatgctattgatgcaaatatttcggaagagaaaagcggtgaaatttttaaagcatcattagtctcatataacggaaaacccgttgctaaaagcgatgattttggaaaatttgatgttggtttaaaagatgataatattattcaagtagatcaaaaattagcagaacaaataaaagaagaatgcaatgctaatgattggttagttaataatattgaaagtaaaccaacttccagctctccagcgccaccgttcaccacaagcacactacaacaagatgcttcaagaagatttggattttctccaaaaagaacaatggtagttgcacaaaaactttatgaacaagggtttattacatacatgagaactgattctacccatctttcatctgaagcattaaatgcttccaagaaatttatagaaagcagttttgggaatgattttttatctgaaaaaacgaatatctataaaaataaagttgccaatgctcaagaagctcatgaagctattcgtccagcaggtacagcatttagtaaagttgaaaatgtccaaaaaattggtgctgatgaagcaaaactatacgaattaattttaaatagaacagttgcttctcaaatgaagcccgcacaatatattcgaacaaacgttgaaattcataatggaacatctatctttaaagctagtgggaatgttacagtatttaaaggttacactttagcatatgaacaagccttgacaagaaaagataaaggcagacctgatagcctaccagctttggataaacaatccaaaattcaaagcaaggaagtattgcttgaagaaaaaacaacatctcctcctagaagattttcagaagctatgttagttaaagaaatggaaacaagaggaattagaagaccttctacttactctgcaattata

SEQ ID NO: 293713 - DNA, 1054 bp, Unknown
  Bacterial polypeptide expressing nucleotide sequence isolated from the Sargasso Sea
ttacaaaataaaaataataaaaatattttttcaaaattaagtttatttaatggagaaaaaatagaaaaattttctttcaaaaacaaagaagaaatacaaaaagcagttgatgtaatcaataaaacaaaatttaaaattacagatgtaaacactaaagtattcagacgtaatcccctggcccctttcaccacttctaccttacagcaaactgcttcgggacgatttggttttggagcttccagaacaatgcaaatagcacaacgactgtatcaaggagtagatatcgagggtgaaactactggattaattacttatatgagaactgatggaactaatatttcaaatgaagcaattgaagattttaggaaattcattactgatgattatggtgataaatatttgccagaggcaccgaatagttatactggaagaaaagcaaagaatgctcaagaagctcatgaagcaattagaccaactaatataagtagaaaaccctctgacatcaaaaaatatgtaaacgcagatcaatttaaactctatgaattaatttggagtagagccttatcatctcaaatgacaccagcagaatttgatagaaatacgataattatttcgtcaaatgataataaaattaactttagagctagcggctcagtagtaaaatttgatggatttcttaaagtttatcaagttcaagaaactgacgaagatgcaaagaatattttgcctgaagtcaaagtcggagaagaaattaatatacttaagctaaatgatgaacaacattttacagatccaccgccacggtactctgaagctagtttagtaaaaaagatggaggagttaggcattggtagaccctcgacttacgctagtattatttcagtattatcaactagaaattacgtcgaattaattaataaaagatttaatccaactgatagaggcaagctaatttcagcttttttagagaaattattctctaaatacgtggattataatttcacagcagacttagaaaatcagctagatgaaatcacaagtggtaaaatcgaat

SEQ ID NO: 293714 - DNA, 1104 bp, Unknown
  Bacterial polypeptide expressing nucleotide sequence isolated from the Sargasso Sea
atctgttgctttaaaattaataacagaaagagagcatgaaattgagttatttaatccagaagagttttggactttaagtttaaaatttcaagatgagaaaaaaaattcaattaccgcaagcatctatcaattagattggaaaaaaattgaaaaatttacctttagaaaaaaagaagatattgaaaaggcaatcactggattaaagaataaaaaatataatattagtgatatttcatcaaaaattgttaatagaaatccatctggtccatttacaacttctacactacaacaagttgcttcaagtagattgggatttggtgcttctagaaccatgcaaattgcacaaaaactttatcaaggaattgaaattgagggtgatacagttggtttaataacctacatgagaactgatggtacaaacttatcggctgatgctattagtgatttaagaaattttattaaaaaaagttatggtaatgagtacatacctgaaaaagctaataattattcaggaaaaaaagccaaaaatgctcaagaagcacatgaagcgataaggccgacagatattaatagatcccctgaaactgttaaaaaatatttaagtactgaccaaaataaattgtataatttgatatggagcagagcactatcctctcaaatgctatctgctaagtttgatagaaatacaataactattgaaactgaggataaaaataccgtttgtaaaacaagtggctcagttttaaaatttgatggttttttaaaagtttataaaaatcctaattcagaagatgatgatgaaatacttccagaagtaaaaaaaggacccattaatatagagtcatttttagatgaacagcattttacacaaccacctccaagatattcagaagcgagcttggtaaagaaattagaggaacttggaattggaagaccctctacctatgcaagtattatatctacaatttctaaccgtggatacgctgagataactaataaaagattttttccaaccgatcgtggaaaattaatttctgcttttttagaaaaattattttctaaatatgttgattataattttactgcaggattagaaaatcaatt

SEQ ID NO: 293715 - DNA, 1030 bp, Unknown
  Bacterial polypeptide expressing nucleotide sequence isolated from the Sargasso Sea
acaggcaagattaagtccgaagacttagctaaaagttatattgaaagatatgataagtttgaaaaaaatgtaaaagcctgggctcattatgataaaaactttatattaaaaaaatcaatagattgtgatgatttaaaaaatatcggaagacctatcggacctttgcatggtctgcctatagcagtaaaagatatctttggcactgatgaaatgcctacagagtgtggcacaattctgagaaaaaaaaaatactcaaaaggtgatgcgtttgtagtaaatttattgagaagctctggcgcatatgtaatgggaaaaactgttacaactgaacttgcatattttgatccaggagatactacaaatccacatgattacactaggacacccggaggatcctctagcggatcagcagcggcagtcgcatcttttatggctccctttgcaataggttcccagacaaacggatctataataagacctgcttcgtattgtggtgtaataggttacaaacctagttatggtttaatctcaagaactggggttttaaaacaatcttcttttttagaccacgtaggtatctttactagatcgataaaagatttagcattaattacaaaagaattagtcataaaagatttagaagacagtcactcgattccttattcaataggaaacataagagaaactgctattgagaaacctccatttgatcctcgttttatattttttaaaacaaatatgtggaagaatttagataaagatgcaataaaaagttttgatcaacttattaaaaatcttggtaaaaatgttgatttacttgataccccgtcgtactttgatgatattttaagatatcataaaatcattcacgaaagcgatatgtcttatgccttttcagattattataaaaattcaaagagcaaattaggaaaaaaattagttgaagccattgaaagaggacaaaaatattcatcaagtgattatgttgaagctgtagaaaacagagagtacctatataaattattttctg

SEQ ID NO: 293716 - DNA, 877 bp, Unknown
  Bacterial polypeptide expressing nucleotide sequence isolated from the Sargasso Sea
tttactgaatggtgcctccgggattgccgtaggaatgtcaacaaacataccaccccacaactttaaggaattggcaaatgcaataatagctcaaattaaaaatccaaaaattagtgttgaaaaattaattgaaattattcctggaccagattttcccacaggcggcataattcatggctctaaagaaattataaaacaagtctattcaacaggaagaggaatcattaaattaagagggaaggcttttgttgaaactgaaacaaactcaattgttattactgaaattccataccaagtgaataaaagtaaattaattgaaaagatagctgatctcgtcaaggatgaaaaaattaaagggatttcagatataagagatgaaaccaacagagacggtatgagaatcgttattgatccaaaaagaaatgaggatcctaatgtgattttaaataacttattctcattgactccattaagtacaacttttgggataattcttttagcaatcgataaaaacaagcctcaacttttaggattaaaacagataaatcagtgttttatagaccatagatttgaaataatcactaaaagatttctctttgagctttctaaagcaaaagatagattacatttactggatggttttaaaattgccttagataagctagatcaaacaatcaagataattagatcttctaaagaacccagtgatgcaagagagtctctaattaaaaaattaaaaatatctattattcaagcaaacgcaatccttgatttaagacttcaaagacttaccggaatggagcaagaaaaaatatttgaagaaagaaaaaatttgatcaaacgcatcaaagaaattgaaaaaatattatccagtgat

SEQ ID NO: 293717 - DNA, 823 bp, Unknown
  Bacterial polypeptide expressing nucleotide sequence isolated from the Sargasso Sea
aatacgcatgatacgctactctgctttagcagtgtggggaaagtctactggttaaaagtttttcaaattcccgtggcaagtcggacgtcacgcggaagacctattgttaatcttctacctctggaaacgagtgagaggattactagcatgttaccggtatcgaaatttgatgacgagagattcgtattcatggcgacgagtaacggcactgtaaaaaagacctcgatagccaattttgcgcgccaacgcagcgtcggtttgaaagccatcgaattggatgagggagatgagttaattggaacagcgataactgacggatcgcacgatgtaatgttgattagtaatagcggaaaaactatacgtttcaaggaatcagatgtaagggctatggggagaactgcgagaggggtgcgcggtattcgtatgtcagatggatttaagatgatatcactaataataccaagcccagaaaaacagatactcactgttagtgaaaatggttatggtaaaagaaccaatagtgatgaatacccagtttatggaagaggtggtcagggtgtgattggcatgcaagctagcgacagaaatggaaaagtagtgggcgcagtgcaagttagcgagagcgatgaaattatgctgatttctgataagggaacactcgtaagaaccagagttgatgaggtttccgtgcagggaagaaacacacaaggcgtcagattaatcagacttagagatggagaaacacttgtaggcttagagcaagttgatgagcctgatgtggaagaagatttgtcagaggcatcagaagagactgatgagtagc

SEQ ID NO: 293718 - DNA, 193 bp, Unknown
  Bacterial polypeptide expressing nucleotide sequence isolated from the Sargasso Sea
atgagtgaaacgatcataccttccgacatcgttgatgaaatgcgtgattcctacatggaatacgcaatgagtgtaattgtaggcagggccctgcccgatgtgcgggacggtttgaagccggttcatcgcagggtgcttttttcgatgaatgagcagggaaatgaatttaacaaaccattccgcaagtcggcac

SEQ ID NO: 293719 - DNA, 606 bp, Unknown
  Bacterial polypeptide expressing nucleotide sequence isolated from the Sargasso Sea
aaagcttatcaaagatgatttcatcaaatgaaatagttacattgataaacgctctcggtcttgatccaaaaaatgaggacatagatcttaaagatttaagatatgggaaaataataataatgacagatgctgatgttgacggctcacatataagagcattgctattaactttttttaataataagccatttgataaattaattgagtttggacatgtttatcttgctcagccacctttattcaaaattagcaaaggaactaaaagcatatacatcaaagatgaaaacgaacttgaaagttatttaataaaaaattcaaaaaatattaagaaatataaaaagaattctaaagaatttaataatgttctccaaattgaaaagtctaaactaaacattcaaagatttaaaggacttggtgaaatgaatcctgatgaattgtggaatacaactttaaatcctgaaacaagaaatttgctgcaggttcaatattcaaagaatagtaaaaaagatcaagatttgatacaaaccttaatgggtaacgatgtttcttcaagaaaagattttattgttgaaaacgcaataaatgtttcaaacttagatatttaga

SEQ ID NO: 293720 - DNA, 574 bp, Unknown
  Bacterial polypeptide expressing nucleotide sequence isolated from the Sargasso Sea
aatgccagcaaagaaaaaaaccacaaagaagccagcggcaaagaaaacaaccacaaagaagccagcggcaaagaaaacaaccacaaagaagccagcggcaaagaaaacaaccacaaagaagccagcggcaaagaaaacaaccacaaagaagccagagactcaaaacggggcaatagcggtagaagatgaaatctccaagtctttcctggactatgcaatgtcagttattgtttcaagagcactccctgatgttaaagacggtttaaaaccagtacaaagaagaattctttattcaatgtatgaaacagggataaggcccactggtccatttagaaaatgttccaaggttgtaggtgatgttatgggtaattatcacccacatggaaacgaagctatatacggaactcttgtaaggcttggacagcactttagtacaaggtatcctcttatcgaaccacaaggtaacttcgggacccccgatgatccaccagcagcgatgagatatacagagtctagaatgtcgttactggcatcgcagcttcttgatggcattgatgaggaaactgttgacttg

SEQ ID NO: 293721 - DNA, 217 bp, Unknown
  Bacterial polypeptide expressing nucleotide sequence isolated from the Sargasso Sea
atgaaaaatactgaagagtttaaagataaaaatataaaattaatctcaatgcatgatgagatgagctcatcatatctttcttatgcaatgagcgtaattgtaagtcgtgctcttcctgatgtaagagatggattaaaaccagttcatagaagaattttatatgcaatgtacaaaggcggatatgattggtctaaacaatttagaaaatctgcaagaa

SEQ ID NO: 293722 - DNA, 945 bp, Unknown
  Bacterial polypeptide expressing nucleotide sequence isolated from the Sargasso Sea
gatagccgaagaagaaatggtttaaccattacacataacggctatataaaaagaacaagcttgagcacctatagaagtcaaagaagaggcggaaggggtgtccaaggggcttcttcaagagaagaagattttgtggaacacctgtttgtagccaacacacatagttatattttatttttcacagataaaggaaagtgctactgggttaaggtttatgacattccagagggcggtagagccgccaagggtagagcaattgttaatcttattggctgtgagcccgacgaaaaggttagtgcgtttataagcgttaaagagtttaatgacgaccactatgttgtgatggcaaccgaaaaaggaatggttaaaaaaaccaagctttctgcatattcaaacccaagaaaaaagggtatttatgctgttgaaattagagatggagataaacttattgaagccagggtttcaacaggagataatgacatccttctcggaacaagaaacggaaaatcaatcagattttcagaagaacaaataagggcaagcggaagaaaaacaatgggggttaaaggtataacgcttaactcagaagatgacaggcttgttggaatgcttttaatcaaaagagagggcaccgtgcttgttgcaaccgaaaagggttttggaaagagaactgaaatttcacaatatcgcgctcaaaagaggggcggtaaaggggttttaaccatgaaaacaaccgataaggttggaaaaatggttaccataaaagaggttgtagacaaagacgatctaatgattattacaaaccaaggtgttctaattaggcttccagttgctcaaataagatcaataggaagagcaacacaaggggttaagctaattaagcttggtgaaggaacgcttgtttcatcaatcaccagaattatgtctgaggaagaagaagagaaa

SEQ ID NO: 293723 - DNA, 95 bp, Unknown
  Bacterial polypeptide expressing nucleotide sequence isolated from the Sargasso Sea
gatgactgataacaaagcctatgattcatcgagtattaaggttctgagggggcttgatgcggtgcgtaagcgtcccggtatgtacatcggtgaca

SEQ ID NO: 293724 - DNA, 847 bp, Unknown
  Bacterial polypeptide expressing nucleotide sequence isolated from the Sargasso Sea
ttggccaagaacacatacgattcaaaagcaatagaagttctttctggacttgatccagttaagaaaagaccaggaatgtacacagatacttcttgccccaatcatcttatccaagaagttttagataactctgttgatgaagcaatagcaggccattgttcaaatattaaaattaaaatccaaaaagacggttttataaaaatctctgatgatggaagaggaatgccagttgatattcatccagaacataaacttactggtgttgaacttattctatgtaaattacacgctggagcaaagttctccggagaggaatataatttttcaggtggtcttcatggtgtcggtgtttctgttgtaaatgccttatcggaatctcttcaggtaaatatcaaaagagattcaaaagagcatgagatgcaattttcaaatggcgataaaaaaaatgatattaagattgttggtgacgttggaataagaaacacaggcacaacaataaaatttaggccaaatctaaagtattttgaatctgataaaattaaaacaaacgagctaaagcatcttcttaaagcaaaagctgtattatgcccaggactaacaattgattttcataatgaaaataaaaaagagaaaattaagtggtattttgaagatggacttaaaagctatctagatgaagcctctgatggagttgatcaaatactagacgaatccatagtttcttcgaatgcttcgaagactcaagaggtggaatttgttataaattggacttctaaagttcaaaaaaataaacttgaagagacatatgtaaatttaatccctacagcacagggtggatctcatttaa

SEQ ID NO: 293725 - DNA, 457 bp, Unknown
  Bacterial polypeptide expressing nucleotide sequence isolated from the Sargasso Sea
aacatagactatgacgatgatggaataggctacataaacacagaagaacaaattggcggagtaacacaccaggggaagattgctaactcttttttaagatctaacgattacaaaatttttagccgggtacaaaaagcacaaaaagtattctcaggtcctgttgtcatagataacggatctgaaattacagaatatccaaacattgaagattgcctaaaccaaattgttaacacctctaaaagaggccttaatgttcagcgctacaagggtcttggcgagatgaacccagaccaactttgggaaacaacacttgacccaaccacaagatctttgttgcaagttaaggctgacgacgatgcaggcctgacatttgaaacccttatgggcgatgaagtaccacctagaagagagtttattgaagaaaatgccttaaatgcaggaaatgttgatatataaa

SEQ ID NO: 293726 - DNA, 511 bp, Unknown
  Bacterial polypeptide expressing nucleotide sequence isolated from the Sargasso Sea
tttaagatacggaaaaataataattatgacagatgcagatgttgatggttcacatatcagggctttattattaactttttttaataacgaaccatttaataaattaattgaaaatgggcatatatatttagctcaaccacctttgtttaaaataaataaaggaactaaaggcatttatataaaagatgaaaaagaattagaagattatattttaaataacaataaagaaattaagaaaataaaaaagggatcaaaagaatttacaaaagctttagacttagaaaagtctaaaatgaatatccaaagatttaaaggtttaggagaaatgaatcctgaagaattgtggagcactacacttgatccagaaaccagaaatttacttcaagtacaatattcaaaagatcttaaaaaagaccaaagtttaatacatacacttatgggtaatgatgttgcattaagaaaggattttattgtttctaatgcaattaatgttcagaatcttgatatataa

SEQ ID NO: 293727 - DNA, 832 bp, Unknown
  Bacterial polypeptide expressing nucleotide sequence isolated from the Sargasso Sea
aattgctgaattagtaaaagagaaaaaaattgatagcattagtgagattagggacgagagtgataaagatggaatgcggattgttatagatgttaaaaaaggagagtctgtagaagtcttagaaaataatttattttcgcaaacgcaattagagcaatcatttgggatcaactttactgtattggtaaatggccaaccaaaagtattaaatttaaaagaaattctcgcagagttcatcaagcaccgaaaagatgttgttacaaaaagaacaaaatttgaattaaaaaaatctaaagagcgaggccacatagttgaaggattgatggttgcaatagcaaacattgatgcaattattaaaattattaaacagtcaaaagatccaaaggttgctgcagaagaactaataaagaaaaaatggaaagccggaccgattgaggcaatcttaaaaaaggttggaaaagattcatgtcgaccgaatggactttcaaaagatgttgggcttactggtaaatcttataagttatcaaaactgcaggcaaaagccattttagaattacgtcttggcagattaacaggcctggagcaagaaaatttgtccaatgagtttaatgatttaattgacaagattttatcattgcaagaaattttggataaaaaagatgttttgaatgatttaatagcttcagagctaaatgaggttcaaaataattttggtgatgatcgaagaactgacataaatgatacacggcaagatatatcaaacgaagacttaatacctgaagaaacaagagtgcttacaatttcaagatcaggatatgcaaaaactcagcct

SEQ ID NO: 293728 - DNA, 203 bp, Unknown
  Bacterial polypeptide expressing nucleotide sequence isolated from the Sargasso Sea
aatgtcagacgataatataaccgaaaatcacgaaacaatagcaatagctgatgagctaaaaaaatcttatttagattacgctatgagtgtaattgtaagtcgagccttgcctgatgtcagagacggcctcaaacctgttcatcgcagaatattatacgctatgataaaagggggatacgactggtcaaagccatataaaaagt

SEQ ID NO: 293729 - DNA, 805 bp, Unknown
  Bacterial polypeptide expressing nucleotide sequence isolated from the Sargasso Sea
tgcttccgccagcgaatattccgaaggttcgatccgcgtgcttaagggcctggagcccgtcaagcagcgcccgggcatgtacacccgcaccgacaaccccctgcacatcatccaggaggtgctggacaacgccgccgacgaggcgctggccgggtacggcaagaagatccgcgtcaccctgcacgccgacggctcggtcagtgtggaagacgacggccggggcatccccttcggcatgcacccggaagaaaacgcgccggtgatcgagctggtcttcacccgcctgcacgcgggcggcaagttcgacaagggcaagggcggggcttacagcttctcgggcggcctgcatggcgtgggcgtgtcggtcaccaacgccctggctacccggctggaggccaccagctatcgcgagggcaaggtggcgcggctggtgtttgcggctggtgatgtgatcgagcccctggtggcccggccgctggaggcgggcgagcgcaagcagggcacctcggtgcgcgtatggcccgacgccaagtatttcgaatccagcgccctgcccatgggcgagctgacccacctgctgcgcagcaaggccgtgctcatgcccggcgtaacggtgcagctggtcaacgagaaaacccgcgacacgcaaacgtggcagtacaaaggcggcctgcgcgactacctgatgcagacgctgaacggcgatccggtgatcccgctgttcgagggcgagggttttgccgaccgcaacaacgaaagttttgccgaaggcgagggcgccgcctgggccgtggccttcaccgaa

SEQ ID NO: 293730 - DNA, 145 bp, Unknown
  Bacterial polypeptide expressing nucleotide sequence isolated from the Sargasso Sea
tatgtctaaaaaaagctattattcagcaaaaaatatagaagttttggaaggtttagaaccagttagaaagcgacctggaatgtatataggtagcactaatgagcagggccttcatcatttagttaatgaagtattagataatagc

SEQ ID NO: 293731 - DNA, 358 bp, Unknown
  Bacterial polypeptide expressing nucleotide sequence isolated from the Sargasso Sea
aaagatcagaaaattatttctcttgttgtccttgaggaaggaaatattcttgtagcaacagaaaatggttatggtaaacagacattaaaagatgaattctctattcaaaaaagaggtgggaaaggcgtaattgcaatccaaacatcagacagaaatggaaacttgattggtgctaaacaagttaatacaggtgatgaaatcatgttcattagtacctcaggtaacctgattcggactcgaactgatgatatatctattattggaagaaatactcagggtgtcaggcttataagactatctgaagacgataacttgttgggcatggagaaagtcatcagcgaagatgatgaggagtaaa

SEQ ID NO: 293732 - DNA, 676 bp, Unknown
  Bacterial polypeptide expressing nucleotide sequence isolated from the Sargasso Sea
gttggccaagaattcatacgactcaaaagcaatagaagtcctttctggtttagatcctgtcagaaaaagacctggtatgtatacagatacatcatgtccaaatcatttgattcaagaagtccttgataattcagttgatgaagcaatagcaggacactgttcaaatatcaaaataaaaattgaaaaagatggtcatatcaaagtgagtgatgatggcagaggaatgccagttgatattcatccagaacacaaggtaagtggcgtagaattaattttatgtaaattgcatgcaggagcaaaattctctggcgacgaatataacttttctggaggattgcatggggttggagtttcagttgtgaacgcattgtcagattcacttcaagtaaatataaaaagagattccaaagaacatgaaatgcattttgataatggaaataaaaaaactgaattaaaagttgttggtgatgttggtgtcagaaatagtggaaccactataaagttcaagcctaactcaaaatactttgaatcagatcagatcaaccttaaagagcttaaacatcttttaaaagcaaaagcagttttatgtcctggattaactatcgactttcattacgaaaaaaagaaagaaaaaataaaatggttttatgaggatggcttaaaaagttatcttgaa

SEQ ID NO: 293733 - DNA, 250 bp, Unknown
  Bacterial polypeptide expressing nucleotide sequence isolated from the Sargasso Sea
aatggcaaaaaaatctgataaggccaaatacgactcttccaacattcaagtactaaaaggactagaggctgttaaaaaaagacctgggatgtatataggtgatacagacgacggctctggattacatcacatggtttttgaggttctcgacaattgtattgatgaagcaatggctggccattgctcagacataaacgtcatccttaacaaagatcagtcagtaacaattgaagataacggaagaggaatt

SEQ ID NO: 293734 - DNA, 264 bp, Unknown
  Bacterial polypeptide expressing nucleotide sequence isolated from the Sargasso Sea
catgaatgatttactctccgtagaaaacgaagtgcaatatgatgcatcttcgatagaagttctggaaggcttggaaccagttcggaagcggccaggaatgtatattggaggaacggatgaaagagctctccaccacttggtttctgaaatattagataactctatggacgaggcagttgctggccaagctaatagaattgaagtggagttgcattcagattattcaataagtgtaaaagataatggacggggcattccgactga

SEQ ID NO: 293735 - DNA, 658 bp, Unknown
  Bacterial polypeptide expressing nucleotide sequence isolated from the Sargasso Sea
aaatataaaaaaaaatggtaacggcaatggtcaagtttcagatctaagaacaaaggctcttgcaaaaatgatatcttcaaatgagatcgtaacattaattaatgcattgggacttgatcctaaatctcaggaaatagatttaaaagatttaagatatggcaaaataattataatgacagatgctgatgttgatggctctcacataagagctctgttattaactttttttaacaataaaccattcaataaattaatcgagaatggccatgtttacttagctcaaccaccattatttaaaattaataagggttcaaaaggtatttatattaaagatgaaaaagaattagaggatcatatcgtaaaaaataataaggaattaaaaaaattaaaaaaaggctcaaaagaatattttaatgtactagatttagagaaatcaaaaatgaatattcaaagatttaaaggtcttggtgaaatgaatccagaagagttatggaatacaactttagatccagaaactagaaatttgcttcaagttcagtattctaaagatcttaaaaaagatcaaattctcatccatacactaatgggaagtgatgttgcgttaagaaaagattttatagtttcaaatgctattaatgtaaaaaatcttgatatttaa

SEQ ID NO: 293736 - DNA, 865 bp, Unknown
  Bacterial polypeptide expressing nucleotide sequence isolated from the Sargasso Sea
atgaccacgttaaaagagaccgtttacgacgaaagcaaaatactcacactttcatccctcgaacatatccgattgcgccctggcatgtacattggtcgtctggggaacggatctcaccccagtgacggcatatatgtactactgaaagaaattgttgataactcaatcgatgaatttatcatggggcatggcaaacgcatcgacattcgcatggacaatggatcagttaatattcgtgatttcggaagaggtatccccctgggtaaggttgttgaatgtgtttcaatcataaacaccggtgctaaatataatgatgaagtatttcaatttagcgttggccttaatggagtcggttcaaaagcagtgaacgcgctatcagagaattttgaagttatttcctatcgtgaaaagaaaatgctatcagcatgctttaaatccggagaacttgagacaaaaccactcacacaagacaccaatgaaaacaacggcacgaaaattagttttactccggatacaaaaattttcccaaattacagctatgacctcggtacaatccgcaaacaactctggaattacgcttatcttaaccggaaactcacaatcaccttaaacggtgaaaagtttaagtcagaaaatggactgctggatttacttaatgaagaagtgaacgacactaacctttatccaatagttcactgtcattcaggacaattagaaatgtccttgacgcatactgagagatatggggaagaatattacagttatgtgaacggtcatcacactaacgatggagggacacatctttcatctttcagggagggcattctcaaggcagtaaaccaattttttaattcaaagttttgaa

SEQ ID NO: 293737 - DNA, 239 bp, Unknown
  Bacterial polypeptide expressing nucleotide sequence isolated from the Sargasso Sea
cataaattttggtaaaaaaggcatgtacatccagcgctacaaaggattaggtgaaatgaatccggaacaattatgggaaacaacactaaaccccgaagtaagggcacttaagaaagtaaccattgaagatatagtagaatcagatggaatctttaccattttgatgggtgatcaagttgaaccacgccgaaacttcattgaggaaaacgcgcttagagtaaagaatcttgatgtttagc

SEQ ID NO: 293738 - DNA, 931 bp, Unknown
  Bacterial polypeptide expressing nucleotide sequence isolated from the Sargasso Sea
atagataatcctgattcaacaattgaagattttcaagaatttattttaggtcccgattttccaactggaggacaacttattggtaaaaaaggaattaaagaagcttttgaaacaggtagaggagcatgtgtaattagatcaaaaacaactattgaaacttttaaaaaagatagagaagctataataataaatgaaataccttatcaagtaaataaagctaagcttttagaaaaaatagctgagacagttaaaaataatattattgagggtatttcagatctaagagatgaatcagatcgtaatggtgtcagggttgttatagaattaaaaaaagatgttgattctaatataatacttaatcaactttataaacatactcttctgcaaactacttttaattcaaatatgcttgctcttaacaaaggtaaacctgagcaaatgaacttaaaagatattttaaaatcttttatagattttagagaggaagtaataactaaaagaactatttatgatttaaataaagcaagagataaggcacatatattattaggattagttgttgctaatgcaaatattgatgagataattaatttaattaaatcatctaaagattctaaagatgctaaaaataaattagtaaataaaaaatggaaattatcaaaaagtaattctgactttattaaattagtagaagaacaaagttctcaagttaaaaatgatacttttcaattttcagattctcaagttaaagcaatattagaattgagacttcatagattaacttcgcttgaaagagaagatattcaaaaagatttagaaaaaattattttagaaattaaaggatatttagaaattttaaattctagacaaaaattactaaaagaaataaaaaacgaattaatgaaatcaaaaaagaattgcaacacccaga

SEQ ID NO: 293739 - DNA, 496 bp, Unknown
  Bacterial polypeptide expressing nucleotide sequence isolated from the Sargasso Sea
atgacagatattataatatccaatgaagggacagagcagctgccgctgcgtcgcttcactgaagaagcctacctgaactattcgatgtacgtcattatggaccgtgctctgccttttatcggcgacggtttaaaaccagtacaacgccgtattatttatgcgatgtcagagctgggtttatcgcatctggcaaagtacaaaaaatctgcccgtactgtcggtgatgtgttaggtaagtttcatcctcatggagatagcgcctgttacgaagctatggtactgatggctcagcccttttcttaccgttacccattggtagatggtcagggcaactggggtgcgccagacgatccgaagtctttcgctgctatgcgttatactgaagccaaattgtcccgtttcagcgaagtgttattaaacgagctggggcagggcactgtggactgggtgcccaactttgacggcactatggaggaaccccgcactttaccttaag

SEQ ID NO: 293740 - DNA, 790 bp, Unknown
  Bacterial polypeptide expressing nucleotide sequence isolated from the Sargasso Sea
cctctgtcgtctgcacgcgggcggcaagttctccaacaagaactaccagttctccggtggtctgcacggtgtggggatctccgttgttaacgccctgtccaaacgtgtggaagtgaacgtacgccgcgatgggcaggtatacaacatcgcgtttgagaatggcgataaagtgcaggatttacaggttgtcggtacctgcggcaaacgcaataccgggaccagcgtgcacttctggccggatgaaagcttctttgacagcccgcgtttttctgtttcgcgcttaacgcacgtactgaaagccaaagcggtactgtgcccaggcgttgagatcaccttcaaggatgaggtcaacaacagcgaacagcgctggtgctaccaggatggtctgaatgactatctgagcgaagcggtgaatggcctaccgactctgccggaaaaaccgtttatcggtaatttcagcggtgagacggagacagtggactgggcgctgctctggctgccggaaggcggtgagctgctgaccgaaagctatgtgaacctgatcccaactatgcagggcgggacgcacgtcaacggtctgcgtcagggtctgctggatgcgatgcgcgagttctgcgaataccgcaatattttgccgcgtggcgtgaagctgtcggcggaagatatctgggatcgctgtgcttacgtgctgtcggtaaaaatgcaggatccgcagtttgccggacaaaccaaagaacgcctctcttcgcgtcagtgtgcggcgtttgtttctggcgtggtgaaagatgcc

SEQ ID NO: 293741 - DNA, 763 bp, Unknown
  Bacterial polypeptide expressing nucleotide sequence isolated from the Sargasso Sea
attagagatgaaagtgatagagatggaatgagaattgttgttgaattaagaagagattcatatcctcaagttgttttaaataatttatttaaacttactcctttgcagactaattttagtgcaaatatgcttgcattagttaatggtgagcctattatattgtcacttaggaagatgttgcaggtatttttagattttagagtagaaaccattgaaaaaagaactaaatatcttctgaaaaaggcagagagtagagatcatatattattaggattattattagctttagatcagctagatgaaataattcatcttataagatcagcctctgactctgctaatgcaaaaagggaattgcaagaactgcatggattaacagatattcagtctgatgctattttgcagatgcagttaagaaggctaaccgctttagaggcagataagataagacttgaacatgaggatctagttaaaaaaataatagatttaaaagatattttaaataagagagaaagggtatttgaaataacaaaagttgaattaaatgaaatcaaagaaaaatacaacaccccaagaagaacaaaaattcttgatcttggtggaggccttgaggatattgatttaattgcgaatgaaagatcagttgttttgttgaccgagacaggatatttaaagaggatgcctgttaatgaatttgaagcaacaagtcgcgggactaggggtaaagcaggaacgcgaagccaaggagaagaagaggtgaaaa

SEQ ID NO: 293742 - DNA, 919 bp, Unknown
  Bacterial polypeptide expressing nucleotide sequence isolated from the Sargasso Sea
aagagctctttaaaaattaatgaaattccttatatggtaaataaagcaaagatgcttgagagaattgctgagctggtcaaagaaaagaaaattgatggaattagtgagataagagacgagtctgataaagatggcttgagagtagtaattgaagttaagcgtggagaatcagttgaagttttagaaaataacttattttctcagtcacaactagagcaatcatttggtattaattttactgttcttgtggatggccagcctcgcgtattaaatattaaggagatcctccaagaatttatcaaacaccgaaaagatgttgttatcaaaagaacaaagtttgatctgagaaaagctaaagaaagaggacatattgttgaaggattaatggttgcaattgcaaatattgatgaaattatcaaaataattaagaaatctaaagatactaaaatagcagcaaatgatttatgcaagaagtcttggaaagcaggtccaattgttgcaattcttaaaaaagctggcaaggatgcttgccgtccaaaaggtttgtcatctgaatatggcttaaaaggtaaaaattacaaattatcaccagatcaagctaagtctattcttgaattaagacttggaagattaacaggtctagagcaagataatctttcaactgaatttaatgaaattttagaagttattttagagcttcaaaaaattctagatgataaagaaactcttctccagctaattaaggatgaattaatagaagttagagaaaactttggagatgatagaagaacagatataaatgatacccgtcatgatatttctaatgaagacttaattcctgaggaaaaaagagtattaactttatcaagaagtggctatgcaaaaactcaaccacttgatgaatatagagagcagcgca

SEQ ID NO: 293743 - DNA, 769 bp, Unknown
  Bacterial polypeptide expressing nucleotide sequence isolated from the Sargasso Sea
aatcatccaaaatatccaaataaatcagcacttgaagtaattttaacaactctgcattcaggaggaaaatttaatgataaaaattatactacctcaggtggacttcatggagttggtgtatctgtagttaatgcactttcaagtgagctaatagtagaaataaccagaaataatagagtttatcaacagaaatatattaggggactggcaacaaacaaacttttagaaatttcaaaagtttcaaaaaaatctggcactagcatccaatttactccagataatcagatttttgataactgctcttttaatcctaatacaataattaatatggccaaaattaaggcttatctcacgaaaggaattgaaataatttggaagtgcgataagagcttagtaaaagattacaatattgaagaaaaattaattttcaaattccctaatggaattgtagactttcttcacaattctacctctggaaagtcttttatttcttcagaaaatttttttggctctattccgttcaataacaatagaattgattgggtaatgaattggctaggaccgagtgaagatgggttttttaaaagtcattgtaacacaataagcacaccattaggtggaacacatgaaaatggttttaaaaatgctattttaaaggggtttaaaaattggggtgaactatcaggtattaagaagtcacaagaattaattatagatgatatatttaatgaaacagctgtgataatttcaatttttttaagcaatcctc

SEQ ID NO: 293744 - DNA, 366 bp, Unknown
  Bacterial polypeptide expressing nucleotide sequence isolated from the Sargasso Sea
tttttaattacatgagggaactagttgagcgaggtaatatttacatagcaactcctcctttatatcttgtcaaaaaaggcagtaaaaaagtttatgcctggaatgacgaggaaagagacaatatcgcaaaagatctaggttcaggagtttcaatacaaagatataagggtcttggtgaaatgaatgcagaccaactatgggatactacaatgaatcctgaatcaagaaccttgagacaaataacgcttaataatgacaatgcaaaagaggctcaggaatggtttgcaacactaatgggtgatgaagttcctccaagaagaaaatttattgaggataatgctatatatgctaaaatagatgtttaaa

SEQ ID NO: 293745 - DNA, 793 bp, Unknown
  Bacterial polypeptide expressing nucleotide sequence isolated from the Sargasso Sea
gctgtacaaacatactcaactacaggacacctttggaattatcttgcttgccttagtggaaggcgttcctcaaataatgagcctaaaaacggttttacaacactttgttgatttccgacaccgggttgttgttaggcgaacagagttcgagcttagagaagcagaagcacgcgctcatatacttgaaggtttaaagatcgcgttagacaatatagatgaggtaatatcaattattaggggtagcaaagaccccgttatggcaaaagagggtctgatgaatggttttaatttatcagagattcaatcacaggcgatattggatatgagactacaaaggcttaccagccttgaggttgacaaggttgtaaaagaatataaagagctaataaagcacatcgcacaccttaaaggaattttggaaagcaagagccagaggatggacataataaaaaaagagcttatcgaaattcgtgaccaatacggggatgaaaggcggacagagattgttcctgtagattctgatttctcaatggaagacatgatagctgaagaagaagttgttcttactattacccaccagggatacataaagcgcacagctttgaacacctacagaacacaacggcgcggtggtcgcggagttcaaggggctatgagcaaggaagaagactttgtagagcatttatttatagcaaatacacataactatatgttgtttttcacagaccaggggaagtgttattggctcaaggtctatgatattccacaaggtggccgagccgctaggggaagg

SEQ ID NO: 293746 - DNA, 457 bp, Unknown
  Bacterial polypeptide expressing nucleotide sequence isolated from the Sargasso Sea
aatgtctgatttatttgacaacgctgcatcaagtgatagttatgacgccagtaaaattgaggtgttggaaggcctagaaccagtccggcaccgcccggggatgtatattggcggcactgacgagcgtgccttgcatcatctggcagccgaaattctggacaatgcgatggatgaagccgtcgcgggacatgccaaccgtatcgattttattcttgaatcagccaccacattaactattcgcgataatggccgcggcatgccgacgggcaaacaccccaaatttccagaaaaatcaactgtcgaagtgattatgacgacgctgcatactggcggtaaattttccggtgaatcttatgccacttctggtggcttgcatggtgttggcgcctctgttgttaatgcattatcgagtgcgctcacggtagaaatcgcccgcgaaaaactgctgtacaggcaa

SEQ ID NO: 293747 - DNA, 592 bp, Unknown
  Bacterial polypeptide expressing nucleotide sequence isolated from the Sargasso Sea
atgatttcttcgaatgagatagttactttgatcaatgcattaggattggatcctaaagctcaagaaattgacttaaaagatttacggtatggtaaaattattataatgaccgatgctgatgtcgatggatctcatataagagctcttcttttaactttttttaataataaaccttttaataaattaattgaaaatggccatgtttatttggctcaacccccgttattcaaaataaataaaggtaccaaaggaatttatataaaagatgaacaggaattagaggaatatattcttcacaataataaagaattaaaaaaattaaaaaaaacttcaaaagaatattctgcagctattgatttagaaaaatccaagttgaatatccaaagatttaaaggtttaggtgaaatgaatcctgaagagttatggaatactacacttgatcctgatgcgagaaatttattacaagtgcaatattcaaaagactcaaagaaagatcaaagtcttattcacacattaatgggaaatgatgttgctttaagaaaagattttatcgtttcaaatgctattaatgttcgaaatcttgatatttaaa

SEQ ID NO: 293748 - DNA, 830 bp, Unknown
  Bacterial polypeptide expressing nucleotide sequence isolated from the Sargasso Sea
acaggaagagggtcttttaaaatcagagccactcatagtattgaacaacataaagataaaaactcaataatcataaatgaacttccttatcaagttaataaagctaaattaattgaatcgatagcaattttagtaagagataagaaaattacaggtatcagtcacctcagagatgagtctgatagggatggattaagagtcgtcatagaattaaagaaaggagagcagcctgacgtgattctaagtagcttgtataagcagacaaatcttcaaacatccttttctgccaatatggtttgtcttgtagacggagagccatgcaccattagtgtaccccaagctttattagaatttattaggcacagacgtgagattattaccagaagaactttataccttttaaataagacttatgataaagctcatattcttgaaggcttgagcatagcactaaatagtatagatgaaatgatagatcttataaaaaaatcaaaatctactgaggaggcaaaaaaaagaatcgtgagcaaatcttgggtaacttccaaaaataaatggaatttgtcaaagttaatgcaggagtgctccgactatatgaccattgatgacgctgtcggtcttaatgataaaaattatactataagtaatgagcaagctcaggcgatactggatatgagactgaacaaattaactaatcttgagcaggaggtaattttaaaagattataatgatgcaatcgaatctataaaaaaatatctcaagattttgtctaacccatctgaactagataatttgatgataactgaacttgaggaaataaaatcattata

SEQ ID NO: 293749 - DNA, 220 bp, Unknown
  Bacterial polypeptide expressing nucleotide sequence isolated from the Sargasso Sea
tatggcagaaggtgaaaaattaattccaataaatattgaagaagctatgaaatcggcttacattgattattcaatgtcagtgatagtttcaagagcacttcctgacgttagagacggtttaaaacctgttcacagaagagttcttttcggaatgagtgagttaggtttgagatcaaatagtaagtataaaaaatcagcattcattgttggtgaggtttaa

SEQ ID NO: 293750 - DNA, 219 bp, Unknown
  Bacterial polypeptide expressing nucleotide sequence isolated from the Sargasso Sea
aatgtctgattttgcaaaagaaattctaccaataaatattgaggaggagcttaagcaatcatacttgagttatgccatgagtgtgattcatggaagagcactccctgatgtaagagatggcttaaaaccggtacacagaagaatactttttgctatgtatgatttaagaaacttctacaatagaccatacaaaaagtcagcccgtgtcgttggagacgt

SEQ ID NO: 293751 - DNA, 603 bp, Unknown
  Bacterial polypeptide expressing nucleotide sequence isolated from the Sargasso Sea
cgcaatatccgcggcatatattagaacaggcagccatagccggcgcttttgttccaggggcagtagataaagatttgcaaggtactgctgatagtattgcgacaagattgaacctcattgctttagagtatgaacaaggttggtctggaaggattacacaggaccaaggtattcgtttagcaagagtattgaggggtgtagaagagctgcgcactttagatggacccatgttaagatcaggagaggcaagaaaaactggcacgtttactgaaagtctaaaagaagtctatgaaagtcccgctacccttattcgaaaagatcaaagtcaaaccatctacggcccgttagaattactaagctcgattctaaaggaaggagaaaagggacttacacttcaacgctacaaaggccttggtgaaatgaaccctgatcaactttgggaaacaacccttgatcctgatgctcgaacactatttcaagtcaagataaccgatgccgcagaggctgacgatttgtttacaaagttaatgggtgatgttgtagaacccaggcgggagtttattcaaagcaacgccttaactgtggcaaatttagatttttaaa

SEQ ID NO: 293752 - DNA, 822 bp, Unknown
  Bacterial polypeptide expressing nucleotide sequence isolated from the Sargasso Sea
aagatgaagactttgtctcaaaactattcttagccaatacacatgacacattgttgtgcttctccagttatgggaaagtctactggattaaagtataccgccttccaagaggtggaaggaatgcaaaaggtcgacccatagttaatctgttgccgttagaaaaagatgagagaattcaggcagttcttccagtgaaagagttcaatgatgatcaatttatattcatggcgactgagacaggaagcgttaagaagacaaagttatccgcttattctaggccgatgaaatcaggcataaaagcaatcaaacttagggatggagatcgtgttgtcaatgctgagatcactgatggatccaaagaaatcatgctgttttcaaattctggtaaatcaatccgattcaaagaatctgatgcgagacccatgggcagagtctcccaaggtgtcagaggcatgcgaatagataaagaccaaaaaattatttccctagtggtccttgaagaaggaaatattcttgtggcaactcaaaatggttatggaaaacagacactaaaaaatgaattttccattcagaataggggcggtaaaggggttattgcaatccaaacatctaaaaggaatgggaatttaatcggggcaaaacaagtcagtactggtgatgaagtgatgttcatcagtacttctggtaatctcattcgaactcgtactgatgatatatccgtcataggtagaaatactcaaggtgtaagacttatcaggctatcagaagatgataacctcttgggaatggagaaagtcatcagcgaagatgatgacgaataag

SEQ ID NO: 293753 - DNA, 490 bp, Unknown
  Bacterial polypeptide expressing nucleotide sequence isolated from the Sargasso Sea
atggcaaaagatgaattaaattcaattagtttaaaaaaatatgcagaagaatcctatttaaattatgcaatgtatgtaattttagatcgtgctcttcctaacgttggtgatggattaaaaccagttcaaaggagaatcttgtatgcaatgtctgagttgggtttagatgcatcatctaaatataaaaaatctgcaagaactgtgggtgatgttataggtaagtttcatcctcatggagatagtgcagcatatgaagcaatggttttaatggctcaaaatttttcttttaaatatcctttagttgatggtcaaggcaattggggatcacaagatgacccaaagtcatttgctgcaatgcgatatacagagtcgaaactaacagatttttcaaatttattaatttctgaacttaaatcagggactgttgattggcagccaaattttgatggttctttattagagcccagtcatatttccatcaaaaggtacc

SEQ ID NO: 293754 - DNA, 870 bp, Unknown
  Bacterial polypeptide expressing nucleotide sequence isolated from the Sargasso Sea
tattcacaaacttattcacgaggaaaacccaagacaaaaattaagatacaaaaatgtaataaaaatttaagaggcacttcaatatcttttattccagacaaagaaatttttgaaaatataattttttctcctaaaaaactttattcgtttattaaaatgaaagctgtactagttaaaggcacaaaaatatctttttcaatagataaggaattaatttcagacaaaactccttttaaagaagaatttatttatcctaaagggataatagattatatgaatgaaaattatttaaatcgaaaaaaagcaatttctaaagattttcatactaatttagacattaattcaaaagaaagatgcgaggtatatatatcttttaataattcagatcattcttcaattctatctttttgcaatactatacaaacgccagatggtggctctcatgaaaattctctaaaaaattctattatcaaatcattaaaactatttggacaaaaaaaccaattaacaaaatcagcaaatattattgcgagtgatttatttgactatgttgattcttttatttcaatttttattacatctccaagttttgaaggtcagacaaaaaaaagaattgctatgccaaaacttcaaaaaaaactagaagagctattacaaaatcaatttatcctatggttaaatagtaataaaaaagaatcaattaagttaattgagatattaattgaaagatctttattaagaactgacattacaaaattcaaagagctagaaagaaaaactgtaaaagaaaaaaatagactgccaggaaagttagttgattgctcaaataaaaatgttcaaggaacagaattatttatagttgaaggagac

SEQ ID NO: 293755 - DNA, 826 bp, Unknown
  Bacterial polypeptide expressing nucleotide sequence isolated from the Sargasso Sea
atgtctactcaatacaatgcggatgccattgaggtcctcaatggccttgaaccggtgcgtcgccgccccggcatgtataccgacaccacccggcccaatcacctcggccaggaggtcatcgacaacagcgtcgatgaggcgctggcgggtcacgcccgtaccctggaggtgaccctgtatgaagatcagtccctcgaggtgatcgacgacggccgcggcatgccggtcgacatccacccggaggaaggggtgtgcggggtggagctgatcctctgcaagctgcacgcgggcggcaagttctccaacaagaactaccagttctccggcggtctgcacggggtgggcatctcggtggtgaacgcgctctccgagcgggtcgaggtgacggtgcgccgcgatggccaggtctacgacatcgccttcgagaagggcgagaaggtgcaggagctgaccatcaccggcacctgcgggcgccgtaacaccggcacccgggtgcgcttctggccggaagcccactacttcgattctcccaggttctcggtctccaagctggaacacctgctcaaggccaaggcggtactctgtccgggtctgaccatcaagttcctcgacaagaacaccggcatcaagctggagtggtgctatgaagacggcctcaaggattacctggtcgacgcggtcaagcagttcacctgcctgccggagcagcccttcgtgggcgccttcagcaccgagctgtcggcggtggactgggccctctgctggctgccggaagggggcgaatgtctcgccaaatcctatgtgaacctgatccccaccgcccagg

SEQ ID NO: 293756 - DNA, 853 bp, Unknown
  Bacterial polypeptide expressing nucleotide sequence isolated from the Sargasso Sea
cccacataacttaggagaagtaatagatgcatctttatatcttattaaaaatccagattgtaaaatatcagatcttcaaaaatatatttttggtcctgattttccaacaggaggtcaaataattggtaaaaaaggcataactgaagcttttgaaactggaaaaggagggtgtgtagttagatcaaaaaccagtattgaaaattttaaaaaggatcgagaggcaattattctccatgaaataccttatcaggttaataaatcaaaattattagaaaggattgcagaaattgtaaaaaatggaattgttgaaggaatttcagatttaagagatgagtcagatagaaacggtgttagggttgtgatagaattaaaaaaagatgtagactcaaatattattctcaatcaattatataaacatactttaattcaaactacattcaattcaaatatgcttgctttaaataaaggtaagccagaacaaatgaatttaaaagaaattttatcttcatttttagatttcagagaagaagtaataataaaaagaacattatttgaccttaataaagctagagaaaaagctcatattttagttggattagttgttactaatgaacatattgatgaaattatagaattaataaaaagttcaaaagatacaaaagaagcaaaagaaaaattaattaaaaagaaatggaaagtatctaaacaaaatcttaattttattaaatcagttgaggatgatactgtagagttaaaaaataacactttcaatttttctgacgcacaggctaaagctattttagaattaagattacaaaaattaactgctttagaaagagaagatatacaaaaa

SEQ ID NO: 293757 - DNA, 475 bp, Unknown
  Bacterial polypeptide expressing nucleotide sequence isolated from the Sargasso Sea
gatggcactaaagaaattatgctcttttcaaattctaggtaaatcaatcaggtttaaagaatctgatgcaagaccattgggacgagtatcacaaggtgtcagaggtatgcgaattgataaagatcagaaaattatttctcttgttgtccttgaggaaggaaatattcttgtagcaactgaaaatggttatggtaaacagacattaaaagatgaattctctattcaaaaacgtggtgggaaaggcgtaattgcaatccaaacatcagatagaaatggaaatttgattggtgcaaaacaagttggtacaggcgatgaagtcatgttcattagtacctcaggtaacctgattcggactcgaactgatgatatatctattatcggaagaaatactcagggtgtcagacttataagactatcagaagacgataacttgctgggcatggagaaagtcatcagcgaagatgatgaggagtaa

SEQ ID NO: 293758 - DNA, 815 bp, Unknown
  Bacterial polypeptide expressing nucleotide sequence isolated from the Sargasso Sea
aagcccgcgaaaaggctcacctgtctggaaggcctggcggttgccctgagcaatattgatccggttatcgagctgatcaaggcctcacccagcggcgctgaagccaaggccaagctgttggacaagggctggaagcccggtgacgtgctgcaaatgttggagcgtgccggtggtgaaaacgcggcgcgcccggatggcctggatgaacaatatggcctggttgatggcctttatcacctgagcccggaacaggcccaggcgattttggacctgcgcttgcagaagctgaccggtctggaacgggaaaaactgatcaatgactatcaggagctgctggagcagatcgctgaactgctgaagattctcggtaaccccgagcgtctcatggaagtgatccgcgaagaactacaggcggtccgtgaagaatacgctgacgagcgccgttccgagatcgttgcgtcccgtcaggacttcagcatggaagacctgattgctgaagaaaccgtggtggtgaccctgtccaacggtggttatgccaaaatgcagcccatcgacacctaccgtgctcagaagcgtggtggtcgcggcaagtctgcgggccagctaaaagatcaggattatgtggagcacctgctggtagccggcacccacgataccctgttgctgtttaccaatgcgggcaaggtgttctggttgcgtacctttgagttgcctcaggggggccgggcatcgcgtggcaaaccaattgttaacctgctgccggcattgggtgctgacgaacgtattaccgctattttgcgtctggatgccgacat

SEQ ID NO: 293759 - DNA, 622 bp, Unknown
  Bacterial polypeptide expressing nucleotide sequence isolated from the Sargasso Sea
gtaaatgctctatctaaaaaactgcaactagagattaatagagatagtaaaaagtattttatagagtttagtaatggtgaagcaaaggcacctttaaaagtaattggaaattcaaagcaaacaggcaccaaaattacctttttaccgtctacgaaaatcttttcttcaattaaatttagtgccaatattttaattaaaagaatgagagagttagcttttttaaataaagggattaaaatcacttttatagatgccagtttaaaaaaagaaaaagtatctgaatttaagtatgatggtggattaatagagtttgtcgattttttagatgaaaaaagagaaaggttacaaaataaaaatggaaatgatttatttagaaagcctatatatatagagggaaagaaaaacaatattgaaattgagtgttctttgaaatggaacgctggttatagtgaagaaatttttccatatacaaataatatttatcaaaaagatggtggtacacatttattaggatttagaagtgctttaactcgggttgtcaataaatatgccaatgaaaataatttgttaaaaaaaaataaactgacaatttctggagatgatataaaagaaggtcttacat

SEQ ID NO: 293760 - DNA, 238 bp, Unknown
  Bacterial polypeptide expressing nucleotide sequence isolated from the Sargasso Sea
tttgactgattcagataatcaaactccaaaagagaatacagataaaaagcattcaatcgttccaatcttgatcgatacagaaatgcaaaattcttatctcgattatgctatgagtgtaattgtcagcagagctttacctgatgtacgcgatggtttgaagcctgttcatagaagaattttgtatgctatgcatgaggcaggttacttatggaataaaccgcataggaaaagtgctaga

SEQ ID NO: 293761 - DNA, 570 bp, Unknown
  Bacterial polypeptide expressing nucleotide sequence isolated from the Sargasso Sea
gttcttccatctcaacttccgaatatattaattaatggtgcaatgggaatagctgttggtatggctacaaatattcccccacataatgttgttgagttaattgatgctttaaagttaatacttagaaaagataaggtttcattatctgaaattttaaaaataattaatggcccagaccttcctacaggaggatcaataatattagaaaccaatgaaaagaaagaaatttataaatatggaaaaggatcttttacaattaattcccaatatcaaatagaagaattaaaaaatggtttatatcaaattgttgttacagagattccatttcaagttaacaaagtcaaaataattgaacaacttgcaaataacataaataataaaaaattacccttagatgatgtggttgatgagtctgatgaaaatattagaatagtattaaggccaaagactagaaatattaatgcaaaaaaattaataagtctgtgttttaaattaactgacttatcaattaagtattcttgtaattttaatgttttaattgatggtttagaaccaaaacaagttggtatt

SEQ ID NO: 293762 - DNA, 899 bp, Unknown
  Bacterial polypeptide expressing nucleotide sequence isolated from the Sargasso Sea
tggtgttggtgtttcagttgtaaacgctttatctgaaaaattagatctaactatttatagagatcaaaaagagtattttgtctctttcgagcatggaaaaacaataaaaccaattaaatttttaaataagacgaaaaaatccggaactaaaataaattttttaccctcaaaagaaacattttcatcaatcaaatttagtgccgctacattacagaaaaaaataaaagaattagcttttttaaacaagggtttgaaggtagatttaatagatgagacgcactcaaaacccaaagtttatgaaaataaatacgatggaggcataagcgaatttgttacattcttagatcaaaagaagtctattttaattaacaaaaatgaaaaggctgtgttcaaaaaacccctttatttacagggtcaaaaaaacaatgtaactgttgaatgctctttacaatggaatgcaggttattcagaagaagttttgtcatttacaaacaatattcatcaaaaagatggaggtacacatcttttaggctttaggagctcattaaccagaattatcaataaatatgcttccgaaaaaaatctcaccaaaaaaaacaaagtaactattggaggcgaagatataaaagagggtcttacagcaatcttatcaatcaaaatgcctgatcctaaattttcatctcaaacaaaagataaattagtttcgtcagagatcagaaatatcgtagaaacaattgttggtgaaaaaattgcagtatggtttgaccaaaatccatcaattgttaaatctgttttagataaagtcttacaagcagctttagctagagatctagctagaaaggctagggatagcgtcagaagaaaaggaacattagaattatctggtttaccaaggtaaa

SEQ ID NO: 293763 - DNA, 158 bp, Unknown
  Bacterial polypeptide expressing nucleotide sequence isolated from the Sargasso Sea
aatgaaaaataaaaactatcaagcagattctattaaagtactaaaaggtcttgaagctgttcgaaaaaggccggggatgtacatcggtgacacagatgatggaacaggcttacatcatatggtttatgaggtgatagataattcgattgatgaggctt

SEQ ID NO: 293764 - DNA, 181 bp, Unknown
  Bacterial polypeptide expressing nucleotide sequence isolated from the Sargasso Sea
aatgcaaaaagtagaattaaaaaaagaaaaaatttctaaacaaatatctttgcacgatgaaatgaaatcatcatatttgtcttatgcaatgagtgtaattgtaagtagagctttacctgatgttagagatggtcttaagcccgtgcacagaagaatattatacgcaatgtataaaggaggc

SEQ ID NO: 293765 - DNA, 708 bp, Unknown
  Bacterial polypeptide expressing nucleotide sequence isolated from the Sargasso Sea
catgcaggtggaaaattcgagtcaggagcgtacaccgtaagtggaggactacacggagtggggatctcggttgtaaatgctctttctacagttgttaaagttgaggttcaaagggacggacatttttggaatcaagactttgaccttggaaaaccaaaaacaaaaataaaaaaagggaaggtgtcaaaaaaaacaggaacaaaaataaattttttacccgatcctaaaatctttgacgaaacacagctttttgagtacaacattgtttctgaaagacttagacaaactgcctttcttaataaaggattaaagataaatcttacggacagcagagtaaagccagcaacaaaggaaaattttcactacaaaggcggtctcgttgatttcgttgattatttaaacgagggcttcgaagttcttcatgaaaaaacaatttcattttcagatcaaagcaaagactcagaaattgaagtagccatgcagtggaaaacagaagacgacataaacatcaaaagttttgcaaacaacatacacacacttgaaggaggaacccacgaggaagggcttagaacagcagtaacaaaagccatcaatgactttgctaaatcaagaaaccttcattctgatatttcattaaccggtgacgacataagagaaggtattacaggagtagtttctgtaagggtcaaagaacctcagttgaaggcc

SEQ ID NO: 293766 - DNA, 144 bp, Unknown
  Bacterial polypeptide expressing nucleotide sequence isolated from the Sargasso Sea
tatggaaaaagaaaagttaattccaataaaaattgaagatgaaatgaagtctgcatacatcgattattcgatgtctgtaattgtttcaagagcattgccagatgtgagagatggtttaaaacctgtccataggagagttttatt

SEQ ID NO: 293767 - DNA, 100 bp, Unknown
  Bacterial polypeptide expressing nucleotide sequence isolated from the Sargasso Sea
atgaatgtagaaaattattcttcagaatcaatcaaagtattaaaaggattagaggctgtcagaaaaagaccaggtatgtacattggtgatactgatgatg

SEQ ID NO: 293768 - DNA, 685 bp, Unknown
  Bacterial polypeptide expressing nucleotide sequence isolated from the Sargasso Sea
tggtggggtgaagatcgtcttccgcgacgagcgccctgaggcctgtggcgcggacggccaagcacgggaggagatctatttctacgagggcggcatccgagagtatgtcgcttatatgaatacggagaaagatcctctccaccccgacattatttatgtcaatgcagagaaagatggggtgcaggtggaagctgctttgcaatggtgcattgatgcctactccgacagcattcttggctttgccaacaacatccgtaccgttgatggcggtacccatattgaaggcctcaagaccgtgcttacccgcaccctcaatgtgtttgcccgtaaacgcggaaagcgcaaagaagctgacggcaaccttgccggtgagaacatccgcgaagggttgaccgcggtgctgtcggtcaaagtgcccgaccctgaattcgaaggccaaaccaaaaccaagctgggcaacaccgaggtgcgcggcatcgtcgatacggtggtcggcgaagcgctggcggaatacctggaatttcaccctcaggtcatcgatctgatccttgaaaaggcgattcaggctttcaatgcagctgaggcggctcgccgtgcccgcgaactggtgcgccgcaagagcgtgctggagagctcaactctgccaggcaagttggctgactgcagttcaagggatccggctgaa

SEQ ID NO: 293769 - DNA, 839 bp, Unknown
  Bacterial polypeptide expressing nucleotide sequence isolated from the Sargasso Sea
tttatcaggttattgtaagcgcattaaagtaaatatttataaggataatagcgttgaagtctcagacaatggacgaggcatgcctgttgatgtccatcctgagcataagctaacaggcgttgaattaattatgtgtaagcttcatgctggagcaaagttctctggagaagattatggtttctctggagggcttcatggagtcggggtttctgtagtaaatgctttatccaccaaacttaatgtaaaaattaagcgtgattcaaaagagtatgaaataaatttctctgcaggagacaaagacaatgatttgaaatcaattggtgatgttggagcaacgaattcaggaacaacaattagattttatccagacaaacaatacttcgaaacattagagataaacaaaaagagcttaaaacatttactaaaggctaaggcagttctttgcccaggtcttcaaatagattactttgatgaaaaaaagaatgagagaattaaatggatttttgatgagggactgagcgactacctcgatgagttttcaggttgtaacgagaaacttcttgatgaaactattattctttccaaaacttccgatgatcaagcattagatgtagcagtgaattggactgaagaggcttcaaataatttactcaaagaaacctatgtaaacttaattcctaccgcattaggtggctctcatttaaatgggtttaaatctggtcttcttgaggcaataaaagaattctgtgactacagaaatttgattccaaaaggaataaaaattaactcggatgatattcttgctaactgcatctttgttatttcctcaaagttaaaaa

SEQ ID NO: 293770 - DNA, 592 bp, Unknown
  Bacterial polypeptide expressing nucleotide sequence isolated from the Sargasso Sea
aatgatatcttcaaatgaaattgttacacttataaatgcgcttggattagacccaaagtctcatgagatagatttaaaagatttaagatatggaaaaattattattatgactgacgcagatgtagatgggtctcatattagagctttgttgcttactttttttaataataaacctttcaataaattaattgaaaacggtcatgtatatttggctcaacctccattatttaaaataaacaaaggttcaaaaggtatttatataaaagatgaaaaggagttagaggaatatattctagataataataaagatttaaagaaaataaaaaaaggatcaaaagaatttattaaacttttagatattgaaaaaaataagatgagcattcaaagatttaaaggattgggagagatgaacccagaggagctatggagcacaacccttaatccagagactagaaacttgttacaagttcagtactcaaaggataccaaaaaggatcaaaatttgattcataccttaatgggtaatgatgtggcattaagaaaagattttattatatctaatgcaataaatgtgcaaaatttagatatttaa

SEQ ID NO: 293771 - DNA, 205 bp, Unknown
  Bacterial polypeptide expressing nucleotide sequence isolated from the Sargasso Sea
atgtctgatattgtagattccggtaactctggattaaacgaagataacgatcgaattattcaaacagacttaagaaatgagatgtcgcgctcttatctggagtatgcgatgagcgttatagttggtcgtgcgcttccagatgcaagggatggattaaagcctgtacatagaagaattctttatgcaatgtatgaacttggttaac

SEQ ID NO: 293772 - DNA, 340 bp, Unknown
  Bacterial polypeptide expressing nucleotide sequence isolated from the Sargasso Sea
atgaaaaaaaaaaaattggacaactatgatgcttctgaaattgaaattttagaggggctagaacctgttcgacgtaggccaggtatgtatattggaggtactgacaataacgccttgcatcatcttgcaactgagataattgataattctatggatgaagtggttgccaaacatgctactactattaatgtaaatctgcttgataataacacaataaatatttctgataatggaagaggaatacctgtagataatcatcctaaatttaagaaaaagtcagcattagaaatcataatgactactctccattctggtggaaaattttcaaataaaaattata

SEQ ID NO: 293773 - DNA, 690 bp, Unknown
  Bacterial polypeptide expressing nucleotide sequence isolated from the Sargasso Sea
catggggggttatatcaaacgagttccggtttcgacatataggtcccagcgtcgtggtggtaagggtaggtccggaatgtctacacgcgatgaagactttgtctcgaatgtctacgttgtaaatacccataccccggttttgttcttttcgagccggggcatggtttacaagttaaaggtctataaacttccgttaggcactccccaggcacgcggcaaagctctagtaaatcttttgccgttacaagaagaagaaactataactactctgatgcctttactggaggatgaagaagcctgtgaaaaactagatgtgatgtttgcaacttctaaaggttccgtccgacgaaatcggttgagtgatttcgtgaatgtgatgtcaaatggtaaaatagcgatgaaactgggagaaggtgatcacttagtcgatgtaactgtttgtgattctaatcatgatgtccttctgtctaccggcaaaggtaaatgcatacgatttccgaccatcgacgtacgtctatttgtcgggcgttcatctagtggagttcgtggaatacgtctagctcctaaagataccgttatttccatgtccacccttaaacatgtatccttttcgattgaggaacgcgatgcatatttacgtagacgtcgattagaaaggttggaaaatgaagacaatattgaagaggaaag

SEQ ID NO: 293774 - DNA, 505 bp, Unknown
  Bacterial polypeptide expressing nucleotide sequence isolated from the Sargasso Sea
tctcttggatgcggtattggtaaaaactttgatttatcaaaattaagatatgaaaaaataatactaatgacagatgctgatgttgatggctcacatattgcaacattacttataacttttatttataaatacatgagacctataattgatcacaacaggttatttttagctatgcctcctcttttcaaaatacaacacaaagataaatttttttatgcatatgatgaagttgaaaaaaataagattattaaaaaagaattttccaatacaacaaacataaccttaagtcgttacaagggacttggagaaatgccagcagaacaacttaaatcaactactatgaatcctgaaaaaagaaaattgttaaatataaatatcaatcaaggaaaaaaagaattaaaggaaacagaaaatttatttgaatctttgatgggtaaaaaagctgaatacagatttaagtttattcaagaaaatgcaaattttactgatcaaatcgatatttaat

SEQ ID NO: 293775 - DNA, 843 bp, Unknown
  Bacterial polypeptide expressing nucleotide sequence isolated from the Sargasso Sea
gctagtagatggtgtcccaaagataatgccattaaaaacagtattagaacaatttatagagtttagacatgaggttgttgtaagaagaactgaatttgatttaaaggcagctgaagcaagagctcatatattagagggattaaaaattgcgctggataacattgatgaagttatttcaattattaaaggaagcaaggatccaagccaagcaaaagaaggtctgatgaatgcatttaatttatctgaaatacagtcacaagcaattttagacatgaggcttcaaaaactaacaggtctcgaagtagacaaaatagttgatgaatacaaagaggtgataaagttaattgctttcttaaaaggcatccttgaaagcaaaagccaaaggatggacataataaaagaagaaatgcttgctgttaaaaccgagtttggcgatgaaagaagaactgaaataattcctgtggatgcaaatttttctatggaggatatgatagcagaagaagaggttgtgttaacaattactcatagtggctatattaaaagaacagccctaaacacttacagaacccaaagaagaggaggtcgaggcgttcagggcgcaacgagtaatgatgaagattttgttgaacacctttttatagccaacacgcataactatatgttgttttttaccaatcttggcaagtgttattggttaaaagtgtatgatattcctcaaggaggaagagcaacaaaaggaagggctattgttaatttaattggttgcgaaccaggtgaaaaggttgaggcttttgttagcgtaaaagagtttgacgataatcattttatagtaatggcaacgcg

SEQ ID NO: 293776 - DNA, 496 bp, Unknown
  Bacterial polypeptide expressing nucleotide sequence isolated from the Sargasso Sea
ataataataatgacagatgctgatgttgatggctcacatataagagcattattattaacgttttttaataacaaaccatttgataaattaattgagtttggacatgtttaccttgctcagccaccattgtttaaaattaataaaggaactaaaagcatatatatcaaagatgaaaatgagcttgaaagttatttaataaaaaattcaaaagatattaaaaaatataaaaaaaattctaaagaatttaataattttctccaaattgaaaagtctaaacttaacattcaaagatttaaaggattgggagaaatgaaccctgatgaattatggaatacaactttaaatcctgaaacaagaaatttattacaggttcaatattcaaagaatagtaaaaaagatcaagatttgatacaaaccttaatgggtaacgatgtttcctcaagaaaagattttattgttgaaaacgcaataaatgtttcaaacttagatatttaga

SEQ ID NO: 293777 - DNA, 838 bp, Unknown
  Bacterial polypeptide expressing nucleotide sequence isolated from the Sargasso Sea
tattgaggcaggctacttatatatagcgcaacccccactttatagagcaaaaaagggttcaagcgaagtttatctaaaagacgacacggcgcttgatgattatttaatacagtcaggattaaaggaagctaaactgataactggagacggttcagaaatagctggtccggatttagaggatgctgctaaaacttctttgaatgcctcacgaaatattgagacgctagacaatctaactggctcaaaaggtgttatagagcaagctgcaattgctgggttattaaattctgaacatctttttaataaagatgcagcagattatttagcaaaaagaatggataccgttagtacagaatatgaaaaaggttggaagggatctgtaaatgaacatggtttacttgtctctagagtgttaagaggagttaaagaagaaacaataattaacaatgatataattagcagaatagaggcacaaaacttagatgatatggctattaaacttcaagaattattcggaaatggaagtaatcaagtgttatttaaaaatacttcaagcttaacagaagtaataattggacctatttctttaagggatgctattttcaaaattggtaaaaaaggagcacaagttagtaggtataaaggacttggcgagatgaaccctgaacagctttgggaaactactttagatcctgatgctagagttttattacaagttaaagttgatcaagaagaagatgctcaggaagccttttcctcattaatgggagaagctgtagaagaaagaagggctttcatccaagagaatgctctaaaagtttcaaacctagacatttag

SEQ ID NO: 293778 - DNA, 622 bp, Unknown
  Bacterial polypeptide expressing nucleotide sequence isolated from the Sargasso Sea
gaatgatcaaagaacaaaagctctatcaaaaatgatttcttctaatgaaattttaactttaattaatgctcttggtcttgatcctaaggcacatgaaatagatttaaaggatctcagatatggtaagattattattatgacagatgcagatgtcgatggatcacatataagagctttattgttaactttttttaataataaaccatttaataaactaattgaaaatggacacgtgtatttagcgcaaccacctttatttaaaatcaataaaggatcaaaagggacatatattaaagatgaaaaagagcttgaggaatttataattttgaataattcaaaattaaaaaaacttaaaaagggatcaaaagaatttttgagagaattggaagcagaaaaatcaaaaatgaatatacaaagatttaaaggtttaggagaaatgaacccagaggagctatggagcacaactttagatccaaaaaaaagaaatttacttcaggttaaatattctaaagaccttcaaaaagatcaaaatttaatccataccttaatgggaaatgatgttgcacttaggaaagattttataatttcaaatgcaattaatgttgaaaatcttgatatctaa

SEQ ID NO: 293779 - DNA, 874 bp, Unknown
  Bacterial polypeptide expressing nucleotide sequence isolated from the Sargasso Sea
tctaaatggttaaaattacagattaagagaggaggaaaaaaatttatacttgaatttaaagaagggctttgtgtaaaaccgttgactcaggttgacatgtgtgatgatacaggaacagaaatccattttaaaccgtcagaagaaattttcaattcaatagaatttaaatacagtattttagttaaaagactacgagagttaagttttttgaatgatggtgtaaatataaatttatctgatgaaacgacaggaaaaaaagaaaattttgcaaattcagaaggtctggccggttacgtggaatttcttaaccagagtaaacatccgatacattcaaaaatttttcaagcaaaaaaggaagcaaataacataatcgtggaagtagcattgcaatggaataatagctactatgaaaatgttatgtgttttactaataacattcctcagcgggacggtggtacgcatttaacgggcctaagatcaggtatgacacgatgcataaatagatatcttgaaataaatgatttggggaaaaaaacaaaaattaatattactggtgatgatctcagggaaggcttaacttgtgtcttatctataaaattagcagaaccaaagttttcatcgcaaacaaaagacaaacttgtatcaagcgaagtacgtcaaccggtagaagatgtaataagcaaattctttgaggattatttaaatgaaaatcctaaagaagcaaaacaaataatttctaaaataattgacgcagccagggctagagaagcagcccgaaaagctaaagagataactcgccgtaaaggaattttggattctataggactctcagcaaaacttgctgactgtcaagagcgagatcccgaaaaatcgg

SEQ ID NO: 293780 - DNA, 592 bp, Unknown
  Bacterial polypeptide expressing nucleotide sequence isolated from the Sargasso Sea
atgatatcctcaaatgaaattttaactttaattaatgcattaggtcttgatccaaaaaatgaagaattgaatttaaaagatttaagatatggaaaaattattattatgaccgatgccgatgtagatggatcgcatataagagcattactacttactttttttaataaccaaccattcaataaattaatcaaagaaggtcatgtttatttagcgcaaccaccgttgtttaaaattaataaaggttctaaagggatctatattaaagatgaaaaggaattagaaaattatattttaaaaaattcaaaagatttaaagaaatttaaaaaagatactaaggaacacaaaaaattatttcaatttgaaaaatccaaacttagtattcaaagattcaaaggacttggagaaatgaatcccgaggaattatggagtacaaccttagatcctcagactagaaatctacttaaggtagaatattcaaaaaattataaaaaagatcaagatctaattcaaacattaatgggaagtgatgttgcatcaagaaaagattttattgttgataatgcaataaatgttttaaacttagatgtttagt

SEQ ID NO: 293781 - DNA, 535 bp, Unknown
  Bacterial polypeptide expressing nucleotide sequence isolated from the Sargasso Sea
aatgaggaaatagatttaaaagatttgagatacggcaaagttataattatgactgatgcggatgtagacggttctcatatcaaagcattacttttaacattttttaataataaaccatttaataaacttattgaaaatggtcatgtatatattgcacagccaccattatttaaaattaataaaggctcaaaaggtatttacattaaagatgaaaaagagctcgacaagtatatattaaataattcaaaagaattgaaaaacactaaaaaaggctcaaaagaatttgagaaaaaattacaagaggaaaaattaaaaattagtatacaaagatttaaaggactgggagagatgaatcctgaagaattatggaatactactttgaatcctgaaacaagaaacttactgcaagttaaatattcaaaagatttaaaaaaggattatgaattaattcatacgttaatgggcaatgatgttactttaagaagagattttattgtcgaaaatgcaattaatgtttcaaatctagatatataat

SEQ ID NO: 293782 - DNA, 806 bp, Unknown
  Bacterial polypeptide expressing nucleotide sequence isolated from the Sargasso Sea
gatggaaaaaaatatttttgtagaatttaataatggtgaagcaaaaaaaccattaaaagaaataggaaattcaaaagaaactggtacactaattacatttcttccttcaaaaaaaattttttcatcaattaaatttagtggaaatattttaatcaagcgaatgagagagcttgcttttttaaataaaggcatcaaaataacttttatagatagttctcaaaaaaaagaaaaaattcaagattttaaatttgatggtggaattttagaatttgtagaatttttagacgaaaaaagagaaaaattattaaataaaaatgggaatgatctttttaaaaaaccaatttatatagagggaaaaaaagataatattgaagttgaatgttctttaaagtggaacgcagactattctgaagatgttttaccttatacaaataatatttaccaaaaagatggtggaacacatgtattgggttttagaagtgcattaactagaattattaataagtacgtcagcgacaataatcttttaaaaaagaataaattaacaatttcaggtgatgatataaaagaaggactaacttgtgtattatcagcaaaaattcctgatcctaagttttcatctcagacgaaagataaattagtttcatcagaagtgagaacaatagttgagacaattattaatgaaaaactatcaatttggtttgatcaaaatccatcaatttcaaaaattattttagctaaaataattcaagctgcaacagcaagagatgttgctagaaaggccagagaaaacgtaagaagaaaag

SEQ ID NO: 293783 - DNA, 283 bp, Unknown
  Bacterial polypeptide expressing nucleotide sequence isolated from the Sargasso Sea
gggaaataaaaaggaatatgcatgggataatgatcaaagggacaaaataatgcttgattttggtcaaggtgcttcagtacaaagatataaaggtttaggagaaatgaatgctgaacaattatgggacactacgatgaaccctgaatacagaactttaagaaaaatagttgtagagaatcaaaagagagctgatgagactttttctatactcatgggagacgacgttcctcctaggagggagtttattgaaaataatgctgtttatgcaaatattgatgcataa

SEQ ID NO: 293784 - DNA, 352 bp, Unknown
  Bacterial polypeptide expressing nucleotide sequence isolated from the Sargasso Sea
gattacaaagttttgggccgggttcaaaaagcacagaaagtattttcaggccctgttgtcatagataacggatctgaaattacagaatatcccaatattgaagagtgcctaaaccaaattgttaacgcctcaaaaaggggccttaatgttcagcgctacaagggtcttggcgagatgaacccagaccaactttgggaaactacgcttgacccaaacacaagatctttgttgcaagttaaggcggacgacgatgcaggcctgacatttgaaaccctaatgggagacgaagtaccaccaagaagggagtttatagaagaaaatgccttaaacgcgggcaatgttgatatttaag

SEQ ID NO: 293785 - DNA, 565 bp, Unknown
  Bacterial polypeptide expressing nucleotide sequence isolated from the Sargasso Sea
caaattatcagcttactctagacccatgaaatctggtattaaagcgatcaaacttaaagatggagatcgcgttgtcaacgcagagatcactgatggcactaaagaaataatgctcttttcaaattctggtaaatcaatcaggtttaaagaatctgatgcaagaccaatgggacgagtatcacaaggtgtcagaggtatgcgaattgataaagatcagaaaattatttcacttgttgtccttgagaaaggaaatattcttgtagcaacagaaaatggttatggtaaacagacattaaaagatgaattctctattcaaaaaagaggtgggaaaggcgtaattgcaatccaaacatcagatagaaatggaaacctgattggtgcaaaacaagttagtacaggcgatgaagtcatgttcattagtacctcaggtaacctgattaggactcgaactgatgatatatctattattggaagaaatactcagggtgtcagacttataagactaactgaagacgataacttgttaggcatggagaaagtcatcagcgaagatgatgaggagtaa

SEQ ID NO: 293786 - DNA, 898 bp, Unknown
  Bacterial polypeptide expressing nucleotide sequence isolated from the Sargasso Sea
aatcatcttattcaagaagttctggataattctgtagatgaagctttatcaggttattgtaagcgcattaaagtaaatctttataaagataatagcgttgaagtctcagacaatggacgaggcatgcctgttgatatccaccctgagcataagctaactggcgttgaattaattatgtgtaagcttcatgctggagcaaaattctctggagaagattatggtttttctggagggcttcatggagttggagtttctgtagtaaatgctttatctaccaaacttaatgtaaaaattaaacgtgattcaaaagagtatgaaataaatttttctgaaggagacaaagacaatgatttgaaatcaattggtgatgttggagcaacgaattcaggaaccacaattagattttatccagataaacaatactttgaaacattagagataaacaaaaagagcttaaaacatctactaaaggccaaggcagttctttgtccaggtcttcaaatagattactttgacgaaaaaaagaatgagagaattaaatggatttttgatgagggactgagtgactaccttgatgagttttcaggctgtaacgagaaacttcttgatgaaactattattctttctaaaacttccgacgatcaagcattagatgtagcagtgaattggactgaagaggcctcaaataatttactcaaagaaacttatgtaaacttaattcctactggattaggtggctctcatttaaatgggtttaaatctggtcttcttgaggcaataaaagaattctgtgactacagaaatttgattccaaaaggtataaaaattaactccgatgacattcttgctaactgcattttcgttatttcctcaaaaattaaaaaatcctcagtttgct

SEQ ID NO: 293787 - DNA, 664 bp, Unknown
  Bacterial polypeptide expressing nucleotide sequence isolated from the Sargasso Sea
tagaaaatgttccaaggttgtaggtgatgttatgggtaattatcacccacatggaaacgaagctatatacggaactcttgtaaggcttggacagcactttagtacaaggtatcctcttatagaaccacaaggtaacttcgggacccccgatgatccaccagcagcgatgagatatacagagtctagaatgtcgttactagcatcgcagcttcttgatggcattgatgaggaaactgttgactttgaaccaaactattcaggagaaacaaccgaaccaaaagtactcccaggaaggtttccaaatcttcttataaacggagcagaaggaatagctgtcgcaatggccacaaacatgccaccatataacctacaagaaattacagaagcagttaaattcacactaaaaaccaaagaacctaaaccaagagactacttgaagataattaaaggcccagactttccaaccggaggcttaatagtcaaaaccccaacaataaaagatgcaatattaaaaggaagagggtctatcaaacttatagctgttgctgacgttgaagagcttggaaaaggaagatcagcaatcgttgtgaaagagttaccttatcaggcatcaatatatcgaataatggaaaaaattgcttccttagtgcaggataagaaactt

SEQ ID NO: 293788 - DNA, 539 bp, Unknown
  Bacterial polypeptide expressing nucleotide sequence isolated from the Sargasso Sea
taaagatgaggaaattgatattaaaaacttgcgttacggaaaaataattataatgactgacgcagatgttgatggatctcatattagagcgttactactaactttctttaataataaaccctttaataaactgattaaaaatggaaatatttatctagctcaacctcctttatttaaaataaataaaggtggaaaagttacttatataaaagacgagaaggagctggaaaaatttattcataataactctaaggaacttaaaaagtttaaaaaaggatcaaaagattttcaaaaatattattctcaagaaaaatctaaattgaatattcaaagatttaaagggcttggtgaaatgaacccagatgagctatggaatacaaccttaaatcctgttactagaaatttacttaaaattgaatattcaaaaaatatagaaaaagacgcaaaaataatccatacccttatggggaatgatgtatccttaagaaaagattttatagtttcaaacgctattgatgtacaaaatcttgatatttagt

SEQ ID NO: 293789 - DNA, 430 bp, Unknown
  Bacterial polypeptide expressing nucleotide sequence isolated from the Sargasso Sea
attgtcaaaaaaggcttacgattcaaaagcaattgaggttttgtcgggtctcgatcccgtcaaaaaaagaccgggtatgtataccgatacttcttgtccaaatcaccttattcaagaagtcctggataactctgtagatgaagctttatcaggtttttgtaagcgcattaaagtaaatctttataaggataatagcgttgaagtctcagacaatggacgaggcatgcctgttgatgtccatcctgagcataagctaacaggtgttgaattaattatgtgcaagcttcacgctggagcaaagttctctggagaagattatggtttttcaggagggcttcatggagttggagtttctgtagtcaatgctttatccaccaaacttaatgtaaaaattaaacgtgattcaaaagagtatgaaataaatttctct

SEQ ID NO: 293790 - DNA, 253 bp, Unknown
  Bacterial polypeptide expressing nucleotide sequence isolated from the Sargasso Sea
atggctgaggagcgcgttcaaccgatcgccctgcatcaggagatgcagcgctcctacctcgaatacgccatgagcgtgatcgtgggccgggctctccctgatgcccgcgacggcctgaagccggtgcagcggcgcatcctctatgcgatgcaggagctcggcctcactccggaccggccctaccggaaatgtgcccgtgtcgtcggagacgtgctcggcaagtaccacccccatggcgaccaggccgtctacg

SEQ ID NO: 293791 - DNA, 850 bp, Unknown
  Bacterial polypeptide expressing nucleotide sequence isolated from the Sargasso Sea
ggatctcaagatgatcctaaatcctttgctgcaatgagatatacagagtccaagttaacaaattttgcaaatttattaatctctgagcttaaggcgggtacagttgattggcaaccaaattttgacggctctttattagaaccagtaatttttccatcaaaaattcctataatcctcttaaatggaacttctggaattgctgtcggtatggcaacagacataccatctcacaacattaacgaagtaattgaggcaacaattagaattcttgaaaaaccaaaatcagatttaaatgatttattaaagattattaaaggccctgatttttctaatgatgcgcctatagttgctagcccagaagagttacacgagatgtatttaacaggcaggggaggttttaaaatccaatcccaatggaagcaagaaaaaaatcaaataataattaatgctttgccatatcaagcctctggttcaaaaattctagagcaaattgcagaacaaatgcttaataaaaaacttcccatggttatagatttatcagatgaaggagatcatatggaacctgtaaggttagtgataactttaaaatcaaatcgtgttaatgctgaagacgttatgaatcatctctttgcatctactgaccttcaaaaaacctataggatgaatatgaatctgatttctttgaaaggtgggcctaaagtattttcgctcgtagatttgttaaaagaatggttaacattcagaaaagatactgttaaaagaaagttagaacatcgattaaatcaagttaatgacaggcttcatatacttgaaaggcttactaaaccatattttattgactttggataaa

SEQ ID NO: 293792 - DNA, 313 bp, Unknown
  Bacterial polypeptide expressing nucleotide sequence isolated from the Sargasso Sea
gggattgcagttggaatggcgactaatatattgccacatattctaggtgaagttattgatgcgtgtgttgcttatatagatgatccagaaatttcttttgaaaagataaacgaaattataaaaggaccagactttcctacaggaggaaaaatagttggcacaaaaggaattagagactcacaaaacagcggtagaggatcgattattgttcaggctaagtcaacgtttgaagaatttaaaagtgaccgtgaagcaattattttctcagagttgccttatcaagtaaataattcaactttaattgaaaagatag

SEQ ID NO: 293793 - DNA, 652 bp, Unknown
  Bacterial polypeptide expressing nucleotide sequence isolated from the Sargasso Sea
tttcggaccgcaatgcagatcagactttacagaacccattatgatcgattgtgctataacccgaacctcaacatgctaatcaatctgttgcttactcaccaaattgagatagatttaggaggagcagagcatatcattaactgtatcagcgccttaaagaacatatatcaagattataaacttactgttgatcctgagaagaagggtagcaatgttttaattgaggcaaacgggcaaaaaattgagctttcttttaatttgctggaaaatctgagtgcctatgattattctcagttgtttgatgaacatttgaggcttaaagctgcattgggtgaaaaaggtgttgtcctaactgaagaaaaagaaggtgagagcaatttttttaaatcttggtttgaattgctagattttattataaattttggtaaaaaaggcatgtatatccagcgctacaaaggattgggtgaaatgaatccggaacaattatgggaaacaacactaaatcccgaagtaagggcacttaaaaaagtaaccattgaagatatagtagaatcagacggaatctttactattttgatgggtgaccaagttgaaccacgccgtaatttcattgaggaaaatgcgctcagagtaaagaatcttgatgtttagc

SEQ ID NO: 293794 - DNA, 388 bp, Unknown
  Bacterial polypeptide expressing nucleotide sequence isolated from the Sargasso Sea
tatgcttgctcagccacctctatataaaataaataaaggatcaaaagcaacttacataaaagatgacaaacaattagaaaattacattttaaaaaattctaaagatcttaccaagctgaaaaaaggatcaaaagattttgtaaaaatttttgaaattgaaaaatctaaattaaatatacaaagatttaagggcttaggagaaatgaatccagaagaattatggagcacaactttaaatcctgaaacaagaaatttgttacaagtagaatattctaagaatatcaaaaaagatcaggaaatcgtacatacccttatgggcaatgatgttactgcaagaaaagattttattatagaaaatgcaattaatgttttaaatttagacatttaa

SEQ ID NO: 293795 - DNA, 141 bp, Unknown
  Bacterial polypeptide expressing nucleotide sequence isolated from the Sargasso Sea
aatgtccacaaacaacaaaaaaaatcagtattctgcagatagtattcaagcccttgagggtatggaacatgtaagaaaaagaccctcaatgtatataggtgatgttgggtctcgaggccttcatcatttagtttatgaagt

SEQ ID NO: 293796 - DNA, 952 bp, Unknown
  Bacterial polypeptide expressing nucleotide sequence isolated from the Sargasso Sea
caaaaataaagatattaaaataaatgaattaatgaaacatattccaggtccagattttccaacaggaggattgataattggaaaagatataattaaacaaggatataaaactggcagaggttcctttaaaatacgtggtgatatatctgttgaaaatcttaaaaatggtaaagacagactcgtaatttcgtcaattccttatcaaatcaataaggcaaatttaaatgaaagaattgcagaacttgtcagagataaaaaaattgagggtattagtgatataagagatgagtctaatagcgagggtattagagtttcaatcgacttgagaagaaacattgaacctgaaactgttaaaagacaattatataaatacacttctatcgaaacttcttttgggttcaactctttggcaatagttgatcaaaaaccaaaaacttgcagtcttaaagattttttagaaaattttttaaaatttagagaagatgtagtaataaaaagaacaaaatttgatcttaaaaaagccgaagaaagagtacatattttactaggattatctgtaagtgtagaaaatattgataaagttattaaaataataagatcttctaaaaatccagatgaagccaaaacatcacttttaaaaacaacatggaaaataaataaatcttctaaactaataaaattagtcgatactaaaaattataaaggaaaatatacactttctttagatcaagtaacatcgatactagagttgagattacaaaaacttacagcaattggaattaacgaaattgaaattgaaattaaaaagttagcagaagaaatttcaaaatttaaaaaaattataaattctaaaaatgaattattaaaagttataagtaacgatttacaaatgataaaagataaattctcttttccaagaagaacaaagataattgatgctgttttgaattat

SEQ ID NO: 293797 - DNA, 905 bp, Unknown
  Bacterial polypeptide expressing nucleotide sequence isolated from the Sargasso Sea
ttctaacattattaaaggacctgattttcctacaggtggagaattaatttacaatgaagcaataaaagaactttatgaaacaggcaaaggatctttaacgataagaggagttataaatacagaagaagtatatttaggaaaagggaaacataaaaagaatgcactaatcattacggaacttccttaccaaataaataaagcaggttggattgaaaaactcgcagaactggttaattcaggaaaaattaatgggatctctgatattagggatgagagcgacagagatggaatgagaattgtaattgaactaaaaaaggattctaattctgaacttgttatttctaatttatataaaaaaacaactctccaaacaaactatggtgcaatatttttagctttaattaaaggcaaacctatacagctaaacctaaagaaatatctcaactattttcttgaattcagagaagaaacaattagaaaaagaactttttattttctaaaaaacacgcttaataaattagaaatatcagaaggtttatctaaagctacgaaaaacataaaaaaagttatcgcaattattgaagaatcagaaaattctgtgcaagctagatcaaaattagtagaaaattttttcttaagtgaaaaacaagcaaattcagttttggatatgccactaaaaaaattaacaaatctagaaaaaaatcaaattgataatgaaataaagaatttagaagaaaaaaagaattattttgaaaaattattgaatgaaagagaattatttcttaaattactcatagaagaattattaatattaaagaaaaaatacaatgttatacgtaaaacaaaaataattaaaaatataaatcaaaatgaagaattagaaacgcttaataatcagatattag

SEQ ID NO: 293798 - DNA, 394 bp, Unknown
  Bacterial polypeptide expressing nucleotide sequence isolated from the Sargasso Sea
atgaaaaataatgaaaaaatatcatcattaagtttaaaaaattatgctgaagagtcatatctcaactatgcaatgtatgtaattttagatagagctttacctaatattggagatggactaaaaccagttcaaagaagaattctttatgcaatgtctgaattaggacttgatgcatcttcaaaatataaaaaatctgcaagaactgtcggtgatgtaataggtaaattccatcctcatggagataccgcagcatatgaagcaatggtcttaatggcacaaaatttttcttttaaatatccacttgtcgatggccaaggaaattggggttctcaagatgatcctaaatcttttgctgcaatgcgatatacagaatcaaaactaactagttttgcaa

SEQ ID NO: 293799 - DNA, 733 bp, Unknown
  Bacterial polypeptide expressing nucleotide sequence isolated from the Sargasso Sea
gttcagcaaaacaggggaagaaatagggaaaatcaagctgttcttcctttaagaggtaaaattttaaatacttatgtagatctcaatgattcaaaaaagaatggtaacagttcagagttacgaactaaaacactttcaaaaatgatatcatcaaatgaaatagttacactgatcaatgcacttggattagatccaaaagcggaggaaattgatatcaaagatttaagatatggaaaaattattataatgactgatgcagatgttgatggttctcatatcagagcgctccttttaacattttttaataatactccatttaataaattaatagaaaatggaaatatttatttggcacaacctcctttatttaaaataaataagggcacgaaagggatttacataaaagatgataatgaactagaaaattatatactgaaaaatacaaaatctttaaaaaaatacaaaaagggatcaaaagaatttaacagttttattgagagtgaaaaatcatttttaagtattcaaagatttaaaggattgggagagatgaatccagatgaactttggaatacaactttaaatcccgaaactagaaatttattacaggttcaatattcaaaggatatcaaaaaagatcaagaaattattcatactttgatgggtaatgatgtttcttcaagaagagattttattgtatctaatgctattaatgttttaaatttagacatttaaa

SEQ ID NO: 293800 - DNA, 679 bp, Unknown
  Bacterial polypeptide expressing nucleotide sequence isolated from the Sargasso Sea
ggggaaaattttaaatacttatgtagaggaggatactaaaaaaaataattctaatggaaacaatcatagaaccaagactctttccaagatgatatcttcaaacgaaatagttactttgataaatgctatgggattagatccaaagtctgacaatatagaaacaaaagatgtaagatatggaaaaataatcattatgactgatgctgatgtggatggctctcatatacgtgcattattattaacattttttaataatgttccatttaataaacttattaaagaggggtatatttatttagcgcaacctccattatttaaaataaataaaggaacaaaaggaatttatataaaagatgaaaaagaattagaaaaatatatacaaaaaaattcaaaaatattatcaaatttaaaaaagggaacaaaagaatacgaaagatcatttgatgaggaaaaatctaaatttaatatacaaagattcaaaggtttaggagaaatgaacccagaagaactatggagcacaacgttaaatcctgaaacaagaaatttattaaaagtagaatattcaaaaaacattaaaaaagatcaagatattattcatacattaatgggcaacgatgttgcatcaagaaaagattttattgtttcaaatgcaattaatgtttcaaaccttgatgtttaa

SEQ ID NO: 293801 - DNA, 875 bp, Unknown
  Bacterial polypeptide expressing nucleotide sequence isolated from the Sargasso Sea
tatggaggatatgatcgctgaagaagaggttgttttaacaataacacaccaaggttacattaaaagaacagctttaaatacctatagaactcaaagaagaggtggtcgtggagttcaaggtgctatgagcaaagatgaggattttgttgaacatttattcattgctaatactcataattatatgttgttttttacagacatgggtaaatgttattggttgaaagtatatgatataccacaaggcggaagagcagcaaggggtagggctattgtaaatttaataggttgtgatccgggtgagagagttgaggcttttgtcagtgtaaaagattttgatgacgatcactatattgtcatgtgtaccaagaacggcatagttaaaaagacagttttatctgcttatggtaatcctcgaaaagggggcatatatgcgattgatatccgtgataatgataagttaattgaagcaagaataacaaatggagaacatgatatccttctaggaacacatgaggggaaatccataaggttttctgaaaacaatatcagacctagtggtagaaaaactatgggtgttaaaggtataactcttagttcgtctgatgattatgtggttgggatgttggttgttcgaagagaaggtacggttttggttgctacagaaaagggatatggaaaacgaaccgaagtcattcaatatcgaacccaaacacgaggtggtaagggcgttttaactatgagatgtactgataaaactggaaaaatggtaaacattatggaggtagttgattcagatgatcttattgttattactaattcaggtgttctaatgagacaatctgtatctgagattagagctattggcagggtaacac

SEQ ID NO: 293802 - DNA, 127 bp, Unknown
  Bacterial polypeptide expressing nucleotide sequence isolated from the Sargasso Sea
atgacaaaaaataaatcttatcaagcagactcaattaaagttttaaagggtcttgaggcagttcgtaaaagaccaggaatgtatattggtgataccgatgatgggaccggtctacatcacatggttt

SEQ ID NO: 293803 - DNA, 220 bp, Unknown
  Bacterial polypeptide expressing nucleotide sequence isolated from the Sargasso Sea
tatgaaaaatactgaaaagtttaaagataaaaatataaaattaatctcaatgcatgatgagatgagctcatcatatctttcttacgcaatgagtgtaattgtaagtcgtgcacttcctgatgtaagagatggattaaaacctgttcatagaagaattttattcgctatgtataagggtggatatgattggtctaaacaatttagaaatcagccagaatag

SEQ ID NO: 293804 - DNA, 223 bp, Unknown
  Bacterial polypeptide expressing nucleotide sequence isolated from the Sargasso Sea
tatggataaatcgcaattagagaataaaaataatataaaacctattgaaatgtatgatgaaatgagttcatcatatctttcttacgcgatgagcgtaattgtaagtcgtgctttaccagatattagagatggtttgaaaccagtccatcgaagaattatttatgcaatgcataaaggtggttttgactggagtaaacaatacagaaaatctgcaagaatagtt

SEQ ID NO: 293805 - DNA, 850 bp, Unknown
  Bacterial polypeptide expressing nucleotide sequence isolated from the Sargasso Sea
ctcgactacttttagtgataattatgatggccaaaaccttgagccagatgttttaccatccaagttacctaatattttgttaaatggttctacgggtattgcagttggaatggcaactaatattccaccccataatttaatagaaataaatgactgcttaactaaactaatactaaaaccaaactcctctgaatctgaacttcttaaaataattaaaggacctgatctgccaacaggaggagagattatattaagttctagtgaaaagaaaaatatttataagagaggttttggctcttttcttattaattcgaagtggcatgatgaaaaaataaaaaatggtttgtatgagatagttattactgaaattccatttcaagttaataaagttaaaattattgaacagcttgccaatttgattaatcaaaaaaaaataccattagatgatgttagagatgaatcagatgaaaagataagaattgttcttaaacctaaaaacagaaatatagataaaaaaaaattagtagatttatgtcttaaattaactgacctatctattaaatattcatgcaactttaatgttttagaaaaaggccgtattccaaaacaactaggtttaaaatcaatactttctcaatttattgattttagaaaaattactgtaaaacgtaaatcaaaatataatataaataaaaataaccaaagattagaaatacttaaaggttatttaattgtatttgcaaatttagataaaattataaaaattattagaattaaagaggatccaaaaaaagaaataattaaagcttttaaattatctatattacaggttgaagcaattttaaatatg

SEQ ID NO: 293806 - DNA, 166 bp, Unknown
  Bacterial polypeptide expressing nucleotide sequence isolated from the Sargasso Sea
aatggccacggcctccacacgggagcgaattctggcacgcagtctcgaagctgagatgcgcgaatcgttccttgattactcaatgtccgtcattgtgcagcgcgctttgccggatgtccgcgatggactaaagccagttcataggcgaatcctatacgccatgcag

SEQ ID NO: 293807 - DNA, 868 bp, Unknown
  Bacterial polypeptide expressing nucleotide sequence isolated from the Sargasso Sea
tatgggaactaaggatgaagatttcgttgaacagctgtttgttgccaacacacatgattatctgctctttttcaccaacaaaggacaggttttccgaaaaatcgtgttcgagctgccccaggcaggacctaccggacgcggcaaagcagtaatcaatatgctacctttacgtgagggtgaaagtatttgtgcctgcttaaatgtgccgaaggaatcagaaaacaagtatatttttctctgtacagaaggaggtgtagccaaaaaaacacccatgctggattgtgcaaagatccgtgtaagcggtttgagggtaatcactcttgatgaaggagattcggtaatttccgtgcagcttaccggtggtgaccaggaactgttttttgccacccgggagggtatgggattacgtgtcaacgaaaaaacactgcgtccgatgggacgacaggcacgtggagtgagaggagtcagacttcgaaaactagacagggttgtatccgcgcttgcgctttccggttccggggaactattgactgtaaccgaaggcggttatggtaaaaagactccgattgcggattacacgcttgcaaaaaacaggggcaattttggaatgcgcacaatcaggatcacagacacaaatggtccagtggtgaatgtacttgaagtagaagagcatttccagcttttcctaatcactcagctgggcaaattaatccgcattcctgttgaaaacatccgtacaatcgggcgtgtaactcaaggcaatcggcttattcatcttgaaaaggatgaacaggtaattggcattgctccagtgattgaaaacgaggaggaggaggagatcgaagcattacagcaggattcaggatct

SEQ ID NO: 293808 - DNA, 277 bp, Unknown
  Bacterial polypeptide expressing nucleotide sequence isolated from the Sargasso Sea
tatggaaaatgaagatttagaaaacgaagatattcaacataccactttttcaaaagcaatatctgaaaggtatttagcatatgctttatcaacaatcacatcaagatccttgccagatgtaagagatggtttaaagccagttcatagaagagttttgtatgccatgatgcaattaaaactcaatcacaatgtatcgtttaaaaaatccgcgcgtgtggtaggagacgtgatgggaaaatttcatcctcatggagatggtgcaatttatgaatctcat

SEQ ID NO: 293809 - DNA, 184 bp, Unknown
  Bacterial polypeptide expressing nucleotide sequence isolated from the Sargasso Sea
gatgaaccctgaacagttatgggaaaccactatggatccaaatacccgccgcatgctgcgtgtgactattgaagatgccataggtgccgaccagttgtttaataccttgatgggtgacgacgtagaaccacgccgtaactttattgaagaaaacgcgctgcgggttgcaaacctggacgtgtaa

SEQ ID NO: 293810 - DNA, 235 bp, Unknown
  Bacterial polypeptide expressing nucleotide sequence isolated from the Sargasso Sea
ttgaccgacgagactcaaaatacagatacctcaagcgatgatgaaaagcctatcagcatctatcacggtcctagcgtttcaataacgaaggaactgaaaacgtcgtatttggattatgcgatgagtgttatcgttagtcgtgcgatacctgacctgcgagacggcttaaaaccggtacatagacgcattttatacgcaatgcacgatagtggtaacacacacgacaaaggttatc

SEQ ID NO: 293811 - DNA, 139 bp, Unknown
  Bacterial polypeptide expressing nucleotide sequence isolated from the Sargasso Sea
atgaaaactaacaatacatataaggcagattccatcaaagttctaaagggtcttgaggcagttagaaaaagaccaggaatgtatattggagatacagatgatggtaccggtctacatcacatggtctacgaagtggttg

SEQ ID NO: 293812 - DNA, 731 bp, Unknown
  Bacterial polypeptide expressing nucleotide sequence isolated from the Sargasso Sea
gaaacaaggaagggatagatccaatcaagcggtattgcccttaagaggaaaaattttgaacacttatgtagaagatatgacattaaaaaaaaacggcaattctaatggcactgatcagcaaacaaaagctctatcaaaaatgatttcttcaaatgaaatagtaactttaattaatgctctaggtttagatccaaaagctcaagaaattgatttaaaagatttaagatatggtaaaattattattatgactgatgccgatgttgatggatcacatatcagagctttattgttaacattttttaataataaaccatttaataagttgattgagtatggctttgtttacttagctcaacctcctttatttaaaatcagtaaaggttctaagggaatttatattaaagatgaaaaagaactagaggagtacataattcataataataaagatttaaaaaaatttaaaagaggatcaaaggaattttataaagcaattgatttagaaaaatctaaaatgaatattcaaaggtttaagggtcttggggaaatgaatccagaagagttatggagcacaacgcttgaccctaaaacaagaaatttattacaagttcagtattctaaggatcttaaaaaagatagagatttaattcatactttaatgggaaatgatgtctcattgagaaaagattttattatctctaatgctattaatgttcagaatcttgatatttaac

SEQ ID NO: 293813 - DNA, 196 bp, Unknown
  Bacterial polypeptide expressing nucleotide sequence isolated from the Sargasso Sea
taaaggtttaggtgaaatgaacccatctcagttagcagaaacaaccatgaatcctgaaacaagatcactacttaaggtgagtcaaatccctgatgatgattacagtatttttgatacacttatgggcgaggatgttgaaaagagaaaagattttataatttctactgctaatacaattgatcacgttgatatttaa

SEQ ID NO: 293814 - DNA, 715 bp, Unknown
  Bacterial polypeptide expressing nucleotide sequence isolated from the Sargasso Sea
gttggtatggcaacaaatgtacctccgcacaatctgaccgaggtcataaatggatctctaaaacttcttgagaatccaaaactatctatcgatcaaatcatagagtctataagtggtcctgactttccaactggaggcaccatcgatgggaaaatgggtatctatgaagcctataaaaccgggagaggaataatatatgtccgatctaaatcaaaagtagaagaaaacaaagctggaaggaagtctcttgttatttatgaaatacccttcatggttaacaaagcaagaactctcgagaagatagcagagcttgtcaaagaaaaaaagattgatggaataagtgaaattagagatgagagtgataaagacggtctaaggattgttatagatgttaaaaaaggggagtccgtagaagtattagaaaataatctctttgcgcagactcaacttgagcaatcattcggaattaattttaccgtcttggttgatggtcagccaaaggtccttaatttaaaagaaatccttcaagagtttttaaagcatagaaaagatgttgtgcttaaaagaacaaaatttgcgcttaggaagtctaaagatagagggcatattgtagaaggattgatggttgctattgcaaacattgatgaaattataaagattattaagaaatccaaagatccaaagattgcagcacaggagttaatcaaaaagaaat

SEQ ID NO: 293815 - DNA, 697 bp, Unknown
  Bacterial polypeptide expressing nucleotide sequence isolated from the Sargasso Sea
ttttcctcttagaggcaaaattttgaacacttatgttgaggattttacaataaaaaaaaatggtaatggacacgcatcagacaaaaggacgaaagctttgtcaaaaatgatatcttcaagcgagatagtgacattaattaatgcacttggcttagaccctaaggcacaagaaatagacctaaaggatttaagatacggaaaaattataattatgactgatgccgatgttgatggttctcatatcagagcattgttattaactttttttaataatgaaccatttaataaattaattgaaaacggccatatttacctagctcaaccaccgttgtttaaagttaataaaggaataaaaggtatttacattaaagatgagaaagaattagaagattatatagtaaataataacaaagaaattaaaaaaataaaaaaaggaacaaaagaatttactaaagctttagatttagaaaagtctaaaatgaatattcaaagatttaaaggtttaggagaaatgaatcccgaagaactgtggagtacaacgcttgatccagaaactagaaatttacttcaagttcagtattctaaagaccttaaaaaagaccaaagtttaatacatacacttatgggtaacgatgttgcattaagaaaagattttattgtctctaatgctattaatgttcagaatctcgatatataa

SEQ ID NO: 293816 - DNA, 781 bp, Unknown
  Bacterial polypeptide expressing nucleotide sequence isolated from the Sargasso Sea
acatggagttggtgtttcagtagtaaatgctctatcagaaaaactagaattagaaattaatagagatggaaaaaaatattttgtagagttttataatggtgaagcaaagaaaccattaaaagagattggaaaatcaaaagaaaatggaacacaaattacttttcttccttcaaaagagatcttttcatcaattaaatttagtggaactattttaattaagagaatgagagagcttgcttttttaaacaaaggtatcaaaataacttttatagacggttctcaaaaaaaagagaaaattcaagagtttaaatttgaagggggcattttagagtttgtagagtttttagatgaaaaaagagataaactgctaaataaaaatgaaaatgatctttttaaaaaacctatttatattgagggaaataaagataatatttatatcgagtgctctcttaagtggaacgcaagttatacagaagatgttttaccgtatacaaataatatttaccaaaaagatggtggaactcatgttcttggttttagaagtgctctcactagaattataaataaatatgtaagtgataataatctcttaaaaaaaaataaattaacaatatcaggagatgatattaaagaaggactcacttgcgttttgtcagcaaaaattcctgatccaaaattttcatctcagacaaaagacaaattagtatcatctgaagtaagaacaatagtcgagacaataattaatgaaaaattatctatctggtttgatcaaaatccttca

SEQ ID NO: 293817 - DNA, 903 bp, Unknown
  Bacterial polypeptide expressing nucleotide sequence isolated from the Sargasso Sea
tcctccacataatcttaatgaagttttgaatgggtgtatcaatttaattaagaatccgaaaatatctattgatgatttaattaaagatatatcaggtccagattttccaacagggggaactattgatggcaaggctggtatttatgaggcatataaaactggaagaggaataattcacacaagatcaaacacatcagttgaagaagacaaatctggaaaacaaagtttaattatcaatgaaataccttttatggttaataaagcaaaaatgcttgagaaaattgctgaactagtaaaagaaaaaaaaatagaaggcataactgaaataagggatgaatcagataaagatggtttaagagttgtaatcgaggttagaaaaggtgattcagttgatgttttagagaataatctttttgcgcaaactcaacttgaacaatcatttggcataaatttcactgttctatctgaagggcaacccaaagaagtaaatctcaaagaaatgttacaagcatttgttaaacacagaaaagatatcatcacgaaaagaacaaaatatgacttaaggagagctaaggatagggggcatgtcgttgagggcctaatggttgcgattgcaaatattgatcaaataattgcaattattaaaaaatcaaaagatccaaaaatagctgcaaatgaattatgtaaaaaaatatggaaatctggtcccttggaggcagtgctaaaaaaagttggtagtgatgcatgcaagccaaaaggattaagcaaagaccttggactcaagggtaaaaaatataaactgtctgagaatcaagcaaaagcaattcttgaattaagactaggcaggttaacaggcttagagcaagataatttgaataaagagttttcagagattgttgaaaa

SEQ ID NO: 293818 - DNA, 592 bp, Unknown
  Bacterial polypeptide expressing nucleotide sequence isolated from the Sargasso Sea
atgatttcatcaaatgaaattttaactttaattaatgcattaggattagatcctaaaacagaggatatagatataaaagatttacgttatggtaaaattattattatgaccgatgcagatgttgatggatcacatattagagctttactattaacttttttcaacaacaaaccatttaacaaacttatagaaagtggacatgtttatcttgcacagccaccactatttaaaattaataaaggatcaaaagtaatttatattaaagatgaaaaagatcttaataaatatattttaaataattctaaaaacttaaaaaaatttaaaaaaggaagtaaagaatttttaaatgcttatgatgaagaaaaatcaaaaatgaatatacaaagattcaagggtcttggagaaatgaatcctgaagagttatggagcacaactttaaatccagaaacaagaaatttattaaaagttcaatattcaaaagatctaaaaaaagatcaaaatatcattcatactctaatgggaaatgatgtcgctctaagaaaagattttatagtatcaaacgcaattaatgtttcaaatttagatatataac

SEQ ID NO: 293819 - DNA, 181 bp, Unknown
  Bacterial polypeptide expressing nucleotide sequence isolated from the Sargasso Sea
atgtacattggaagcacaaatgaacaaggactacatcatttggtaaatgaggtgttagataatagtattgacgaagtagttgccggtcatgcaagtgaggttttttttcactataaaaaaaatggttcaattttaattaaagataacgggagaggtataccaattgattttcaccctaaat

SEQ ID NO: 293820 - DNA, 806 bp, Unknown
  Bacterial polypeptide expressing nucleotide sequence isolated from the Sargasso Sea
tggacttgatccggtcaagaaaagacctggaatgtatacggaaacttcccgacctaatcacctagccttagaggtaatagataacagtattgatgaagcccttggaggctttgcctcaaagatagatgtagttctgcacaaagatggatctcttggtgtagaagatgatggaagagggatgccagttgatttgcacccagaggaaggtgtgcctgctgttgagcttattttcacaagactccatgctggagctaagttttcaaatgaagactataaattttctggaggtttgcatggtgtgggtgtatcggtagtcaatgccctatcaacttttcttgaagctgaaataaaaagagacggtcaaaagtactcaattagatttgaagatagtgagaagaaaaaagatttaaaagccattgataaggttggccagaagaataccggaacaaaggttacatttctcccggatcctcaatattttgataatcctaaaatttcagtttctcaacttacatctgcattaaaagcaaaagcagttctttcacctggattaaagatttccttcaaagatgaaaacacgggccagtctgaatcttggtgttttgttgaaggacttgcagcttatttggcttcttctaacaaaggaggagaggttgttccttcagatccttttgagggtgaatttttgtctgatgagggcggattgacttgggctctgcaatgggttcaaggaattgctgatcctatttcagagagctatgtaaatctcataccaacctctcaaggaggaacgcatgtaaacggaa

SEQ ID NO: 293821 - DNA, 853 bp, Unknown
  Bacterial polypeptide expressing nucleotide sequence isolated from the Sargasso Sea
atcatgaccaagttgcatgcaggcgggaagttcgacaatgaggcctacaaagtggccggtggcctacatggagtaggcgtgagtgccgtaaacgcagtttcagaatctctgattatgaccattcatagagaaggcaaggaatggcaacagacctacaacaaaggagtcccccagggcaagctaaagtcgataggaagctcagataggactgggaccataatctcgtttaagcctgatttggaagaagtattcagcgacatcatagagtttgacttcgagcagattaataccaggctcaggagaacggcattcctgaatgcaggacttcagattatcgccagagatctcagaggtgagtctgctgtggaaatcgagcataagtacgatgggggtctgaaggagtatgtagaatccatgaacaagaacaaggaagtggttcacgaagatgtgctgcatgtacttggcagcaagcagggagacaagggggaggtttacgtggaggttgcaatgcagtggactgatgcttactcggagtcaatacattgcttcaccaatataattcacaatacggacggggggactcatctttctggcctgaagagctcgctgacgcgaacagtgaatggatatgcgcagtcaaaaaacctgctcaaaaatgtgaaaggactgtctggagatgatgtcagagagggtatttctgctgtcatttcgataaagcatccggatccatcattcaatgcgcagaccaaagcaaaattggtcactagcgaggtggccgggatagttgagcagatcgtgaatgacaaattgggcgagttcttcgaagagaatccctccgttgcaaagcagatcg

SEQ ID NO: 293822 - DNA, 184 bp, Unknown
  Bacterial polypeptide expressing nucleotide sequence isolated from the Sargasso Sea
catggaaaaaactagtacagagaataaatcctttaaacctatcttcgtccaagacgaaatgagttcgtcatacttatcttacgctatgagcgtaattgtaagtagagctttgccagacgtcagagacggactaaaacctgtgcataggagaattatatacgcaatgtacagaggcggatatgat

SEQ ID NO: 293823 - DNA, 850 bp, Unknown
  Bacterial polypeptide expressing nucleotide sequence isolated from the Sargasso Sea
tatgcctgttgacaagcatccaaaacacaatgtttcaggagctgaagtaatcatgactaacctgcattctggagcaaagttctcagaaaaaaattataaattttctggtggacttcatggtgtaggagtatctgtagttaacgctctttctgagaaactagaacttataattaatagaaagggggataaaaatgaatattttatgtcatttcaaaaaggcattttatcccaaaaactcatacctaaaaataaatctaaaaaacaacagggaacaaagatatctttcaaaccagatactaaatattttgattcagttaacatagatcttgatgctttagttcatttgataagagctaagtccattcttcagccagaattaaaactaatactatatgataataaaaataacttagagcctagagaattttatcattctggtgacttaaaggattatctagtatccgtaaacagtaatttaggagaattattacctgagaattcctattatggaaaaattgaaacagataattacatgatggattggtctgttttatggattgatgaaaataatgatttagtacaagaaagctatgttaatctcataccaactgcattaggagggacacatgtaaatgctatgaggtcaggtttagtagatgctatacgtgagttctgtcttaagagaaagttacttcctaaaaatattaaactatcaccagaggatatatggaaaaatgtatcctatgtcttgtcatttaaaatgaccaatcctcaattctctggacaaacaaaaggtaaacttcaatctaatcacctttcagctatactagtttcacaaattgaaagataa

SEQ ID NO: 293824 - DNA, 904 bp, Unknown
  Bacterial polypeptide expressing nucleotide sequence isolated from the Sargasso Sea
gatgcacccatggagaaaccctcggtgcttccggcccggcttccgcacgtgctgctcaacggtaccacgggtattgccgttggtatggcgacggatattccaccccataatgttcgggaagtcacagccgcctgtattcgtttgctggatcagcccgatgcgtccgtagatgagctgtgtgagcacatcaaggggccggatttcccaaccagggctgaaatcatcactccccgcaaagacttgcgccagatgtacgagaccgggcgaggttcgctgcggatgcgcgcacgctggattcgcgagaatggcgaagtggtgatcactgatttgccgcaccaggtctccggaaaccgggtgctggagcagattgcccagcagatgcagaccaagaagctgcccatggtggcagacctgcgcgatgaatcggatcatgaaaatccgacccgtctggtgattgtgccccgctccaatcgggttgatctggacgggctgatggctcacttgtttgccagtaccgatctggagaagacctatcgggtcaacatcaacgtgattggcaacgatggccggccaggcgtaaaaggcttgtacaccattctgaccgagtggctggcattccggaaaacaacggtaacacgccgtttgcagcatcgcctggacaaggtgctggcgcggttgcatcttctggaaggcctgttgattgcctacctcaacattgatgaggtgatcgagattattcgcaccgaagacaagccgaaggcggagctgatggcgcgctttggtctgtcggcggagcaggcagaggccattctggagctgaaattgcggcacctggccaagctggaggaaatgaagatccgcggcgagcaggatgagctctccgccgagcgcgatgagctgcagg

SEQ ID NO: 293825 - DNA, 829 bp, Unknown
  Bacterial polypeptide expressing nucleotide sequence isolated from the Sargasso Sea
catttagttatagaggtattagataatgctattgatgaagctgtagctggatatgcaaatcttattgaaattgaacaaatttcgaataacacaataaagatttctgataatggaaggggaattccagtggactctcatcctaagtatccaaataaatcagcacttgaaattataatgactactttacactctggtggaaaatttactgataaaaattataaaacttcaggtggacttcatggcgttggtatttctgttgtaaatgctctttctagtaaactaatagttgaagtttcaagagatagaaaactttacagtcaaacatatagcaaaggtattcctcaaaataccctttcagttgaggggaaaataagtaaaaaaactggtactagcattcaattcacaccagactatactatttttcccaaagatagctcttttaaaccacaaatagtcatagaaatggctaagacaaaagcatatttaacaaaaggtatagaaattaagtggaaatgtaataatgaactatcaaaacaacttggcatagaagaatccttaacttttaaattccctaacggaattttagattatcttaatgatcttactagtaataaacctatcctaacttcagacccatttttgggttttgtaaattttgacgacaattcaattgaatggataataaattggcttgctccaggtgaagaagggatttttaaaagtcactgcaatactattagcacaccattaggtggtacacatgaaaatggttttaaaaatgctattctcaaaggatttaaaaattggggagatttatcagggaacaaga

SEQ ID NO: 293826 - DNA, 876 bp, Unknown
  Bacterial polypeptide expressing nucleotide sequence isolated from the Sargasso Sea
gtcttgggatggaatttcagatttgcgtgacgaatctacggaggaaacgagaatagtcgttgaacttaagcttggtgaaatcgagcgagtgaccatgaataagctctacaagctcactgctctcgaaagtagttttggggtcattttgcttgccttggataaattgcggccccggcaactcaacatcaaggaggctctggagtgctacgtcgagcacaggcgcgaggtaaccctccggcgcacccagtttagacttagaaaagcggaggatagagctcatatcctcgagggatacaagatagctctcgacaacctggatgacttcgtaaagatcattcgcgcttcgtcgaacagaacggaagccaaggaaaagctgatggaaaaatactcgctttccgaaaggcaggcgaatgcgatattggatctcaggctctatcaattgaccggaatggagcgtgaaaagattgacgccgaataccttgaactgatgaagttgatcgaggggttcaaagacgtcatcgagaacgagcataagcttctaggtgtaataaaggaggaattgcaggagctaaaatcctcctatgccgacgaaagaaagaccgttatttccgatgtggaaggtgacgtcaggatggaggacttgattcctaacgacggctgcgtcgttacaataacaaaaaccggttttatcaagagaaccggagtcgaggagttccgagttcagaatagaggaggaaaaggggttatcggaagcggtcaaaaggatgaggacccagttgatattcttaccacctgcaacgctcacgacaccctgatgttctttatgcagaacggacgggtttatgtcgaaaaagcgtatgaaattcctgagggtag

SEQ ID NO: 293827 - DNA, 803 bp, Unknown
  Bacterial polypeptide expressing nucleotide sequence isolated from the Sargasso Sea
taagtttaatgattcagcatataaaacatctggcggactgcatggagttggtatttcagttgttaatgctctaagctcaaatttgattgttaaagtttttaaaaagggaaaagtttattcgcaaaaatattcaagaggaaaagctaaatcaaaaatattaattgaaaaatgttcaattaaattaaaaggaactgaaatttctttttgtcctgataaagaaatttttgatgaaattagttttattccgaaaaaattgtatgaatttataaaaatgaagtctgtattagttgcaggtacatcaattaattttaaaatagacaaagatttaataacagattcaacacctagtaaagctttgttttattataaaaatggaattcaagattatattaatgaaaaaaattctaaaattgataaaatatttgaaaaaaatttttcattaaagaacagtttatctgaaaatgaaaaatgtgaaatttttatttcatttaataaaaaagaaaaatcttcatttatttcattttgcaatactattgaaactcctgatggaggatctcatgaaaatgcattaaaaaatggaatattaaaatccttaaaactatttggtaaaaaaaatcaattttctaaaattgcaaatattaatatcaatgatttaattgattactcagatgtatttatttcaatatttattaatgaacctagctttgaaggacaaacaaaaaaaagaattattatgcctaatttacaaaaaaaacttgaaaatttatgccagaatggaatttttactatggttaaattctaac

SEQ ID NO: 293828 - DNA, 791 bp, Unknown
  Bacterial polypeptide expressing nucleotide sequence isolated from the Sargasso Sea
agaatggctttgggttgaggtaaaaagggacggaaaagtccatcgtcaggagtataaaattggcgacccccaaaataaattaaaaataattggtgattcaaaaaaaacaggaacaaaagtttgttttttcccagacagtacggtttttaaaactatacgttttgaatactcaattatagcagagcgtctaagagaattagcttatctaaacagcggtttagagatcgttctgagggatgagagaaccgaagatggagaatcagattctttcaagttcaaaggtggtctgagcgacttcgttaaatatttagacgagaacaataacccactgcataataaggtggtaactgttaaaaaagaggatggagatgtccctgtagatgttgcattgcgatatgggaatacctataatgataatatacttacctttgttaataatataaacactatcgaagggggaacgcacctgtcgggtttccgctcagctctcacacgagcgatgaataaccatgcttccaaaaacaatctaattaaatcaaagaaaaatgagaaactcactcttacgggagaagattttcgggaaggtcttacagctattatcagtgttaaggttgcagagccgcagtttgaaggtcaaactaagacaaaactaggcaatggagaaattaaaggttttgttgacaaaattgtttatgagggtattctagacttccttgaacaaaacccctcaataggcagaagaataattgaaaaggctcttttagctgctcgaagcagaagcgcagcaagaa

SEQ ID NO: 293829 - DNA, 462 bp, Unknown
  Bacterial polypeptide expressing nucleotide sequence isolated from the Sargasso Sea
catgagtgacgagatcattattagtaacgacggtgtggaacagctcccgatgagacgtttcacggaagatgcttatcttaactattccatgtacgtaatcatggatagggcgcttccccatatttctgatggtttaaagccagtacagcgccgcattatttatgcaatgtccgatcttggactcagtgccaacgcgaagtataaaaagtctgcgagaaccgtaggtgacgtacttggtaaattccatcctcacggtgattcggcttgttatgaagccatggtactgatggcgcagccgttctcttaccgttatccgctggtggatgggcaggggaactggggagcacctgatgatcctaaatctttcgcggccatgcgttataccgaagctaagctatctcgttttgccgaagtactattaaatgagataggccagggcaccgttgattgggtacccaattt

SEQ ID NO: 293830 - DNA, 340 bp, Unknown
  Bacterial polypeptide expressing nucleotide sequence isolated from the Sargasso Sea
gtggggtgagcgcctcgatggcctgattgaggcagacggatttttccagcgcggagagaagcgtcatgagacgcaagactttgctgccgggttggactggttgctggcggaggcgaagaaaggctgtgcgatccagcgctacaaaggtctcggtgagatgaacccggaacaactgtgggaaaccactatggacccagaagcccgccgcatgctgcaggtcaccatcgaggatgcattcctggcagaccagatgttctcaacgctgatgggagacgacgtggagccgcgccgggaatttatcgaacaaaatgcgctggcagtcgccaacctcgatatctga

SEQ ID NO: 293831 - DNA, 856 bp, Unknown
  Bacterial polypeptide expressing nucleotide sequence isolated from the Sargasso Sea
cagcagagtttcgacctcacggacaaagaggcgatcaaacagttgcttttcaactttgaatggcattacgccctggggattagagacgagtccgataaaagtacctacgtttcagaaaaaacgctttggaacacgcgctatttattgaccgaaaacgatttgtatcagtcgctattcgatattcccacccggcagcttgccgatctttgcggggtcgatccttccaggcaacgattggattcggtacatattttttccaacatgcgccacctcggccggatcggtttatttgtccggaccatcaagaaatttctgcaatacctcaagcgtcatcaccccggaacttctggattcggcaggctcgagaaaagcctgagagatcgttatttaagcaaggaagaaagctctgttttttccatggtcaagccttcggaaaccccaaaaaccctgcaaaacctggccgaagacctgttcagcatcattcgttgctaccgagacgatcccaaagtgacttcgatgaaatactacaagctgatgctgcgcctgctcgaagagcaatgcatcgtcggcaatgaacaggatgatggcgaaaaaatcaccatcaagcccaaccgggaagttccctcggactccctgcaaaacccttccgacccggatgcgacctatgatggcctcaagggaaagggctaccaggttcaagtcgctgaaacctaccgcaccggggatgaggccccggcactttcactgatcactcatattaatgttgaacccgcgcaccatcatgactccgaggctctggtccccgccatcgagagaactaaaaaaatggggtttgcacccaaacaaatgctggccg

SEQ ID NO: 293832 - DNA, 529 bp, Unknown
  Bacterial polypeptide expressing nucleotide sequence isolated from the Sargasso Sea
aatggattttaataaaaccggaggaggatcaaaatctgattctcaaccactcagtgagtttgtagagaaggcataccttgactattcaatgtatgtcattcttgatcgtgcactcccgttcataggagatggtctaaaacctgtccagaggagaatcatatttgccatgtctgagctgggcctttctgctcaatcaaagccgaagaagtctgcaagaactgtaggagatgttcttggaaaatatcatccacatggtgacaccgcatgttatgaggcaatggtcaatatggcacaagacttctcatatcgatatccattgattattggccaaggaaactggggctcatatgatgatccaaaatcatttgctgccatgaggtataccgaagcaaagctgagcgcatatacaaagttgatgttgagcgagcttggccaagggacaaccgattggaagcaaatttcgacggcactctcaaggagcctgaattccttccttccagattacccaacctcattctcaatggtgtaa

SEQ ID NO: 293833 - DNA, 715 bp, Unknown
  Bacterial polypeptide expressing nucleotide sequence isolated from the Sargasso Sea
agatcaaatcaagcagtcttacctttaagaggaaaaatacttaatacttacgtcgaagaattgagtatcaaaaaaaatggtaatggaaatggctcagatcaaagaacaaaagcactgtctaagatgatatcatcaaatgaaatagttacattaattaacgcacttggattagatcccaaggctcatgaaattgatttaaaagatttaagatatggaaaaataattataatgacagatgctgatgttgatgggtctcatataagagcattgttattaaccttctttaacaataaaccttttaacaaattaatagaacatggacatgtttaccttgctcaaccaccattatttaaaattaacaaaggttctaaaggaatttatataaaagatgaggaagaattagaaaattatataatgactaataataaggaacttaaaaagttaaagaaaggctcaaaggagatttcaagattgatagaaattgaaaaatctaaaatgagtattcaaagatttaagggtttaggagaaatgaatccagaagagctttggagcacaactcttaatccagaaacgagaaatttacttcaggttcagtattcaaaaaactcaaaaaaagatcaggaattgatacatactttaatgggtaatgatgtaacattaagaaaagattttatcatttctaacgcgataaatgttcaaaatttagatatttaga

SEQ ID NO: 293834 - DNA, 690 bp, Unknown
  Bacterial polypeptide expressing nucleotide sequence isolated from the Sargasso Sea
cacgcttggagcaaaattttcaggagaggattaaatttttctggaggcttgcacggcgttggcgtttcagttgtaaatgctctttctaaaaaattatctgttgaaattaaaagggaaggtcataaatttgagatgaatttcaatggtggcgaaaaaatttctgatcttaaaaaagtcggagacattggcgcaaggaatacaggaacggctataaattttcttcccgatgatcaatattttgaaacaacaaaaattgataaatcaaatcttaagcatttacttaaagcaaaagcagtgctttgttccggcctaactgttgaatattttgatgagaaaaaaaatgagaaaatactatggaattttgaaagtggtctcatttcttatttatcagaatcttctgaagatcttgagctactattagatgaatcaatctcttgtagtaaatcaggagatgataatgcgttagattttgtcttaaattggtcaactaagcctgtaaagaatttaatgaatgaatcctatgtcaacctcattccaaccgcacaaggaggatctcatttgaatggatttaaagcaggcttacttgagtcagtcaaagagttttgtgaattcagaaatttaattccaaaaggattgaagataacagctgatgacgtagtgcagcacagtacttttattgtttcctcaaaa

SEQ ID NO: 293835 - DNA, 141 bp, Unknown
  Bacterial polypeptide expressing nucleotide sequence isolated from the Sargasso Sea
catgacagataaaatttctcagattaatttagaagatgaaatgaagaaatcctatctggattatgcaatgagtgtcattattggacgagcattgcctgatgtcagagatggattgaaaccagttcatagaagagtcctcta

SEQ ID NO: 293836 - DNA, 256 bp, Unknown
  Bacterial polypeptide expressing nucleotide sequence isolated from the Sargasso Sea
attattgaacgaatgaaaaaagataataaaaacactaaagtctcaattcaacgttataaagggcttggtgagatgaatgctgaacaattatgggaaacaaccatggaccctgaaagaaggacccttttacaggttacggttgaaagcgccggagaagcagccgaaacatttcaaaacttgatgggaagtgatgttgaagccagaagaaccttcattgagaaaaacgctaagtttgttgttaatctagatatttaaa

SEQ ID NO: 293837 - DNA, 592 bp, Unknown
  Bacterial polypeptide expressing nucleotide sequence isolated from the Sargasso Sea
gatgatttcctcaaatgaaattttaactttaattaatgcgctaggattagaccctaaaacagaggatatagatttaaaagatttacgttatggtaaaattattattatgaccgatgcagatgttgatggatcacatattagagctttactactaactttttttaataataaaccgtttaataaacttatcgaaaatggacatgtttatcttgcacaaccacctctattcaaaattaataaaggatcaaaagtaatttatattaaagacgaaaaagatcttaataaatatatcttaaataattctaaaaatttaaaaaaatttaaaaaaggaagtaaagagtttttaaatgcatatgatgatgaaaagtcaaaaatgaatatacaaagatttaaaggcctcggggaaatgaatcctgaagaattatggagcacaactttaaatccagaaacaaggaatttattaaaagtgcaatattctaaagatctaaaaaaagatcaaaatatcattcatactctaatgggcaatgatgttgctctcagaaaagattttatagtatcaaacgcaattaatgtttcaaatttagatatttaa

SEQ ID NO: 293838 - DNA, 243 bp, Unknown
  Bacterial polypeptide expressing nucleotide sequence isolated from the Sargasso Sea
aatggcggatcccaccggagcgggcaaccccagcgagcggatcatccaaaccgacctgcgcatcgagatgtcgcgctcctatttggagtatgcgatgagcgtgatcgtgggccgagccttgcccgatgctcgcgacggtctcaaacctgtgcatcgccgcatcctttacgcgatgtacgaacttggcctgattgctgaaaggccctaccgcaaatgcgcccgtgtcgtgggcgaggtgttggg

SEQ ID NO: 293839 - DNA, 664 bp, Unknown
  Bacterial polypeptide expressing nucleotide sequence isolated from the Sargasso Sea
gaagcaatggcaggacgatgtaattcaatcgaagttcgtcttgagaaaaatggatcagtaactgttacagataacggaagcggaatacccgtaaaaccaagaccgaaaacaaaagaatcagcactaacaaccgtcttaacaaccttacatgccggtggcaagtttgaatcagaagcatatagtgttagtgggggtctacacggtgttggtatctctgtagttaatgccctttcagtctttgtaaaagcggaagtacaaagagatggtttcttttggaatcaaaattttgactttggtaagccggtttcaaaaattaaaaaaggaaaagccacaaaaaaaacgggaacaaaaataaattttttagttgatccagaaattttcgaagaaacacagagttttgaatataacattgtatcggagagactaagacaaacagcatttttaaataaagggttaaaaatcacccttgtagacaacagagttaaaccagcaaccaaggataaatttttatacaaaggtggcttagttgactttgtggactatttgaatgatggatttgaagttcttcacgagaaaacaatatccttttctgatcaaagcaaggactctgaaatagaagttgctcttcagtggaaaaaagaagatgatgtaaatattaagagct

SEQ ID NO: 293840 - DNA, 643 bp, Unknown
  Bacterial polypeptide expressing nucleotide sequence isolated from the Sargasso Sea
atgagcactgaacaattagcaacagaatcagaatcagtagcagaagttagttcttcacttttagagcaagcaatcggtgcgactaaacaaacagagtcaagccgtgctgaagagttactgaaaacgttaacggaagaagcattaaaaggcacagttcaatggaacaaaaacatgactgtgacgtttaatgaagcaattcaattaatcgatcaaaaaatctcaaagcagttaagtgtcgtaatgcacacggatgagtttcaaaaacttgaaggctcatggcgcggattacatcacttagtgatgaattctgaaactagctcaacattaaaaattcgtgttttaaacatgaaaaagaaagagctgcataaagacttaagtaaagctgttgagtttgatcaaagccaaacctttaagaaaatatatgagtcagaatttggtaccccaggtggtgaaccgtatggcacgattgtaggtgactttgaatttactaatcacccagaagatgttgaaacattaagcttaatgtctaatgttgcagctgctggtttctgtccatttattgccgcatcatcaccgtcgttatttggttttgataattgggaagaattaactaagccacgtgatttagaaaaaagtgtttgaa

SEQ ID NO: 293841 - DNA, 83 bp, Unknown
  Bacterial polypeptide expressing nucleotide sequence isolated from the Sargasso Sea
attgaaaaatttaaggtatgacaaaatagttattatgactgatgccgatgttgatggatctcacataagaactttattgttaa

SEQ ID NO: 293842 - DNA, 112 bp, Unknown
  Bacterial polypeptide expressing nucleotide sequence isolated from the Sargasso Sea
atggttaaaaattctaattatcaagcagactcaataaaagtactaaaaggcttagaggctgtccgtaaaagaccaggaatgtatattggtgatactgatgatggaactggtt

SEQ ID NO: 293843 - DNA, 592 bp, Unknown
  Bacterial polypeptide expressing nucleotide sequence isolated from the Sargasso Sea
aatgatttcatcaaatgaaatcgtcacattaataaatgctttaggcttagatcctaaggctgaagaaattgatttagatgatttgagatatggtaaaataattattatgactgacgcggatgttgatggatcacatatcagagcattattactaacattttttaacaacaaaccattcaacaaactaattgaaaatggaaacattttcttagctcaaccacctttatttaagataaataaatcaggaaaaagtatatatattaaagatgaaaaaagtttagaagactttattttaaacaattccaaaagttcgaaaaaatataaaagaggatcaaaagaatttgaaaaagtactttcagaggaaaaatcaaaacttaatattcaacgatttaagggtcttggtgaaatgaatcccgatgaactttggaatactacattagatcctgaaagaaggaatttacttcaagtaaaatactctaatgacaaaaaaaaagaccaaaagataatccatacattaatgggtaatgacgtatccataagaaaagattttataatttctaatgcattagaaattagtaatttagatatttaa

SEQ ID NO: 293844 - DNA, 562 bp, Unknown
  Bacterial polypeptide expressing nucleotide sequence isolated from the Sargasso Sea
cgtctttagtgtaagtttatcaaagattgctgataataatgaaattcaaaatcttattcagtctttaggatgcggtattggtaaaaattttgatttgggaaaattacgatacgaaaaagttattctaatgacagatgctgatgttgatgggtcgcatattgcaactttgctaatcacttttatttataagtatatgagacctatcattgataacaataggttatttttagctatgcctcctctttataaaatacaaaataaagaaaaaattttttatgcttatgatgaagatgaaaaagataaaataattaaatcagaatttaaaaaaataaatccaacattaagtcgctacaaagggcttggtgaaatgcctgctgaccaactgaaatcaactacaatgaacccagaaaaaagaaaattattaaatgtaaacattaatcaaggaaaaaaagaattgaatgaaacagaaaaattatttgagtctttgatgggcaaaaaagctgaatatagatttaagtttattcaagaaaatgctaactttacaaatcaaatagatatttaa

SEQ ID NO: 293845 - DNA, 207 bp, Unknown
  Bacterial polypeptide expressing nucleotide sequence isolated from the Sargasso Sea
cttgagcgactcagaagataaatccgaagaaggtagatcaagcgttgtcgagcgcaagccatacgacggcccatcaatctcgataacaaaagagctaaaaacctcctacttggactacgcaatgagtgttattgtaagtagggcaataccagatttaagggacggcttaaagcccgtgcatcgtagaatcttgtacgcaatgcacga

SEQ ID NO: 293846 - DNA, 924 bp, Unknown
  Bacterial polypeptide expressing nucleotide sequence isolated from the Sargasso Sea
tgaggtagtgctcaaactcttcatgcagggcggaaaatttaacagtaacgcttataaaacttcaggtggattacatggtgtaggaatttccgttgtaaatgcattaagctcctcattaaaagtagatgtcttcaagtcaggaaaagtgtatcatcaagaatactcaagaggaaaagttgtaacaaaaatcaagataggtaaatgtaataaaaaactaagaggtacacaaatttcttttgtacctgacaaaaatatttttgaagaaacaaattttattccaaaaaaattatataattttatcaatatgaaatctgtattagttggtggcacaataataaattttgatattgataaagaaataataaaagataaaactccaaataaaaaagagttttattataaaaatggagtagatgatttttttaagttagagtactcaaataatattaagctatttgaaaagtttttttctctaaaatgtaaattaaaagataatgaaaatttttctgttcatatttcatttaaccagaacgaaacatcaactttctattcatattgtaatacaattgaaacaccagatggtggttcgcatgaaattggtgtgaggaatggtatattaaaagctataaagatttatggtcaaaaaaatcaattctctaaaattaataatattaatcataatgattttatagatttttcaaatattattatatcaatatttattagtgatccaagttttgaaggacagactaaaaaaagaattattatgccttctttacaaaaagaaattgaaacaaaaactcaacaagaatttttattgtggcttaattcaaataaaaaaaattctaaaatacttttagatattatgattgaaagagctcttcaaagaactgatttatcaaaaataaaagaattagacagaaa

SEQ ID NO: 293847 - DNA, 558 bp, Unknown
  Bacterial polypeptide expressing nucleotide sequence isolated from the Sargasso Sea
atgctttgggactagatccaaaagcacaagagatagatttgaaagatttaaggtatggaaaaattatcattatgactgatgctgatgtagatggttctcatataagagcattattattaactttttttaataacaaaccttttaataaattaattgaaaatggacatgtgtatttagctcaaccaccattatttaagattaataaaggttctaaaggaatttatattaaagacgaaaaagagttagaagattatatagttaataataataaagaattaaagaatattaaaaaaggttcaaaagaatttttaaaaaaaatagatatagaaaaatctaaaatgagtattcaaagatttaaaggattgggtgaaatgaatccagaagaattatggagtacaactcttgatcctgatactagaaatttgatacaagtccaatattcaaaagatattaaaaaagatcaaactttaattcatacattaatgggaaatgatgtttcgttaagaaaagattttataatatctaatgcgatcaatgttcaaaatcttgatatttaat

SEQ ID NO: 293848 - DNA, 739 bp, Unknown
  Bacterial polypeptide expressing nucleotide sequence isolated from the Sargasso Sea
cagcaaacaaggaagaaatagagctaatcaagctgttttacccttaagaggtaaaattttaaatacttatgttgatagtttaccaacaaaaaaaaatggaaatggtaaatctaatggtgatgatcaaagaacaaaggcactatctaaaatgatttcttctaatgaaattataactttaattaatgccttaggactagatcctaaagctaatgatattgacctaaaagatctaagatatggtaaaataataattatgacagatgccgatgttgatggttctcatatcagggcattattattaacattctttaataataaacctttcaataagttgatcgaaaatggaaatgtatacttggctcaaccaccattgtttaagatcaataaagggtcgaaaggtatttacataagagatgaaaaggagcttgaggagtacataataagtaatagtaaagaattaaaaaagactataaaaggatcaaaaaattttcttaaattaatagaagatgaaaaatcaaaaatgaacatccaaagatttaagggattaggtgaaatgaatccagaagaattatggggcactacacttaatcctgaaactagaactttgttacaagttcaatattcaaaagatttgaaaaaagaccaaatgcttattcatactttaatgggtagcgacgtgtcacttcgaaaagattttatagtttctaatgcaattaatgttcagaatttagatatttaa

SEQ ID NO: 293849 - DNA, 625 bp, Unknown
  Bacterial polypeptide expressing nucleotide sequence isolated from the Sargasso Sea
tggtaatgaaattagaacaaaaactttagcgaaattaatttcttctaatgaaatagttactttaatcaatgcacttggtttagatccaaaaaatgaagatttagatttaaaagatttaagatatggaaaggtaattattatgactgatgctgacgttgatggatcacatataagagctttacttttaactttttttaataataagccttttaataaactaatagaaaatggaaatatttatcttgctcaaccaccattatttaaaattaacaagggatcaaagggaatttatattaaagatgaaaaagatttagaaaattatattataaataattctaaagaatttaaaaaaataaaaaaaggatcaaaagattttgaaaaaaaattacaagaagaaaaatctaaaattagcatacaaagatttaaaggattaggtgaaatgaatccagaggaactatggaatactactttaaatcctgaaactagaaatttattacaagttaaatattcaaaggatttaaaaaaagattatggattaattcatacattgatgggcaatgatgttgctttaagaaaagattttattcttgaaaatgctattaatgtatcgaatttagatgtctaa

SEQ ID NO: 293850 - DNA, 949 bp, Unknown
  Bacterial polypeptide expressing nucleotide sequence isolated from the Sargasso Sea
acacccgaagaaacagagatacaggatacctatgaggagcatgaggaagaagaccttattcaaagtgaagagatggtaataacggtatctcatttaggctatataaaaagggttcctctttcgacctacagagctcaaaagaggggaggtaaaggaagatctggaatgtcaacaagagatgaagactttgtctcgcaagtttttgtcgtaaatactcacactccaattctatttttttcttcatatggaaaagtttatagacttaagacttataaattacctcttggaacaccacaggcaagaggaaagccaatggtaaatttattgcctatagcagatggtgaggtaatacaaactttattaccacttaataaagaaaacacaaattataaagattttgtagctgtgtttgttactgccaatggtttggttaggcctataggtttagataattttgaaaggatattgtcaactggcttaaaagctataaaattaaatcaggatgataaactcataagtgtagtgctagctactaagaaaaatgacattcttttagctgcatcctcaggtaaatgcataagattttcaatgaaaggtcttagagtgtttggtggaagaaacacttcaggtgtaaaaggcatgaacttaactaaagatgactcagttgttagtatgacagttttaaataacgttgaagttactacagaaataagatctgaatatcttcaggcagtctctgcatctaggaggttaaataatagtgaatcaaaaaataatgataattatttgagagataaagaattatctgaattattagaatcaaataaatttagatctttaaaagaaaaagaagaatatatattgtctgttactgaaaatggctacggaaagagaacttctgaatatgaatatagactaactaatcgtggtgggtcaggtataataaata

SEQ ID NO: 293851 - DNA, 178 bp, Unknown
  Bacterial polypeptide expressing nucleotide sequence isolated from the Sargasso Sea
atggccaaaaaatcttcggaagccaaatacgattctagcaacattcaagtcctcaaaggtttagaagcagtcaaaaaaagaccaggcatgtatataggcgacacagatgatggttccggtttacatcacatggtttttgaagttttagacaattgtattgatgaggcaatggcaggac

SEQ ID NO: 293852 - DNA, 718 bp, Unknown
  Bacterial polypeptide expressing nucleotide sequence isolated from the Sargasso Sea
aggaagaaatagagaaaatcaagccgttcttccattaagaggtaaaattttaaatacttacgttgaagaaaatgtttctaaaaaaaatggtaatggaaatgattttagaactaaaactttatccaaaatgatttcttcaaatgaaattattacactaattaatgctttaggcctagatccaaaagttgaagagttagatttaaaggatctgcgttatggaaaaattattattatgacagatgcagatgttgatggatcccatataagagctttattattaacattttttaacaataaaccctttaataaattaattgaaaatgggcatatatatcttgcacaacctcctttgtttaaaattaataaaggatctaaaggaatttatataaaagatgaaaaggaacttgatcaatatataatgaaaaattcaaaagaattaaaaaagttaaaaaaaggaagtaaagaattttttaaagtttatgatgaagagaaatctaaaatgagcattcaaagatttaaaggattgggcgaaatgaatcctgaagagttatggagcacaacactaaatccagaaactagaaacttgcttaaagttgaatattcaaaaaatattaaaaaagatcaagatattatccacactttgatgggcaatgatgttgctttaagaaaagattttattgtctctaatgcaattaatgtttcaaatctagacatttaa

SEQ ID NO: 293853 - DNA, 259 bp, Unknown
  Bacterial polypeptide expressing nucleotide sequence isolated from the Sargasso Sea
ccaggctatcttgcctttaagaggtaaaattttaaatgtaattagtgctggaagagataaaataaatgcaaaccaagaaattacagatttaatgcaagctattggatgtaagcgaggagacaaatttaatagcaaagatattaggtacgaaaaaattataattatgacagatgctgacgttgacggagctcatatatctaccttattgatggcattcttctataaagaatttccaaaactaattgatgaagggcatctg

SEQ ID NO: 293854 - DNA, 427 bp, Unknown
  Bacterial polypeptide expressing nucleotide sequence isolated from the Sargasso Sea
gtacataaacaccgaagaagaaattggtggggttacccatcacggaaagattgctaactcttttttaagatccaatgactacaaggtttttgggcgggtacaaaaagcacagaaagtattctcaggccctgttgtcatagataacggatctgaaataactgagtatgccaatattgaagattgcctaaatcaaattgtcaacgcctctaaaagaggccttaatgttcagcgctacaagggtcttggcgagatgaaccccgatcaactttgggaaacaacactagacccaacaacaagatctttgttacaggttaaagcggacgacgatgcgggcctgacatttgaaacccttatgggagacgaagtaccaccaagaagggagtttatagaagaaaacgctttaaacgcaggcaatgttgacatttaa

SEQ ID NO: 293855 - DNA, 673 bp, Unknown
  Bacterial polypeptide expressing nucleotide sequence isolated from the Sargasso Sea
tcagaaattccatatatggttaataaagcttcaatgattgaaaaaacagctcaacttattaatgaaaagaaaattgaaggcattagtgacataagggatgaatctgacagaaatgggttaagaataatatatgatttaaaaagagatgctatacctaacgttgtgttaaataatctttataaatatacacaacttcaatcatcatttggagtaaataatgttgctcttgtcaaaggaagaccaaaaacattaaatcttaaagaattaatagaaaattatgttattcatagacatgaggtagttactagaagaacagaatacgaattaaaagaagctgaaaaaagatcacatattcttcaaggatatataattgccctagataatattgatgatgtaattgaattaattaaaaaatcaaaaagtcctgaagaagccagaaatggtttaatatcaaaatataagctctctgaaatacaatctaaagctattttagaaatgaggttacagaaaattactggtcttgaaagagaaaaagtaataaaggaaaacgaagaactaaataaattaatagaaagccttaaagctattttagctgataagactaaaagaatggatataattaaggatgagttgattgaagttaaagaaagatacggtgatgagagaagatcag

SEQ ID NO: 293856 - DNA, 185 bp, Unknown
  Bacterial polypeptide expressing nucleotide sequence isolated from the Sargasso Sea
agtaagtggcgctggtggtatagcagttggaatggcaacaagtatacctccgcgtaacttaggtgaagtaatagatgctactaatgcttttatagaaaatcaaaatattactatctcacaattgatgaaatatattccgggtccagattttcctactgggggactaattattggaaaagatttta

SEQ ID NO: 293857 - DNA, 829 bp, Unknown
  Bacterial polypeptide expressing nucleotide sequence isolated from the Sargasso Sea
agtttatattttgcacagcccccggttatacaaaattaaaaaaggcaaaacagagaaatacatctcaaacgatgaagagctcaatcgctttctttcgtacagtttcttcgatggtaaatctattgatattaatggcgttatactaaaacccaaagcctgttctgagattttaatgaattattctaaaataaattcaattatcaaaaaaactaataaatcaaaagataataatattcttacttgcatgtcttttatagagccattgcctaataatgcgaattgctcaactaaagaattaaataattacttaactaaattgtctgaaatgttaaaagctacatcacctataaatatctcttacgctctttctcataaagagcttgaccatgaatctttccaaattagtgtagtaaaaaaagttaatggcgtaatagacccaacaattgcccccattaataagaagtttttttcatcccaaacatatcagagccttatttctctcaaccttcaccagtattatggtgctcaaattactcttaaacatgattctggcgatataacctataaatttatacataacttatgtgagcatgggtttgctgctgctagaaagtctatttcacttcaacgatataaaggacttggtgaaatgaacccatctcagctagcagagacaaccatgaacccagagacaagatctcttcttaaggtgagtcaaatctctgatgatgaatataatatttttgacacactcatgggagaggatgtagaaaaaagaagagagtttataatttcttcagctaatacaatcgatcatgttgatatttaa

SEQ ID NO: 293858 - DNA, 172 bp, Unknown
  Bacterial polypeptide expressing nucleotide sequence isolated from the Sargasso Sea
ttgagtgattctgaaaatactaatgaaatagttaacccaatcatttctatttctgacgaaatgaaaaaatcatacttagattatgcaatgagtgttattgtttctcgcgcattgccaaaagtcagggatggtcttaagccagttcatcgtagaattttatatgcaatgatga

SEQ ID NO: 293859 - DNA, 613 bp, Unknown
  Bacterial polypeptide expressing nucleotide sequence isolated from the Sargasso Sea
attgtcaaaaaaggcttacgattcaaaagcaattgaggttttgtcgggtctcgatcccgtcaaaaaaagaccaggtatgtataccgatacatcatgcccaaatcatcttattcaagaagttctggataactctgtagatgaagctttatcaggttattgtaagcgcattaaagtaaacctttataaagataatagtgttgaagtctcagataatggacgaggcatgcctgttgatgtccatcctgagcataagctaacaggcgttgaattaattatgtgtaagcttcatgctggagcaaagttctctggagaagattatggtttttcaggagggcttcatggagttggagtttctgtagtaaatgctttatccaccaaacttaatgtaaaaattaaacgtgattcaaaagagtatgaaataaacttctctgccggagacaaagacaacgatttgaaatcaattggtgatgttggagcaacgaattcaggaaccacaattagattttatccagacaaacaatacttcgaaacattagagataaacaaaaagagcttaaaacatctactaaaggctaaggcagttctttgcccaaggtcttcaaatagattactt

SEQ ID NO: 293860 - DNA, 511 bp, Unknown
  Bacterial polypeptide expressing nucleotide sequence isolated from the Sargasso Sea
atgaatactcaacaaatagaccaaaaacaagatattacaacagcattagagacaagatatcttttatatgcagtatctacaatcatggatagagccctccccgacgcaagagatggtcttaaaccggtgcatagaagaattctttacgcaatgaatcagcttagattatatcctcaatcaaattttagaaagtgttccaaaatagtgggggaggttatgggcaactaccacccgcatggagataaggctatatacgatgcattaacaagatttgctcaacatttcagtgttagatatccgcttattgaaggtcagggtaattttggaaatatcgatggagataacccagcagctcaaagatatactgaagctaggctatcaaaatactcaattgagcttcttgacggtcttaatgagaactctgtagatttcaaggaaacatatgacagctccggtgatgaaccgagtgtgcttccagcgaactttcctcatctcttagcaaatggagcct

SEQ ID NO: 293861 - DNA, 322 bp, Unknown
  Bacterial polypeptide expressing nucleotide sequence isolated from the Sargasso Sea
tgttataagggaggcttaaaagattttgttcgccatcttaataaaccccaaaagccaacacatcaaagcattgcatatatcaacaagaaatccaagaaagacggagatattgaggtagaggttgccatacaatggaatgaatcttatagagaaaatacattttgttttgcaaacacaattagacagagagacggagggacgcacctcgccggatttaggggcgcattaacaaggacaatcaacacttatatcgataaggaaattccaaaaaacgatacgtctgtaacgggagatgattgccgagaagggatgacagctatca

SEQ ID NO: 293862 - DNA, 846 bp, Unknown
  Bacterial polypeptide expressing nucleotide sequence isolated from the Sargasso Sea
tctgaaaaagagcctgaatttttgcctgcttttttcccccaacttttggctaatggcgcctacggaattgctgtaggaatggcaaccagcattcctccacataatatacaagaaatattaaatgcttctataaaattaattcaaaattctaaaatagatcaagaagaccttttagaaataatcaaaggccctgactttccaactggaggggttttagttgactcaaaaaaaactattttagaaaattatatttcgggaaaaggtagttttaggattcgggccaaatatgaaatagaatttttatctagaggtagatggcaaatagtaattaaggaaataccatatggaattcaaaagtcaaaattagtagaaaaattggctgaattaattaatgaaaaaaaaataaatcttttgtctgatttaagagatgaaagtgctgaggatataagattagttcttgaaccaaaatccaaaaatattcctccagagatgcttatggaacatttatttaaaaaaactgatttagagtataggttttcactaaatatgaatgttttacaagatggtaaaatgccaaaagtattaagtctgaaagatttattacaaaactatgttaatcatggaagaaacattttaattcgtcgatccaattacagattgaaaaatattgatactaggttgcatttaattgaaggctttttagtaacctatttaaatatcgatagagttataagtataattagattcaacgagaaaccaaaatctgatcttcaacaagagtttgatctttctgaaatacaagcagaagcaattctaaatatgaggctcaggtcactcagaaaacta

SEQ ID NO: 293863 - DNA, 202 bp, Unknown
  Bacterial polypeptide expressing nucleotide sequence isolated from the Sargasso Sea
aatgtctaaaataatcaaaaacaaaatagataggattttaagtgataaatatttatcatatgcaatttcaaccattgtttcaagatcattgcctgatgttagagacggcttaaagccagttcatagaaggataattttttcaatgtatcagttaaaattatttcatgatactccattcaaaaaatctgcaagaattgtggag

SEQ ID NO: 293864 - DNA, 811 bp, Unknown
  Bacterial polypeptide expressing nucleotide sequence isolated from the Sargasso Sea
attaataataaagacatcacagtcgcgcaattgatgaaacatattcctggacctgattttccaactggagggataataataggaaaagatattatcaaacaaggatacaataaaggaagaggctcatttaaaatcagaggtgaaatagaatttgaagataaaaaaggtggcagagatattttaataatcaaatcaattccatatcaagttaataaatctatattaatagaaaaaattgcacaattagtcagagacaaaaaaattgaaggtataagagatattagagatgagtctaaccgtgaaggtattagagtagttatagaattaagaaaaggtgtcgagcccgaaacaattagaagacaactttataaattaactaacatagaaagctcatttggttttaatacattagcaatagtaaacaacaaaccaaaaattttaaacttaaaagaatttatttctgaatttttaaagttcagagaagatactgtcattaaaagagttaaatttgatttaaaaaaagcagaggaaagagctcacatattaattggccttgccactgctgttgaaaatattgatggaataattaaaattattaaaaactctaaagatacagagacagctaaaaaaaacttactttcaagaaaatggaaaattaaaaaaagtacaaaactaatatctctcattgaaaaaaagaaaaatattacaagctactcattatcaaatgaacaagttaacgcaattttagaattaagattacaaaagcttactgcatatggaataggtgaaattgaaaatgaaattagtaaat

SEQ ID NO: 293865 - DNA, 943 bp, Unknown
  Bacterial polypeptide expressing nucleotide sequence isolated from the Sargasso Sea
cccaccccacaacctaaatgaagttttaaatggatgtattaatctaattaataatcctaaaatatctattgatgaattaattaaggatatttctggacctgatttcccaactggaggaacgattgatggtaaagcaggtatttatgaagcttataaaactggtagggggataattcatgttcgatctaatacttctatagaagaagataaatcaggaaaacaatcattaatcattaacgaaatcccatttatggttaataaagctagaatgcttgaaaagattgcagagctagtaaaggaaaagaagatagagggcataactgaaattcgagatgaatcagataaagatggattgagagtggtaattgaagtcagaaaaggcgactctgtagaagttcttgaaaataatttatttgcacaaactcaacttgaacagtcttttggaataaatttcacagtactttcaaacggtcaaccaaaagaagttaatctcaaagaaatgcttcaggcatttattaagcatagaaaagaaattattaccaaaagaactaaatttgatcttaaaaaagcaaaagatagagggcatgtagttgaaggtttgatggttgctattgcaaatatcgatcagattatagcaataattaaaaaatcaaaggatccaaaaatagctgctagtgaattatgtaagaaagtttggaaatctggaccagtggaagcaattcttaaaaaagttggcagtgatgcatgtaagccaaaaggtcttagtaaagatcttggcttgaaagggaaaaaatataaattatctcaagatcaagctaaagcaattcttgaattaagactgggaagacttaccggtttagaacaagataatttaagtaaagaattttcagaaattgtagaaaaaatacttagccttcagaaaattttggatgaaaagcaaact

SEQ ID NO: 293866 - DNA, 497 bp, Unknown
  Bacterial polypeptide expressing nucleotide sequence isolated from the Sargasso Sea
aataattattatgaccgacgctgatgttgatggatcccatattagagccttactattaacttttttcaataatagcccatttaataaattaattgaaaatggaaatatatacctagctcaacctccattgtttaaaattaataaaggctcaaagacaatatatttaaaagatgaaaaagatttggaaaattatattttgaagaattcaaaacttgaaaataaggataaaaaaaaacaaactagcatgattaaatttttagaggaggaaaaatcaaaattatcaattcaaaggttcaaaggtctaggtgaaatgaatcctgacgaattatggaataccactttaaaccctgaaacaagaaacttgctacaggttaattactcaaaaaatataaaaaaagataacgaattaatacaaacattaatgggaaatgacgtaggttcaaggaaagactttattattgataatgccatttatgcatctgatttagatatctaaa

SEQ ID NO: 293867 - DNA, 697 bp, Unknown
  Bacterial polypeptide expressing nucleotide sequence isolated from the Sargasso Sea
cattgaggtcctcaatggccttgaaccggtgcgtcgccgccccggcatgtataccgacaccacccggcccaatcacctcggccaggaggtcatcgacaacagcgtcgacgaggcgctggcgggtcacgcccgtaccctggaggtgaccctgtatgaagatcagtccctcgaggtgatcgacgacggccgcggcatgccggtcgacatccacccggaggaaggggtgtgcggggtggagctgatcctctgcaagctgcacgcgggcggcaagttctccaacaagaactaccagttctccggcggtctgcacggggtgggcatctcggtggtgaacgccctctccgagcgggtcgaggtgacggtgcgccgcgacggccaggtttacgacatcgccttcgagaagggcgagaaggtacaggagctgaccatcaccggcacctgcgggcgccgcaacaccggcacccgggtacgcttctggccggaagcccattacttcgattcgccccgtttctcggtctccaagctggagcacctgctcaaggccaaggcggtgctctgcccgggcctcaccatcaagtttctcgacaagaacaccggcatcaagctggagtggtgctatgaagacggcctcaaggattacctggtcgatgcggtcaagcagttcacctgcctgccggagcagccctttgtcggcgcc

SEQ ID NO: 293868 - DNA, 202 bp, Unknown
  Bacterial polypeptide expressing nucleotide sequence isolated from the Sargasso Sea
tttggttgataaaaacgacgaaattaatttatctgaaactaatgatatagctccagtaaccatagaagatgagatgcaaaaatcttatcttgattacgcaatgagtgtaattgtatctcgtgcacttccagatgtaagggatggacttaaaccagttcatagaagaattctttatgctatgcatgaaagtggttatgaatac

SEQ ID NO: 293869 - DNA, 253 bp, Unknown
  Bacterial polypeptide expressing nucleotide sequence isolated from the Sargasso Sea
tctgaatggaaatctttcaataaaaagagtggagattgaagatgaaatgaagaagtcttacctcgattatgctatgagcgtaattgttagtagggcgctaccagacataagagacggattaaagcctgttcacagaagaattctatattctatgtatgacggaaattatgattggaacaaaccatacagaaaatcagctagaatagttggtgaagttatgggaaagtttcatcctcatggagatagtgctatc

SEQ ID NO: 293870 - DNA, 571 bp, Unknown
  Bacterial polypeptide expressing nucleotide sequence isolated from the Sargasso Sea
attaacattaatcaatgccctaggtttagatccaaaaaatgaagaaatagatttacaagacttaaggtatggcaaaattataatcatgacggatgctgatgtagatggttcacatataagagctctgcttttaactttttttaataataaaccatttaataaacttattgaaaaaggacatgtatatttggcacaacctccattatttaaaattaataaagggtcaaaaggaatttatattaaagatgagaaagaattagaaaattatattataaaaaattctaaaaatttgaaaaaattaaaaaagggatcaaaagattatgataattttattcaactagaaaaatctaaacttagcattcaaagattcaaaggacttggagaaatgaatcctgaagaactttggagtactaccttaaatcctgaaactagaaatttacttcaagttgaatattctaaaaatttaaaaaaagatcaagatcttattcaaacattaatgggaagtgacgttgcttcaagaaaagattttattgttgataatgcaataaatgttttaaatttagatatttag

SEQ ID NO: 293871 - DNA, 820 bp, Unknown
  Bacterial polypeptide expressing nucleotide sequence isolated from the Sargasso Sea
gtgggttgaggttcatagagatggaaaaatatacaagcaggattacaagattggtataactcaaaacaaactaaaagaaataggtaaaacgaaaaaaagtggaacaagggtttgttttatgccggacagcgaggtttttaatacaacaagttttgaatacgatattatagcagaaagactcagggagttggcgtatttaaacaaagggcttgaaataaaccttcgtgatcaaagagaagaagatgggcaaagcgactcttttaattttaaaggtggactaagtgattttgtgaaatatcttgatgaacacaacaacccactacacaacaaagttataacagttacaaaagaaggtggcgagataccggttgatgttgcccttaggtatggaaacacgtacaatgacaacatactcacatttgtaaataatataaacacaatagagggaggaacacacctatcaggatttcgctcggcactaaccagggcgatgaacaatcacgcttcgaaaaacaacttaataaaaacaaagaaaacagaaaaactatctcttactggagaagactttagagaggggttaacagccataataagcgttaaggttccagaaccacaatttgaggggcaaacaaaaacaaaactcggaaacggagaggttaaggggcttgttgataaggtagtttatgagggaatattggactttctagaagaaaacccatctattggaagaaaggtgattgaaaaagcgttgttggctgcgcgaagtcgctcagcggcaagaaaagctagagagctaataagaaggaaaagcgctctggcg

SEQ ID NO: 293872 - DNA, 853 bp, Unknown
  Bacterial polypeptide expressing nucleotide sequence isolated from the Sargasso Sea
agacaatagtttgtggcgacaagagttttctaaaggattaccaaaaacaaaaataaaaaaaattaaagaaagtaaaaaaaaaggaacatatatagaatttattcctgataaagaaatttttggaaatgatacattttttgatgcaaaagtattaaaacaaatggcagaatctaaagcctatttatttagaggaattactattaattgggaattagattcagaagatagtaaaaataatgaaaaaataacttataattttcctgacggtatcaaagattttttaattaataaactagatagtggcccattacttataaatgaaatattctcaggtaaaacttacttagattcagaagaagagttaattgaatggtctatttgttggccaatacaactagaatcaaatttattgagtttctgtaatactatacctacacatgaaggaggaagccatgagaacggttttaaagttgctttaacgaaagctatgagatcttttggtgagattaataatatcaagaaagcatcaaaaatatcatccgaagatttattaggaagagcttttggtattttatctatatttataaaagaccctcaatttcaaggtcaaactaaagaaaaactttcctccccaaaaacacaaaaatcaatagaaagttcattaaaagatcattttgaagtctggcttaataataatatggaaatagctcactatttattaaatgaaacaataaataggacagatgaaagaataagaagaaaaaaagaaaaagatctaaataaaaacaatttaataaaaaaaatatatttaccaggtaaattagcagattgttctcaaaaggaagccaaagga

SEQ ID NO: 293873 - DNA, 639 bp, Unknown
  Bacterial polypeptide expressing nucleotide sequence isolated from the Sargasso Sea
gatggccacaagtatacctcctcataatcttggagaagtaattgatggcactttagctttaataaaaaataaagatattaaaattaacgaattaataaaacacattccaggacctgattttccaacatcaggagttataattggtaaaaatattattaaagaaggttacaaaactggaagaggatcattcaagataaggggagagataaaaatcgaacaacaaaaaaatggtagagagagactagttataacatcgataccttaccaagttaataaatcttctttaaatgaaaaaattgctgaattggttagagaaaaaaagatagaagggatcaaagatattagagatgagtcaaatagagaaggagttagagttgctatagatttaagatcaaatgtggaaccagaaacaatcaaaagacaactttataaatacacagctatagaaagttcttttggctttaatactcttgctatagtagataacaagccaaaaacctgtaacctaaaagaatttttagaaaacttcctaaactttagagaagatgtaataattaaaagaactaaatttgatttaaaaaaagcagaggaaagagctcacattttaattggcttatcggtgtcagttgaaaatcttga

SEQ ID NO: 293874 - DNA, 790 bp, Unknown
  Bacterial polypeptide expressing nucleotide sequence isolated from the Sargasso Sea
ttgggctgcggcatcaaagacgagttcgatccagacaaactgcgatatcaccgcattattatcatgacggatgcggatgttgacggatcgcatattcgcacgctgtatctgaccttctttttccgggagatgcgcgagcttatcgatcgcgggcatgtctatatcgcgcagcctccgctctacaaactggcgcgtggcaagcaaagtcggtacctcaaggatgaggctgccttggcggagtatctgacgcagtcggcactcgaaggggctgcgatattcacgaattctgaagcgccacccttggcgggtgagccgttgtctgaactggtctcgtcatatcaggcggtcgcttctgatatcgagcggctggcccgggtgtacccgcgggacgtgttttggccgatgatggcggtgccttcgctggcgaccgaagatttggcggatgaggccaaagttcaaacatttgcgacagctctaagtaagcacttacttacactacaggacaagtcagtacagtatgaaatctttgtacgacaggacccagagcgcggcttttactaccccgtagtgcgccgaactgctcacagtgttgcgacggataccgtgttaagcagaggtttttttgcttcgccagagtacctgggtttgcgtgctgtgggcaagcgcctcgatggcctgattgaggtagacggcttttttcagcgcggagagaagcgtcacgagacgcaagactttgctgccgggctggattggttgctggcggaggcgaggaaaggctgcacgattcagc

SEQ ID NO: 293875 - DNA, 652 bp, Unknown
  Bacterial polypeptide expressing nucleotide sequence isolated from the Sargasso Sea
aaatacagttaaagtaatcgagcgcttaaaacgtaaataccctaacacggtaatggaacgtttaatctaccaaagcgagttgaccaaagaagaccttgcagacgaagctaaagtaattgcgtggacaaaagagcttgttgacgatttagttgaccgtgacgaagatgcaactattttcaacgctgcaactcagtatgatgcagagcgtaacttgtattatcctgttgtgaatattcgtcaacacggtgtagataagtctcacgtactaagctacgacttcatcacatcgcgtgactaccaacgtattgctgtgactggtgttaacattgcaaacatcattacagaaggtgcttatattcaacgcggtgagaaaacaaaacctgttgataactttgtggatgctttggaatggttgatcactgaatctaagcgcgggatctatattcaacgctacaaagggttgggtgagatgaacccagatcaactttgggaaactaccatggatccagacgcacgccgtatgttacaagtaaccattgaagatgctgtaggcgcggatcagttatttgctacgcttatgggcgatcaggtagagccacgtcgtgactttatcgaaactaacgcactacgcgtagttaacttagacgtgtaa

SEQ ID NO: 293876 - DNA, 196 bp, Unknown
  Bacterial polypeptide expressing nucleotide sequence isolated from the Sargasso Sea
ttgataaaaaaagttatgtctaaaaaaagcaattattcagcaaaaaatatagaagttttagaaggtttagagccagttagaaaacgtccaggtatgtatataggaagtactgatgaacaaggcttacatcatcttgttaatgaagttctggacaatagtatagatgaagttgttgcagggcatgctagcgagattt

SEQ ID NO: 293877 - DNA, 314 bp, Unknown
  Bacterial polypeptide expressing nucleotide sequence isolated from the Sargasso Sea
tcgtgtctctcaaggtaaaaaagaacaatactcttatgatgataatgaacgagatcttatgattgagaggatgcaaaaagagaacaaaaacacgaaggtgtctattcaacgctataaagggttaggggaaatgaacccagggcaactatgggaaacaacaatggatccagaacgccgaaccttaatgcaggtaacggttgaaagcgccgcggaagcagcagaaacatttcaaaatctaatgggcagtgatgtggaagcaaggcggactttcattgaaaaaaatgccaagtttgtagtcaatctcgatgtttaat

SEQ ID NO: 293878 - DNA, 157 bp, Unknown
  Bacterial polypeptide expressing nucleotide sequence isolated from the Sargasso Sea
atggcaaaaaataacacaacttaccaggcagactctataaaagttcttaaaggtttagaagctgtaagaaaaagacccggaatgtatattggtgatactgatgatggaactggtttgcatcatatggtttatgaggttcttgataactcaatagatg

SEQ ID NO: 293879 - DNA, 905 bp, Unknown
  Bacterial polypeptide expressing nucleotide sequence isolated from the Sargasso Sea
attagctcaggatgattatttagagcaattcataattcaaactggctttaagggcccggactttccaacaggagctgaaatcaaagacaatggagggattagcgatgctataaaaactggccgtggttctttcaaaattagagccgtgcattctatcgaagaaaaaaaagacaaaagttccatagtcatcaatgaactaccataccaagtcaataaagctaagttaattgaatcaatagctttgttagtgagagacaaaaaaattacaggcataagtcatcttagggatgaatctgatcgagatggcttaagagttgttattgaactaaaaaagggcgagcaacctgatgtaattttaagcagcctatacaaacaaactaacttacaaacttcattttcagtgaatatggtttgtctggtcgatggtgaaccttgcactataagtgtaccaagagctttgcaagagttcattaagcatcgcagggaaatcattacaagaagaacattatatcttttaaacaagacatatagtaaagctcatgtactagaaggtctaagtatagccttagataacatagatgaaatgattgatttaattaaaaaatcgaaatctacagaagaagcaaagaaaaaaataattaataaaacatgggcaacagctaaaaacaaatgggttttatccaaactaataaatgattgtagtgattttatgacagttgatacaaaagggggatcgaaagacgataaatataaaattagcgaagagcaagcccaagctgttttagatatgaaacttaataagctgacaaacttggagcaagatactatattaagtgattatcattctgctatatcgtctattgaagaacatttaaatattttgtctaaacccggaagagcttaat

SEQ ID NO: 293880 - DNA, 284 bp, Unknown
  Bacterial polypeptide expressing nucleotide sequence isolated from the Sargasso Sea
tagttgggaagtcgatgagagcaatctactttcttctcaagaaatcagcaatatttctcaggcactgggtgttgagcctggtgccgatgagcttggtaatcttcgataccataaaatttgtatacttgcagatgctgattcggatggactccatatcgcaacattgatgtgcgccctgtttctgaaacattttagaaaattggtcgaagatggtcatgtgtacgtatcaatgccacctcttgtatcgaatcgatgttggaaaagaggtgcattatgcgcttgat

SEQ ID NO: 293881 - DNA, 508 bp, Unknown
  Bacterial polypeptide expressing nucleotide sequence isolated from the Sargasso Sea
cctttaaaaattattggaaagtcaaagaatacaggaacaaaaattaattttttgccttcgaaagatgttttttcatctacaaagtttagttttgctattattcaaaaaagaatgcgggaactagcttttttaaataagggaattaaaattatattaaacgatttaactcaaaaaaaaatcaagtccttagaatttaaatttgagggtggaataaatgaatttgtcgaatatcttgacgaaaaaagagaaaaattaaaaaataaaaatgaaaatgatttatttagaagaccaatttacatagagggggtaaagggaaatataaatatacaatgttcgttaaaatggaacgcaggatataatgaggatgtatatccatataccaataatatttatcaaaaagatggaggtacacaccttctaggttttagaagtgctctcacaagagtagtaaataaatatgcttcagagcaaaacttgttaaaaaaaaataaagtaatgctgtctggag

SEQ ID NO: 293882 - DNA, 762 bp, Unknown
  Bacterial polypeptide expressing nucleotide sequence isolated from the Sargasso Sea
acgatgagcttaatagtttaatactaagcaatgctgttaagggcaccgaggtcagggctaaaaacaagaaaaaaggaattgagggagacgggctcttgaacaccattcttgattattctaattcattatctgtgattgtaaaaattgagaaacaggcaggaactatcgcggcaaaagcaatatcgcttcataaaccaattactaaaacagaagctaataataaaaagaaactagaggcttggatcaagggcctatcaagaactgcatcaaagatagcaaaagagaaagggtacaaggcgtctgtaaacatagactatgacgatgatggaataggctacataaacacagaagaagaaattagtggagtaacacatcacggtaagattgctaactcttttttaagatctaacgattacaaaatttttggccgggtacaaaaggcaaagaaattattctcaggccctgttgtcattgataacggatctgaaattacagaatttgcgcatattgaagattgcctaaaccatattgttaacacctctaaaagaggcctgaatgttcagcgctacaagggtcttggcgagatgaacccagaccaactttgggaaacaacacttgacccaaccacaagatctttgttgcaagttaaggcggacgacgatgcaggactgacatttgaaacccttatgggtgacgaagtaccacccagaagagagtttattgaagaaaatgccaaaagtgcaggaaatgttgatatataac

SEQ ID NO: 293883 - DNA, 622 bp, Unknown
  Bacterial polypeptide expressing nucleotide sequence isolated from the Sargasso Sea
acaagacgaaagaaccaaaactttgtctaaaatgatatcttcaaatgagataatcacccttatcaatgcactcggactggatcctaaatctgaggaaattgatttagatgatttaagatacgggaaaataattattatgactgacgctgatgtagatggatcgcatatacgtgcactacttttgaccttttttaataataaaccatttaataagttaatagaaaacggaaacatatttcttgctcaacctccacttttcaaattaaataaaagcggcaagagtatttatttaaaagatgaaaacacattagaaaaatatattttatctttatcaaaaacattaaaaaaacataaaaaaaactctaaagagtatgaaaaagttttatcagaagaaaaatcaaaattaaatatccaaagatttaaaggtttaggagaaatgaaccccgaagaattatggagcacaactcttgatccaaaacagagaaatcttttgcaggtaaaatattcaaaagataaagataaagatcaagatattattcataccttaatgggaaatgatgtttcaattagaaaagaatttataatatcaaatgctatagacataaataaacttgatgtttaa

SEQ ID NO: 293884 - DNA, 916 bp, Unknown
  Bacterial polypeptide expressing nucleotide sequence isolated from the Sargasso Sea
gccaaagcaattctttgatttaaaacttaatcgattaactggcctcgagcaagaaagtatttttaatgaatattctgaactacttgaagatattaaaagattcacccttattctatctaatccagatgagttgaaatctgtcataaggaaagagcttattgaaacacaggaaacatatggtgacgaacgaaggacagaaatagttgaattctattcagacctcactgatgaagatcttataccagaagaagatctcattgttactttatcgaaagagggttatgcaaaaactcaaccgctcgacgcatatcaagcacagaatcgtggtggcacaggtaaaagagctgcaactctaaaagatgaggactttgtttcgaaattatttgtagcaaatacccatgacacattgttgtgtttttctagctatgggaaagtttattggattaaggtttaccgacttccgagaggcgggaggaatgcaaaaggccgcccaatcgtaaatctcttaccactagaaaaggatgaaagaatacaggctgttctcccagtcaaagaattcaacgatgatcaatttatctttatggcaactgaatcaggcagtgttaagaaaacaaaattatctgcatactctagaccaatgaaatcaggtataaaagcaataaagctaagagaaggtgaccgagtagttaatgcagagatcactgacggttcaaaagaaattatgcttttctcaaattctggtaaatcaattcgcttcaaggaaaccgatgctagaccgatggggcgcgtctctcaaggagttagaggaatgcgtattgaaaaagatcagagaataatctcacttgttgtgctcgaagagggaaatattcttgtcgccactgaaaatggatttggcaaacaaacttttaaagatgaa

SEQ ID NO: 293885 - DNA, 592 bp, Unknown
  Bacterial polypeptide expressing nucleotide sequence isolated from the Sargasso Sea
atgatatcttcaaacgaaatagttactttgataaatgccatgggattagatccaaagtcagaagatatagaaactaaagatgtaagatatggaaaaattattattatgaccgatgctgatgtagatggctctcatatacgtgcactattattaacattttttaataatgttccgtttaataaacttattaaagaggggtatatttatttagcacaacctccattatttaaaataaataaaggatcaaaaggaatttatataaaagatgaaaaagaattagaaaaatatatacaaaaaaattctaaaatattatcaaatttaaaaaagggaacaaaagaatatgaaagatcatttgatgaggaaaaatctaaatttaatatacaaagattcaaaggtttaggagaaatgaacccagaagaattatggagcacaactttaaatcctgaaacaagaaatttattaaaagtggaatattcaaaaaacattaaaaaagatcaagatattattcatacattaatgggcaacgatgttgcatcaagaaaagattttattgtttcaaatgcaattaatgtttcaaaccttgatgtttaat

SEQ ID NO: 293886 - DNA, 778 bp, Unknown
  Bacterial polypeptide expressing nucleotide sequence isolated from the Sargasso Sea
ggagaggattcctgtagaacctcatcctaagtaccctaacaagtcagcacttgaagtaataatgacaactttacactctggtggaaaatttactgataaaaattataaaacttccggtggacttcacggagttggtgtttctgttgtaaatgctctttctagtgaattaatagtggaagtttcaagagatagaaaactttacagtcaaacttatagcaaaggcatacctcagaataccctttctagtgatgggaaaatatgtaaaaaaaaaggtactagtattcaattcacaccagactattctatttttcctaaagatagctcttttaaaccacgaatagttattgaaatggctaagacaaaagcatatttaacaaaaggtatagaaattagatggaaatgtaataatgaactgtcagaacaacttggtacagaagaagccttaactttcaaattcccaaatggaattttagattatctcaatgatctaactaacaataagtctatccttacttcagaaccttttttgggttctgtaaagttcgaaaacaattcaattgattggataataaattggcttgctcctggtgaagatagtatttttaaaagtcactgcaatactatcagcacgcctttaggtggcacacatgaaaatggttttaaaaatgctattctcaaagggtttaagaattggggcgaattatcaggaaataagaaagctcgtgatttaatcattgaagatatattttcagaaaccgcttccataatatccatattt

SEQ ID NO: 293887 - DNA, 302 bp, Unknown
  Bacterial polypeptide expressing nucleotide sequence isolated from the Sargasso Sea
cttttgaataacttatataaacaaacggttttagagagcacgttctctatcaacatggttgctttatcaaatggtcaaccacagttgaagaatcttaaaagtatgctcgaagcttttcttggtcatcgacgtgatgtagttacgaagagaacaatttatcaactcaatcgctctattaatagagcacatattctagaaggccaaacaatagctctgacaaatatagacgaaatgattgctatcataaaaaaatcaaagacgccagcggaagctcagaaagcattagtagcaaaattatggaa

SEQ ID NO: 293888 - DNA, 850 bp, Unknown
  Bacterial polypeptide expressing nucleotide sequence isolated from the Sargasso Sea
atggttagagaatataacgcagaatcaatagaagtcttatctggactagatcctgttcgtaaaagacctgggatgtataccgaaacatctaggccaaaccacttggctttggaggtaattgataatagtgttgatgaggctttagcaggttatgctaagagcatcgatgttatcttgcacaaagatggatctttatctgtttcagatgatggtagaggcatgccagtagatgttcatccagaagaaggcatacctggtgtagagctaatttttactcgtttacatgcaggagcaaaattttcaaatcaagactataaattttcaggaggattgcacggagtaggggtttcggtggtaaatgctctttcttcttctttgagagctgaaataaaaagagaaggaaaaaaatactctattgaatttaaagacagtgaaaagaaaaaagacctaaaggtaattgatgaggtcggcaagagaaatacaggaactaaagtaactttttctcctgacccagagttttttgacacaccaaaaatctcttcaactcaattaatggctgcattgaaagctaaagcagtcctttctccaggactttcaatatcttataaagatgaacaaaaagggataaaagaaaagtggtgttttttagaaggactcgctgcttaccttaaagatagcaataaaggaggagacttgataccagtagacccttttgaaggagagcatattacagatgaaggtggtattacctgggcaattcagtgggtaaggggaattgacgaccctctaagtgagagctatgttaacttgattccaactactcaaggaggaactcatgtaaacggctaag

SEQ ID NO: 293889 - DNA, 378 bp, Unknown
  Bacterial polypeptide expressing nucleotide sequence isolated from the Sargasso Sea
cacgattgagggggggacacacctttctggttttcgctctgcgctaacgagggcgatgaacaatcatgcatccaaaaacaacttgattaaagcaaagaagaatgaaaaaatatctcttactggtgaggacttcaaagaaggcctgacggcaatattaagcatcaaggtggccgaaccacagtttgagggtcaaacaaaaactaaactcggtaacggtgatgtaaaaggaattgtggacaaggttgtttatgagggcattctagattttttagaacaaaacccatctattggaagaaaggtaattgaaaaagccttgctagcggctcgaagtagaaacgcagctaaaaaagccagggagcttattcgtataaaaagtgc

SEQ ID NO: 293890 - DNA, 370 bp, Unknown
  Bacterial polypeptide expressing nucleotide sequence isolated from the Sargasso Sea
ttgggagaggccctgagtgagcgttatctaaattacgcgctttctacaataatgcatcgagcgcttcctgatgctcgagatgggcttaaaccggttcacaggaggattctatttgcaatgcgtgagcttaaattagactcgtcaggaactttcagaaaatgtgccaagattgttggcgaagttatgggtaatttccatccgcatggagacaaagcaatttatgatgcacttgcaaggttagcgcaagattttagtgttagatatccactagtggatggtcagggtaattttggcaatattgatggcgataatcctgccgctcagagatatactgaggcaaggttaacaaaagtttctgagctgatgttag

SEQ ID NO: 293891 - DNA, 841 bp, Unknown
  Bacterial polypeptide expressing nucleotide sequence isolated from the Sargasso Sea
atgaaacatataccaggtccagactttcccacaggcgggataattattggtaaagatataataaaacagggatacaaatcaggtagaggctcatttaaaattagaggcgatataaatgtagaaaatttaaaaaatggtaaagatcgtcttgtaataacatcaataccttatcaggtaaacaaatctaatttaaacgagagaatagctgagttagttagagataaaaaaatagaaggtatcagtgacataagagatgagtcaaatagagagggtataagagttgctattgatcttagaagaaatattgaaccagaaactgtaaaaagacaattatttaagtacacatctatagaaagttcatttggatttaatacattagcaatagtagataaaaaaccaaaaacttgtaacttaaaagaatttttagaaagttttttaaaatttagagaagatgtagttataaaaaaaacaaaatatgatttaaagaaatctgaggaaagagcacatattcttcttggtctttcaattagtgttgaaaatttagataaggtcataaaaataataagatcatctaaaaatccagatgatgcaaaaaaaatactattaaatacaaaatggaaatttactaaatcatcaaaattaataaaactcattgaaaataaaaaaagccaaaaactttattctctttcagaagcacaagttaattcaattttagaattgagacttcaaaagcttacagcattaggaataaatgatattgaaagtgaaattaaaaaattatcagaaatgattattcaatttaaaaaaataataaattctaaaaaagaattattaaacgtta

SEQ ID NO: 293892 - DNA, 367 bp, Unknown
  Bacterial polypeptide expressing nucleotide sequence isolated from the Sargasso Sea
tatgcccggactcattaaagaaggaaaggtttggatctccgaacctccactttatagagctaagtcttctggttcaataaattatttgaaagacgatcaagcccttgaaaattttaaaaaagaaaacaaaaataagaaatttgatatcagcagattcaaaggtcttggagaaatgaacgcaggagagctttgggacactgcaatgaatccagaaagtagaactcttataaaagtaagcattgctgatggaaaggcagctgaagctagagcagcaaacatgtttgaaatactaatgggtaacgacgttgcaaaaagaaaaactttcattgaggaaaacgccaaagatgtaaggttcttggacgtataa

SEQ ID NO: 293893 - DNA, 610 bp, Unknown
  Bacterial polypeptide expressing nucleotide sequence isolated from the Sargasso Sea
aacaaaagcattagcgaaattaatttcatccaatgaaatagttactttaataaatgcacttggtttagatccaaaaaacgaagatatagatttaaaagatttaagatatggaaagataatcatcatgacggatgctgatgttgatggttcacatattagagctttgcttcttactttttttaataataaaccttttaataaattaatagaaaatggaaatatttatcttgcacaaccaccattatttaaaattaacaaaggttcaaaaggaacctatattaaagatgaaaaagaattagaaaattatattataaaaaattctaaagaatttcaaaaaataaagaagggatcaaaagattttgaaaagaaattacaagaagaaaaatcaaaaattagtttacaaagattcaaaggattaggagaaatgaatcccgaagaattatggaacactactttgaacccagaaactagaaatttgctacaagttaaatactctaaagatttaaaaaaagattacggattaatccatacacttatgggtaacgatgttgctttgagaaaagattttattgtagagaatgcaattaatgtgtcaaatttagatgtttaa

SEQ ID NO: 293894 - DNA, 178 bp, Unknown
  Bacterial polypeptide expressing nucleotide sequence isolated from the Sargasso Sea
catggaaaaaaatacagtagaaataaaaaaatcatataaacctattttcgttcaagatgaaatgagttcttcttatctttcgtatgctatgagcgtaattgtaagtagagctctaccagatgtaagagatggattaaaaccagttcatagaagaataatatacgcaatgtataaaggg

SEQ ID NO: 293895 - DNA, 147 bp, Unknown
  Bacterial polypeptide expressing nucleotide sequence isolated from the Sargasso Sea
tatgggcgaaattgctgctaaggaaatagtacctgttgatataggtaaagagcttaaacaatcttatttagattacgcaatgagcgtaatcgtaggaagagccttacctgatgcaagagacggcttaaaaccagtgcatagaagagt

SEQ ID NO: 293896 - DNA, 361 bp, Unknown
  Bacterial polypeptide expressing nucleotide sequence isolated from the Sargasso Sea
tttgaggcgggcgattggggatcgctatttgacctacgctctatcaacaatcatgcatcgagcgctgcctgatgctcgcgatggacttaagcctgtacatagaagaattctctatgcgatgcgtgaactaaagttagcctcaaatggtggatttcgcaaatcagcaaagatttcaggcgatgttatgggaaattaccacccacatggtgatgctgcaatctatgatgctatggccagattagcacaagacttcaatgtcagatatccactagttgatggccaaggtaactttggaaacatagatggggataatcccgcggccagtcgatatactgaggcacgcatgacagttatcgctgag

SEQ ID NO: 293897 - DNA, 895 bp, Unknown
  Bacterial polypeptide expressing nucleotide sequence isolated from the Sargasso Sea
tggaaaagaggagcgtgtaatcaagattattcatgatgaaagcgtggaaatccgtgagaaatatggagacgaacgacgtactcaaataattgagggtgacagctccatcatgattgaagagctgattaatgaagaagacatggtggtcacaatatctagagaaggttacatcaaacgcagttcagtcagtgaatacaggcttcagcgccgcggcggaaagggacgccttggtatgggcaccaaggatgaagatttcgttgagcaactttttgttgccaacacacatgattacctgctctttttcaccaataaaggccaggttttccgtaaaatcgtgtttgagctgccccaagcaggacctaccggacgcggcaaagcattaatcaatttgctgcctttacgtgatggtgaaaacatttgtgcctgcctaaatgtgcctaaggaagcagaaaacaagtatattttcctttgtacagaaggaggtgtagccaaaaaaacacccatgctggattgtgcaaagatccgtgtaagcggtttgagggtaatcactcttgatgaaggagattcggtaatttccgttcagcttaccgatggagaacaggaactgttttttgccaccagggacggtatgggattaagggtccacgaaaaaacactacgtccaatgggacgacaggcacgtggagtgagaggagtcagacttcgaaaaggagacagggttgtatccgcgcttgcactttccggttccggggaactgctaactgtaaccgaaggcggctacggtaaaaagactccgattgctgattacacgcttgcaaaaaacaggggaaattttggaatgcgcacaatcaggatcactgacacaaatggtccagtagtgaatgtgcttgaagta

SEQ ID NO: 293898 - DNA, 511 bp, Unknown
  Bacterial polypeptide expressing nucleotide sequence isolated from the Sargasso Sea
cctatcaagaactgcatcaaagatagcaaaagagaaagggtataaggcatctgtaaatatagaatatgatgatgatggaataggctacataaacacagaagaagaaattggtggagtaacacatcacggcaagattgctaactcttttttaagatctaacgattacaaaatttttggccgagtacaaaaagcacagaaagtattctcaggccccgttgtcatagataacggatctgaaattacagaatatgtgaatgttgaagagtgcctaaatcatattgttaacacctctaaaagaggccttaatgttcagcgctacaagggtcttggcgagatgaacccagaccaactgtgggaaacaacacttgatccaaccacaagatctttgttgcaagtaaaggcggacgacgatgcaggcctgacatttgaaactcttatgggtgatgaagtaccgcctagaagagagtttattgaagaaaatgccttaaatgcaggaaatgttgatatataa

SEQ ID NO: 293899 - DNA, 239 bp, Unknown
  Bacterial polypeptide expressing nucleotide sequence isolated from the Sargasso Sea
tatgacatcaggtagtaagtctgaatttggattcattcaaccaacccaaataactgaggaaatgcgtagctcatatttggattatgcgatgagtgtaatcgtttcccgtgctttacctgacattagagatggtttaaagcctgttcaaagaagaattttgtatgctatgcacgatttaggcatgaggcctaattcaagttataaaaaaagtgcacgtttagttggtgaggttcttgggg

SEQ ID NO: 293900 - DNA, 707 bp, Unknown
  Bacterial polypeptide expressing nucleotide sequence isolated from the Sargasso Sea
caacccagaggcgccaccgattcagggagagcccctcgaggcgctggttgttgcctatcagactttgctgcaaaccttggccgagtcccagcgtaaatatcctgaggagcttgctatggcgttggtgaggctcgataaactcacaccagaacggatgtcggacgaagccgcgatgcagcagtgggcgcaatcgcttgttgatctgcttcgtcagagcccggacgcgaatccaaaagtcgaggtggccctcgatacggaaaccaatgcctatgtgcctaaaataacgctcttgctcaagggggttgctcgtgaaattgcactacccctggcgttcctaagtgggcgcgagtacaaaggcatcgcggccatgatcgatcaagtgcaggatctcttggagcctggcgcctacgtgcagcgcggtgagcgccgcctagacgtcgagcactttgcagaagcgtttgattggctgcaaaaagaagccagacggggcattgatctgcagcggtataaggggcttggtgagatgaacccggaacagctatgggagacgaccatggacaagtcagtgcgacgcatgctgcgggtttccatcgacgatgccattggtgccgatcaaatgttcaccactttgatgggtgatcatgtggagccaaggcgtgagtttattgagcaaaacgccctatcagtggtaaatctagacgtttagt

SEQ ID NO: 293901 - DNA, 499 bp, Unknown
  Bacterial polypeptide expressing nucleotide sequence isolated from the Sargasso Sea
aatgtttaataaaattcttactgatgattttggttgcaactggacagggaaaataaatgagacaaaaaacctagtcttgacctgtacttcacgcaacgtttcaaaagaatacatattttacaataacctccgtgatcacgcagaagtaaaaaacattaataagttaatggatcaaattgcaacaatatttgacacaacatcaaattttattacgaaatatgattcctatataatacacactcctttgcaattactaaaacacattgatgaagaaggaagaaaagggataacaatccaaagatttaaaggattaggtgaaatgaatcctgatcaattatgggaaactactttggacccggactcaagaacattactacaagtcaaaattaaccataaagatgatgcagaagatgtattctctacattaatgggtgatgtagtagagccaagaagagagtttatattaaataatgctcataacgcaaatttagacgcataa

SEQ ID NO: 293902 - DNA, 206 bp, Unknown
  Bacterial polypeptide expressing nucleotide sequence isolated from the Sargasso Sea
aatgagtaagaaaaacaattatggtgcagaaaaaatttcagttctaaaaggtttagaagctgttagaaaaagaccagcaatgtatattggagatgttggaaaaagaggttttcatcatcttgttaatgaagtagtagataatagtattgatgaagctttagctggtttttgtacaaaaataattgtaacaattaaaaaagatggat

SEQ ID NO: 293903 - DNA, 879 bp, Unknown
  Bacterial polypeptide expressing nucleotide sequence isolated from the Sargasso Sea
ttttttatagacacatgaagcccattattgactccggccgcctgtacatagcacagccaccactttatagaattaaaaaaggtaactctactgtatataagaaagatgaaaacgatttagaagaatatttaattgaggaaggcttaaaaaatacaactttacgtaatattaaaaatattcaggttggggggaaagaacttaaggaaataatttatttatctaggaagacaaaaaatctaataattcctttaatgagaagaattgacaatagtgatattattgaacattctgcaatagtcagggctcttgatttaagaaatctaaaagacagtaaaataggtgccgaaattgcaaaatatttacaacaaagattgaatcttatttctaatatttctgaaaaaaattggaaagtatcccacgcgaatgactcgatttatatagagagaactattagaggttttactgaaaaatttattattgatgaaaattttattattacacctgaagcaaaagcattaaacgaaataagagatcagttaatggaaaatttttatagattaaaagaaaatggtaccggtgtattagagaataaaaaagaagtatttaatatttttggtcctttagatcttatagataaaatactggagataggaaaatttggaatacaaattaataggtacaaaggtttaggagaaatgaatccagatcaattatgggaaacaactcttgacaagaatgaaagaactttactttctgttaaaataaatgaagttgatgcagcgaataaagcatttgaagatctaatgggtggcgaaactgatgcccgcaagaaatttatagctgaaaattcacttaaggttgctaatttagatatttaaa

SEQ ID NO: 293904 - DNA, 553 bp, Unknown
  Bacterial polypeptide expressing nucleotide sequence isolated from the Sargasso Sea
ttaggattagatccaaagtctcaagaaattgatcttaaagatcttagatatggaaaaataataattatgacagatgcagacgtagatggatctcatattagagcattattattaactttttttaacaataaaccatttaataaattaattgaaaatggacatgtatatttggctcaaccacctttatttaaaattaataaaggttcaaaaggcgtttacataaaagatgagaaggaacttgaagattatataattaataataataaagaattaaaaaaaattaaaaaaggatcgaaagattttttaaaagtaatagaattagaaaaatctaagatggatattcaaagatttaagggattaggagaaatgaatccagatgaactatggaatacaacattaaatccagaaactagaaatttattaaaagttcaatattccaaagatttgaaaaaagatcaaattttaattcatactttgatgggaaatgatgttgctctaaggaaagattttatagtttcaaatgctataaatgttcaaaatttagatatttaaa

SEQ ID NO: 293905 - DNA, 562 bp, Unknown
  Bacterial polypeptide expressing nucleotide sequence isolated from the Sargasso Sea
aatcaacgcgttgggcttagaccctaaagcacaagaaatagatttaaaagatttaagatacagtaaaataataattatgacagatgctgatgttgatggttctcatatcagagctttgttattaactttttttaacaatgaaccatttaataaattaatcgaaaatggtcatatatatctagctcaaccaccactgtttaaaataaataaaggaagtaaaggtatttatataaaagatgaaaaagaattagaagattatattttaaatagcaacaaagaaattaagaaaataaaaaaaggaacaaaagaatttgctaaggctttagatattgaaaaatctaaaatgaatattcaaagatttaaaggtttaggagaaatgaacccagaagaattatggaacaccacacttgatcctaaaactagaaatttacttcaggtacagtattctaaagatcttaaaaaggatcaaaatttaattcatacacttatgggtaacgatgttgcattacgaaaggattttattgtctcgaatgcaattaatgttcagaatctcgacatataa

SEQ ID NO: 293906 - DNA, 725 bp, Unknown
  Bacterial polypeptide expressing nucleotide sequence isolated from the Sargasso Sea
taaacaaggaagaaacagggaatatcaagcagtattacctttaagaggaaaaatattgaatacttatactgaaatgaatgggtccaagaaaaatggtaatcaaagtgatcttagaacaaaatcattatcaaagatgatttcctctaatgaaattgtcacattgataaatgcccttggattagatcctaaaacagaagaaatagatttagaggatttaagatatggaaaaattataattatgacagatgcagacgttgatggttcacatattagggcgctacttttaaccttttttaataatataccttttaataaattaatagaaaaaggccacgtttatttagcccagccacctctttttaaaatcaacaaaggttctaaaggtatttacataaaagatgaaaaagatcttgaaaattacataattaagaattctaaggatataaaaaaagtaaagaaaaattctaaagaatttgacaaaattattctattggaaaagtctaaactaaatattcaacgatttaaaggacttggagaaatgaatcccgaagaattatggaatactactttaaatccagagactagaaatttgcttcaagttcagtactcaaaaaatcttgaaaaagatcaaaacctcatacaaacattgatgggtaatgatgttgcttctagaaaagattttattgtagataatgctataaatgttgttaacttagatatttaat

SEQ ID NO: 293907 - DNA, 103 bp, Unknown
  Bacterial polypeptide expressing nucleotide sequence isolated from the Sargasso Sea
atgacagatcaatatacagcttcctcgataaaagttttaaaaggcttagaggctgttagaaaaagaccaggtatgtacattggtgataccgagatggcacagg

SEQ ID NO: 293908 - DNA, 407 bp, Unknown
  Bacterial polypeptide expressing nucleotide sequence isolated from the Sargasso Sea
aatggggatcagtgatttcgaatcactgctgcaaaaggaattcaaacccaagtcggatcgttctcgcgaggcggttgaagatgcagttaagacgctagcagagcagctacttaaggacacagttgttgtttctgacgatgttatcagcactatccaggccatgattgctgaaattgatcaaaaacttactgaacaggtcaacttaatcttgcaccacgaagattttcaaaagctcgaaggatcgtggcgcgggttgcatcacctcgtttccaacactgagtcggatgaactccttaaaatacgggtgaaaaacatcagcaagaaggagttaggcaaagagctcaagaagtataagggtacggcatgggatcaaagtagtatctttaaaactatctatgaagaagagt

SEQ ID NO: 293909 - DNA, 810 bp, Unknown
  Bacterial polypeptide expressing nucleotide sequence isolated from the Sargasso Sea
gacttcaaaaactaacagggttagaggtcgacaaaatagttgctgaatataaagaggttataaagctaatcgcctacttgaaagggattttggaaagtaaaagccaacgaatggatataattaaagaagaaatggttgccgtaaaagaagagtttggtgatgaaagaagaactgaggttataccggttgattccaacttttcaatggaggatatgatagcagaggaagaggtggttttaactataacccacagcggttatatcaaaagaaccgcactaaacacatatagaacacaaagaagaggtgggcgcggtgtacagggggcaacaagcaacgaggaagattttgttgagcatttatttattgccaacacacataactatatgttgttttttacaaaccttggtaaatgttactggttaaaggtttatgatattccccaaggaggacgagctacaaaaggtagggcaatcgttaatttaattgggtgtgaaccaggagaaaaggttgaagcctttgtaagcgtaaaaggttttgatgataatcattatatagtcatggccacaagaaatggtttagttaagaagacagtgttgtcagcctacagcaaaccacgcaaaggtggaatttatgccatagagataaaagaccaagacacccttattgaggcaagaataacaaacggtgaaaacgatatattgttaggaaccagaggtggaaaatcaataagattttccgaaaaaaacatccgcccaaccggaagaaaaacaatgggcgtgaaggggattactcttagctcaaaaggatgat

SEQ ID NO: 293910 - DNA, 121 bp, Unknown
  Bacterial polypeptide expressing nucleotide sequence isolated from the Sargasso Sea
aatgataaaaaataattcaaacaattaccaagctgactcaataaaagttctaaaaggtttagaagcagtaagaaaaagaccaggtatgtatatcggtgacaccgatgatgggacgggatta

SEQ ID NO: 293911 - DNA, 175 bp, Unknown
  Bacterial polypeptide expressing nucleotide sequence isolated from the Sargasso Sea
atgcagaaaactgaaattcccgaagataagaatataaagttgatatcaatgcatgatgagatgagctcatcttatctttcatatgccatgagtgtcatagtaagtagagctcttccagatattagagatggcctcaaaccagtgcatagaagaatattatacgcaatgtataaag

SEQ ID NO: 293912 - DNA, 204 bp, Unknown
  Bacterial polypeptide expressing nucleotide sequence isolated from the Sargasso Sea
tatggaaaaaaacgaagtctcaaaagataaaaatataaaactcatttcgatgcatgatgagatgagctcatcatacttatcctatgcaatgagtgttatagttagtcgagcacttccagatgttcgtgatggtttaaaacctgttcatagaagaatattgtacgcaatgtataaagggggttatgattggtctaaacagtttag

SEQ ID NO: 293913 - DNA, 839 bp, Unknown
  Bacterial polypeptide expressing nucleotide sequence isolated from the Sargasso Sea
accatcgaagtaataaaaaatcctactgtgactatagaagaaattatgaggattgtacccgcaccagactttccaacaggagcacttattttaggtagatcaggtgcaaagaaggcatatacagatggtcgtgggtcggtaatccttagagcaaaagtcaatattgaagaaattcgaaaagatcggtgggccattattgtaacagagattccctatcaggttaataaatctgctatgattgaaaagattgctgaactaggcaaagaaaaaagggttgaaggtatatcccacgttcaggatgaaactgatcgacttgggatgcgcattgtaattgaattgaagagagacgccactccagaagttgttcttaatcaactttataaatttacgccactacagactagcttcggctgcaatatgcttgccttaaacgaaggtaaacctgaacaattaaatttaaaagggtttttaacagctttcataagttttagacaagaagttgttactcggcgaactgcatatgaattaagcaaggcacgtgaacgaagccagattttgtgtggtttggctgtagccgtttcaaacgttgatgaaatagttgaaacaatccgagtatcagcagacccagctgatgcccgcgccaaactgaccaacaagaaatggtctgccgaaaaaatcaaagaatttatcatcctgatagatgatccttctcataaaatcaatccggacaatagttattatctgtcagagactcacagccaagctattctagaattgcgtttacaaagattaacagcgttaggtgtgaaaagaggtacagaaagactttgttcactttc

SEQ ID NO: 293914 - DNA, 228 bp, Unknown
  Bacterial polypeptide expressing nucleotide sequence isolated from the Sargasso Sea
tatgtctgatattgtagattccgagaattctggattaagcgaagataacgatcgaattattcagactgacttaagaaatgagatgtctcgctcttacctcgagtatgcaatgagcgtaatagttggtcgtgcccttccagatgcaagagatggtttaaagcctgttcatagaagaattctttatgcaatgtatgaacttggtttaactagtagtagaccatatagaaa

SEQ ID NO: 293915 - DNA, 753 bp, Unknown
  Bacterial polypeptide expressing nucleotide sequence isolated from the Sargasso Sea
ccacataatttaacagaagttacaggtgccgtaaaacaccacgtcaacaaaattattgaacaaggcgttgacaataaagaaatgccaacaatatcaattgaaaactacatgaattatatcacaggaccagattttcccacaggagcatcaattcacggaattgagggaatttacgatatgtattccactggaaaaggaaggttccacataagatcaaaatgtgatgttttcgatgataataaaggtaaaagaatcataattcatgaaataccatatcaagttaaaaaagcagatatgctcgtatatatcgctgatttagtaagtaaaggcacagttatcggaattagagatattcgagacgaatcttcaaaagagggaataagagtagtcatagaagttaaaaacaatgctgaccctcacgcagtactaaatcaattatacaaaaagagccgtttacaagaatcttattctgccaacatgatgggtattttagatggaagaccagtactacttacactaccaaaaatgttgcacacatatgtagaacacagagaatctgtaatagaaagacgggctcaatacgaattggataaagcagaagcaagagcacatattctagaaggattagttaaagcacaagatcgaattgatgatgtgattgctgtaggtagagcaagtgaaagtagagaacagtttgaatctgtactaaaaggaaatgaaaatatcatcaaaggtattgatgcttttgatttc

SEQ ID NO: 293916 - DNA, 580 bp, Unknown
  Bacterial polypeptide expressing nucleotide sequence isolated from the Sargasso Sea
atgctgatcaatctgttgcttaagcaccaaatcgagatagatttaggaggagcagaacatattattaagtgtatcggcgctttaaagaacatatatcaagattataaacttagtgttgatcctgagaagaagggaagcaatgttttaattgaggcaaacgggcaaaaaattgagctttctcttaatttgctagaaaatctgagtgcctatgattattcacaattgtttgatgaacatttgcgacttaaagctacattgggtgaaaaaggcgttgctttaactgaagaaaaagaaggtgagagcaattattttcaatcttggtttgaggtgctggattttattataaatttcggtaaaaaaggcatgtatatacagcgctacaaaggattgggtgaaatgaatcctgaacaattatgggaaacaacactaaatcctgaagtaagggcacttaaaaaagtaaccattgaagatatagtagaatcagacggaatctttaccattttgatgggtgatcaagttgaaccacgccgtaacttcattgaggaaaacgcgcttagagttaagaatcttgatgtttagc

SEQ ID NO: 293917 - DNA, 394 bp, Unknown
  Bacterial polypeptide expressing nucleotide sequence isolated from the Sargasso Sea
cttgttgttaacattcttctttaaatttatgcccggactcattaaagaaggaaaggtttggatctccgaacctccactttatagagctaagtcttctggttcaataaattatttgaaagacgatcaagcccttgaaaattttaaaaaagaaaacaaaaataagaaatttgatatcagcagattcaaaggtcttggagaaatgaacgcaggagagctttgggacactgcaatgaatccagaaagtagaactcttataaaagtaagcattgctgatggaaaggcagctgaagctagagcagcaaacatgtttgaaatactaatgggtaacgacgttgcaaaaagaaagactttcattgaggaaaatgccaaagatgtaaggttcttggacgtataa

SEQ ID NO: 293918 - DNA, 839 bp, Unknown
  Bacterial polypeptide expressing nucleotide sequence isolated from the Sargasso Sea
ggttattgtaagcgcattaaagtaaatctttataaagataatagtgttgaagtctcagataatggacgaggcatgcctgttgatatccatcctgagcataagctaacaggcgttgaattaattatgtgtaagcttcatgctggagcaaagttctctggagaagattatggtttttcaggagggcttcatggagttggagtttctgtagtaaatgctttatccaccaagcttaatgtaaaaattaaacgtgattcaaaagagtatgaaataaatttctgtgctggagacaaagacaatgatttgaaatcaattggtgatgttggagcaacgaattcaggaaccacaattagattttatccagacaaacaatacttcgaaacattagagataaacaaaaagagcttaaaacatctactaaaggctaaggcagttctttgcccaggtcttcaaatagattactttgatgaaaaaaagaatgagagaattaaatggatttttgatgagggactgagcgactacctcgatgagttttcaggttgtaacgagaaacttcttgatgaaactattattctttccaaaacttccgatgatcaagcactagatgtggcagtgaattggactgaagaggcttcaaataatttactcaaagaaacttatgtaaacttaattcctactgcattaggtggctctcatttaaatgggtttaaatctggtcttcttgaggcaataaaagaattctgtgactacagaaatttgataccaaaaggtgtaaaaattaactcggatgatattcttgctaactgcatttttgttatttcctcaaaattaaaaaatcctca

SEQ ID NO: 293919 - DNA, 856 bp, Unknown
  Bacterial polypeptide expressing nucleotide sequence isolated from the Sargasso Sea
gacgaatccgatagagacggcgtgcgtgtcgttatcgagatcaaacgcgatgccgtcgcggaggtggttctgaaccagctctaccgctattcgccgctgcaaacgagctttggcgtcaattcgctcgcacttaacaacggcaagccggaattgctgaacctgcgaagcgttctggacgccttcatcgattttcgcgaagacgttatccgccgccggaccgaatatgatctttccaaggcacgtgatcgggcacatgtgctggtcgggctggcaattgcggttgccaatatcgatgacgtcatcgcgctgattcgtgcagcgaaagaccctgtccaagcgcgcaatgaactgatggaacgtgactgggacgccgaagacgtggcgtcactgatcgaactgattgatgaccctaaccatcagatcatagaagaacgttacaggctctcagaggctcaggcgcgagccatcctcgaactacgactgcaacgcctgaccgggctggaacaggacaagatcaaggaagaactcagcggcctggccgccgagatcgaaaatttcctcgatattctgaggtcccgcgaacgcctgcggtcgatcatgcgcgacgaaatgatggcggtgaaggagcagttcgcgacgccacgccgcacatctatcgaggattcagaactcgacacagatatcgaagatctgatccagcgggaagatatggtcgtgaccgttagccacaacggctacataaagcgggtagcgctttccagttatcgggcgcagcgccgcggtggcaagggccgggccgggatgagcacacgcgacgaggatttcgtcagaagcgtgttcgtctgcaacacccata

SEQ ID NO: 293920 - DNA, 511 bp, Unknown
  Bacterial polypeptide expressing nucleotide sequence isolated from the Sargasso Sea
ttaaggtatggaaagataattattatgactgacgccgatgtagatggctctcatattagggccttactattgactctttttaataacaaaccttttaaccaattaatagaaaatggacatatttatcttgctcaaccacctttatttaaaattaataaaggttcaaaaggaatttacattaaagatgaaaaggaattggaaaattatattacaaataattcgaaagaatttaaaaaaataaaaaaaggctcaaaagagtttgaaaaaaaattacaagaagaaaaaacaaaaattagtatacaaagatttaaaggattgggtgaaatgaatcctgaagaattatggaatactactttaaatcctgaaactcgaaatttactaaaggttgagtattcaaaggatttaaaaaaagaccatggattaatccatacactgatgggtaatgatgtagctttaagaaaagattttattgtagaaaacgccattaatgtttcaaatcttgatgtgtaat

SEQ ID NO: 293921 - DNA, 725 bp, Unknown
  Bacterial polypeptide expressing nucleotide sequence isolated from the Sargasso Sea
aaatagagcaaatcaagcagttttaccacttagaggtaaaatacttaatacttatgtagaagaattgaatatgaaaaaaaatggtaacggcaatggaaacggttctgatcaaagaacaaaggctttgtccaaaatgatttcttcaaatgaaatcgttactttgattaatgctctaggtttggacccaaaagcacaagagattgatttaaaagatttaagatatggaaaaattattattatgactgatgctgatgtagatggatctcatataagagcccttcttttaacttttttcaataataaaccattcaataaattaattgaaaatggccatgtatatttagcccaacctcctttatttaaaattaataaaggttctaaaggtatttatattaaggatgagaaggagttagaagattacataataaataataataaggagttaaaaaaaattaaaaaaggatcaaaagattattcaaaaaaaattgatgaggaaaaatcaaaaatgaatatccaaagatttaaaggtcttggagaaatgaatccagaagaattatggagtactacattagatccagaaacaagaaatctacttcaagtacaatactcaaaagatttgaaaaaagatcaaagtttaatccatactttaatgggcaatgatgtggcattaagaaaagattttatagtttctaatgctataaatgttagaaatcttgatatttaaa

SEQ ID NO: 293922 - DNA, 505 bp, Unknown
  Bacterial polypeptide expressing nucleotide sequence isolated from the Sargasso Sea
tatggaaaaataataataatgacagatgccgatgttgatggttcgcatataagagcattattattaacgttttttaataataaaccatttgataaattaattgagtttggacatgtttatcttgctcagccacctttatttaaaattaataaaggaactaaaagcatatatatcaaagatgaaaatgagctcgaaagttatttaataaaaaattcaaaggaaattaaaaaatataaaaagaattctaaagaatttaataatattctccaaattgaaaagtctaaacttaacattcaaagatttaaaggacttggtgaaatgaaccctgatgaattatggaatacaactttaaatcctgaaacaagaaatttgttacaagttcaatattcaaagaatagtaaaaaagatcaagatttgatacaaaccttaatgggtaacgatgtttcttcaagaaaagattttattgttgaaaatgcaataaatgtttcaaacttagatatttaga

SEQ ID NO: 293923 - DNA, 508 bp, Unknown
  Bacterial polypeptide expressing nucleotide sequence isolated from the Sargasso Sea
aagatatggaaaaattattattatgactgatgctgatgtggatggttctcatataagggctttgcttcttacttttttaaataataaaccttttaataaacttatagaaaacggacatgtctatttagctcagccaccactatttaaaataaataaaggatcaaaagggatttatattaaagatgaaaaagaacttgaagaatatattttagataactcaaaaaatttgaaaaaaataaaaaaaggaagcaaagagttcattaaagctttcaatgatgaaaaatcaaaaataagcatacaaagatttaagggcttaggtgagatgaatcctgatgaattatggaatactacacttaatccagaaactagaaatttacttcaagttcaatactcaaaagatcaaaaaaaagaccaaaacataatacatacactcatgggtaatgatgtaagtttaaggaaagaatttattgttgcaaatgcaatcaatgtttcgaatttagacatatag

SEQ ID NO: 293924 - DNA, 833 bp, Unknown
  Bacterial polypeptide expressing nucleotide sequence isolated from the Sargasso Sea
tgatggagagccgaagttacttaatcttaaatcaatactctctgtttttttcaaccatagaaaagaagttgtttctcgaagaacatttttcgatttaagaaaagcaaaagaaagagggcacattttggaaggcctcaccattgcattggctaatattgatgagatgatagacctaataaagaaatcaaaagaagggtccgaagcaaaaaagaaattactatcaaaaaaatggaaaccaggaaaaataactgcaatgcttgaaaaggctggtccagatgcttgtaaaattgatgtcactgataattccgttggtctaatcggaaagacttatcaattatctgaacaacaagctcaagctatattggatatgagattgcagaggcttactggtcttgagcaagataagttaattaaagaatacgaagaaataatcgatcacataacatatttgctagcaatacttggagactctgaaagattaatcgaggttgttaaagaagaacttttggaagtccaagagaaatataaggatgatagacgaaccgaaatacaagattcagctgcagatctaactgaagctgatctgattactcccgaagatagagtagtaactatttctcatgaaggttacgccaagactcaaccactagaagaatatagggcacagagaagaggaggaactggaaagactgccgcatcagttaaagaggaagattttgttgagcagctattagtagcaaatacacatacaacactactatgcttttctaacttaggacaagtttactggttgaaagtatatgagattccttctgctggaagggctgcgaaag

SEQ ID NO: 293925 - DNA, 625 bp, Unknown
  Bacterial polypeptide expressing nucleotide sequence isolated from the Sargasso Sea
aatgcctgctaaaaaaccaacagctaaaaagccagctgctaaaaaacctcctgcaaaaaaaccagctgctaaaaaagctcctgcaaaaaaaccagctgctaaaaaaccaccagcaaagaagaccgcaactgcaaccaaagagactaaaccaaaagaagcaatttcaagcaacggcacaattgcagttgaagatgaaatttcaaaatcattcttagactatgctatgtccgttattgtttcaagagcattaccggatgttaaggatggcttaaaacctgttcaaagaagaattctgtattcaatgtatgaaacaggaattagacctacaggtccttttagaaaatgttcaaaggttgttggtgatgtaatgggtaattatcacccccacggtaacgaagcaatttatggaaccttagttagactaggtcaacacttcagtacaaggtacccactaattgaacctcaaggaaattttggtaccccagacgatcctccagctgccatgaggtacacagagtctcgaatgtctttactctcatctcaacttctagatggcattgatgaagataccgtaaattttgaaccaaactattcgggagaaacttcggaaccaaaagtctccagc

SEQ ID NO: 293926 - DNA, 150 bp, Unknown
  Bacterial polypeptide expressing nucleotide sequence isolated from the Sargasso Sea
aatgtcaggtgatacgtacgattcaggcagtattaaggtattagaaggtttagaagcggttaaaaagaggccaggaatgtatatcggggataccgatgacggcactggacttcatcatatggtttttgaagtgcttgataactcaataga

SEQ ID NO: 293927 - DNA, 499 bp, Unknown
  Bacterial polypeptide expressing nucleotide sequence isolated from the Sargasso Sea
ctaaatcaactatctggccgccttaaacaaggctggactggagaatttgacgaagccaaacaaaatataacctttgaacggacggtgcgcggtgtaaccgaagcttatactatagacgctcagctgattagaactcccgaggcgcgcgagttggatcgtatggttggtgatctccaagaagcctatggaaaaccagcagttttagagaccaaagattcgcaggagactgtagacgggccaacaaaattaagtgaattgatacagcagataggtaagaaaggattagcggtgaatcgatataagggtttgggtgaaatgaacccagatcagctgtgggaaactactttggacccaaatcaaaggacacttcttcaagtgaaaattaatcatttagaagaggcagcagaagtgttttctactttaatgggtgatgttgttgagcctagaagagatttcattcaagaaaatgcgcttaaagtagcaaatttagatatttaga

SEQ ID NO: 293928 - DNA, 876 bp, Unknown
  Bacterial polypeptide expressing nucleotide sequence isolated from the Sargasso Sea
gttagttgttgaattgaagagaggtgctagcgaatttgttgttctcaataatttatacaaattaacaccattaaggtcatctttttcaataaatatggttgctttagttgatggatccccaagagtattaaaccttaagcaaattttaaaatattatgttgattttagggttgatattgttacaaaaagagctgaatttgaccttaagaaggctcaagcaaggattcatatccttgaaggattaagggtagcattgcaaaatattgatgaagttgttgaaacaattaaatctgctggaccagttgaagaagctagggaagccttaatgacaagattcgatttgactgaaattcagtctcaggcaatccttgatatgcaacttagaagaattgctgctttagaaactgaaaaaattgaatccgaatacaacgaattaaaagaattgataaaagatctaaatgatttgttatctaataaatcaagaatttatgatgtcataaaaaccgaaacaagtgaacttaaagataaatatggtgacaaaagattaaccaaattgcataaagaagaattgggtcaatggaatagagaggatgttgagccacacgaagaatgtgtcgtaacgctaagtagaaatggttatttaaaaaggataaagagtgatacatttaggaggcagcatagaggtggtaaaggcgttaaaggtcaaaaaatgactaaagaagatgacgttacaccatacatgcaaattgcagatacccacgacaccatattgttttttactgacaagggcagagtcttttcttcaagggtatttgatcttcctgccaatcaaagcagaaatagtagaggaactccagtacacaacattgttgcttt

SEQ ID NO: 293929 - DNA, 821 bp, Unknown
  Bacterial polypeptide expressing nucleotide sequence isolated from the Sargasso Sea
ttatcaaagttctctgaggtattacttaaagagctagggcaaggcaccgttgattggacgccaaactttgacggcactatggacgagccattagtgttaccggcgcgcttaccgcatattttgttaaatggcgtaacgggtattgcagtaggtatggcaaccgatattccaccacataatgtgcgtgaagtagccagtgcctgttgtttattacttgataagcctaaaaccgagcttgatgagttacttgagcttgtgcacgcacctgattatccaaccgacgctgaaataattaccccaaaagccgatattcataaaatatacaaaaccggccgaggctcaattaaaatgcgcgcggtgtatactgaagagcatggcgatattgttattacggcgctaccgcatcagtgttcaggggctaaagtgcttgagcaaatagcagcgcaaatgaatgctaaaaagctgccaatggtcgctgatttacgagatgagtctgatcacgaaaatccaacccgtattgtgattgtaccgcgttcaaaccgcattaaagctgagccgttaatggcgcacctatttgccaccaccgaccttgaaaaaaactaccgtgtaaacttaaacatgctaggccttgatggccgcccgcaagtaaaagacctacgcagtattttatctgagtggctaacgtttagacgcgaaacagtacgcaggcgcttacagcaccgtttagataaagtactggcacgattgcatattttagaaggtttacttgctgcctttttaaatattgatgaagtaattgaaattattcgcacagaagataa

SEQ ID NO: 293930 - DNA, 262 bp, Unknown
  Bacterial polypeptide expressing nucleotide sequence isolated from the Sargasso Sea
tatggcggtttcagtggggcccggaggcggcggtcccggcgattccgacgatcgaatcatccagacggatctgcgcaacgagatgtcgcgttcctatctggaatacgcgatgagcgtgatcgtgggtcgggcgctgcccgatgcccgcgatgggttgaagcctgtgcatcgacgcatcctctatgcgatgtacgagctggggctgacgagcgatcggccctaccgcaagtgcgcccgtgtggtgggtgaggtgctggggtag

SEQ ID NO: 293931 - DNA, 300 bp, Unknown
  Bacterial polypeptide expressing nucleotide sequence isolated from the Sargasso Sea
aaaaagaaagatatgcatataccgacgaagaaagagacaaccttttaaaaaggcttgaatctgaaaacaaaacaaaaattgatatccaaagatataaaggtttaggagaaatgaatgcagagcagctctgggaaacaacaatgaatgcagaaaccagaactttaattcaagtaaccgttgatcatattagggaagaggaaacaaacgtgagatttagagaattaatgggttcagaagtagaacacagaagaaattttataacagaaagagcaaagtttgcaaccaacatagatatataag

SEQ ID NO: 293932 - DNA, 646 bp, Unknown
  Bacterial polypeptide expressing nucleotide sequence isolated from the Sargasso Sea
ttctaattcattatctgtgattgaaaagattgaaaaacaggctggaactatcgcagcaaaagcaatatcaattcataaaccaatcactaaaacagaagctaataacaaaaagaaacttgagacttggattaagggcctatctagaactgcatcaaagatagcaaaagagagagggtacagggcgtctgtaagcatagactatgatgatgacggaataggctacataaacacagtagaagaaattggtggagtaacccatcacggcaagattgctaactcttttttaagatctaacgattacaaaatttttggacgagtacaaaaagcacagaaagtattctcaggccctgttgtcatagacaacggatctgaaattacagaatatgcgagtattgaagattgcctaaaacatctcgttaacacctctaaaagagggcttaatgttcagcgctacaagggtcttggcgagatgaacccagaccaactttgggaaacaacacttgatccaaccacaagatctttgttacaagttaaggcggacgacgatgcaggcctgacatttgaaacccttatgggtgacgaagtaccacctagaagagagtttattgaagaaaatgccttaaatgcaggaaatgttgatatataa

SEQ ID NO: 293933 - DNA, 726 bp, Unknown
  Bacterial polypeptide expressing nucleotide sequence isolated from the Sargasso Sea
ccagattgtagttgtagtgatttacaaaaatatgctttaggtccggattttccaacaggaggagagattattggaaaaaaaggtattgatgaagctttcgatacaggtaaaggaagttgcgttgtaaggtcaaaaacaagtattgaaaattttaaaaaagatagagaagctataatacttcatgagataccctatcaagtaaataaatcaaaattacttgaaagaattgctgaaatagtaaaaaatggaataatagagggtatttcagatcttagagatgaatcagacagaaatggtgtgagagtagtaattgagttaaaaaaagattttgatgctaatataatcttaaatcagctttataaaaatacactaattcaaactacttttaattctaatatgcttgctcttaatagaggaaaaccagagcaaatgaacttaaaagaaattttaagtgcatttttagattttagagaggaggtaataactaaaagaactttatttgatttaaacaaagctagagacaaagcacatattttagttggcttagtagttgctaacactaatattgatgaaataattgaattaataaaaaattcaaaggacataaaagcagctaaaaataaattaataaataaaaaatggaaacttgataaaaacaatgtaaattttattaatcttgttgaagataatgctatgcaactaaaaaaagatctttataatttttct

SEQ ID NO: 293934 - DNA, 97 bp, Unknown
  Bacterial polypeptide expressing nucleotide sequence isolated from the Sargasso Sea
atggttagaaatacaacatatcaagcagactcaataaaagtacttaaaggtttagaagcagttagaaaaagaccaggtatgtatataggtgataccg

SEQ ID NO: 293935 - DNA, 271 bp, Unknown
  Bacterial polypeptide expressing nucleotide sequence isolated from the Sargasso Sea
tatgtctgatattttagattctgacaactcaggattaagtgaaaataacgacagaattattcagactgacctaagaaacgagatgtctcgctcataccttgagtatgcaatgagcgttatagtgggtcgtgctcttccagatgcaagagatggattaaaacctgttcatagaagaattctttatgcaatgtatgaacttggtttaactagcggtagaccatacagaaaatgtgcaagggttgttggagaagtcctaggtaaataccaccct

SEQ ID NO: 293936 - DNA, 175 bp, Unknown
  Bacterial polypeptide expressing nucleotide sequence isolated from the Sargasso Sea
tatggaaaaaactaatattcaaaaaaaagacttgtttaaaccaatttttgtgcaagatgagatgagctcatcatacttgtcgtatgcaatgagtgttattgttagtagagctcttccagacgtaagagatggtcttaaacctgttcatagaagaataatttatgcaatggtataa

SEQ ID NO: 293937 - DNA, 997 bp, Unknown
  Bacterial polypeptide expressing nucleotide sequence isolated from the Sargasso Sea
cgccacaggtcgtggatcaatcatcatgcgcgctaaagcagaggtccaaacgaacgcgaaggatcgtgaggcgataatcattcatgaaattccgtatcaagtaaataaggcgcaattattagaacgtattggcgaaatggtgcgcgaaaaaacgcttgaaggcatttctgacattcgcgacgagtcagaccgtaatggaatgcgagttgtgattgagataaagcgggatgcgcaaggcgatgttgtgctgaaccaactttaccgacacacaagactacaaaccagttttcccgtaaatttgctggcaatgaacggcggtcgccctcaacagatgggattgaaagacgttatcaccgcgttttgtttattccggaaggaagtggtagtccggcggacaacgtttcttttgtctaaggcacgcgatcgagcgcacattttagctggcctgatggttgcattggcatctattgatacaatcattgaattgataaaaaaagcgcccgataccgagtccgctcgcaacgcgctatgcgatgcgaattggcccgcagctgaagtagcagattttgtttcgctaattgatgaccctggccatgcagtcattgatggacattaccgcctgtctgagacgcaagcccgggcgattctggaattgcggttgcaacgtttgaccgggatggagcgtgacaagctaagcgccgaaacgcgcgaactcgcagataagatttctgattatcttgatatcttggggtcggaaacgagggttagtcgtgttgttttagatgagctagcagcaacacgtgaacggcttgctaatccgcgccgcactgaaatcaccgaccaacttggtgatcaagacgatgaagatcttatccagcaagaagatatggtagtgacggttagtcaccgcggctacatcaaacgtgtgccattatcggtttatcgtgcccaaaggcgcggtggcaagggacgctcgggcatgaagacccgtgacgaa

SEQ ID NO: 293938 - DNA, 822 bp, Unknown
  Bacterial polypeptide expressing nucleotide sequence isolated from the Sargasso Sea
catgtccaaccaccttattcaagaagttctggataactctgtagatgaagctttatcaggttattgtaagcgcattaaagtaaatctttataaagataatagcgttgaagtctcagacaatggacgaggcatgcctgttgatgtccatcctgagcataagctaacaggcgttgaattaattatgtgtaagctccatgctggagcaaagttttctggagaagattatggtttttctggagggcttcatggagttggagtttctgtagtaaatgctttatcaaccaaacttaatgtaaaaattaaacgtgattcaaaagagtatgaaataaatttttctgccggagacaaagacaatgatttaaaatcaattggtgatgttggagcaacgaattcaggaactacaattagattttatccagataaacaatacttcgaaacattagagataaataaaaagagcttaaaacatctactaaaggcgaaggcagttctttgcccaggtcttcaaatagattactttgatgaaaaaaagaatgagagaattaaatggatttttgatgagggactgagtgactacctcgatgagttttcaggttgtaatgagaaacttcttgatgaaactattattctttccaaaatttccgatgatcaagcattagatgtagcagtgaattggactgaagaatcttcaaataatttactcaaagaaacttatgtgaacttaattcctactgcattaggtggctctcatttaaatgggtttaaatctggtcttcttgaggcaataaaagaattctgtgaatacaggaatttgattccaaa

SEQ ID NO: 293939 - DNA, 643 bp, Unknown
  Bacterial polypeptide expressing nucleotide sequence isolated from the Sargasso Sea
aattcattatctgtgattgaaaaaattgaaaaacaggcaggagctatcgcagcaaaagcaatatcacttcataaaccaatcactaaaacagaagctaataacaaaaagaaactagagacttggattaagggcctatcaaaaactgcatcaaagatagcaaaagagagagggtataaggcatctgtaagcatagactatgatgatgatggaataggctacataaacactgaagaagaaattgggggagtatcccatcacggaaagattgctaactcttttttaagatctaacgattacaaaatttttggacgtgtacaaaaagcacagaaagtattttcaggacctgttgtcatagacaacggatctgaaattacagaatatgcaaatattgaagattgcctaaaacaaatcgttaatacctctaaaagaggacttaatgttcagcgctacaagggtcttggcgagatgaacccagaccaactttgggaaacaacacttgacccaaccacaagatctttgttgcaagttaaggctgacgacgatgcaggccttacatttgaaacccttatgggtgacgaagtacctcctagaagagagtttattgaagaaaacgccttaaacgcagggaatgttgatatataac

SEQ ID NO: 293940 - DNA, 844 bp, Unknown
  Bacterial polypeptide expressing nucleotide sequence isolated from the Sargasso Sea
ccatattgaacttcatgctgatcattcgctaacaatttccgataatggtcgaggcattcccacggacccgcatcccaagttcaaggataagtcggcgctggaagtgattttgacgacgctgcactccggtggcaagttttccggggaagtctatgagacgtcaggcggtctgcatggtgtcggcttatccgtagttaacgctttggcagagcggttgaccgtggaggtagcgcgcgaccagaacatgtggtgccagacctaccagtttggtgtccccgacgggccattgaaagacctgggcacggttcgaaatcggcgcgggaccactgtcaatttccatcccgacgccaagatctttggtccgcgcaattacttcaagccggcgacgctctatcgcatggcacggtctaaggcttacctgtttcgtggcgttgagatccgctggacttgcgatgaaaagctgctcacctttggcgatgagacgcccgttaaggagaccctgcattttccgggtggcctgtccgattatctggtcagcgccttgggtcagcgaaagaccattacgccgcatcccttctctggccaatcaaagataaacggtggatcgggtagggtagaatgggccgtcgcgtggcccgtggacgaggattcgttctttaactcttattgcaacaccgtaccaaccccattgggcggtacccacgagttgggcttgcgcggcgcgctaactaaggggttgcgcgcctacggggaacttgttggcaacaagcaagcagcgaagctcaatggtgacgacgtcgttggcggcaccttggccatgctgtccgtgttcatcgttgatccg

SEQ ID NO: 293941 - DNA, 472 bp, Unknown
  Bacterial polypeptide expressing nucleotide sequence isolated from the Sargasso Sea
gatcgacgttaccaggcaattcttccattaagagggaaaatcttaaatacgtgggaacttgactctgctattgttttggggtcgaacgaagtgcaagatatttcaattgctttggggatagaacctggtgaacaatcgatggagaggcttccatacggcaaggtttgtattctcgccgatgctgattcagatggccttcatattgctgctctcctatgcgccttttttgtaaggcactatgctccccttgtaagagatgggcgagtttatgtcgcgatgcctcctctttataggattgattctgcgaaggacatattttacgcacgggatgaggaagaaaaagaactggttttagagaagctcggggataaaaaagctcaacgtgccaatgtacaacgcttcaaaggattaggtgaaatgaaccccaatcagcttaaagagacaaccttagagcctctcactcgtactttgc

SEQ ID NO: 293942 - DNA, 879 bp, Unknown
  Bacterial polypeptide expressing nucleotide sequence isolated from the Sargasso Sea
acaagcataccccctcataacctcggtgaaatcataagtgccactattgcctacataaagaataataacataactatttcacaattaatgaaatatgtaccaggaccagattttccaactgggggcattataattggaaaagaaattattaaacaaggatataataagggcagaggttcattcaaaatccgaggagatatagaatttgaggaaaaaaaaaatggaagatcaaatcttgtaattaagtctatcccatttcaagtaaacaaatcaagtataattgaaaaagttgctcaacttgcaaaagataaaaagattgatggtataagcgatataagagatgaatctaatcgcgagggagttagggtagttcttgaattaaaaaaaggaattgaaccggagactattagacggcaattatataaattatcaaatattgaaacctcctttggttttaatacattagcccttgtaaacaatatcccaaaagttttaaatcttaaatcttttatatctgagtttgtatcttttagagagttaacagtaattaataggctcaaatttgatttaaaaaaagctcaagaaagagcccatattttactgggtttggcggtagctgttgacaatattgatgaggttataaaagttattaaaaaatctaaagatgcaaaatcagcaaaacaaaatatactctcaaaaaaatgggctattaaaaagagtaaaaaaattgttttggcatttaataaaaaagatgtaagaaattataatttcactgaaaaacaagttgagtctattcttgaacttaaacttcaaaaattaacctcttttggaatagcggaaatagataatgaattaaatgaactaataaaaaagattaat

SEQ ID NO: 293943 - DNA, 471 bp, Unknown
  Bacterial polypeptide expressing nucleotide sequence isolated from the Sargasso Sea
ttgctgttaatcctgaaaagcagggtaacaatgttttaattgaggtaaatggtaaaaaaatagagctttctttcaatttactggaaaactttagtgcctatgattattctcaaatgtatgatgaacatttgagactaattgctgcattgggtgaaaaaggagttgttttaactgaagaaaaagaaagtgcaagcaatgtttttcaatcttggtttgaagtgttagattttatgataaactttggaaaaaaaggaatgtatattcaacggtacaaaggactgggtgaaatgaatccggagcagttatgggaaacaactcttgatcccaatgtcaggacacttaaaaaagtaactattgaagatattgtagagtcagacggaatctttaccattttgatgggagaccaagttgaaccacgtcgtaacttcattgaagaaaacgctcttagagtaaaaaatcttgatgtataaa

SEQ ID NO: 293944 - DNA, 624 bp, Unknown
  Bacterial polypeptide expressing nucleotide sequence isolated from the Sargasso Sea
ggagttggtgtctcagttgttaatgcattatcggaaaaattagatttatcaataaaaagagatggtaaagaacatgctatgtcttttcaaaatggtgaaacagttaaagctttgaaagccgttaaagattgtaaagatgaaaccggaacagaaattactttttatccatctaagtcagtttttacaatgaccgaatttagtcgtagaactttagaagcaaggttgagggaaatggcttttttgaattcaggcatatcaatacatttggaggataaaaggaaagatgagccatgggctaagacaatgtcttatgaaggtggtttagaagaatttgttaaacatattgatcagacaagaaagtctctaatggatttgccaatcagtttttctggtaaaaaagatgaaattgaagtcgatgtttcaatgtggtggaatgatagttattatgaaactgtaaattgctttacaaataatattcctcaaaaagatggaggcactcatttggctggtcttagatcagcattgacaagagttgtaaattcttatgcgcaagacacaggtttaacaaaaaaagaaaatgttcaacaaataggtgaagatattagagagggctttacatgtgtt

SEQ ID NO: 293945 - DNA, 703 bp, Unknown
  Bacterial polypeptide expressing nucleotide sequence isolated from the Sargasso Sea
gttaaagacggtttaaaaccagtacaaagaagaattctttattcaatgtatgaaacagggataaggcccactggtccatttagaaaatgttccaaggttgtaggtgatgttatgggtaattatcacccacatggaaacgaagctatatacggaacacttgtaaggcttggacagcactttagtacaaggtatcctcttatcgaaccacaaggtaacttcgggacccccgatgatccaccagcagcgatgagatatacagagtctagaatgtcgttactagcatcgcagcttcttgatggcattgatgaggaaactgttgactttgaaccaaactattcaggagaaacaaccgaaccaaaagtactcccaggaaggtttccaaatcttcttataaacggagcagaaggaatagctgtcgcaatggccacaaacatgccaccatataacctacaagaaattacagaagcagttaaatttacactaaaaaccaaagaacccaaaccaagagactacttgaagataattaaaggcccagactttccaaccggaggcttaatagtcaaaaccccaacaataaaagatgcaatattaaaaggaagagggtctatcaaacttagagctgttgctgacgttgaagagcttggaaaaggaagatcagcaatcgttgtgaaagagttaccttatcaggcatcaatagatcgaa

SEQ ID NO: 293946 - DNA, 361 bp, Unknown
  Bacterial polypeptide expressing nucleotide sequence isolated from the Sargasso Sea
atgaaacagttctacaaaaatgttttgcttctggatgatgtttctgatgatcttccaacgctagaaaagaaaaaggggtattcaggcaatgttagtttcattggagatggaaatatccagacacatatagcggaaaaggacttagaagttaatttcaaaactggccactttatcaatcctgttgaaaaaggtcatattgcttacagaacagataatttagatcagtttaaggagcatttaagatatcataaaattagatttgcggattgggaagagactgcagtttctggctggaagcaaattttcttttatgacccagatgggaatattattgaggttcacgaaaaagtcaaaaattgat

SEQ ID NO: 293947 - DNA, 1174 bp, Unknown
  Bacterial polypeptide expressing nucleotide sequence isolated from the Sargasso Sea
tgatgaggtgatagaaattattcgcggaagcaaagatccaatgatggctaaagaaggcctaatgaacaattttaacctttcagaggttcaagctcaagccattttggatatgcgtcttcaaaagctaacaggacttgaggtagacaaagttgttgaagaatataaagatctcataaaacacattgcccatttaaaaggaatcctagacagcaagaaccaaaggatgaatattataaaaaccgaactagcggaagtaaaagaatcatatggagatgaaaggttaacggaaatagtaccagtagattcaaatttcactatggaagatatgatagcagaagaagaggttgtgttgacgattacccaccaaggatatataaaaagaacagcgttaaacacttatagaacccagcgaagagggggaagaggtgttcagggggcaatgagcaaagaagaagacttcgtcgaacatttgttaattgcaaacacacacaactacatgttgttttttacagataaaggaaaatgttattggttaaaggtttatgatataccccaaggaggaagagccgctcgcggcagagcggttgttaatctgattggttgcgaacctggagaaaaagttgaagcttttgttgctgtagaaaagtttgatgataatcattttattgtaatggcaactaaaaacgggatagtaaaaaagacagttttatctgcatatggaaaacctagaaaaggtggtatatatgcaattgatattcgagaaaatgacaaattaattgaagcgagaattacaaacggggaacacgatattcttcttggaacatcagaaggaaaatcaattcgtttttccgaaaacaatatccgccctagcggaagaaaaaccatgggcgtcaaaggcattaagctcggttcaaaagaagacagagttgtaggaatgttggtcgttcgcagggaaggcaccattcttgttgcaaccgaaaaaggaatgggaaaaagaacggatgtgatacaatacagaagtcaaactcgtggagggaagggcgttatgaccatgcgctgtacagaaaaaaccgggaaaatggtaaacatcatggaagttgtggattcggatgatttaattattattactgattctggcgttttgatgagacaacctgttgcggctataagaaca

SEQ ID NO: 293948 - DNA, 460 bp, Unknown
  Bacterial polypeptide expressing nucleotide sequence isolated from the Sargasso Sea
aatgacaaaagatcaatttaattcaataagtctaaagaaatacgcagaagaatcttatctaaattatgctatgtatgtaattcttgatcgtgctctacctaatattggtgatggattgaaacctgttcaaagaagaatactatatgcaatgtctgaattaggcttagatgcatcatctaaatataaaaagtctgcgagaactgttggagatgtaataggaaagtttcaccctcatggagacagtgctgcatatgaagcaatggttttaatggctcaaaatttttcatttaaatatcctcttgtagatggtcagggaaattgggggtctcaagatgaccccaaatcttttgcggcaatgagatatacagaatcaaagcttacaaattttgcaaatctacttatttctgagctgaagtctggcacagttgattggcaacctaattttgatggctcgctttta

SEQ ID NO: 293949 - DNA, 988 bp, Unknown
  Bacterial polypeptide expressing nucleotide sequence isolated from the Sargasso Sea
tatgacagaccagcaatacaacgccgattccattgaggtgctgacaggccttgagccagtgcagcgccgtccaggtatgtataccgatactacccgtcctaaccacttaggtcaggaagtcatagataacagcgtcgatgaagctttggctggccatgccgacttagtgcatgtgattttgcatgaagaccaatcgctggaagtgatagacaatggccgtggtatgccggtggatattcacccggaagaaggggtatcaggtgttgaactgatcctttgtcgtttgcatgccggtggtaaattttccaacaaaaactaccagttctcaggtggtttgcacggcgtaggtatttctgttgtgaacgccctgtcaagccgggtcgatgtagcggtacgccgcgatggcaatgtctatgaaatagcttttgagcatggcaataaagtcagcgaactggcgattaccggtactgtaggcaaacgcaatacaggcacaagagtgcgcttctggcctgcgcctgattattttgattcgcctaagttttctgtcagccgcatgctgcatgtgcttaaagccaaagccgtattgtgtccaggcctgactatcaagtttgacgacaaggtcaacaaccagagttatcagtggtgttatcaggccggtatccgcgattatttaatggatgcggtcaaagacatgattgctttgcctgagcagccttttgtcggcagcttaagcgccagccatgaagcggttgaatgggccgtgctttggttacccgaaggtggcgagctggtgacagaaagttatgtcaacctgatcccaacggctcagggcggtacccacgtcaatggtttacgtcagggcttgttagaagcgctacgcgatttttgtgaattccgtaatttattgccgcgaggcattaagctcacgcctgaagatgtctgggatcgctgtagttacattctgtcgttaaaaatgcaggaacctcag

SEQ ID NO: 293950 - DNA, 523 bp, Unknown
  Bacterial polypeptide expressing nucleotide sequence isolated from the Sargasso Sea
ggtactgctgataatatcgcgacgagattaaaccttattgctttagaatatgaacagggttggtctggaaggattacacaggaccaaggtattcgcttagcaagagtattgagaggtgtagaagagctacgcactttagatggatccatgttaagatcaggagaggcaagaaaaaccggtacgtttactgaaagtttaaaggaagtctatcaaagccccgctacccttattcgaaaagatcaaagtcaaaccatctacggcccgttagaattactaaactcgattctaaaggaaggagaaaaaggacttacacttcaacgctataaaggtcttggtgaaatgaaccctgatcaactttgggaaacaacccttgatcctaacgctcgaacactattgcaagtcaagataaacgatgcggcagaggctgacgatttgtttacaaagttaatgggtgatgttgtagagcccaggagggaatttattcaaagcaacgccttaactgtagctaatttagatttctaag

SEQ ID NO: 293951 - DNA, 349 bp, Unknown
  Bacterial polypeptide expressing nucleotide sequence isolated from the Sargasso Sea
aatgaatttaattgatcaatataaagatatagaaatcgttgatgctcttgaagagagatacttagcttatgcgcttacaactattatggatagagcgcttcctgatgttaaggatggattgaaaccagtacatagaagacttctttatgctatgaggcagttaaatttgtcccctaattcttctttcaaaaaatcagcaagaatagttggcgaagtgatgggtagatttcaccctcatggagatcaagcaatatatgatacattagttagattagcccaagatttctctgttaggtggcctctaattaatgggcagggtaattttggaaatattgatggtgataatgct

SEQ ID NO: 293952 - DNA, 802 bp, Unknown
  Bacterial polypeptide expressing nucleotide sequence isolated from the Sargasso Sea
attgtcaaaaaaggcttacgattcaaaagcaattgaggttttgtcgggtctcgatcccgtcaaaaaaagaccgggtatgtataccgatacttcttgtccaaatcaccttattcaagaagttcttgataactctgtagatgaagctttatcaggtttttgtaagcgcattaaagtaaatctttataaggataatagcgttgaagtctcagacaatggacgaggcatgcctgttgatgtccatcctgagcataagctaacaggtgttgaattaattatgtgtaagcttcatgctggagcaaagttctctggagaagattatggtttttctggagggcttcatggagtcggagtttctgtagtaaatgctttatccaccaaacttaatgtaaaaattaaacgtgattcaaaagagtatgaaataaatttctctgccggagacaaagacaatgatttgaaatcaattggtgatgttggagctacgaattcaggaaccacaattagattttatccagacaaacaatacttcgaaacattagagataaacaaaaagagcttaaaacatcttctaaaggctaaggcagttctttgcccaggtcttcaaatagattactttgatgaaaaaaagaatgagagaattaaatggatttttgatgagggactgagtgactacctcgatgagttttcaggttgtaatgagaaacttcttgatgaaactattattctttctaagacttccgatgatcaagcattagatgtagcagtgaattggactgaagaggcttcaaataatttgctcaaagaa

SEQ ID NO: 293953 - DNA, 1450 bp, Unknown
  Bacterial polypeptide expressing nucleotide sequence isolated from the Sargasso Sea
gatgtcgcgaatcgccgtcgccgcggcgctcgtcatgctcggcgcgtgcgcgagccgcgacgggctcgcgccggccggcacgctgcgcggcgccgatacgcttgccgcatcgcgcagcctcgcgcaggtgcctgccgccgactggccggccgccgactggtggcgcgcgctgaacgatgcgcaactgagcgcgctgatcgacgaggcactcgccggcaaccccgatctcgcgaccgccgacgcgcgcgcacgcgaagcgcaggcgctggtgatcgaggcgcaggccgcgcggttgccgcacctcgtcggccgtgcgagcgcgaaggccgagcggctttccggcacccagttttcgtcgggcgagggcggcggcttcttcagccacacgcgcgagatcaatctcggcctgagctgggatctcgatctgtggggcggccgccgggccgcgtgggaagccgcgctcggcgaagcgcgcgccgcgcaagtcgatgcgcaggccgcacgcgtgctgctgtcggtcaacgttgcgcgcgcctacgtgaatctcgcatacgccttcgaccagcaggacgtcgcgcgggccgaatacgagcgggccgacgaagcgctcacgctcacgcgccagcgcgtcacgaaaggcatcgacaacgtcgcgcagcagcgccaggcggaaagcgaagtcgcggccgcgacgcgcgagcaggcccgcaccgcgcaggcgatcgacagtgcgcgcatcgcgctcgcgatcctgctcggcgcgggccccgatcgcggcctcgcgctggtgcggcccgcgccgttgccggccgccgcgctcgcggtaccggccgacctgccggccgcgctgctgggccggcgcgccgacctcgtcgccgcgcgctggcgggtcgaggcggccagccgcaacgtcgcggccgcccgtgcggatttcctgcccaacgtcagcctcaccgcgctgatcgggctcgcgacgcgtggcggcgcctcgctgttccaggccgcatcgcgcacctacaacgccagcccggccgtgagcctgccgatcttcgacggcggcgaacggcgcggcgtgctgcgcaggcgcgacgcgcaatacgacctcgcggtcgccggctacaacaagacgctgatcggtgcgatcggcgaagtcgccgacgatctgcaccggctgcattcgctcgccgtgcagaccgatgcgcagcagcgtgcgttcgactccgccaccgatgcgtggcggctcgcggacgcgcgctaccgggccggcgtcggcagctacctcgatgcgctcgtcgtgcgccagcaactgctggtcgcgagccgcgaggtcgccgcgctgcgcgcgcagcgcgcggaccagtcgctgcagctcgtcgccgcgctcggcggcggcttccgcgccgagccggacgacgccgcgcttgccgccactccttcccaacgtccttga

SEQ ID NO: 293954 - DNA, 706 bp, Unknown
  Bacterial polypeptide expressing nucleotide sequence isolated from the Sargasso Sea
atggcaagagaatatactgcaaagtcaattgaagtcctttctgggcttgatcctgtcaaaaaaaggccgggcatgtacaccgagacatctcgtccaaatcacctagctcttgaagtaatagacaatagtattgacgaagctcttggaggctttgcatctaagatcagtgtttgtttgttcaaagatggatctttgagtgtagaggatgatggaagaggtatgccggttgatatccatcctgatgaaggtatacctgcggttgaattgatatttactaggctacatgctggggcaaagttttctaatgaagattataaattctcaggaggccttcacggagttggcgtctctgttgttaatgctctgtcactttatctggaagcagaaataaaaagagatggaaaaaagtattcaataagatttgaagatagtgaaaaaaagatagatctcaaaactatcgatagcgtgggacaaaagaacacaggcactaaggtgacttttttagctgatccacagtattttgataatgcgaaaatatctgtaactcaactaactgcagccttaaaggccaaagcagttctatcgccgggtttaaagatttctttttttgatgaaaatacaggaaattcagaaagttggtgttttgtagacggactcgcctcttatctagctgcttcaaatcaaggaggggaagtagttccttcag

SEQ ID NO: 293955 - DNA, 1207 bp, Unknown
  Bacterial polypeptide expressing nucleotide sequence isolated from the Sargasso Sea
tatgtcgccaaaaggttacaagctatctccgacccaggcacaagcaattcttgatttaagacttcatcggttaacaggtctcgagcaagagaagattattgaagaatataaaaaagttcttgacttaatcaatgaatacacaaaaattctttcgcgcactgaagtactgatggatgtaattaaaaacgaattacatgaaactttatcagaatacgacgactctagattaaccgaaataaataatgactatacagatttagttgatgaggacttaatacctgacgaggaggttgttgtgacgctctcccatagtgggtacattaaatctcaatcgtcagatacttatcaagctcaaaaaagaggtggaagaggtaaatcctccacaaaaatgaaggatgaggatttcatagataaaatttggatagcaaatactcatgacacccttctttgtttttcaagcaaaggaaaactgtattggttgaaagtttatcaagtaccaatggccagtagaggagccagaggcaagccaattatcaatttgttgccgctagaggaaggggagagaattagtaccgtattgccaataagggagtttgatgaagattcctttgtttttatggccaccagcgatggaactgtaaaaaagacacccttgaaattattttcaaagccaagatcatctggaattatagccatcaaccttaaagatgattatttgattgacgcggcaattacaaatggaaaaaaggaagtactgctcgtagccagtaatggaaaagcaataaaattcaatgagaacgatgtaagagcgatgggtaggactgctcatggcgtaagaggcatgagactcaaagatgaccataaggtgatagctttatctatagtcaatgaagatttattactaacagcaaccgagaatggttatggaaaaagaacatcaataaaagaattctcgactcaaagaagaggtggtcagggagttatcgcaattaaaacatccgacagaaatggactaacgataggagcaattcaagtctctgatgatgatgagattatgttgattagttctaatggagttctgataagaactccagttgacggaatttcgatagtgggaagaaatactcaaggggtcaccttaattaagctagttgacgaacaaaaattagttggacttgcaaaaataatttctattgatgaagagtaa

SEQ ID NO: 293956 - DNA, 142 bp, Unknown
  Bacterial polypeptide expressing nucleotide sequence isolated from the Sargasso Sea
aatgacaaataaaaacacatatcaagcagactccatcaaagttttaaagggtcttgaagcggttagaaaaagaccaggtatgtatattggagatacagatgatggaactggtttgcatcatatggtctatgaagtttgttga

SEQ ID NO: 293957 - DNA, 622 bp, Unknown
  Bacterial polypeptide expressing nucleotide sequence isolated from the Sargasso Sea
atggcttccgcacaacaacagaaacaacagagcgtcgcaacggctgatcagtccgactttccggcgctactgaaccgcgagttctcccccaagaccgaccaagcccgcgaggctgttgatctggccgtccgcaccctggccgagcaggcgctcgccagcacctttaccatgagcgacgatgcctacaagagcatcgaagccatcatcggcgccatcgactccaagctctccgagcagatcaacctaatcctgcacaacgaagacttccagaagctcgaatccgcttggcgtggtctgcatcacctagtctccaacaccgagacggatgagaagttacgcatccgtgtaatggacgtctccaaggatgaactgcgccgcacgctgcgccgctacaagggcatcggctgggaccaaagcccgttcttcaagcgcatctatgaagaagagtacggccaactcggcggcgaaccgtatggctgcctggttgcggactattacttcgaccacacaccgccggatgtggagctgctcggttcgttggccaagatctccgccgccgcacacgccccgttcattgctggtgcatcgccatcggtgctgcaaatggattcgtggcaagagc

SEQ ID NO: 293958 - DNA, 274 bp, Unknown
  Bacterial polypeptide expressing nucleotide sequence isolated from the Sargasso Sea
ttaccgcacaacacagattattctgataatgcattaaaaaaaatggtaactgatatgcaattatggaaaaaagtaaggatgattggatctgcagcaatggcatcttgttatgttgcttccggaaagggtgacctttacaaagaaaatggtatatatttatgggacatagtcgctggtgcagcaattgtcagttcagctggaggatcagcgaaaatattgaatattcgagataattatcaagttgacgtagttttttcaaattcacatatataaa

SEQ ID NO: 293959 - DNA, 1162 bp, Unknown
  Bacterial polypeptide expressing nucleotide sequence isolated from the Sargasso Sea
gagctaataaagcacatcgcacaccttaaaggaattttggaaagcaagagccagaggatggacataataaaaaaagagcttatcgaaattcgtgaccaatacggggatgaaaggcggacagagattgttcctgtagattctgatttctcaatggaagacatgatagctgaagaagaagttgttcttactattacccaccagggatacataaagcgcacagctttgaacacctacagaacacaacggcgcggtggtcgcggagttcaaggggctatgagcaaggaagaagactttgtagagcatttatttatagcaaatacacataactatatgttgtttttcacagaccaggggaagtgttattggctcaaggtctatgatattccacaaggtggccgagccgctaggggaagggccattgttaatcttattggttgtgacccaggtgaaaaaatagaggcatttgttagcgttaaagagtttgatgaccagcactatattgtgatggcaacacgaaatggaatagttaaaaaaacagttctttctgcatatggtaagccacggaaaggaggcatatatgcaatagagatcagagagggcgataaacttatagaagcaagaatcactaacggtgaacacgatattcttttaggaacgaacgagggaaaatccataaggttttctgagaacaacgttcgtccaagcggaaggaaaaccatgggggtcaaggggataacacttggctctaaagaagatcacgtagttggtatgcttgtggtaaggagggaaggaacaattcttgtagcaaccgaaaagggaatggggaaacgcacagatgtcattcaatatagaacacaaaccagaggcggtaagggtgtaatgactatgcggtgcactgataaaacaggaaaaatggttaatataatggaggtcgtagactctgacgaccttattataataacagactcaggcgttttaatgagacaaccagtggctgacatcagaacgattggtcgagttacgcaaggtgtaaaacttgttaagctggatgacggcgcaagcatctcttcaataacaagagtcataagtgaggacgctacgccagcaaaagaagatgacgcagttcaggagaatgaagaggcatctagtgatgagtcatgat

SEQ ID NO: 293960 - DNA, 1114 bp, Unknown
  Bacterial polypeptide expressing nucleotide sequence isolated from the Sargasso Sea
aatgggtatctatgaggcatataaaactggaagaggaataatttatgtcagatctaaatcaaaagtagaggaaagcaaaactggaaagaaatcccttgttatctatgaaatacctttcatggtaaataaagctagaacccttgaaaaaattgcagaacttgtaaaagagaaaaagattgatggaattagtgaaattagagatgaaagcgacaaagatgggttaagaatagttatcgacgtaaagaagggagagtccgttgaggttttagaaaataatctttttgcgcaaactcagcttgaacaatcatttggaataaactttaccgttctagttgatggtcaaccaagagtacttaatctaaaagagattcttcaggaattcttgaaacatagaaaagatgttgttttaaaaagaacaaaattcgagcttaggaaggctaaggaaagaggtcatattgtagaaggcttgatggttgccatagctaatattgatgaaatcataaagattattaaaaaatctaaagatccaaagatagcagctcaagagttagttaaaaagaaatggaaagctgggcctgtagaagcaattctcaagaaagttggaaaagatgcatgcaagccaaagggtgtagcaaaaggttttgggttatcagggaagtcatataaactttctaatgatcaggcaaaagccattcttgaattaaggcttggaagattaactggacttgagcaagacaatctatctagtgagtttaattctctaattgaaaagattacttcacttcaagaaatcattgatgataaaggggttcttcaaaaggtcatagaagatgagcttaatgagataaaagaaacttatggtgatgatagaagaacagatataaatgacactagacaagatatttcaaatgaagatttaataccagaggaaacaagagtattaacaatatcaaggacaggatacgcaaaaactcaaccgcttgaagaatatagagagcagagaagaggaggccagggcaaagccgctgcctcagttaaagaagaagatgttattcaaaatctttatgtattaagcagtcattcacaaatgctttgttttacaacaaaagggaaa

SEQ ID NO: 293961 - DNA, 352 bp, Unknown
  Bacterial polypeptide expressing nucleotide sequence isolated from the Sargasso Sea
gatggacgacgacaacactctcgaccttttcaccgagccgccgccgcccgagggcgacattctgacgctcggcaattacgcggaacgcgcctacctcgactatgcggtgagcgtggtcaaaggtcgtgcgctgccggatgtgtgcgacggccagaagccggtgcaacgccgcatcctcttcgccatgaacgagatggggcttggcgacaatgccaagccggtcaagtcggcccgcgtggtcggcgacgtgctcggcaagtatcacccgcacggcgaccagtcggcgtacgacgcgttggtgcgcctcgcgcaagacttctcgatgcgctatccgctgatcgacggccagggc

SEQ ID NO: 293962 - DNA, 464 bp, Unknown
  Bacterial polypeptide expressing nucleotide sequence isolated from the Sargasso Sea
tgatgatttgcgatatgataaggttataattatgaccgatgctgacgttgatggtgcccatatagcatctttgcttatgactttcttttttacgcaaatgcggcctctaattgactatggtcacctgtatttagcctgtccaccactttttaggcttacgcaaggatcacaccgtgtatactgtattgatgaagttgagagagatacttggcttagtaacggactaggtggccgtggtaaaatcgatgtgagtagatttaaaggtctgggtgaaatggatgctaaagatctaaaggaaaccacaatggatccttcatctagaaaactcatccaagtaagtattgatgacgaggagcccggcgaaaccagtaatttggttgaccagcttatgggtaaaaaacccgaacttcgttttcaatatattcaagaaaatgcaaaatttgctgatgaattagacatataat

SEQ ID NO: 293963 - DNA, 2006 bp, Unknown
  Bacterial polypeptide expressing nucleotide sequence isolated from the Sargasso Sea
aacaaatattccaccacataatgctacggaaatcttagatgcttgtattcatatccttgataaccctagttgcactattgaagatctgcttaaaatcgtaaaaggtcctgatttccctttaggtggaattattactggtatagatggaattgaacaagcatatagaacaggccaaggaaaggtttatacaagagcaaaaacctcatttgaacaaataaaaggcggtaaagaagcaattgtaattactgaaataccattcatggtgaataaggcacgtatgctcgaaagaatagctgaactagtgaaagagaaaaagctagagggtataggtgaaattagagatgaatctgataaagatggaattagagctgtaattgaattaaaaaaaggtgaggtcccagaggttgttcttaacaacttatttaaaaattcacaattagaacaagtttttggaattaacaatgttgttctagtagatggtaggcctaaattatgtaacttagaagaacttctaaatatttttcttgaacatagaaaaacagtagtaacaaacagatcattatttgaattaagacaagcaaaagagagagggcatgttgttgaggggttaattgttgcaattgcaaatatagatgaagttattgatatcataaaaaaatctgaaaatgttaaggttgcctctgagaagctttgcgaaagagattggtcagctgatacaatcaagcctttacttgataaggtagctgatccagatatatgtaaacctgagggacttgaaaaaggttttggtctcaacggaaaaaaatataaattgtctgttgttcaagctaaagcaattcttgagttaagattaagtcgattaactgctcttgaaactgataagttgaaagaggaatacgaagaactaattaaagaaatcaaaagacttcaagagatactctcaacagaatcggttcttgtaaaagttgtaaaaaaagaactagaagaaattaaatcagattttggcgatgaaagaagaactgaaataatcgaaaaacgactaacaattgatgatgctgatttaataccagaggaggagagagtattcactatatcaaataatgggtttgtaaaaactcaacaacttgcagaatacagatctcaacgaagaggtggagttggaaaaacagcttcagctttaagagatgaagattttattaaacaagttttagttctgaacactcatgttcaagttctttgttttacaactaaaggtaaagtacattggcttgaaatctataaattacccgtaatgtctcggactgcaaaaggtagacctatttcaaatgtacttcctttagaagaagatgaaagagtaacctcttttttaccagtagatgagtataaagatggacattacattttaatggctacaagaaacggagtagtaaagaaaacagttttaaaagcttttgaaaaaaaatacgctccaggactcagagcaataaatttagatgacggcgataaacttatcggtacagtaattacagatggttccgatgaaatatgtttagcttctgaatccgggaaagcaataagatttaatgagactgatgttaggccaatgggaagatctacgagaggcgtaaagggaatgaatattcacaaagaggataaagtgatttctattatgaaagtaattcctgaggctaaacttttaaccattagtcagaatggttatggaaaacgaacaaatatttcagaatttagtgggcaaaaaagaggcggaaaaggtgttattgcactaaatacgtcacaaagaaatggaaaaatgattgcagcagttcaagtaattgatggagatgaggttatgttaattggaaaccgcggaacattgataagaacacaggttgaccaaataagtgttattggaaggaatactcaaggagtaaaagtagtatcaactagagatgaagaaagtcttgttgatgcagtaggatttaaagaaactcttgatgaagagtaag

SEQ ID NO: 293964 - DNA, 922 bp, Unknown
  Bacterial polypeptide expressing nucleotide sequence isolated from the Sargasso Sea
attgtcaaaaaaggcttacgattcaaaagcaattgaggttttgtcgggtctcgatcccgtcaaaaaaagaccaggtatgtataccgatacctcatgcccaaatcatcttattcaagaagttctggataactctgtagatgaagctctatcaggttattgtaagcgtattaaagtaaatctttataaagataatagcgttgaagtctcagacaatggacgtggtatgcctgttgatgtccatcctgagcataagctaactggcgttgaattaattatgtgtaagcttcatgctggagcaaagttctctggagaagattatggtttttctggagggcttcatggagttggagtgtctgtagtaaatgctttatctagcaaacttaatgtaaaaattaaacgtgattcaaaagagtatgaaataaatttttctgccggagacaaagacaatgatttgaaatcaattggtgatgttggagcaacgaattcaggaaccacaattagattttatccagataaacaatatttcgaaacattagaggtaaacaaaaagagcctaaaacatcttttaaaagctaaggcagttctctgcccaggtcttcaaatagattactttgatgaaaaaaagaatgagagaattaaatggatttttgatgagggactgagcgactacctcgatgagttttcaggctgtaatgagaaacttcttgatgaaactattattctttctaaaacttccgatgatcaggcattagatgtagcagtgaattggactgaagaggcttcaaataatttactcaaagaaacttatgtaaacttaattcctactgcattaggtggctctcatttaaatgggtttaaatccggtcttcttgaggcaataaaagaattctgtgactacagaaatttattccaaaaggaataa

SEQ ID NO: 293965 - DNA, 160 bp, Unknown
  Bacterial polypeptide expressing nucleotide sequence isolated from the Sargasso Sea
atggaaaaaaatattctagaaaacaacaaacaatttaaacctatttttgtacaagatgaaatgagctcatcatatttatcttatgcgatgagtgtaatagtgagcagggctcttccagatgtgagagatggtttaaaaccagtgcacagaagaataattt

SEQ ID NO: 293966 - DNA, 519 bp, Unknown
  Bacterial polypeptide expressing nucleotide sequence isolated from the Sargasso Sea
tagaagatttaagatacggaaaaattataatcatgactgatgcagatgttgatggctcacatatccgagcactacttttaactttctttaataatattccatttaataaattaatagaacaaggtcatgtatatttagcccaaccacctcttttcaaaataaataaaggttctaaaggtatttatataaaagatgagaaagatcttgaaaattatataatcaaaaattctaaggatataaaaaaagttaagaaaaactcgaaagaatttgatagaatgattcaattagaaaaatctaaattaaatattcaaaggtttaaaggacttggagaaatgaatcccgaagaattatggaatactacattaaacccagagactagaaatttacttcaagttcaatattcaaaaaatcttcaaaaagatcaaaaccttatacaaacattaatgggtaacgatgttgcttctagaaaagattttattgtagataatgctataaatgttgttaatttagatatttaat

SEQ ID NO: 293967 - DNA, 1948 bp, Unknown
  Bacterial polypeptide expressing nucleotide sequence isolated from the Sargasso Sea
atggccaccagcattccccctcacaatctcggtgaagtggtggacggcctggtggccttgattcgccagccggaactgggcgacaacaaactgctggccctgattccgggacccgattttccgaccggtggagaggtactgctcagcagtggcttacaggacacctacctggccggacgcggcagcatccccatgcggggggttgcccacatcgaagaggtacaacccgggaaagggcgtcacaaacgcaacgccgtcgtggtgacggaacttccgtatcagctgagcaaagccggctggatcgaaaaactggcggaatcggtgaacgacggaaagatcggcggcattgccgacatccgtgatgagagcgaccgcgatggcatgcgcgtggtggtggagcttcgccgcgatgcggacccgaccaaggtgctggcggacctgcaacgacgcacagcgctgcagagcaacttcggagccatcctgctggcccttgtggatggtcagccacgccagctctcgttgcgtcagttgttgcagacgttcctggattacagggaactgaccctgatccggcgcaccagctacgccctgcgcaaaacagaggatcgacttgaggtggtcgacggcctgatcaacgcgctgaacaaccttcaagcggtgatcacgatgattcaggaggcccgggatgccgcctcagcccgagccagcctgatggtgcgcctcgacctgagtgaacgtcaggccgatgccgttctggcgatgccactgcgcagattaacgggtctcgaacaggagagcctgcgccaggaactggaggagttacgggcggaacgggagcggttacgcctgttgctcgacaaccgcgatcagttgctcgatgccatggtcgatgaactgaagacgttgaaaaaacgcttcagcacaccgcgtcggacacgcctggtggaaggcggagatgccctgattgcggagcgggccgccagccagcgacccaacaccgagctgctgcgtcagcaggccctggcggctctgcccgccgatgcacgcctgctgatccaggccgatggccaggtgaaactggtcagcccccaggtgctgggccgcatgcacctgtctgaagcctgtcccgtgggtgaccatccttcaccggcacagctcatccttccgatcgaaccctcaccgcggcttctcggggtgagcgccagtggtcgagtcgctttgatccgttgggaattcgccggacaacaacctggatccctggagaagtttctgcccagtggacttgatggtgatcccctgatcgccatcacacaactcccaacgggggatggcaaagagctcagcctgggcctgctcagcagtgatggacgcttcaaacggcttcccctgacggaagttctggatctttccggccgagccacgagcatggtgaagctgaaggaaggcgtgcgcctttgctctgcggtgatctgccgtgaacacagcgacctggtgctggtcagcagcatgggtcgtctgctgaggctgccggtgaatgattccgtgctgcccaaaatgggacgtctggcccaggggccgatgactatgcgtctccttccaggggaagaactggtgggcagcctggccatgaacgttgccgagacggatcccaccctgctgctggtgagccgtcacggtcagatgacgcgaatcgacctgaccccgctgcggcgttgtcaacgcggagatctggggatgatggcggtgcacctcagttcaaatgaagattccgttgtaggactctgttcaggagatgtgctggctgggattgtgaccgatcagaagcgtcatggacggctggacgccgccgcagtggagcttgctgctgcggggaaggcctggggcgatcaactgactctggacagcaacgaacagattgtttccgtggtcgccctgcagaccctctgat

SEQ ID NO: 293968 - DNA, 310 bp, Unknown
  Bacterial polypeptide expressing nucleotide sequence isolated from the Sargasso Sea
aatggataagaaaaacttcacttccatctcgcttcaagaagaaatgcaacgttcttacttggagtatgcaatgagcgtcatagttggacgtgcgttgcctgatgcaagagatggtcttaagcctgtacaaagaagaatcatatttgcaatgcacgaattaggtttaactcctgataaaccattcaggaagtgtgcaagagttgttggagatgtacttggaaaataccatccacatggagatcaagcagtttacgatgcattggtaaagctggtacaaaatttctcaactaagtattcctactctgacggc

SEQ ID NO: 293969 - DNA, 1410 bp, Unknown
  Bacterial polypeptide expressing nucleotide sequence isolated from the Sargasso Sea
atattttagaagggttggctgttgccctcgcaaatattgatcccgttatactattagtaaaaaaatcagcgagtcctgcagcagcaaaaatagaattacttaaaggagtttgggaatctagtgttgttgttgaaatggtgaaagattctggctcggaaatttcaagacccgataatttacaacatgaatttggattacataaagatggatatcgattatctccagagcaagctcaagcaatcctcgaattacgcttgcaaaaattaactggtcttgaaaaagaaaaaatacttaaagaatatagtgatttattaaaaacgatcacagatttattagatattctttcacgaccccaaagactaatgaaagtaattcgcgacgagttaaaagatatacaagatcgttatggtgatgaacgtaggacagagattgttcaaacacagcgagatttaaatatggaagatttaattacagaggaggatgttgttgttacattatctcatgcgggttatgccaaatcccaaccaatcaatacatatcgttcacaacgtcgaggtggtagaggaaaggcagcaacctctgtcaaagaccaggattttattgacaagttatttattgccagtacgcatgacacattattgtgcttttcaagtcgaggtaaagtttattggcttaaagtatatgagttaccacaagctagcagaatcgcacgcggcaaacctataataaatttattgccattagatcagggagagcaaattaatgccgtattaccaataagagattatagcgaagatatgtttgtatttatggcaaccgcaaatgggaccgttaaaaaaacatcgttgatcgaattttcacgtcccagaccgagtggaatacgtgcaattgaacttgtcggcgggaataagcttataggtgcagagttgactgacggtaagcgtgacatcatgctatttagcgatgccggcaaagttgtccgtttttctgagtctcacgttcggtcaatgggtaggactgctaagggcgttcgcggcattcgtctatctaaggggcaaaaagcaatatctcttattattgttgataatcaagacatcactgtcctaaccgcaactcagaatggttatggtaaacgaacgaatattaaggattacccacagaaatcacgaggcggagtcggggtaatatcgatacaggtaacgaagcgaaatggccctgttgtcagtgcggtaactgttgaaaatgatgatgaaatcatgttgattagtgatcaaggtacgctaatcagaacacctgttaaagacatttctgtatttggacgtaacacacagggcgtcagattggtgaatcttagtgaactagagcatctagtgagtatcgaacgtattgttgaatataatgacaattaag

SEQ ID NO: 293970 - DNA, 2239 bp, Unknown
  Bacterial polypeptide expressing nucleotide sequence isolated from the Sargasso Sea
ggaccctttagaaagtgttcaaaggtggtgggagatgttatgggtaattatcatccacacggaaacgatgccatttatggaactcttgttagacttggtcaaaactttagcaccagatacccacttatcgagccccagggtaactttggcacacccgacgatccgcccgcagctatgagatatacagaatcaagaatgtcaccactttcatcccagctcttagatggcattgatgaagaaactgttatctttgaacccaactattcaggtgaaacaagcgagccaagagttctaccaggaaggtttccaaatcttttaattaatggagctgagggcatcgctgttgctatggcgacaaatatgccgccatataacctcagagaaataactgaggctgttaaatttacgctaaatacaaaagatccaaaacctagagattatttgaaaataattaaaggtccagattttcctacaggcggattaattgttgaaaccccaacaataaaagatgcaattttaaaaggaagaggatctataaagttaagggctgttgctgacattgaagagctaggaaaaggtaggtcagcaatagtagtaaaggagcttccctatcaagcctcaactgacaggattatggaaaaaatagcttcattagttcaagacaaaaaactaacgggtgtgtctgatttaagaaatgaaagtagcgatagaaacggaacaagacttgttgttgaactaaaaagagacgcagtgccacaggttgttttaaatgatttatttaaatacacgcagcttcaagatacattttctgtaaactctgttgcattagttgagggtgtgccaagggttctatcggtaccagaactaataagatattatattgaccaccaaattgatgtaatccaaagaaggtctcaatttatgcttgataaagcaaaatcacgattacatattgtagatggtctattgcttgctctaaataaaattgatcaaattataaaagtcattaaatcctcaaaagatgttgaagctgcacgaaaatcgttaatgagtaaatttaaactttcggaaatacaagcaactcatattttagacatgcccctaagaagactaacggcactagaaaaagagaaacttgaagaagaaaagaaagaactaaaacaaacaatcaaagacctaactgcaatattaaaaagcagaacaaaacaaaacgaaatacttatagaagagctggacgcaataaccgaaaaatttggagatgaacgaagatcaagacttgttccagacgtaggagaggtaaagattgaagacctaattgaagatgaagaaattattgtctcaatatcatctgaaggatatataaaatctgttccatctacatcatataaaaaacaaggaaggggcggaaagggagtaaaagcctcatcatcagaagaagatgtgatagaacaccttttatcaacttccgtacattcctatttattattttttacagacaacgggaaagtttatagagctaaagcacatgaaattccaaaaactaatagaacagcaaaaggatctttaattcataatgttttatcaatgggccaggatgaaaaagttcaagccataattgacacaagagattatgaaactgaaaagtttcttctgattatgaccgaaaaaggcacagttaaaaagtcaaaatttaaagactttgattcaaactataagtctttacaagcaataaaacttaaagatgatgataaagtcgtatctgttaaaacaacttcaggaaaagaagacattattctagtttctcaaaaaggacaggcaattagattcgatgagaacaacctaaaacctcaaggaagaacggcaatgggcgtaaggggaattaagcttagagaaggagataaagttgttggcgcggcaacctcacgagaagaaacacttttatttattactgcaaaagggtatggaaaaaggactaagcttgatgagtttagaagagccggaagaggtggcatcggcgtaaaagctctcaaagtcacagaagccaaaggagacttagtcggagcaagatcggtagatgaagacacagaggttatgcttatgagtactggcggaacggctataagatgtgctgtaaagcaaataaaacaaatgagtagagttgctcagggagtaaaggttatgaaactttctaaagaagaagaaatatcagcatttattcctattaaaacagagtcgtaat

SEQ ID NO: 293971 - DNA, 1138 bp, Unknown
  Bacterial polypeptide expressing nucleotide sequence isolated from the Sargasso Sea
ttgtcaaaaaaggcttacgattcaaaagcaattgaggttttgtcgggtctcgatcccgtcaaaaaaagaccgggtatgtataccgatacctcttgtccaaatcaccttattcaagaagttctggataactctgtagatgaagctttatcaggtttttgtaagcgcattaaagtaaatctttataaggataatagcgttgaagtctcagacaatggacgaggcatgcctgttgatgtccatcctgagcataagctaacaggtgttgaattaattatgtgtaagcttcatgctggagcaaagttctctggagaagattatggtttttctggagggcttcatggagttggagtttctgtagtcaatgctttatccaccaaacttaatgtaaaaattaaacgtgattcaaaagagtatgaaataaatttctctgccggagacaaagacaatgatttgaaatcaattggtgatgttggaacaacgaattcaggaaccacaattagattttatccagacaagcaatacttcgaaacattagagataaataaaaagagcttaaaacatttactaaaggctaaggcagttctttgcccaggtcttcaaatagattactttgatgaaaaaaagaatgagagaattaaatggatttttgatgagggactgagcgactacctcgatgagttttcaggttgtaacgagaaacttcttgatgaaactattattctttccaaaacttccgatgaccaagcattagatgtagcagtgaattggactgaagaggcttcaaataatttactcaaagaaacttatgtaaacttaattcccactgcattaggcggctctcatttaaatgggtttaagtctggtcttcttgaggcaataaaagaattctgtgactacagaaatttgattccaaaaggaataaaaattaactcggatgacatccttgctaactgcatctttgttatttcttcaaagctaaagaatcctcagttcgctggtcaaactaaagagagacttgattctaaagatcatatgagctttgtttcatcttcaacaaaagattccctaagtatttggctttaccaacataccgaagagggtgaaaagattgcagatctagccattgccgctgctcaaa

SEQ ID NO: 293972 - DNA, 340 bp, Unknown
  Bacterial polypeptide expressing nucleotide sequence isolated from the Sargasso Sea
tatatctatattgcttgtccccccctctataaagttgagcgcggaaaaaatcatacgtattgctacaacgagcacgacttgcagaagaccctggagggttttggcgaaaaagccaactacaccatccagcgattcaagggtctgggcgaaatgatgccgcagcaactgtgggagaccacgatggatcccaccacccgcaccatgaagcgcgttgagattgaagacgctgctcaggccgatcggatcttcacgatcctgatgggtgacaaggtggctcctcgtcgtgaattcatcgagacgcatagcgcggaacttgatttggctgatctcgacatctgat

SEQ ID NO: 293973 - DNA, 634 bp, Unknown
  Bacterial polypeptide expressing nucleotide sequence isolated from the Sargasso Sea
aatggaaatgttaatgatttaaaaactaaaaccttatcaaaaatgatttcttcaaatgaagtggtaactctaataaatgctttaggattagacccaaaagtagaagagatagatttaaaagatttaaggtatggaaaaattattataatgacagatgcagatgtagatggctctcacattcgagcattattgcttactttttttaataacaaaccatttagtaaacttatagaaaatggttatgtttatcttgcacaaccacctttgtttaaaataaataagggttcaaagggaatttatattaaagatgaaaaagagctttatcagtatattttaaaaaattcaaaagagctaaaaaaatttaaaaaaggttcaagagaatttgaaaaagcttattctcaagaaaaatctttgttaaatatccaacgttttaaaggattaggtgaaatgaatcctgaagaattatggaaaactactcttaaccctgaaacaagaaatttacttcaggttcgatattcaaaagatttaaaaaaagatcaagatattatacatacattaatgggcaacgatgtatctttaagaaaagattttatattttctaatgcaattaatgtatcaaatttagatatataaa

SEQ ID NO: 293974 - DNA, 694 bp, Unknown
  Bacterial polypeptide expressing nucleotide sequence isolated from the Sargasso Sea
gttttacctttaagaggtaaaattcttaatacttttacggagttaaatggatcaaaaaaaaatggacatacaaatgatctaagaacaaaggtgctatcaaaaatgatgtcatcaaatgaaattgttactttgataaatgctttaggacttgatcctaaaaatgatgagattgatttaaaagatttgagatatggaaaaataattataatgacagatgctgatgttgatgggtcacatattagagctttattacttacattttttaataataaaccatttaataagttgattgaaaatggtcatgtatatttagctcaaccgccattatttaaaattaataaaggatctaaaggaatttatatcaaggacgagaaagaattagaggaatttatagtaaaaaattcaaaagatctaaaaaaaattaaaaaaggatccaaggattatgaaaaatctttacaagaggaaaaatcaaaattgaatatacaaagatttaaaggtttaggagaaatgaacccagaagaattatggagcacaacactggatcctgaaactagaaacttattgcaagtacaatactcaaagaattcgcaaaaagatcaagatcttattcaaactttaatgggaagcgatgtatcttcaagaaaagattttattgttgataacgcaataaatgtttcaaatttagacatttaaa

SEQ ID NO: 293975 - DNA, 907 bp, Unknown
  Bacterial polypeptide expressing nucleotide sequence isolated from the Sargasso Sea
aatgagaggaaaaacttcaattgaaaatgtaagaaaagatagagaagcaattattatttcagaagtcccttatcaagtaaataaagctagaatgattgagcaaattgctgaagcggttaaaaataaaaatatagaaggaatatcagatttacgtgatgaatctgatagagtaggagtaagggttgtagttgagttaaaaagagatgctactcctgaggtcgttctaaatcaaatttacaaacattctcctctgcaaacatattttggagttaatatgttagctttaaatggaggcaggccagagcaactaagcactaggcaaattttagactcttttttaacttttagagaagaggtaataactagaagaacaatatttgacttggaaaaagctagagatcgagctaatattttagttggtctagcattagctgtatccaatatagatgaagttattaagttgatcaaatcttctaaagactcagacgaagcaaaaaaattattattagataaagattggaaagcctcagatatagccgatttaatagatttaattggagatcctaatgataaggctgatgagaatgatatgtataaattatctaataaccaagcaaaagctattcttgaattacgtttacaaagacttacaggtttagaacgagataaaatagtagaagaattaaaagaaatagtttctaaagttgttgaactgctttcaattttgaggtctagagataagttaatgaatattatgaaggatgaatttactaatattaaagagcaattttctgtaccaagaagaactgaaatattggatatagagataaatcaagatgtggaatctcttattgaacgtgaagatatggtggtaactcttactaatagtggatatataaagcgtaca

SEQ ID NO: 293976 - DNA, 920 bp, Unknown
  Bacterial polypeptide expressing nucleotide sequence isolated from the Sargasso Sea
catgacgaaggattataatgcctcagacatcgaggtcctcagtgggcttgaaccggttcaaaaaagacccggtatgtataccgacactgactgtccaaatcacttagcatatgaggtcatcgataatagcgtagacgaggctattgcaggctattgtaaaacaattcaagtggatctttataaagatggctctattcaagtcagagatgatggacgaggcatgcccgttgatgatcatcctgaggaaaaaatacctgctgtcgaattaatcttaactaggcttcatgcaggcgcaaaatttgataacaagagctataagttttctggaggattgcatggtgttggtgtttctgtggtcaatgcactctcaaagaatctagaggtatggatcaaaagaggtgggcaagaatacaatatgagcttcagcaatggtgacaggacatcagagcttgagatcgttgatagtgttggaaaagccaacactggaacagccatacgcttctggccaaatgagtcgtattttgattcagccgatataagacttgatgaaataaaacataaccttcgtgcaaaagcagttctatgtccaggactaaagattaaatttaaagacgaagcgactggcgaaaaatgtgaatgggagtatcaagaaggagccagtgaatatctggtcgaaatgcttgaaaatattgaatgcattccatcaattccgttttctggtaaagcaaattcagatgaacaagagcttgagtggagcatgacatggcccgatagagatcatgaaggtattcaagaatcctatgtcaatctgatacccaccaaacatggtggtactcatgtgtcaggctttagatcaggattatcagagtcagtgaaagagtttgctgattatcggaatcttctaccgagaggtgtaaaac

SEQ ID NO: 293977 - DNA, 997 bp, Unknown
  Bacterial polypeptide expressing nucleotide sequence isolated from the Sargasso Sea
tatgacaacattaaaagagacggtttacgacgaaagcaaaatactaacgctttcatccctagaacatatccgtttacgcccaggcatgtacattggacggcttggtaacggagcccaccccagtgatggcatttatgtcctattgaaagaaattgttgataactcgattgatgaatttattatgggtcatggaaaacgcatagatattaaaatcgataatggatcagtaaatattcgtgattacgggagaggaatcccgctgggtaaggtagttgaatgtgtttctatcataaacactggtgctaaatacaacgatgaagtgttccaattcagcgtgggccttaacggcgtgggtacaaaagcagtaaacgcactatcagaaaattttgaagttatttcctatcgagaaaataaaatgctttcggcatgctttaaatccggagaacttaagacaaaaccgctttcacaagatactaatgagagcaacggtacaaaaatcagttttactccggatacaaaaattttcccaaattacaattatgatatcggaactatccgtaaacagctctggaattacgcatatcttaacaggaaactgacaataactttaaacggagaaaagtttaaatcagaaaatggcctgcttgatttactcaatgaagaagtgaacgacacaaacctttatccaatcgctcactgccagtcagaacaattagaaatggcattgacgcacaccgagcattatggtgaagaatattacagctatgtaaacggtcatcatacaaatgatgggggtacacatctttcctctttcagggagggcattctcaaagctgtaaaccagttttttaattcaagttttgaaggtcctgacgtaagagacggaattgtaggtgcagtagcaattaagttgcaggaaccagtttttgagtcacagactaaaaataaattagggaactatgatcttcgttcatggctaatgccaatggtacgggat

SEQ ID NO: 293978 - DNA, 193 bp, Unknown
  Bacterial polypeptide expressing nucleotide sequence isolated from the Sargasso Sea
atgcaaaaaatagaaaatagtaaaaattcaaatattaaacccatagcaatgtatgatgagatgagctcatcttatctttcgtatgcaatgagtgttattgtaagtagagcgttaccagatgttagggacggtttaaaaccagttcatagaagaattatttatgcaatgtataaaggtggttttgattggagca

SEQ ID NO: 293979 - DNA, 217 bp, Unknown
  Bacterial polypeptide expressing nucleotide sequence isolated from the Sargasso Sea
atgccagaaattgaaaaaattaaaaacaataatataaaacctatagctatgtatgatgagatgagctcatcttatctatcatatgcaatgagtgtaatcgtaagtcgagctcttcctgatgttagagacggcctcaaacctgttcatagaagaattatttatgctatgcataaaggaggttttgattggtcaaaacaatttagaaaatcagcaagaa

SEQ ID NO: 293980 - DNA, 394 bp, Unknown
  Bacterial polypeptide expressing nucleotide sequence isolated from the Sargasso Sea
gatgccaaaacaatatgatgcaaaatcgatagaggtgctttctgggcttgatccagtaagaaagcgccctggcatgtatacagatacttcttgcccaaatcatttaattcaagaagtgctagacaattcagtagatgaagctatagcaggacattgcgctgcaataaaagtatctatttttaaagatggtttcgtagaaattagcgatgatggcagaggcatgcctacggatatacatcccgaacataagctaagtggcgttgaattaattttaagtaaattacacgcaggtgctaagttttctggagaggactataatttttcaggtggtttacatggcgttggcgtttcagtagtaaatgcactctcatcaagcttaatatcaaccataaaa

SEQ ID NO: 293981 - DNA, 1769 bp, Unknown
  Bacterial polypeptide expressing nucleotide sequence isolated from the Sargasso Sea
tagaccaacaggacctttcagaaagtgttcaaaggttgtaggtgatgttatgggtaactatcatccacatggaaacgacgctatatacggaaccttagtaaggttgggacaaaattttagtactagataccccctgattgaaccacaaggcaactttggaacccccgacgacccacctgctgctatgagatatacagagtctcgaatgtcatctttgtcttcacaactattagatggaattgatgaagagacagtagactttgagcctaattattctggagagacaagcgaaccaaaagtattaccaggaagatttccaaaccttttaatcaacggagcagaaggcatagcggttgcaatggcaacaaacatgccaccctataatcttaaagagattacagaggccgttaaatttacattaaaaacaaaagatccgaaaccacgagattatttaaaaataataaaaggtccagactttcctacaggaggattaattgtagatactcccacgataaaagaagcaatacttaaaggcagaggatctataaagcttcgagctgttgcagacatagaagaattaggaaaaggtaggtctgcaattattgttaaagagcttccttaccaggcatcaactgacagaattatggaaaaaatagcatctttagtacaagataaaaaattaactggagtctcagacttaagaaacgaaagtagtgacagaaacggaactaggcttgttgttgagttaaagagagatgctgtaccacaagttgtattaaatgaacttttcaagtttacacaacttcaagataccttttctgttaattcagtagctcttgttgaaggagtaccaaaagtattatcggttcccgaacttattagatactacattgatcaccaaatagatgtaattcaaagaagatctaaatacagacttgaaaaagcaaaagcacggttacatatcgttgatggcttactacttgcattaaataaaatcgatcaaataataaaagttattaaatcttccaaagatgtggaggcagcaagaaaatcactgatgagtaaatttaaattatcagaaatacaggcaacacacattcttgatatgcccctaagaaggttgactgcattggaaaaagaaaagctcgaagacgaaaagaaagaactcaaagaaacaattaaagaccttacagcaatattaaaaagtagagcaaaacaaaatcaaatacttattgaagagcttgatgcaataacagacaagtttggtgacgaaagaagatccagaattgttccagatgttggagaggtaaaaattgaagacttaattgaagacgaggaaattattgtttctatctcatctgaaggttatataaaatcagttccttcaacatcctataaaaaacaaggtagaggaggcaagggtgttaaagcagcttcttcagaagaagatgtaattgagcacctcctttcaacatctgttcactcttatttacttttctttactgacaatggaaaagtatacagagctaaggcacatgaaattccaaaaacaaataggactgcaaaaggatctttaattcacaatgtactgtcaatgggacaagatgaaaaagttcaggcaataattgacacaagggactatgaaacagaaaaattcttattaataatgacagagaaaggaacggtaaaaaaatcaaaatttaaagattttgactcaaactataaatcattacaagccataaagttaaaggatggtgataaagttgttc

SEQ ID NO: 293982 - DNA, 235 bp, Unknown
  Bacterial polypeptide expressing nucleotide sequence isolated from the Sargasso Sea
aatggcagatcaatatacagcatcctcaattaaggtcttaaagggcttagaggccgtgagaaaaagaccgggtatgtatatcggtgatactgatgatggcacaggtctgcaccatatggtttacgaggtgcttgataattctatcgatgaggcgcttggaggatattgtgacaacattcaaataattataaataaagatggttcagcaacaatctctgataatggtagaggaata

SEQ ID NO: 293983 - DNA, 223 bp, Unknown
  Bacterial polypeptide expressing nucleotide sequence isolated from the Sargasso Sea
aatggcaaaaaaatctatagaacccaaatacgattcttccaacattcaagtcctaaaaggtttagaggctgtcaagaaaagacctggaatgtatataggcgatactgatgatggttcgggtttgcatcatatggtttttgaggtcttagataactgtattgatgaggcaatggcaggacactgctcagaaatacaagtagtaattaataaagatggttcagtg

SEQ ID NO: 293984 - DNA, 187 bp, Unknown
  Bacterial polypeptide expressing nucleotide sequence isolated from the Sargasso Sea
atgtcaggtgatacgtacgattcaggcagcattaaagtattaaaagggctagaggcggttaaaaaaaggccaggaatgtatatcggggataccgatgacggcactggacttcatcatatggtttttgaagtgcttgataactcaatagacgagggaatggctggcttctgtaagcagatagatgtag

SEQ ID NO: 293985 - DNA, 685 bp, Unknown
  Bacterial polypeptide expressing nucleotide sequence isolated from the Sargasso Sea
tctgattgtaatagcgaagacttaaatgaaacagaattatttctagttgagggtgattctgcaggtggatctgcaaaacaggctagagaaagatcctttcaagcaattatgcctttaaggggaaagattctgaatacttgggatttagaaagccaagaaattattaaatcacaagaaataaaaaatctgtcaacagcaattggtgtattaccaggaaattctgatatttccggacttagatatggaaaaatatgcatattagctgatgctgactcagatgggcttcatattgcaactttattatgcgcgctgtttctaagacattataaaagtcttgtccaagatggaaggatctatatcgcaatgcctcctttatatagagtagattgtggtaaagaagttctttatgctttagatgaaatacaaaaagataaagttgtagatgactttaagaagaaaaaaggaaaaccaaaaattaatattcaaaggtttaaaggtctaggagaaatgaatccttcacaacttagagaaactgtcatggatcccaactcaagacaacttgttaggttatctatttctgcaactgataatgctaatgcaatgatggacttacttttatctaaaaaaaatgctcctgctagaaaagagtggttagaaaaaaagggttcattggtgaggttataag

SEQ ID NO: 293986 - DNA, 926 bp, Unknown
  Bacterial polypeptide expressing nucleotide sequence isolated from the Sargasso Sea
tattgaccagacttcatgcgggtggaaattcaataaagataactatcaatattcaggtggcttgcacggcgttggcgtctctgtcgtcaatgcactttcaaaaaacctagaagtctgggtcagaagagatggcaccgaacaaaatatgagctttgccggaggaaaaaaacaaggcgatcttgaggaagttggaaaagtaggcaaagccaacacaggtactacaatcaggttttggccagacccacaatactttgattcatccaatatttcagcttcgaaacttcagcatgctctgaaagccaaggcagtactttgtccgggtttagaggtaaagctgaagattgagagcactggagagaaaattgcatggatgtatacgggcggtcttgagcagtatcttgctgaaactataggccagacacaacacattcctgagattccattcagtggaggatttaaaagtgacaatgaggcggtagactgggctttggtatggctccaagaagaaggcagcaacttatcagaaagttatgtcaatctcatacctactgcacaaggaggcacacatgttaatgggttaagaacagggcttgcaaatgcaataagagaattctgtgaattcagaagtcttcttccaagaggagttactcttacaccagaggatgtttgggataacgtgaattatgtgcttagcgtgaaacttgaagatcctcagttttctggacaaactaaagagaggctctcttcaagagagtcagctgcttttgtgacaggggtaattaaagatgaattttctttgtggttaaaccagcatccagaaacaggagatttgattgcacaattggcaatagaacgagctcaaaaaagaataaaaagtgcaaaaaaagtagttagaaaaaaagtggtttctggaccatcattacctg

SEQ ID NO: 293987 - DNA, 515 bp, Unknown
  Bacterial polypeptide expressing nucleotide sequence isolated from the Sargasso Sea
tatgaacaattttgacgatgaatcaagccaaataattggttctcaaattatttctgagagtttagataatgccttaagtgaccgttatttaacatatgctctctctacaattatgaatagagctttgccagatgcccgggatggactcaaaccagttcatcgaagaatcttatttgcgatgagaggactcaaactggacgcttcaggtacatttagaaaatgcgcaaaaattgtgggtgaggtaatgggcaattaccaccctcatggagataaagccatatacgatgcgttagctcggttggcccaagactttaatgttagatatcctctgattgatggccaaggtaactttggtaatattgatggagataatccagcggctcaaagatacacagaagctaggcttacaaaagtttcagagttgttactggatggtttagccgaggaggccgtagatttcagagaaaactatgatggctcagaacaagagccgactgtattaccagcaggatttc

SEQ ID NO: 293988 - DNA, 415 bp, Unknown
  Bacterial polypeptide expressing nucleotide sequence isolated from the Sargasso Sea
atgaacaaaataattgagtctaacttagatactatacttagtgaaaagtatctttcttatgcaatatcaactattgtttcaaggtcattacctgatgtgagggatggattaaaacctgttcatcgcagaataatttattcaatgtatcaactaaaacttttcaaaagttcaaattataaaaaatgtgcaagaattgttggtgatgtgatgggtaaatttcatccgcatggagatcaagctatttatgatagtttagtaaggatggctcaggatttttccacaagaattacattagtcgatggtcagggcaatttcggaaatattgatggtgataatcctgcagcaatgcgatacaccgaggcaagattacaagattacacaaattatttttttgatggtatagaagaaaactctg

SEQ ID NO: 293989 - DNA, 757 bp, Unknown
  Bacterial polypeptide expressing nucleotide sequence isolated from the Sargasso Sea
atgactaaagaaaatttggataaacaaagtattaaaaaatatgcagaaaatgcatatctcaattattcgatgtatgtcattttggatagagctttacctaatattggagatgggctgaagccagtgcaaagaaggattttatatgcaatgtcagaacttggactaaatgcatcatcaaagtacaagaaatctgctagaaccgttggagatgtaataggtaaattccatccacatggtgatagtgctgcttatgaagcgatggttttaatggcacaagatttttcatttaggtacccatttgtagatggtcaaggaaattggggatcgcaagatgatcctaaatctttcgctgcaatgagatatacagaatccaaactaacaaaattttcagatcttctaatagatgagttaaagcaaggaacagtggattggcagccaaattttgatggatcacttcttgagccagtaatctttccagcaaaagttccatccattttacttaatggaactacaggcatagcagttggtatggctacagatatcccatcacacaacatgacagaggtaattgatgcaactatccatgttttagaaaatccaaagacttctgttgatgaaattctcaaatatataaagggaccagatttttctaataaggctccaattgttgcatctccagaagagttaaatgaaatgtatagcactggaagaggtgcttttaaaatgaagtgtgcttggaaaaaagaaggcaatgaca

SEQ ID NO: 293990 - DNA, 787 bp, Unknown
  Bacterial polypeptide expressing nucleotide sequence isolated from the Sargasso Sea
ggaaaatccaagcaatctggtacaaaaattacttttttaccatctacagaaattttttcttcagtaaaatttagtgcaaatattctaataaaaagaatgagagagttggcctttctaaataaagggattaaaattatttttattgacgctagctctaaaaaagaaaaaatatctgaattcaaatttgatggaggtgtaagtgaatttgtagattttttagatgaaaaaagagaaaagttacaaaataaaaatggaaatgatttatttagaaaacccatttatatagaaggaaaaaaaaataatattgaaatagagtgttccttgaaatggaatgctggttatggagaagaaatttttccttatacaaataatattcatcaaaaagatggaggtacgcatttattaggatttagaagtgcattaacacgagttgtgaacaaatatgctaatgaacataatttgttaaaaaaaaataaattagcaatttctggggatgatataaaagaaggtctgacatgtgttttatcaatcaaaattccagatccaaaattctcatcacaaactaaagacaaactagtctcttcagaagtaagaatgatcgtagaaacagtggtaaatgaaaaattatcaacatggtttgatcaaaatccaactgttgctaaaactattttagctaaaattattcaagctgccatggcaagagatgttgctaggaaagccagagagaacgttagaaggaaaggagcactagaattgagtggccttccaggaaaattagctgattgcc

SEQ ID NO: 293991 - DNA, 835 bp, Unknown
  Bacterial polypeptide expressing nucleotide sequence isolated from the Sargasso Sea
attgatgatatagaaaaaaatacaatccaattcaaaagtaactatgatgaaactgaaaaagaaccctctgttttacccgctcaatatccaaaccttttagttaatggagcaggaggtattgctgttggaatggctaccagtataccaccccataatttgggagaaataatagatggtactttagcattaattgaaaataaagacataacagtcaaacaacttatgaaaattattcctggaccagattttcctacaggaggtgtaataataggaaaagacatgatcaaacaaggttacatcaaagggagaggttcatttaaaataagaggacaaatttcaattgaacaacttaaaaatggaagagaacgtttagtgataacttcaataccataccaggtgaataaatctgttctaaacgaacgtattgcacaattagttagagaaaaaaaaattgaaggtattagagatattcgagatgaatctaatagagaaggtataagagtttctatagatttaagaaatggtgtagaacccgaaactataaaaagacagctatataaaaatactcaaatagaaagttcatttggttttaacacattagcaattgttaatggtaaacctcatacatgcactcttaaagattttttatcaaactttttaaattttagagaagatgttgtagttaaaaaaactaagttcgacttaaataaagccgaggagagggctcatacattaattggtttatctgttgcagttgaaaatttagataaaataattaaaattatccgatcatctaaaacaccagatgacgcaaaaaaatctattcttaaaacta

SEQ ID NO: 293992 - DNA, 247 bp, Unknown
  Bacterial polypeptide expressing nucleotide sequence isolated from the Sargasso Sea
aatggatttaggtagagacaacatattagacaaacagctagttaaagagcttgaagaaagctatttaaactattcaatgtccgttattatgtcgagagcgcttcccgacgctagagatggactaaaaccagtacacagaagaattttatttagtatgagcgaaatgtctgctatgtggaacaggccctataaaaaatctgccagagtagtgggagaggttttgggtaatatcacccacacggagata

SEQ ID NO: 293993 - DNA, 1060 bp, Unknown
  Bacterial polypeptide expressing nucleotide sequence isolated from the Sargasso Sea
atggctcaggattttaattataattttccattagttgatggccaagggaactggggtactcaggatgacccaaaatcttttgcagcaatgagatatacggagtctcgcttaacatccttctctgatctttttttagatgaaatagacaaagatacagtacaatggaatccaaattttgatggctcattattagagccaaggcagcttccatcaaaaattccaaatatcatgattaatggtagttcagggatagctgtaggaatgtctactgatataccctcacataatattactgaaattcttaatgcgactatgatgcttttagataaaccaaaaactactaatgaagaattaatgaatatagtcaaaggcccagattttccaaccgcgggagaaattatcgctcatgattctgaaattgaatcaatttataagcatggtacaggtaacattaaattaagagctacttatagtgataacaaaaaagagataataattaactcaataccatatcaaacacatgtaactaaaattattgatcaaattcatgacgaagttaatgctaagaaacttccattcattcaaagtattttagatgattctgatcaggataaccccgtcagaatcattattaaatatagaggtcgttctcatacatccgaagaaataatgtcacatctttttttaaacactgatcttgagaaaaacataagagtaaatttaaatatgattggtcttgatggaaaaccagaaataaagaatttgcgacaaattcttgcagaatggattaaatttagaactacggtcgttaaaaacaaactcacttgggaaattactaagataaaagatagaattcatatattagagggattcactgttgtatataaatatttagataaaatcataactattataagaaatgaagataatcctaaaaaaaagattcttaaattatataaattttcagagagacagtatgaagctataatcaatatgagactgagaaatctagcaaaactgcatgagagaaatattataaatgaacttaaagaattaaaag

SEQ ID NO: 293994 - DNA, 951 bp, Unknown
  Bacterial polypeptide expressing nucleotide sequence isolated from the Sargasso Sea
actgttgcgtttcagtctaattatgatgatacaacaaaagaaccctcagttttgccatcccaatttccaaatcttttagttaatggagcatcaggaatagctgttggaatggcgactaatattgccccgcataacttaggagaagtcatagacgcatctttatatcttattaaaaatccagaatgtaatatctcagaccttcaaaaatatatttttggtcctgattttccaacaggaggtcaaataattggtaaaaagggcataacagaagcttttgaaacaggaaaaggagggtgtgtagttaggtcaaagactagtattgaaaattttaaaaaggatcgtgaagcaatcattctccatgaaataccttatcaagttaataaatcaaaattattagaaaggattgcggaaattgtaaaaaatggaattgttgaaggaatttcagatttaagagatgagtcagatagaaacggtgttagggttgttatagaattaaaaaaagatgtagactcaaatatcattctcaatcaattatataaacatacgttaattcaaacgacatttaattctaatatgcttgctttaaataaaggtaagccagaacaaatgaatttaaaagaaattttatcttcatttttagattttagagaagaagtaataataaaaagaacattatttgatcttaataaagctagagaaaaagctcatattttagttggattggttgttactaatgaacatattgatgaaattatagaattaataaaaagttcaaaagatacaaaagaagcaaaagaaaaattaattaaaaagaaatggaaagtatctaaacaaaatcttaattttattaaatcagttgaggatgatactgtagagttaaaaaacaacactttcaatttttctgacgcacaggctaaagctattttagaattaagattacaaaaattaact

SEQ ID NO: 293995 - DNA, 130 bp, Unknown
  Bacterial polypeptide expressing nucleotide sequence isolated from the Sargasso Sea
tatgccaaaaacaaagaaaagcacaaataccaaaaagtacgactcttctaatataaaagtcttgaaaggccttgatgctgttcgaaaaaggccgggcatgtatattggcgacacagacgatgaacagggc

SEQ ID NO: 293996 - DNA, 766 bp, Unknown
  Bacterial polypeptide expressing nucleotide sequence isolated from the Sargasso Sea
cgtgcgccaggcgctggacaccgccgtgctcgtgcgccccgacggcaccgagattgccggcgacgccctggccgaactcgcacgccagtaccagctcagccgcggcgtgatcgagcgcctgtctcgcgtgattgacgccgacgccctgcgcgccattgccgaaggcgtgtcgctggacttgtccaacgaagccgcagccgaagccagcgcccgcacgctcaaggcccgcctgctcgaaatgcaaggcaacgccagcagcgccaacggcggcgccaccgcagacgccttcatgcagtacgacgagaagaccgagaagtaccgcatcatggtcgtccgccgccagcacggcaaccagcgcctgagccacatcgacgccgactttgtggccggcgccgactacaccgcgctctcaagcaccgccgccaccttccagggcctgattggcgacggtgccaaggtgcgccgcggcaccggcgacaaggtgcgcgagcagaacgttgccgacttccacgccgccatgacgtggctgctgagcgaagccgagcgcggcgtgagccgccagcgctacaagggcctgggcgaaatgaaccccgagcagctgtgggaaaccaccatggacgtcacccagcgccgcctgctgcgcgtgcagattgaagacgccattgccgcggaccagatcttcaccacgctgatgggcgacgacgtggaaccgcgccggaacttcattgagagcaatgcgttggtggcgcggaatattgatgtttga

SEQ ID NO: 293997 - DNA, 384 bp, Unknown
  Bacterial polypeptide expressing nucleotide sequence isolated from the Sargasso Sea
aatgacaaaggaaaaattcacttcgatttcgctgcaagaagaaatgcaacgttcctacctagagtacgcaatgagcgtaatagttggacgtgcattacctgatgctagagatggcctgaaaccagtgcaaagaagaattcttttcgcgatgcatgagttaggtttaactccagatagaccatttagaaaatgtgccagagttgttggagatgtattaggaaaatatcatcctcatggagatcaagcagtttatgaagccttagtaagattagttcaagatttttctacaaaatatcctactcttgatggtcacggaaattttggatctgttgataatgatccaccagctgcaatgagatataccgaaacacgtcttgcgccaat

SEQ ID NO: 293998 - DNA, 1016 bp, Unknown
  Bacterial polypeptide expressing nucleotide sequence isolated from the Sargasso Sea
agttttaccatctagatttccaaatatatttgtaaatggtgccagtggtattgcagtaggtatggcaactaatattcctcctcacaatttaggagaaattatagacgctactttactgcttattgatgagccagatacaacatctaaacaacttcataagattgtaaaaggtccagattttccaacaggaggaattatatctggaacagctggtttaagctcaatgtatgagacagggagaggtagtgttacggtactttcgaaattacatgaagaaaaaataaaaaatagaaatgcaattgtaatttctgaaataccttatttacaaaataaatcaaaattattagagcgtattgctgatgtggtaaataataaaactatagagggcataaatgatattcgagatgagtctaataaagaaggtgttagaattgtcgtagagttaaaatcttctgcggttcctgaaattataaaaaaccagttatttcaatacacccctttaaaaacttcatttagcagtaatatgttagctttaaaagagacaaaacctctaacgttaaatctacgagatggtctttcatactttgttaattttagaaaagacgttattacaaaaagaactgtttataagcttaataaagctcgtgaaaaagcaaatattttaataggattatcaatagctgttaacaatatcgatgctgttataaatttaattaaaaaatctaagacacccgctgaagctaaagaaaaattattatcaaccaaatggactataaaatctaatatagctcaatatattaaactcataaattcttttaataagacctcatcgtctaaagtttctttagacgaagaacaagctaaagcaatactagaacttagattacaaaaattaactgctttagaaagagacgatatactcaataatcttaaatcattagttgaagacattaatacatacttaaaaatattaaattcagataagcaattattaaaggtactaaaaggtgagtgac

SEQ ID NO: 293999 - DNA, 265 bp, Unknown
  Bacterial polypeptide expressing nucleotide sequence isolated from the Sargasso Sea
atgacagatctggccagagaaatagttcctattaatatcgaagacgaattaaagaattcgtacctcgattatgccatgagcgttattgttggccgcgccttaccggatgtaagggatggtttaaagccagtacatcgtcgcgtattgttcgccatgaaggaactgggcaatgactggaacaaagcctataaaaaatctgcccgtgtggtaggtgacgttatcggtaaatatcacccgcacggcgacagcgctgtgtacgacacta

SEQ ID NO: 294000 - DNA, 961 bp, Unknown
  Bacterial polypeptide expressing nucleotide sequence isolated from the Sargasso Sea
attgttggtgatgtgatgggtaaatttcatccgcatggagatcaagctatttatgatagtttagtaaggatggctcaggatttttctacaagaattacattggtcgatggtcagggtaattttggaaatattgatggtgataatcctgcagcaatgcgatacaccgaggcaagattacaagattatacaaattatttttttgatggtatcgaagaaaattctgtagattttaaagataattacgatggtcaaaatttagaaccagtggtcctaccatctcagcttcctaatattttaattaatggagcaatgggaatagctgtaggcatggctacaaacattcctccccataatattgttgaattaattgatgcattaaaattaataataaaaaaagataaaccttcacttactgaaattttaaaaattattaatggaccagatcttcccacaggtggtgaaataattttagatagtaatgaaaaaaagcaaatttataagaatggcaagggatcatttaatattaatgctaaatacctaatagaagaattaaaaaatggtttgtatcaaataattattactgaaattccatatcaagttaacaaagttaagataatcgaacaacttgctaataacatcaataataaaaaattacctttggacgatgtagtagatgaatcagatgaaaatattagaattgtcttaaaaccaaagactagaaatattgattctgaaaaattaataagcttatgttttaaattaactgacctatcaattaagtactcttgtaattttaatgttttaattgatggcatagagcctaaacaaattggaattattgaaatactatctaattttttagaacatcgtaaagttaccattaaaagaaaatcaaaattttatatagaaaaaattaaaaagagactagaaattcttaagggttatcaaattgtttttaaaa

SEQ ID NO: 294001 - DNA, 788 bp, Unknown
  Bacterial polypeptide expressing nucleotide sequence isolated from the Sargasso Sea
gatgaacgcccgttataacgccgccgatattgaagtcctgtccggccttgacccggtcaagcgccgtcccggcatgtataccgacaccgcgcgcccgaaccacctggcgcaggaagtgatcgacaactcggtggacgaggccctcgccggccacgcccgctcgatcgagatcaccctgtacaaggacggcagcgtggaggtcagcgatgacggccgcggcatgccggtggacatccatccggaagagaagatcccgggcgtcgagctgatcctcacccgcctgcacgccggcggcaagttcagcaacaacaactacactttctccggcggcctgcacggcgtcggcgtcagcgtggtcaacgcgctgtcgaccctggtggaagtgcacatcaagcgcgaaggtgccgaacaccgcatcaccttccgcaacggcgaccgtgccaccccgctggaagtggtcggcagcgtcggcaagaagaacaccggtacccgcgtgcgcttctggcccgacccgaagtacttcgacacgcccaagttcgcggtgcgcgcgctcaagcacctgctgcgcgccaaggccgtgctgtgcccgggcctgaccgtgaagctgaccgacgaagccaccggtgaagtcgatacctggtactacgaagacggcctgcgcgattacctgaagctggaactgggcgatcgcgagatgctgccggccgagctgttcgtcggcaacctgaagaaagacaccgaaattgttgactgggccgtggcctggctgccggaaggcgagctggtgc

SEQ ID NO: 294002 - DNA, 680 bp, Unknown
  Bacterial polypeptide expressing nucleotide sequence isolated from the Sargasso Sea
gatggcaaatgatcagtttaattcaattagcttaaagaaatatgctgaagagtcatatcttaattatgcaatgtatgtgattcttgatagagcactcccaaacattggggatggtttaaaaccagttcaaagaagaattttatatgcaatgtcagaattaggtttagatgcaacatccaaatacaaaaaatctgctagaacagttggtgatgttattggaaaatttcatcctcacggtgatagtgctgcctatgaggccatggtattgatggctcaaaacttttcttttaaatatcctcttgtagatggacaagggaattggggttcacaagatgatcctaagtctttcgctgcaatgagatacacagaatccaaacttacaagttttgcaaaccttcttatttctgaattaaagtcaggaactgtagactggcagcctaattttgatggatcacttcttgaaccagtaattttcccatcaaaaattccaacaattttacttaatgggacttcaggaattgcagttgggatggctacagatattccttcacataatatcaatgaagttatcgatgcaacaatacatgttcttgagaagccaaaaacagaattaaaagacattatgaagataataaaagggccagacttttcaaatgaatcactaattattgccagcaaag

SEQ ID NO: 294003 - DNA, 681 bp, Unknown
  Bacterial polypeptide expressing nucleotide sequence isolated from the Sargasso Sea
ggaggcttacacggtgttggggtttcagtggtaaatgctttgtcagaaaccctaaacctaagaatacataaaaacggacatacttatgagcaagactatgtacacggtgttccgcaaaaaccgcttaaaaaaggctctaaaacagacaggagtgggacaacagtaaccttcaaaccaagcgctaaaacatttactaataccacctacagcttcgatattttatctaaaagattaagagagctttcattcttaaactcggggctaagcattaaacttactgatacaaggtctggaaaagaagaagagttttactttgaaggcgggatcagtgcatttgtatctcatctaaacaaagttcaaagccccgtacatgagtctgtcatcaatttcagcaagacaattgatgacataaccgtagacatcgccttacagtggaatgagtcttacagagaaaacatgtattgttttgcaaacaccataaggcaaaaagatggcggaacacacttagctggttttaggggtgcgctcacaagaacaattaatacatatatagacaaggaaattgcaaaggccgatatatctgtttctggagaagactgcagagagggcatgacagctataatttctgttaaacacccagatccaaagttttcatcacaaaccaaagataagctggtctct

SEQ ID NO: 294004 - DNA, 910 bp, Unknown
  Bacterial polypeptide expressing nucleotide sequence isolated from the Sargasso Sea
ggtgttggtgtatcagtagtaaatgcgctttcagaaagcttaattgctgaagttcatagagacggttttcattataaacaggaatataaaataggacaacctacaactgaagtagaaaaaataggtaaaagcgataaaacaggaactattgtgtcatttaaaccagatgaaaccgttttttcacacaagggttttgaagaggaagtcataaaaggaagacttaaagaattagcatatttaaataaaaacttatcaataaaattaattaatgaacccgaagaaacagaaacagaatattgttttccaggaggtttatcagattttgttaaatatttagatggtaatgaagatctaattcatgatgaggttattgtagtaagtaaggaagatatagaagttcctgtggatttagctcttagatatagtacaaattataatagtaatattttctcttttgtaaacaacattaatacaatagagggcggtactcatttgtctggctttaggtcagcgcttactagagcattaaatagttatgccaacaaaaatgatttaatcaaaacaaaaaagaacgaaaaattttcgctttctggagatgattttagagaaggtttaactgttgttatttctgttaaggttcaagagccacaatttgaaggacaaacaaaaactaaattgggtaatggagaggtaaaggggttagtagacaatgttgtatatgatggaatacaggcctttttagaacaaaatccaaaagtaggaaaaagaattattgaaaaagcagcagaagctgcaagagcaagaatagccgctaaaaaagcaagagaattagtaagaaaaaaatcagggttaggatcaacaacacttccaggaaaattggcagactgttcaaataaagatcctatgcagt

SEQ ID NO: 294005 - DNA, 307 bp, Unknown
  Bacterial polypeptide expressing nucleotide sequence isolated from the Sargasso Sea
aatgagtaaagagcaaaatcagcagtattctgcagatagtattcaggccttagagggcatggaacatgttagaaaaagaccttcaatgtatattggagatgttggtgtgagaggacttcatcatttagtttatgaagtggtagataattctattgatgaagccatggcagggcattgttctaaaatatcagttattattaatgaagacgattctatttcagttgaagatgatggtaggggtattcctgttggcattcaccaaaaagaaggtgtttcagctctagaggttgtaatgacaaaaatttgg

SEQ ID NO: 294006 - DNA, 571 bp, Unknown
  Bacterial polypeptide expressing nucleotide sequence isolated from the Sargasso Sea
aagaaaaaatgttctgaaattattattgatgatattttcaacataataataggtgttttatcaatctttattaaagaaccacagtttcaaggacaaacaaaagaaaaactagtatcaacagacgtcagtaaaaaaattgaaagcactgtaaaagatcgttttgaactttggcttagctttaatccaaaaaggagcgaagaaattatacataactctattcaattaatggaggaaagaaaaagcaagcgtatagaaaaagaattatcaaaaaaaagtaataataaaatacgtttacctattaaactatgcgattgcacttctcatgataataaaattaatgaattgtttattgtagaaggagattcagccggcggttcggcaaaatcagcaagagatagaaagtttcaagctgttttgccattaagaggtaagattcttaatgttattagcgcaacacagagtaaaattttacaaaatcaagaactacacgatttatctctcgctttaggaacaaaaataggaaaagattttaatattaatgatttgagatatgataaaataataattatga

SEQ ID NO: 294007 - DNA, 487 bp, Unknown
  Bacterial polypeptide expressing nucleotide sequence isolated from the Sargasso Sea
gatgtagacgggtctcatatcagaactttgctattaacttttttctataattatccttttaatcaacttatagaaaatggacatatttatcttgctcaaccacctttgtttaaagttacaaaagcaaataaaagtatttatattaaagatgaaaaagcactagaggactatattttacaaatggctaaaactgacaaaaggattaaaaaaaattcttcagagtataaaaacttcatccaggaacaaaaagaaaaactgtcgattcaacgctttaaagggttaggagaaatgaatccggaagaattatgggaaactactttaaatccagataatagaacaatgctcagggttcagtacacaaaaggcaccaaagataaatcaaaagaggatcaaaaaatgatcgagattttgatgggtgatgaagtctctccacgaaaagattttattactaataatgctttagatgttaccaacctagacatttgat

SEQ ID NO: 294008 - DNA, 601 bp, Unknown
  Bacterial polypeptide expressing nucleotide sequence isolated from the Sargasso Sea
tattcttccattacgaggtaaaatcttaaatgttgcaactgccaccaaagatttattagttaataatcaagaactttctgatcttaagcttgcacttggttttaaaaataataaagactttgaactaaggtatggaaaaataataattatgacagatgctgatgtggatggtgcacatatagctgctttattaatgacatttttttatttagaaatgccatcaattatagaaaatggtcgtttatttttagctcagcctcccctttacagattatcattaggaaatgttactgagtatgcttcagatgaaaatgaaaaagaacttttaattagtaataaatttaaaaatgcaagtaatcttgaagtaagtagatttaaaggattaggtgaaatgccaccaaaacaattaaaagaaaccactatgtcaaaaataaataggtcattaataaaagtcagtttgcccaaaagaaatattgttgaggctgatgaaagacggtcaattgatcgtcttgtagatacattgatgggtaaaaaagctgatctaagatttgaatatcttaaaactaatgctatatcggttttagatgagattgatatttaa

SEQ ID NO: 294009 - DNA, 399 bp, Unknown
  Bacterial polypeptide expressing nucleotide sequence isolated from the Sargasso Sea
tatgaatttaaaaaattcctatgaagcaaaagatattgaggtattagaaggactagagccagtaagaaaacgtcctggaatgtatattggtggaacggatgataaggcaattcaccatttagcattagaaatactagataattctatggatgaggcaatcgcaggtcatgcagatttgataaaaatatcacttttagatcataatacattacaaattgaagataatggtagaggaatacctatcgatgaccatcccaaattcccaggaaaatctgcacttgagataatagttagcacgcttcacgctggtggaaagttttcaaatggtgcatacgaaacatctggaggattacatggagtgggtatttcagttgtaaatgctttatctgaaaatttaga

SEQ ID NO: 294010 - DNA, 887 bp, Unknown
  Bacterial polypeptide expressing nucleotide sequence isolated from the Sargasso Sea
gttcaaagtagaagtgttccgcgatggtgaggtgcataccatggaatttgaacgcggcaaaacgacgcgtaagcttgaggtaatcggcaagtccaaaagcactggcacgctggttacgttcaaaccggatcccgaaattttcaccatcacccaagatttccaatttaacacactcgcttctcgcttgcgcgaattggccttcctcaatcccggtgtggagattgtgctgattgacgaccgggaagaaaacaaacaggaaacattcttttatcgcgatggcattgagcagttcgttcggcaactcggcaaaaacaaacaggtcgtccactcgaagccagtcatcattgccaataagactgacgacgtgttcgtggatgtagtgattcagtacaacgacagctataacgaccaaatcctctgttacgccaactccattcccaatggggatggaggggcacaccttaccggctttcgcaccgcacttactcgggcgatcaaccaatacgcgaaaaacaataatctgctaaaggaaaaggatccgaatatttctggcgacgacgtgcgcgaaggactcgtggcggtggtcagcgttaaactgcctaacccaaggtttagctcgcagacgaaagagaagctggtcaataacgagatcgagggcgttgtcagcaaggccacgtacgacggcctgatgcaccactttgacaccaacccgtcggttgccaaaaagatcatcgataaaggcctcacagcagcccgagcgagagaggcagcgcgcaaagcacgcgagacggtacgcaagagcgccatggccggaggtggtttgccgggcaaattggctgactgctcagatcgcgatccggccaacactgaattgtatattgttgagg

SEQ ID NO: 294011 - DNA, 871 bp, Unknown
  Bacterial polypeptide expressing nucleotide sequence isolated from the Sargasso Sea
cttaagggcaaaagcggaaattgaaaccgattctaaagaaaaatcaaaaataataatctctgaaataccttatcaacaaaataaggctagattagttgaaaaaattgcccaactagcaagagacaaaaaagttgaaggtatgtccgagataagggatgaatctgacaaagaaggagtgagaattgttatagaaataagatctggacagaatccagaagtaattcttaataatttatattctttaacaccgttagaaagtgcctttggagttaataatgtagctctcgttaataaaactccaaagcttcttaacttaaaagaacttctagaaatttttatttctcacagaagaactgtcgtttctagaagaacagaatttgaactgaaaaaggcaaaagatagaggtcacattcttgaaggtttggcagtttcgctggctaatattgatcaagtgatagatttaataaaaaaatcaaaagatcctcaggttgccaaagaaaaacttcttgcaaaaaaatggaaagcgggagttgtctcaaaactaataaaaaatgctggggaaataaccacaagaccagagtctttgagtgacgactttggcctttccggatcatcatacaaattatcatcggttcaagctcaggccattttagatttaagacttcaaaaattgaccggtttagagcaagataatcttgtaaaggaatatgaagaaattctaggtgaaataaaacttctgcagaaaatcttagatgatccctctgaattgaaacgagtaatcaaagaagaacttattgaaattagagatttgtatggcgatgaaagaaaaactccaatagaagaaagacttgatttatctactgaagactta

SEQ ID NO: 294012 - DNA, 688 bp, Unknown
  Bacterial polypeptide expressing nucleotide sequence isolated from the Sargasso Sea
catgacgaaggattataatgcctcagacattgaggtcctcagtgggcttgaaccggttcagaaaagacccgggatgtacaccgacactgattgtccaaatcacttagtatatgaggtcattgacaacagtgtagatgaggccattgctggccattgcaaaataattcaggttaacctttataaagatggctctatagaagttagagatgatgggcgcggcatgcctgttgatgatcaccctgaagaaaaaatacctgctgttgaattgatattaaccagacttcatgcaggagcaaaatttgataataaaagctataagttttctggcggcttgcatggcgttggcgtttctgttgtaaatgctctttcaaaaaatttggaggtttggataaaaagaggcggtcaggaatacaatatgagttttagtaatggcgatagaacatctgagctcgaaattgtcgacagtgtaggcaaggcaaacacgggaacaaccatccgattctggccaaatgaatcgtattttgattcaccagatataagactagatgatataaagcataaccttcgtgcaaaagcagtcttgtgtccagggttaaagattaaatttaaagacgagtcgagtggtgataaagctgaatgggagtatcaagagggagcgagtgagtatttagtggaaatgctgaaaaca

SEQ ID NO: 294013 - DNA, 754 bp, Unknown
  Bacterial polypeptide expressing nucleotide sequence isolated from the Sargasso Sea
tatgactaaaattggtgcagggggcaaatttgataaagattcttataaggtttctggaggtcttcatggagtcggcgtttcagttgtaaatgcattatctattgatttaaaggctagtgttcataagaatggtaaaatatatgttcaagaatataaacagggtaaagaacaatattctgttaaagaagttggtgttactgacaaaaaaggaacccaagtaatttttttccctgatccagatatttttgaatcactagattatcaatatgatattttagcttctcgaatgagagaattatcttttttaaataaaggtctaattataactttaaatgatgaaagagaatcttcaaaagatgaagatggggaagtttcacataataaattttattcagaaagagggttgtcagaatttgttgagtttttggacggtaacagggaaaagttaattcaaaatgttattagtattgaaggtgaaaaaaatggtataccagttgaagtagcattaatttataataattcttatgctgagaatatacattcatatgtaaataatataaatactcatgagggggggactcatctttcgggttttagaagaggattaactaatactcttaaaaaatatgctgataaatctggaatgttagataagttaaagtttgaaatttctggagatgactttagagagggtttgacagctatcgtttcagttaaagttcaagaaccacaatttgaaggacaaacgaaaaca

SEQ ID NO: 294014 - DNA, 662 bp, Unknown
  Bacterial polypeptide expressing nucleotide sequence isolated from the Sargasso Sea
catgaccgaacttgcccgccccgtgttccacggattcgaacaactgccgctgcgcgagtacgccgaacgcgcctacctcgactactcgatgtacgtggtcctggaccgcgccctgccgttcatcggcgacggcctgaagccggtgcagcgccgcatcatctattcgatgagcgagctgggcctgaatgccgcgtccaagccgaagaagtctgcgcgcaccgtcggtgacgtcatcggtaagtaccacccgcacggcgacagcgcgtgctacgaggcgctggtgctgatggcgcagccgttctcgtaccgctacccgctgatcgagggccagggcaacttcggctccagcgatgacccgaagtcgttcgcggcgatgcgttacaccgaatccaagctgaccccgatcgccgaagtactgctgggcgaactgggccagggcaccaccgactgggcaccgaacttcgacggcaccctgcaggaaccgacctggatgccagcgcggctgccgcacctgctgctgaacggcaccaccggcatcgccgtgggcatggccaccgacgtgccgccgcacaatctcaacgagatcgtcagcgcactgctgcacctgctggacaaccccgatgcgaccgtgcgcgacctgtgcgagcacgtgcagggcccgg

SEQ ID NO: 294015 - DNA, 877 bp, Unknown
  Bacterial polypeptide expressing nucleotide sequence isolated from the Sargasso Sea
gttggtatggcgaccaatattccaccacataacccagcagaagtgatcgcggcctgcgaagcatatgtccaggacccggagattactacagaagaactcatagagattgtcccgggacctgattttccgactggtgggttgatcatggggcgacaaggcatctgtgaagcgtataataccgggcgtggttctattattatgcgagctaaagcagaagtgcaaaccaatgctaaggatcgtgagtcaatcatcatccatgaaattccctatcaagttaataaagcccagcttcttgagcgaattggtgaaatggtgcgcgacaagacgattgagggtatatctgacatccgtgatgagtcagaccgtaatggcatgcgagtggtaattgaggttaaacgcgacgcagcgggtgatgtggtgctaaaccagctatatcgtcatacccgtctgcaaaccagttttccagtcaatttgctggcaatgaatgctggcagaccgatgcaaatggggttgaaagatgtaatttctgcgttttgtgagtttcgcaaagaggttgttctgaggcgcacgacatttttgctcggcaaggcccgtgagcgcgcgcacatactggccgggttgatggtggcactggcatcaatagacgtcattattgagatgatcaaaaaggcaccggataccgaaaccgcgcgcaaatcactatgtgacacaccatggcctgccgatgaagttgccgattttattggcttgataaatgatccaggacatgaagttattgacgggcattacacattatctgagacgcaagccaaagctattttggaattacgattgcaacggttgaccggaatggaacgtagcaagttagccgatgaaa

SEQ ID NO: 294016 - DNA, 690 bp, Unknown
  Bacterial polypeptide expressing nucleotide sequence isolated from the Sargasso Sea
atctatcattaaaaaaaactaaaaatgtagattttaaatatgaaggtggcattttagaatttgttgaatttttagataaagatagagtcaaattaaaaaataaaaatgaaaatgatttatttaaaaaaccaatttttgttgaaggaaaaaaagacaacttagaagtagaatgttctttaaaatggaattcaggatattcagaagatgtttattcatatacaaataatatataccaaaaagatggtggaacacatttattaggatttagaagcgcattaactagagtaataaataaatatgctaatgagcaaaatttactaaaaaaaaataaagtttctatttcaggagacgatataaaagagggcttaacatgtgttttatctataaaaattcctgatccaaaattttcgtctcaaacaaaagataaattagtttcttcagaagtaaggaatattgtagaaactttagttaatgaaaaattatctgtttggtttgaccaaaatcctgctatagcaaaagttattttagcgaaaattgtgcaagccgcactagcaagagatgttgcaagaaaagcaagagaaagtgttagaagaaaaggagctttagaactaactggattaccaggaaaattagcagattgccaaaattcaaaacaggaaggtacagaattgtttattgtagaagggtgat

SEQ ID NO: 294017 - DNA, 429 bp, Unknown
  Bacterial polypeptide expressing nucleotide sequence isolated from the Sargasso Sea
ttattatcatgtgtgatgctgatgtagatggtagccatatttcaacactaattttaactttcttctttagatatatgagagaacttgttgaaggaggtaatgtatatattgctacacctccattatatttagttaaaaaaggaaataaaaaaacatatgcatggaatgataaagaaagagataatcttgcaaaagaatttggttcaggtgtatctattcaaaggtataaaggtcttggtgaaatgaatgctgatcaattatgggatacaactatgaatccagaaactagaacccttagacaaatatcactaaactttgataattctcaagaagctgaaaggtggttttctactttaatgggtgatgatgtccctccaagaagaaaatttattgaggaaaatgctgtttatgctaaaattgatgcttaat

SEQ ID NO: 294018 - DNA, 460 bp, Unknown
  Bacterial polypeptide expressing nucleotide sequence isolated from the Sargasso Sea
atggttaaggaaaacttcacttccatctcacttcaagaagaaatgcgacgttcttatttggagtatgcgatgagcgtcatagttggacgtgcgttgcctgatgcaagagatggtcttaagcctgtacaaagaagaatcatatttgcaatgtatgaattaggtttaactcctgataaaccattcaggaagtgtgcaagagttgttggagatgtacttggaaaataccatcctcatggagatcaagcagtttacgatgcattggtaaagctagtacaaaatttctcaactaaatatcctactcttgacggccatggaaattttggatctatagataatgatccgccggcagcaatgagatatactgagaccagattagctccaatagctcataaaggctttcttgaggaaattggatcggaaacagtaaacttttcaaataactttgacggttctcaaaaag

SEQ ID NO: 294019 - DNA, 958 bp, Unknown
  Bacterial polypeptide expressing nucleotide sequence isolated from the Sargasso Sea
gaagacatgtctgcagctgaagttgtttttacaaaacttcacgctggagaaaaatttgggggcgatggatacaaagtttccgggggtcttcatggtgtgggaatttctgtagttaatgctctttctgcaaaagtagaagttgaaattgaccgagatgaaaaacgtcactacatggatttttcttcaggtggaaacttggttacaaaactttatgaaaccggtgaagccccacaaagcagaactggaacaactgtaaggttttggcctgattctgaaatatttgaggaaataaactttcgtgcacaaactcttttagaaagatttcaaatgatggcttttttaaacaagagtttacaaataactttttcagacttacgtgaagatgcgataaacaaagaagaagttgtttataaatatgacggtggaattaaagacttcgttgaacacgtgaatgcaagtaaggaatcactttttccaaaagttggtttttttgatgcggaggaagaagaacaagaagtcgaaattgcttttcaatggaacaccgggtttaacacagacgggcttcattcttttgctaacggaattaacacaattgaaggtggaatgcatgaagaaggatttagaacagcattaaccggcgttatgaatcgatatgcaaaaaagagaggattaataaaagacaaagacgacaacctgcaaggtgaagacatacgcgagggactcacagcaatcattagtgttcgtttaagtgaaccacagtttgaggggcaaacaaaatctaaattaggaaatgtggatattcgttcattggtgcaaaaaaccacaaatgaaaaactttcagagtggctagaagaacatccagtagaagcaaaaattattttacaaaaagcaattaatgcacagcgtgctcgtttagcagctcaggatgcaagacgttcagcgagacgcaaatcggctt

SEQ ID NO: 294020 - DNA, 945 bp, Unknown
  Bacterial polypeptide expressing nucleotide sequence isolated from the Sargasso Sea
attccccctcacaacctcaacgagctaacaaacgcgatagattatctgatctcagacccgaacgcgacggttgacgagctcatgaagcatctcgacggtccggactttccgactgcaggtattatctatgatcgtaaccagatcagacaggcctatgccaccgggcgcgggcgcattgtcatgcatgcccgaattgctcttgaagagaccacttcagggagatcgcaaataatagtcaccgaactcccgtatcaggtgaataaagcggcgctactggaacgtatcgccgagcaggtacgtgccaaagtgattgagggaattaccgatctcagagacgagagcgatcgggaaggaatgcgtatcgtcatcgaacttggacgaaatgcatcctattactcggttcgcaaccagttactaaaacattctgccttagaaacggcttatcacgtcaatttggttgcactcgttacccaagaggaagatggtcccgaagaaatagagtttgtcgacgacgaggccatttttgatactgaatgggctcctgacagactagacgaatttgaccaagccgaagtcaccggtcgtcctgaaacgctgtctattcgtgaggcaatgcaggcgttcatagatcatcgcagagaagtaatccgaagacgttcaatattcgaccgccataaggctcgacaaagacgtcacattctcgccggacttctaaaagccatcgataatctagacgagattattgacaccataagacaagctgagtccgccgaattagcaaaagcatcacttatgagtgatccacatcagttaaccgatagacaggctcaggctgttctcgatctgcagttacgacggcttgcgcaactcgagtcatcacggatatccgaagaatacaatgaactgcaaggatttattaactcactaaatgaactcctagcgagt

SEQ ID NO: 294021 - DNA, 715 bp, Unknown
  Bacterial polypeptide expressing nucleotide sequence isolated from the Sargasso Sea
tagttttaatgtattacaaaaaaaaatgagagaattggcatttttaaacaaaggtattaaaattatcttaaacgatttatcaaacaaaaaaaataaaagtcttgaatttaaatatgatggggggataactgaatttgtagaatttttagatgaaagtagagaaaaattgaaaaataaaaatgataacgatttatttagaaaacctatttatctagaaggaaacaagaatagtatcaatattgaatgtgctttaaaatggaatgcctcatattcagaagatgtattcccttatacaaataatatttaccaaaaagatggcggaacacatttgttgggatttagaagtgctctcactagagttataaataaatatgcaacagagcaaaatttactaaaaaaaaataaagtaaatctatctggagatgatgtaaaagaaggattaacttgtgtattatcaatcaaggttcctgatccaaaattttcatctcaaactaaagataaacttgtatcctcagaagttagaaatattgtagaaacaatagttaacgaaaagctttcaatatggtttgatcaaaatccatcaatatcaaaaataatattaactaaaattatacaagctgctgtagctcgagatgtggctagaaaagctagagaaaatgtaaggagaaaaggtgctctagagttaacaggactacctggaaaattagcggattgt

SEQ ID NO: 294022 - DNA, 874 bp, Unknown
  Bacterial polypeptide expressing nucleotide sequence isolated from the Sargasso Sea
tatttagtcgatgatataaataaagatacagttgcttttaaaagtaactacgatgaaacagaaaaagaacctgagattttaccggctcaatacccaaatctattagtaaatggtgctggaggaatagccgtaggaatggctaccagtataccacctcataacctaggagaaattattgatggaactttagccttaattgaaaacagagaaattaaaatacctgaattaatgaaactaataccaggtccagattttccaacaggtggattgataattggaaaagatataataaaacaaggttacaaaacaggacgtgggtcattcaaaattagaggggaaatttctactgaacaattaaaaaatggcaaagaaagattagtagtaacatcagttccgtatcaagttaataagtctgttttaaatgaaagaatagctgaactcgtgagagaaaaaaaaatagagggaattagtgatattagagatgaatcaaatcgagaaggaataagagttgtaattgatcttagaagaaatgttgagccagaaacaattaaaagacaactttacaaatacacttcaattgaaagctcatttggttttaatactcttgcaattgtagataaaaaaccaaaaacttgtaatttaaaagatttcttagagagttttttaatttttagagaaaaaataataatcaaaagaacaaaatatgatttaaaaaaagctgaagatagagctcatatattaattggtttatctgtatctatagataatttagataaaattattaaaattattcgtggatcaaaaactccagaagaagctaaagagaagttattaaaaaatacatggcaagttaacaaatcaagcaagttaatta

SEQ ID NO: 294023 - DNA, 865 bp, Unknown
  Bacterial polypeptide expressing nucleotide sequence isolated from the Sargasso Sea
aagaacagagattgttgaattctattcagacctgactgatgaagatcttataccagaagaagatctcatcgtgacattatcaaaagaaggttacgcaaaaacacagccacttgacacttaccaagctcaaaatcgaggtggaactggtaagcgtgcagcatcattgaaggatgaagactttgtttctaaattatttgtggccaatacacatgacacattgttgtgtttttcaagttatggaaaagtttattggataaaagtatatcgccttccaagaggtggaagaaacgcaaaaggacgaccaattgtaaatctcttaccattagaaaaagatgaacgtattcaagcagttcttcctgtgaaagaattcaatgatgatcaattcatattcatggcgacagaaacaggaagcgtcaagaaaacaaaattatctgcttactctagacccatgaaatctggtattaaagcgatcaaactcagagatggagatcgtgttgtcaacgcagagatcactaatggcactaaagaaattatgctcttttcaaattctggtaaatcaattaggtttaaagaatctgatgcaagaccaatgggacgagtatcacaaggtgtcagaggtatgcggattgataaagatcagaaaattatttctcttgttgtccttgaggagggaaatattcttgttgcaactgaaaatggttacggtaaacagacattaaaagatgaattctctattcagaaaagaggtgggaaaggcgtaattgcaatccaaacatcaaatagaaatggaagcttgattggtgcaaaacaagttagtacaggagatgaagtcatgttcattagcacctcaggtaacctgattagg

SEQ ID NO: 294024 - DNA, 755 bp, Unknown
  Bacterial polypeptide expressing nucleotide sequence isolated from the Sargasso Sea
agatggagataatccagctgcccagagatatactgaagccaggttatcgaactactcattacagatgctagtgggtttggaagaagactcagtagattataaggaaacctatgataattctgatagagagcctattgtgctaccagctagttttcctcaacttctggctaatggatcatctggaatagcagttggtatggcaactagtgttccacctcataatttaagtgagttactcgatgcagccaaattagttattgataacccaaaatgctccatagaagaacttacgaggataattttaggacctgattttcctactggtgggctaattttagataatcaagataaaataaatgaaatttatcagtcaggaagaggaagcttgaggcttaggtgtaggagtgaggtggaaaatctatcgcatggtaattggcaggtaataataaatgaaattccgttccaggttcaaaaagggaagcttattgaaaagattgcggatctaatttcaagtaagaggttacctgacgttcaaaatatcagagacgaaagttcagataaagtaagaattgtcatagaaccaagaacaaggaatgttgataaagataggatgatgagaaccttatttaaaaatactgatcttgaaacaaaaatcccaattaacttgaatgtgttagttgatggtatttcccctaaaacatgcgaccttaaggaactattacaggtatttcttgagcatcaaagacaaattttat

SEQ ID NO: 294025 - DNA, 961 bp, Unknown
  Bacterial polypeptide expressing nucleotide sequence isolated from the Sargasso Sea
ttgccggcacattttcctaatttattagttaatggtgcttctggtatcgcagtaggaatggcaaccaatatagctccccacaatttaggagaggtaattgatgccactcttcatatgattgaaaatccaaaagcagaattggaggatttaaataaatttatttttggtcctgattttccaacaggtggacaaattattggtaagaagggaatattagaagcatttcaaactggtaaaggaggagtagttttaagatctaaaacctcaatagaaaattttaaaaaagacagagaggctataataattcatgaaattccatatcaagtaaataaatcaaaattgattgaaaaaatagccgaatgtgtgaagaataacattatagaaggcatatctgatattagagatgagtcagacagaaacggcgttcgtgtagtagtagagcttaaaaaagatgttgatgccaatattatattaaataaactttataagaatacacttcttcaaactacttttaattcaaacacacttgcccttaacaaaggtaagccagaacagatgaatttaaaagaaatgttagctgctttcattgaatttagagaagaggtcataactaaaagaacaatatttgacttaaataaggctagggataaagcacatgtgttaataggtttggttgttgccaatgtaaatatagatgaaataattgaaataattaaatcttccaaagactcaaaagatgcacgatttaaattaataaataaaaaatggcaactgagtgaacagaatattaatttcataaaacttgttgatgaagaaaatatacaattaaataaaaatatttttacctttactgaaacacaggcgaaggcaatattagaacttcgattacaccgcttaacttcaattgaaagagataatattcaaaaagatctagaacaaattatacttcaaattaaaggat

SEQ ID NO: 294026 - DNA, 859 bp, Unknown
  Bacterial polypeptide expressing nucleotide sequence isolated from the Sargasso Sea
taagttcaattcaataagtttaaagaagtacgctgaagagtcttatctcaactatgctatgtacgtaattcttgatagagcccttccaaatattggtgatggtttaaagcctgttcaaagaagaatcttatatgccatgtctgaattaggattagatgcatcatcaaaatataaaaaatcagcaagaactgtaggtgatgttattggaaaatttcatccacatggagatagtgctgcctacgaggcaatggtgctaatggcacaaaatttttcatttaagtatcctttagttgatgggcaaggaaattgggggtcacaagatgacccaaaatcatttgcagcaatgaggtatacagaatcaaaacttacaagctttgccaatcttctcatttctgaattaaaatctggaaccgttgattggcagcctaattttgatggatcacttttagaaccagtaatttttccatcaaaaataccaatgattctattaaatggaacctcaggcattgctgttggaatggcaactgatattccatcacataatattaatgaagttattgatgcaactataagtattcttgagaaacccaaatcacaactaaaagatattttaaagattataaagggtccagatttttcaaatgaatcgtcaattatagccagcaaagaagagctagaagagatgtatctttcaggaagaggaggttttaaaattcaagcaaactgggaacaagaaaaaaatcaaataattattaatgcattgccttatcaagcatctggatcaaaaattttagaacaaattgcagaacagatgctgaataaaaaattgcctatggttgttgatttggctgatgaggga

SEQ ID NO: 294027 - DNA, 137 bp, Unknown
  Bacterial polypeptide expressing nucleotide sequence isolated from the Sargasso Sea
aatgtcaaaaaattctcaacagaatcatgaacagtcttatggagcagagtccattaaggttctcaaagggctagacgctgtaagaaaaagacctgggatgtatatcggcgatacagatgatggttcgggtctccatc

SEQ ID NO: 294028 - DNA, 792 bp, Unknown
  Bacterial polypeptide expressing nucleotide sequence isolated from the Sargasso Sea
tggtaacaaatattttatagaatttaaaaatggcgatgcagtaaaaccattaaaagtaattggaaaatcaaaaaataatggcactgaaattaattttctaccatcaaaagaaatattttcatctataaaatttagctttagtataattgaaaaaagaatgcgcgaattagcttttttaaataaaggaattaaaatttcaattaacgaccaaactcaaaaaaaaaataaaatatcagaatttaaatttgacggaggcatattacaatttgtcgattttttagataataaaagagatagtcttaaaaataaaaatagtaataatctttttaaaaaacctatatatattgatggcaaaaaggataatattcaaactgaatgttcacttcaatggaatgctggctattccgaagatgtttattcatatacaaataatatatatcaaaaagatggaggcacacatttattaggttttagaagtgcacttaccagagtaataaataaatatgcaaataattacaacttaattaaaaaaaataaattttcaatttctggagatgacattaaagaaggcttaacatgtgttttatccataaaaattccagaccccaagttttcatctcaaactaaagataaacttgtttcttctgaagtgagaaatattgttgaaaatattattagcgataaactttctttatggttcgatcaaaatccatctatttctaaaataattttaacaaaaatagctcaagctgctttagccagggatgttgctagaaaagctagagagagcat

SEQ ID NO: 294029 - DNA, 817 bp, Unknown
  Bacterial polypeptide expressing nucleotide sequence isolated from the Sargasso Sea
attgatgaggcaatggctggatattgttcagcaatattaattgaaattaataaagactctagtttaactgttgaagataatgggcgaggaattcctgttggtattcataagaaagaaggagtatctgcacttgaggtagttatgactaaaattggtgcaggaggtaaatttgataaagactcttataaggtttcaggtggactacatggtgttggtgtatcctgtgtaaatgcactatcacaattgcttgtggctaaagtttttagagatggaaaggaatacgaacagtcttatagtaagggaaagcctagtgagcctgttaaagaagtaggaaagtcggataaaactggtactcgtgttacttttaccccagacaaagagatctttaaagaagtaacagagttcgattatgaaattctatctaatagaatgagagagctatcatttttaaataaaggtttaactatatcaattaaagataatagagctatagataaggatgataatcctatttctgagacttttcactcaaaagaaggtttaagtgagtttatcaagtatctagataaaggaagagttcctattataagtagcataattaaaatggaaggcgaaaaaaatggcatccctgtggaggttgctatggtatataattcctccttttcagaaaatcttcattcatatgttaataatattgacacccatgaagggggtactcacctgacaggatttaggagaggtttaactaatactttaaaaaaatacgctgattcatcaggcttaactgacaaactcaaatttgatatttcaagtgatg

SEQ ID NO: 294030 - DNA, 694 bp, Unknown
  Bacterial polypeptide expressing nucleotide sequence isolated from the Sargasso Sea
atgggtaaaattttaaatgaaaatattaatgatattcttagtcaaaaatatttagcatatgctatttcaactatagtttctagatctttgccggatgttagagatggattaaaacctgttcaccgtagaataatttattcgatgtatcagttaaagctatttaaaaattcaagttataaaaaatgtgctagaattgttggtgatgtaatgggtaaatttcaccctcatggagatcaagctatttatgatagtttggtaagaatggcgcaggatttttctacaagaattacattagtagatggccaaggaaattttggaaatattgatggtgataatcctgcagcaatgagatacactgaggcaagactacaagattatacaaattatttttttgacggcattgaagaaaactctgttgactttaaagataattatgatggtcaaaatttagaaccagttgttctaccatctcaacttcccaatattttaatcaatggagcaacgggaatagctgtaggcatggccacaaacatcccccctcataatattgttgagttaattgatgtgataaagttaataataaaaaaggataaaacttcactaactgaaattttaaaaattattaacggaccagatcttcccacaggaggtgaaataattttagataataatgaaaaaaagcaaatttataaga

SEQ ID NO: 294031 - DNA, 438 bp, Unknown
  Bacterial polypeptide expressing nucleotide sequence isolated from the Sargasso Sea
tatggaaaatgaagaattacaaaatgaaaatataagccttactcctttttcaaaagcaatctctgagcgataccttgcatatgcattatcaacaataacatcaagatctttgccagacgtaagagatggtttaaagcctgttcatagaagagttttatttgcgatgatgcaattaaaactaaatcataacgtatcattcaaaaagtctgctcgtgttgtaggtgacgtaatgggaaaatttcatcctcatggggatgctgcaatttatgactcaatggtacgaatggctcaagattttgcattaagatatccattagttgatggtcagggtaattttggtaatatcgacggagataatgcagctgccatgagatatactgaggctagaatgtctaaggctgcagaattattattatctgatattgataaagacacggt

SEQ ID NO: 294032 - DNA, 793 bp, Unknown
  Bacterial polypeptide expressing nucleotide sequence isolated from the Sargasso Sea
attaatggcaaaaaaatctacctataaagcaaaagatattgaagtattagaaggtttagaaccagtaagaaaaagaccaggaatgtacataggaagtacaaaccaagatggacttcatcatttggttaacgaaattttagataatagtattgatgaggtcttagcaggccatgcttctacaatatcttttaaatataaaaaaaatggcaacataacaatcaaagacgatggaagaggtattccaatagattttcatccaaaatacaaaaacaaaagagctcttgaagtagttttaactacacttcatgcaggtggaaaatttaatagcaatgcttacaaaacatcagggggattacatggtgtaggtatttcagttgtaaacgctttaagctcgttcttaaaagtggatgtatttaacaatggtaaggtctatcgacaagaatactcaaaaggaaaagtaaagtcaaaagttaaaattgaaaaatgtagtaaaaatatgaaaggtacagaaattacttttttacctgatgaaactatttttgatgttacaacctatgatcctaaaaaactttataattttatcaaaatgaaatctgttttagttagtggcacaaaaattactttagaaattgataaagaattaattaatgataagactccaaataaaaaagatttttattataaaaatggaatagaagatttttttaaaatagaatattctaataaaaataaattatttgaaaaaaatttttctctaaaaaatagtttaaatcaaaatgaaaattttgaggtt

SEQ ID NO: 294033 - DNA, 835 bp, Unknown
  Bacterial polypeptide expressing nucleotide sequence isolated from the Sargasso Sea
aatgacagatctttttacccaaaacaaaacaagaaaactaaaaaaagatagttataattctaatgatattatagttttagagggtcttgagccagttagaaaaagaccagggatgtatattggtggcacagatgaaaaagcctatcaccatttaataattgaagttttagacaattgtattgatgaggccattgaaggacatgcaaacttaattgaaatagaacttttgtcattaaatactatcaaaataagtgataatggtaggggaataccaattgataaccatccaaaatatccaaataaatcagcacttgaagtaattttaacaactctacattcaggaggaaaatttaatgataaaaattatactacctcaggtggattgcatggagttggtatatcagtagttaatgcactctcaagtgagctaatagtagaaatatccaggaataatagagtttatcaacaaaaatatattaggggacttccaacagacaaacttttagaaatttcaaaagtttcaaaaacatctggcactagcatccaatttactccagataataatatatttgataactgctcttttaatcctaatacaataattaatatggccaaaattaaggcttacctcacaaaaggaatcgaaataatctggaaatgcaataagagctttgtaaaagattataatattaaagaaaaattaatttttaaattccctgatggaattatagactttcttcacaactctacatcaggaaattcttttatttcttcagaaaatttttttggctctattccgttcaaaagcaatagaattgattgggtaatgaattgg

SEQ ID NO: 294034 - DNA, 987 bp, Unknown
  Bacterial polypeptide expressing nucleotide sequence isolated from the Sargasso Sea
gttcctgagtggcgacactgaaggtgtggactgggcggttgtatggctccctgagggcggcgagctgcttcaggaaagctacgttaacctgattcctaccgcgcagggcggaacgcatgtaaacggctttcgctctggtttgcttgatgctttacgagagttctgtgaattccgcaatctgttgccacgcggcatcaaactaaccccggatgacctctgggaacgttgctcatatgtcttgtcggcaaaattagccgatcctcaatttgcgggtcagaccaaagagcgtttgtcttctcgcgaagcgtcggcctttatctctggcgtagtcaaagacgcattcgcactttggctgaatgaaaatactgcggatgctgagcgcctcgctgaactggcgatttccagtgcgcagtcgcgtttgcgtaaatccaagaaagttgcacgtaagaagattactcagggccctgccttaccgggcaagcttgcggactgtacggggcaggacggagagcgcaccgagctgtttctggtggaaggggactcggcgggcggttctgccaagcaggctcgcgatcgtgagtttcaggccattatgccgttgcgcggtaaaattcttaatacctgggaagtcgagtccggagagattctggcgtcgcaggaagtgcatgatatcgccgtggcgcttgggattgaccctgcggcagataacctcgatggtctgcgttacggcaagatctgtattctcgccgatgctgactccgatggtctgcatatcgcgacgttgctgtgtgcactgttcgtgcgtcacttccgcaagctcgtggctgacggtcatgtctatgtcgcgatgccgcccttgtatcggatcgacgtcggtaaggatgtctattacgcgttagatgaaggtgaaaagcagggcgttcttgaacgcatcaaggccgagaacaaacgtggcaaagtgaatgtgcagcgctttaaaggttttgg

SEQ ID NO: 294035 - DNA, 728 bp, Unknown
  Bacterial polypeptide expressing nucleotide sequence isolated from the Sargasso Sea
catgccagatttattcgaaggttcgatttcggatcaaaattataatgcacagcaaatagaagtgcttgaggggcttgatccagtaagacataggcccggaatgtacatcggtggcacagatgatcgggccatgcaccacttagtagcagaaatactagataattccatggatgaagccgtggcagggcatgctaactggattgaaatcaatttaatagatggaaatacagttaaaataagtgataatggaaggggaatacctgtagatcctcacccaaaatttccgaataaatcggcgttagaagtaatattaaccacactgcatgctggcggtaaattctctgataaagtatatgaaacatcgggcggtcttcacggtgtcggagcctctgttgtaaatgccctcagcataaagcttgatgtagaaattgctagaaacagaaagctttataagcaatctttttccaaaggaaagccggtaactcccatgacatctgatggttctgctcataatagacgaggaactagcattaaattctcacctgacccagatatatttggaactgagtgccattttaaaccatctattttgtacaaaatggcgaaatcaaaagcttatctatttgctggtgtggaaattcgatggaaatgttcaccaaaccttaacttaagaactactgttctaattcctgaaaatgagacgatttgctatccggatggcttggctg

SEQ ID NO: 294036 - DNA, 769 bp, Unknown
  Bacterial polypeptide expressing nucleotide sequence isolated from the Sargasso Sea
attgctgtagccaatatcgataagattattgagttgattagaggtgcgccagatcctgtcaccgctcgggaagggctcatgaaaaacccttggcccgctggagaagttgtttcacttattgaactaatcgatgaaccgggtaggggcgtagtagagggctcttatcaattatctgaagttcaagccagggccattctagatttacggttgcaacggttaactggtctggaacgagaaaaaatagccggtgaactcgaggatttggcatctcagattatagaatatttagaaattctcgcctcgccggaaaaagtaagagcaattctaagaggagaacttctcgaggttaaagaaaagtttgcaaatgatcgtcgaacaacaatagatgattctgagtttgaagcagacatcgaagaccttattcagcgagaagatatggtcgttaccgttactcatggcggttatatcaagcgtgttcctgtttctacttatcggtcacaaagacgtgggggtaagggtaggtcaggaatgtcaacacgagatgaagactttgtatccaatgtttatgttgtcaatacacacacaccggtcttatttttttccagtcgtggaatggtctataagttaaaagtttataaggtacctttgggtacgcctcaggcacgaggcaaggccttagttaacttactgccattaaaagaaggagaaacaattaccacgcttatgcccttaccagacgatgaggctgcttgcgaagagctagacgtta

SEQ ID NO: 294037 - DNA, 845 bp, Unknown
  Bacterial polypeptide expressing nucleotide sequence isolated from the Sargasso Sea
catgaccgacctttttgaagattcaaaccaatccacagacaaagcctattccgccaaggacatcgaggttctcgaaggcctggagcctgtgcgtcgccgccccggtatgtatatcggcggcaccgatgatgcggccctgcaccatctggtcgcagagatcctggataactccatggacgaagcggtcgctggccacgcggactggatcgaactggaactgaaaccggacaataccgtacttgtccgcgataacggccgcggtattccgaccgatccgcatccgaagttccccgacaaatccgcccttgaagtcattctgaccaccctgcattccggtggtaagttttcgggcaaggcctatgagacatcgggcggtttgcacggtgtgggtatgtctgtcgtgaacgccctgaccgaaaaattccgggttgaggtctgccgcgatcgcaaaatggtattccaggaatattcgcgcggtgtgccgcagatgccgcttcaggatggcggtgcgatcaataaccgccgcggcaccacggtcattttcaaacccgatcccgagatttttggcgcccgcgccaaactcaaaccgggcaccatcttccgcatggcgcggtccaaggcctatctctataagggcgttgaaatccgctggtcggttgatccgtcgcttttgacaagtgatgacccgaccccgcagcaggaagtcctgaaattcccgaacgggattctcgactatctggaaatgacgcttgagggccgcgaactcgtcaccgaacgcccgttcgccggcgaagccaagttttccgacagtcccggtcgcgttgaatgggcaatcggctggcccg

SEQ ID NO: 294038 - DNA, 773 bp, Unknown
  Bacterial polypeptide expressing nucleotide sequence isolated from the Sargasso Sea
tatgccaaaaaaaaagcagtctgatactaagaaatacgattcatcaaatattcaagtccttaaaggccttgaagctgtaaaaaaaagacctgggatgtatattggtgatactgatgatggctctggtcttcatcacatgatatttgaagttgttgataattgtattgatgaagctatggctggacattgctcgaaaattaacattattatcaacaaagacgagtctatcactgtaaaagatgatggaagaggcattccagtagacactcatagaggcgaaggcgttcctgcagctgagcttataatgacaaccctccattctggaggtaaatttgatgataattcttataaagtctctggcgggctacatggagttggagtatcagttgtaaacgctctttctaaagaattaactttaactatctgcagggatgggggaatgtaccaacaaaaatatagtgagggcttggctaaaactaagcttaaaaaaattaaatcctccaaagatacaggcacagaaataacattctcggcctcagataaaatttttacttctattaattttgaagctgatagagttaataaaagggttcaagagctttcattcttgaatgctggagtcagtatcgaagtaacagacgccagaagcggaaaatccaaaaagtttaaaaatgaaggaggtgtttccagttatgttgactatttaagaggaagaaagccagcattatgtcagacaatacaatgtgagggtggtcaggatggagtaactgtag

SEQ ID NO: 294039 - DNA, 649 bp, Unknown
  Bacterial polypeptide expressing nucleotide sequence isolated from the Sargasso Sea
gcctactaagattccaaatatgctcgtaaatggttctgcaggtatagctgtcggaatggctactaatatggcccctcataatttaaatgagtctctgtctgcttgtttggcctatatagacaatccagaaatttcagttcaagaattgatggagttcatacctggtcctgattttcctacaggagcaatcattaatggcaaagctggaatagtaagtgcttatgagacaggcagagggcgagtaaaaataagagctaaaactgaatttgaagatgaagaaaaagataaggcgaaaatcattattacggagatgccttatcaagtagtaaaagccagattaattgaaaaaatagctgaactctcaagagataaaaagcttgaaggtataagggacataagagatgagtcggataaagatggaattagggtggttatcgagctgaaatcgggtcaaattccagatgtagtgctcaataatctatactcacaaactcagatgcaaactgtatttggcattaacaatgttgcgttaattgacggagagccaaagttactgaatctaaagtctatactttcagttttcttcaatcacagaaaagaagttgtttctcgtagaacctttttcgatttaaggaaagcaaaagaaaga

SEQ ID NO: 294040 - DNA, 883 bp, Unknown
  Bacterial polypeptide expressing nucleotide sequence isolated from the Sargasso Sea
ctcataccaacagctcagggaggctctcacctgaatggatttaaatctggtttattagaggcaatgaaagaattttgtgagatcaggagcttattaccaaaagggctgaaaattaatgctgaagatgtcattgccaatgcaacttttgtaatttcatcgaaacttcaaaaccctcagtttgctggccaaactaaagaaagacttgactctaaagatcacatggcatttgtaagcagcgcgactaaagatattttgagcatctggttaaatactcataccgaagaaggtgaaaaaattgctgaactagcaatttcagctgcacaaagtagggcgaaagcatccagcactgtacaaagaaaaaaaactttcaaaggtccagcactgcctgggaagttgtctgattgtaatagcgaagacttaaatgaaacagaattatttctagttgagggtgattctgcaggtggatctgctaaacaggctagagaaagatcctttcaagcaattatgcctttaaggggaaagattctgaatacttgggatttagaaagccaagaaattattaaatcacaagaaataaaaaatttgtcaacagcaattggcgtattgccaggaaattctgatatttccggacttagatatggaaaaatatgcatattagctgatgctgactcagatgggcttcatattgcgactttattatgcgcgctgtttctaagacattataaaagtcttgtccaagatggaaggatctatatcgcaatgcctcctttatatagagtagattgtggtaaagaagttctttatgctttagatgaaatacaaaaagataaagttgtagatgactttaagaagaaaaaaggaaaaccaaaaattaatattcaaa

SEQ ID NO: 294041 - DNA, 916 bp, Unknown
  Bacterial polypeptide expressing nucleotide sequence isolated from the Sargasso Sea
gggtcaataacaatgagaggggtagcaaatattgagcaaattaaatccattggtagagcagagaaagatgctgtaataattacagagcttccatttcaaaccaataaagcggccttgatagaaagaattgctgatttggttaatgaaaaaaaattagaaggtatttctgatattagagatgaaagtgatcgagatgggatgaggattgttattgaactaaaaagagatgcctacccacaagtagttttaaataatttatttaagttaacacctttacaaaataactttagtgcaaatatccttgcattagtaaaaggagagcccacaacactttcacttaggaaaatgttagacgtttttctagattttagggttgagacaataaggcgaagaacaacatttttattaaaaaaggcagaagaaagagatcatattgtaaaaggtcttttattggccttagatgctatggatcaaattataaacctaataagatcagcgaaagattcaatatcagctcgagaaaaattacaaaacgaccataaattatcttccatacaggcagatgcaattctacaaatgcagttaagaagattaacagcattagaagcagataaaatcaaaggagaacataatgagttaactcgaaaaatcaatctatatcagcaaatattaaatagtaaagaaagaatttttgaaattattcttgaagaacttcataaaattgatgaaagattttcttctgctaggaaaacagaaatactagatttaggcggcggtttagatgatattgatctcattgctaatgacagatccgtagttctattaactgaagcaggttatttaaaaagaatgcctgttaatgattttgaatctaccagtcgtggttcaaggggtaaagccggcacaaaaaccaaag

SEQ ID NO: 294042 - DNA, 808 bp, Unknown
  Bacterial polypeptide expressing nucleotide sequence isolated from the Sargasso Sea
cgtcgcgaagtcgttaccgcccgtacggtctacgaactgcgcaaggcgcgcgagcgtgggcacattcttgaagggcaggcggtcgcgctgtccaacatcgatccggtcattgcggtgatcaaggcttcgccaactccagccgaggccaaggatgcgctgatttccactgcctgggaatcgagcgccgttgaagccatggtcgagcgcgcaggggctgatgcctgtcgcccggaaggcctcgatccgcagtttggcctgcgtgacggcaagtactttctgtcgccggaacaggcgcaggcgattcttgatctgcgtctgcaccgcctgaccggcctcgagcacgagaagctgctcagcgaataccaggaaatcctcacccagatcggcgagctgatccgcatcctgaccaatccggttcgcctgatggaagtcatccgcgaagaactggaaggcgtgaagcgcgatttcggcgatgcacggcgcaccgagattctcgagtcgcgtctggacctgacgctggcggacctgatcaccgaagaagagcgcgtcgtcaccatctctcatggtggttatgccaagtcgcaaccgctggccgcctaccaggcgcagcgccgtggtggtcgcggcaaggctgcgactggtgtgaaggaagaggattacgtcgagcatctgctggttgccaacagtcacaccacgctgctgctgttctccagcaagggcaaagtgtactggctgaagacctacgagattcccgaagcatctcgcacttcgcgtggccgcccgctggtcaacctgctaccgctcgatg

SEQ ID NO: 294043 - DNA, 198 bp, Unknown
  Bacterial polypeptide expressing nucleotide sequence isolated from the Sargasso Sea
aagagatggaggcacacatcttgcaggatttagaggggcattaactcgaagtattgtaaactatattaattcaaaatctaaaacaaatattaatgtttcaggtgatgatgctagagagggattaacatgtgtgatttcagttaaattacctgatcctaaattttctagtcaaacgaaagataaattggtttcttctga

SEQ ID NO: 294044 - DNA, 340 bp, Unknown
  Bacterial polypeptide expressing nucleotide sequence isolated from the Sargasso Sea
catgccaaaaccggtaaaaaaatcaccaaaaaaacctcccaaaaaatctaaaaatgacgccagttatgactcctcaaatataacggttttaaagggcttagaagctgtcaaaaagcgccctggcatgtacataggtgataccgatgatgggactggccttcatcacatgatctacgaagtgttagataactcaatcgatgaagcacttgctggctactgtgagaatgtcactctgacagttcacgatgattctaaggttaccatttcagatgacggaagaggcataccagtagatatccataaagatgagggcatttcagcagctgaggtcatcatgaca

SEQ ID NO: 294045 - DNA, 733 bp, Unknown
  Bacterial polypeptide expressing nucleotide sequence isolated from the Sargasso Sea
atgagaaagaaatcaaagaaaaataaatcaattaaaaagaagagttcatctaaaaagacaataaaaaaatcaaactcatcttacactgcaaaagatattgaggtccttgaaggacttgagccagtcagaaaacgccccggaatgtacattgggggcacagatgttatggcaatgcatcatcttgtaagtgaggttctagataattcgatggatgaggttgttgctggttttgctaataaggtagaaataacacttgtttctctagacacaattgagatctctgataatggacgcggaattccagttgataagcatccaaaatttaaaatacccgcagctgaagtcattatgacgacactacattccggaggcaagttttcaaaaaataattacaaaacttctggcggtttgcacggtgttggaatttctgttgtaaacgcgctatctaaaaaacttactcttgaaattgcaagagataaaaaatattttgtacaaacttatagtcaaggctctcctaaaaataaattaaaagcatccgcaaaaggtcctcttaaaaagggtacgaaaatagtattttcacctgatccagaaatttttggcaatgaagtagaatttgatgcttcaattatatacaatatggcaaaagctaaagcctatctcataccagatgttgaaattcattggtcatgcagtaaagcaagctccaaaaaaaatattcctttatcagataaac

SEQ ID NO: 294046 - DNA, 885 bp, Unknown
  Bacterial polypeptide expressing nucleotide sequence isolated from the Sargasso Sea
tgggaagatacatcgccaggattataaaataggcgacccacaaaacaagctcaaagtaaccggcaaggcaaaaaaaacaggaacaagggtctgtttttttccagataggtcaattttcaaagtaacaaactttgaatatgatataatagcagaaaggttaagagagctggcctatctaaacagtggattagagatagtgttgcaagacaaaagggtagatggtggtgaaacaggctctttcaagtttaaaggaggtttaagtgattttgttaaatatcttgatgaacaaaataacccgctacacaacaaggtaattacagtgagtaatgatagtggagaggtgcccgttgatgttgcccttcggtatagcaattcatataatgataacatacttacttttgtaaacaatattaacacgattgaaggggggacgcacctttctggttttcgctctgcgctaacaagggcgatgaataatcatgcatctaaaaacaacttgatcaaagcaaagaaaaacgaaaaaatatctcttacgggtgaggacttcaaagaagggctgacagcaatattaagcatcaaggtggctgaaccacagtttgaggggcaaacaaaaacaaaactcggcaatggtgatgtaaaaggagttgtggacaaggttgtatatgaaggcattctagactttttagaacaaaatccatctattggaagaaaggtcattgaaaaagccttgttggcagctcgaagtagaaacgcagcaaaaaaagccagagaacttattcgtagaaaaagcgccttaggtggctcgtctctccctgggaagcttgcagattgttcaaatagagaccccagtttttgcgagttataccttgttgagggcgactctgc

SEQ ID NO: 294047 - DNA, 802 bp, Unknown
  Bacterial polypeptide expressing nucleotide sequence isolated from the Sargasso Sea
actatcgtttcaaggtcgttacctgatgtaagagatggtttaaaacctgttcaccgcagaataatttattcaatgtatcaacttaaacttttcaaaagttcaagttataaaaaatgcgcaagaattgttggtgatgtaatgggtaaatttcatcctcatggagatcaagctatttatgatagtttggtaagaatggctcaggatttttctacaagaattacattagtagatggccagggtaattttggaaatattgatggagataaccctgcagcaatgcgatacacagaagcaagattacaagattatacaaattatttcttcgacggcatcgaagaaaactctgtagattttaaagataattacgatggtcaaaatttagaaccagtagttctaccatctcagcttcctaatattttaattaatggagcaatggggatagctgtaggcatggctacaaacattcctcctcataatattgttgaattaattgatgcattaaaattaataataaaaaaagataaagcttcactaactgaaattttaaagattattaatggaccagatcttcccacaggtggtgaaataattttagatagcaatgaaaaaaaacaaatttataagaatggtaagggctcatttaatattaatgccaaataccaaatagaagaattaaaaaatggcttatatcaaatcattattactgaaataccatatcaagtaaataaagttaagataatcgaacaacttgctaataatataaataataaaaaattacctcttgatgatgtagttgatgagt

SEQ ID NO: 294048 - DNA, 865 bp, Unknown
  Bacterial polypeptide expressing nucleotide sequence isolated from the Sargasso Sea
gtgggtatggcgacgaatgtgccgccacacaacctcggcgaggtggttgatgctgcggtagcgttaattgatcagcctgatttagacattgccgcgttgatggaattcatcccgggccctgattttccaacggcggggattatcaatggccgtgcggggatcgtgtcggcttataaaaccgggcgtggtcgtatttctgtgcgcgcaaaaacggacattgaagtgaatgaaaaaacgaagcgcgcgagtatcatagttcacgaactgccttaccaggtaaacaaagcacgcttgttggaaaaaatgggcgagttggttcgggataagaaggttgaaggcattactgggttacgagacgaatcggataagtcagggatgcgtatggtcattgaagtgcggcgcggcgatcaacctgaggtggtgttaaataacctgtatcgccatacgcaactgcaaactgtgtttggtattaatatggtcgcacttgatcagacgcagccgaagttaatgaatttaaagcagctgttagagttgtttttggatcatcgtcgcgacgtggtgacacgtcggagtattttcgaactacgcaaggcgcgtgaccgtgcccacgtgttagaagggttaggcctggctttagcgaacattgatgaggtgattgccttaattaaagcagcggcatcaccgcaggaagcaaaagcgggcttattggcgcgtggatggccgtgtgatgaagtggccgagctcattgcgaaggcagcggatgcgacgcgtcctttggatttggcaccagaatacgggttgcgtgacgggcagtattttttatcacctgtgcaagcgcaggcgattttagatttgcgcttacatc

SEQ ID NO: 294049 - DNA, 244 bp, Unknown
  Bacterial polypeptide expressing nucleotide sequence isolated from the Sargasso Sea
ttgagtaatccagaagagccaaataacttagaaaatcctattatatcgattacagatgagatgaaaaaatcttatctggattatgctatgagtgttatcgtctccagagctttacctgatgtaagagacggacttaaacctgttcatagaagaatcttatatgccatgattgagggaaattatgattggtcaaagccacatcgaaaatcagctagaattgttggagatgtaatgggtaattatc

SEQ ID NO: 294050 - DNA, 256 bp, Unknown
  Bacterial polypeptide expressing nucleotide sequence isolated from the Sargasso Sea
atgaattcctctagttattcatcatcgtcaattaaagttttaaaagggttagaagctgtaaaaaaaaggccaggtatgtatattggagatactgatgatggatcaggtctacaccatatgatatatgaggttttagataattcaattgatgaggctttggcaggtttttgtgatgatatttctgtttttttgaacctcagacggaactatttctgtggaagacaatggaagaggtatacctacagatatacataaa

SEQ ID NO: 294051 - DNA, 927 bp, Unknown
  Bacterial polypeptide expressing nucleotide sequence isolated from the Sargasso Sea
cgttggtgtttcagtggttaatgctttatcagaaaaattaacattaaaaatatttagagataaaaaagaatattttgttgaatttaaagatgggaaagcattgtctcctttaaaagctaagggaaaaacaaataaaacgggaactcttataaatttcttaccatctagagaagtattttctgataccaaatttagttctacgatattgcaaaaaagaatgagagagcttgcttttttaaatagaggtttatgtataatactagttgataaaacaggaaaaaaagagaaggaatataaaaataaatatgagggtggcattcaagaatttgttgagtttttagataaaaataaaacatctttggttaataaaaatgatcttagtttatttaaaaaaccaatttatatttcaggaacaaaagacaatgtagaagtggagtgttcattaaagtggaatgctggatattctgaagaaatgttaccttttgcgaataatattcatcaaaaagatggaggaacacatctattgggttttagaagtgctttaacaagagttattaataaatatgcagtagatggaaatctcttaaaaaagaataaaattacacttactggcgatgatactagggaaggactaacaggagttttgtcaataaaaatacctgatcctaaattttcatcacaaactaaagataaactagtttcatcggaagtgaggtttattgttgaatctatagtaaacgataaattatcaacttggtttgatcaaaaccctggaattaaaaaggtagtattattaaaaatagttcaggctgctgttgcaagagatgttgcaagaaaagccagagaaggagtcagaagaaaaggatctttggagttatcaggtctcccaggaaaacttgctgactgtcagattggtaaagcagaagg

SEQ ID NO: 294052 - DNA, 970 bp, Unknown
  Bacterial polypeptide expressing nucleotide sequence isolated from the Sargasso Sea
tctgacattagagatgaaagtgatagggatggaatgagaattgttatagaactaaagagagatgcctatcctcaagttgttttaaataatttatttaagctaacacctcttcaaaataactttagtgcgaatatcttagcattagtaaacggagagcctacaacactttcactcagaaaaatgttagatgtatttcttgattttcgagttgaaacaataaaaaggagaacaggttatttattaaaaaaagcagaagaaagagatcatataattaaaggtcttttattagcgctagatgatatggatgaaataataaacttaataagatcggctaaggatacaaattcagccagagaaaacttacaaaagaatcatgatttatcagcaatacaagctgatgccatattacagatgcaattaagaagattaaccgctttagaggcagacaaaataaaagcagaacatgatgaactaacaaaaaaaattacagaattcaaaaatatattgaaagataaagaaaaaatcaatgaaattattcttggagagctcactataattgatgaaaggttttcatctcctaggaaaactgaaatccttaatttaggaggaggattagatgatattgacctaatagccaatgagagatctgtagttttactaacatcaaatggttatttaaaaagaatgcctgttagcgaatttgaatctactagtagaggatcaagaggtaaagctggcaccaaaactcaagaagatgatgaagttaaattattcataagctgtaatgatcatgatactctcttactttttagtgatagaggcgtcgcttatgcacttccagcttatagagtccctatgagtagcagaacagctaaaggaactccatctgttcaactcctcccaattcctcgagaggaacaaattacatctcttgtttcagtagagtctttcgataatgaatattatttac

SEQ ID NO: 294053 - DNA, 147 bp, Unknown
  Bacterial polypeptide expressing nucleotide sequence isolated from the Sargasso Sea
aatgccaaaaacaaagaaaagcacaaacaccaaaaagtacgactcttctaatataaaagtcttgaaaggccttgacgctgttcgaaagagaccaggcatgtatattggtgacacagacgacggaacaggcctgcatcatatggtgta

SEQ ID NO: 294054 - DNA, 682 bp, Unknown
  Bacterial polypeptide expressing nucleotide sequence isolated from the Sargasso Sea
aatgcgggaattagcatttttaaacaaagggttaaaaatttctgtaaatgatctaactttaaaaaaagaaaaatcgattatctataagtttgatggtggtattttagaatttgttaacttccttgatgaaaaaagagaaaaattaaaaaataaaaatgggaatgagttatttaagaaacctatctttattgaacaatctaaaaataatatggaggtagaatgtgctctacagtggaattcaatgtattctgaagatgtatacccttacacaaataacatatttcaaaaagatggaggaacacatttattaggttttagaagtgcactaacaagagttgttaataaatatgccaacgaatcaaacctattaaaaaaaagtaaactttcaatttctggcgatgatgtaaaagagggtctcacatgtgttttatcaattaaaataccagatcctaaattttcatcgcaaacaaaagataaacttgtatcatctgaggtcagaaatatagttgaaacaattattagcgagaaattatctttatggttcgaccaaaacccatcagttgtaaaagttatactcacaaagattgttcaagccgcgcaagcacgggatgttgccagaaaagctagagaaaatgtaagaagaaaaggtgctcttgagttaactggtttacctggcaaatag

SEQ ID NO: 294055 - DNA, 196 bp, Unknown
  Bacterial polypeptide expressing nucleotide sequence isolated from the Sargasso Sea
atgaccgatgattatagtgcctatgattcaagcagcataaaggtgttaaagggcctagatgcggttcgaaagcggcccggaatgtacattggcgatactgatgatggcaccggactgcatcatatggttcaggagctcgttgataatgcgattgacgaagcacttgaggggtactgcaatgttattagagtggtag

SEQ ID NO: 294056 - DNA, 700 bp, Unknown
  Bacterial polypeptide expressing nucleotide sequence isolated from the Sargasso Sea
atggctagagaatataatgctgaatctatagaagtcctctctggacttgatccggttaaaaaacgaccgggcatgtataccgaaacctctaggccaaatcacttagccttagaagttattgataatagcatcgatgaagcgcttgcaggatatgccacaactattgatgttcaattaaataaagatggttcccttagcgttgaagatgatggaagaggtatgcctgttggggtgcatcctgatgaaggtattccagcagtagagctaatatttactaggctccacgctggagcaaaattttctgatgaagattataaattttctggaggtcttcatggtgttggcgtatctgtagtcaatgctttgtcacttaatttatctgctgaaatcaaaagaggcggtcacaaataccttctagagtttaagaatagtgaaaaaaagaaagaattagctaagctagataaagtaggcaaaaagaataccggtaccaaagtaacctttcttcctgatcctcaatattttgataatgctaagttttcagtatcccaacttatggctgcactgaaagcaaaagcagtgttgtctccaggcctaaagatttcctttaaagataaggaatcaggaaaatcagagagttggtgttttgtagatggtttagcagcttacttagttaccagcaacaaaggaggagacttaattc

SEQ ID NO: 294057 - DNA, 783 bp, Unknown
  Bacterial polypeptide expressing nucleotide sequence isolated from the Sargasso Sea
aatggagaaactaaaactccactaaaagtaacaggtaagtcaaagaatactggtacaaaaatcaattttttaccttcaaaagatattttctcatctacaaaatttagcttttcaattattcaaaaaagaatgcgtgaattggcttttttaaataaaggaattaaaatcatacttaatgatctaacccaaaaaaaaataaagactcaagaatttaaatttgaaggtggcataaacgagtttgttgaatttttagatgaaaaaagagaaaaattaaaaaataagaatgataatgatttgtttagaaagcctatttatatcgaaggaattaaaagcaatattgatgttcaatgttcattaaaatggaatgcaggatataatgaggatgtttacccctatactaataatatttatcaaaaagatggaggaactcatcttttaggatttagaagcgcattaacaagggttgtaaataaatatgcgtctgagcaaaatttattaaaaaaaagtaaagttttactgtctggagacgatgttaaagaaggtttgacatgtgttctttctgtaaaaatcccagatcctaaattttcttctcaaacaaaagacaaattagtttcctcagaagtaagaaatattgttgagggtatagttaatgaaaaattgtcaatttggtttgaccaaaacccatctgtttcaaaaataattttaacgaaaataattcaggctgccttagcaagagatgttgccaaaagagcaagagaaaacgttagaagaaaaggtgcttta

SEQ ID NO: 294058 - DNA, 872 bp, Unknown
  Bacterial polypeptide expressing nucleotide sequence isolated from the Sargasso Sea
gccaagaaaccagcagctaagaaaccagcagccaagaaaccagcagctaagaaaccagcagctaagaaaccagcagccaagaaaccagcagccaagaaaccagcagctaagaaaccagcagccaagaaatcgaaaaccgctactgctacaaagaaaaaaccaacaattaaatctgatacactaaacggttcaattgctgttgaagatgaaatatctaagtcattcttagattatgctatgtcggttattgtttccagagctcttccagatgtaaaagatggattaaaaccagtacaaagaagaattttatattcaatgtatgaaacaggaattagaccaacaggacctttcagaaagtgttcaaaggttgtaggtgatgttatgggtaactatcatccacatggaaacgacgctatatacggaaccttagtaaggttgggacaaaattttagtactagataccccctgattgaaccacagggtaactttggaacccccgacgacccacctgctgctatgaggtatacagagtctagaatgtcttccctgtcttcacagctattagatgggattgacgaagagacagtagactttgagcctaattattccggagagacaagcgaaccaaaagtattacctggaagatttccaaaccttttaattaatggagctgagggtatcgcagttgctatggcaacaaatatgccaccctacaacctgaaagagattacagaggcagttaaatttacattaaaaacaaaagaccccaaaccacgagattatttaaaaataataaaaggtccagattttcctacaggaggattaattgtagatacccccacgataaaagaagcaatacttaaaggtagagg

SEQ ID NO: 294059 - DNA, 211 bp, Unknown
  Bacterial polypeptide expressing nucleotide sequence isolated from the Sargasso Sea
gatgagctcatcatatctttcttatgcaatgagtgtaattgtaagtcgtgcacttcctgatgtaagagatgggttaaaaccagttcatagaagaattttatatgcaatgtataaaggtggatacgattggtctaaacaatttagaaaatctgcaagaatagttggagatgttattggtaaatatcaccctcacggtgatcagtctgtttat

SEQ ID NO: 294060 - DNA, 961 bp, Unknown
  Bacterial polypeptide expressing nucleotide sequence isolated from the Sargasso Sea
ttccgttgtaaacgctctttcagaaaaattaaaattagagatagatagagatggaaaaaaacattttatcgaatttagagatggggaagctgtagcacctttaaaagttaatggaaaatctaaatatactggaacacaaataacttttttaccttctaaaaaaatattctcatcgattaaatttagctcaaacattcttataaagcgtatgagagagttggcatttttaaataaaggtattaaaattattttttctgatgcaagtcaaaaaaaagtaaaatccttagagtttaattatgagggaggagttttagaatttgttaatttcttagatgaaaaaagagaaaaattacaaaacaaaaatggaaatgatctttttaaaaagccaatttatatagagggtaaaaaaaataatatcgaattagaatgttctttgaaatggaatgcaagctattcagaagatatttttccatatacaaataatatttatcaaaaagatggtggaacacatttattgggatttagaagtgcacttactagagttattaataaatatgcaaatgaaaataatcttttaaaaaaaaataaattagcaatttccggtgatgatataaaggaaggactcacatgtgttttatctaccaaaatacctgatcctaaattttcatctcaaacaaaagataaacttgtttcatctgaagtcagaatgatagtcgaaacattaataaatgaaaaattatctatatggtttgatcaaaatccagctattgcaaaaattatcttagctaagataatccaagcagctttagccagagatgttgctagaaaagcaagagaaaatgttagaagaaaaggagcgcttgaaattagtggtcttcctggaaaattagcagactgtcagataggaaaacaagaaggaacggaactgtttatttgtgaaggagattctgctggaggatca

SEQ ID NO: 294061 - DNA, 909 bp, Unknown
  Bacterial polypeptide expressing nucleotide sequence isolated from the Sargasso Sea
ggatgaagcagttgccggctatgcaaataagattaatgtcgaaattttagagaataatataatttccatctctgacaatggaagaggtataccagttgataaacatcctaaatttccgagcaaatctgctcttgaagtgattttaacgactctgcatgcaggagggaagtttaataataaaatctaccaaacatcaggaggcctgcatggtgttggtataagtgttgtaaatgcattatcagaatttttaaatgttgaagtttatagagataaaaatatttactcacaagattttaaaaaggggaaacctcaaggaaaacttttaaaattagatcaaaaaactaataaaagaggaaccaaagttacctttaaaccagatgagagtatatttgataaaaatataatttttaatatcaaaagactttatgaattttgtaaatcaaaggcgtatttatttgctggaacagaaattaaatgggtttgcgataataaattagctctagataataacattcctaattcggaagtatttaacttctcaaatggtcttgaagattatcttaataatgaaattgaaccctcttcatttattggtaaagaatgtttctcaggaaaaaaagaaaaggatgataataataattcagtagaatgggcagttaattggacaattaattctgacggatttttaaaatctttttgtaatactgttccaacacctgagggcggaacccatgaaataggcttaaaaaacggtcttttaaaagcgttaaaatcacattcagagagaattggtaacaaaagaggctcgtcaattaattctgaagatttatcaaaatcaatggtttgtgttatatcactttttatacctgatccaaagtttcaaggacaaactaaagataaattatcaaa

SEQ ID NO: 294062 - DNA, 129 bp, Unknown
  Bacterial polypeptide expressing nucleotide sequence isolated from the Sargasso Sea
tatgccaaaaaatttagaaaaaactaaaaattcatcctacaaagctgattccatcaaagtactaaaaggcttagatgcggttagaaaaagaccgggcatgtatattggtgacaccgatgatggaacaag

SEQ ID NO: 294063 - DNA, 415 bp, Unknown
  Bacterial polypeptide expressing nucleotide sequence isolated from the Sargasso Sea
tatgtgtgatgccgatattgatggtagtcatatttcaacattaattttaacatttttctttagatatatgaaggaattagtggaaaatggtcatgtgtatatagctacacctccactttatcttgtgaaaaaaggtgcaaaaaaagaatatgcatggaataatgatcagcgagatagtattatgatgaagtttggagatggatgtaaggttcaaagatataaagggctaggtgagatgaatgctgctcaattatgggaaactactatgaacccagaatttagaactttaagaagagttgatattgaaaatggtgttgaagctgatagaattttttcaatgttaatgggtgatgatgtccctccaagaagagaatttattgaaaacaatgcaatctatgctaatatagatgcttaa

SEQ ID NO: 294064 - DNA, 775 bp, Unknown
  Bacterial polypeptide expressing nucleotide sequence isolated from the Sargasso Sea
gggggtcattgatgatcctaaatcatttgccgctatgagatatactgaatgtcgtctatcgccttatgcaaagagccttcttgaagagcttggacaaggaacagttgattgggtcagtaatttcgatgggactcttttagagccctcggttctcccttcaagattacccaatcttcttcttaatggagcaacaggaattgccgtaggaatggccaccgatatacctcctcataacctaaatgaggtagttaaggcttgtatcaagatcttggatgaaccaaaagtttcggtagaagaattgtacgcaatagtgccaggacctgattttcctacaaaagcagaaataatttcttctgaagaggacttgaaagagatttataggtccggcagaggttcaataaaaatgagatctacttatgaaatagaaagtggtgaaataataattacagccttacctcatcaaacatccagttcaaaaatattggaacaaattgctatccaaatggactcaaagaaacttcctatgattgttgatttaagagatgagagcgatgaagaaaatcctacaagattggtattagtgcccaaatccaatcgagtagacaaagatgcagtcatgaatcatctgtttgctacgactgatcttcaaaagaactatcgagtaaatatgaatttaattggtctcaatggcaagccccagacgagagatataaaatcagttcttaaggagtggcttactttcagaactcaaactgttactagaaggttgcaacat

SEQ ID NO: 294065 - DNA, 733 bp, Unknown
  Bacterial polypeptide expressing nucleotide sequence isolated from the Sargasso Sea
ggttcagccaaacaaggcagaaaccgtgaaaatcaagcagttttgccgcttagaggaaaaatattaaatacttttacagatttaaatggatcaaaaaagaatggaaattcaaatgatttaagaactaaaagcttatcaaaaatgatttcatcaaatgaaatagttacattgataaatgcacttggtcttgatccaaaaaacgaggatatagatcttaaagatttaaggtatggaaaaataataataatgacagatgccgatgttgatggctcacatataagagcattattattaacgttttttaataacaaaccatttgataaattaattgagtttggacatgtttaccttgctcagccacctttatttaaaattaataaaggaactaagagcatatatatcaaagatgaaaatgagttggaaagttatttaataaaaaattcaaaggatattaaaaaatataaaaagaattctaaagaatttaataatattcttcaaattgaaaagtctaaacttaacattcaaagatttaagggacttggtgaaatgaaccctgatgaattatggaatacaactttaaatcctgaaacaagaaatttgttacaagttcaatattcaaaaaatagtaaaaaagatcaagatttgatacaaactttaatgggtaacgatgtttcatcaagaaaagattttattgttgaaaatgcaataaatgtttcaaacctagatatttaga

SEQ ID NO: 294066 - DNA, 481 bp, Unknown
  Bacterial polypeptide expressing nucleotide sequence isolated from the Sargasso Sea
gagtttgatactgaaaaacttagataccatagaattatttttatgatggatgctgatgttgacggttctcatatcagaacattgttgcttactttctttaatagacacatgcgagatttgatttcaaaagggcatgtttatatggctcttcctcccctatataaaattaaaaaaggcggtaagacttattatgctaaagacgaggaagaaaaagatgagatcttaaaaaacataagaaaagatgataatgaaaactctagatctccagaaatacagaggtataaaggacttggcgagatgaatccagaacaactttgggaaacaacctttgatccaactaatagaaggcttgttcagattacaattgatgatgtaggagaaactgacgatatttttgaaactttgatgggtgatgaagttaaaccaagaagagagttcattgatgagaatgccttaagagccgaaaatgttgatgtttaaa

SEQ ID NO: 294067 - DNA, 799 bp, Unknown
  Bacterial polypeptide expressing nucleotide sequence isolated from the Sargasso Sea
actgaattctataaagtttttaaaaaaaacaaagaaatcaggaacaaaaataaactttcttccttcaaaagatattttttcaaaaattaaattcagcgcaactattttggaaaaaaagatgagagagttagcttttttaaacaagggtttgaaaataagtttattagacgagacacattcaaaaactaagacctacgaacacaaatatgatggaggagttgaagaatttgtaaaatttttagaccaaaaaaaatcactattaatcaataaaaatgagaaagcagttttcaaaaaacctttatacataaaaggtgaaaaaaaccaagtaatggtagaatgctcttttcaatggaatgccggattttcagaagaagttatggcattcacaaacaatatacatcaacgtgatggtggtacacaccttcttggttttagaagcggattaactagaataataaataaatatgcttcagaaaaaaatcttaacaaaaaaaataaagttaatataggtggagaagatataaaagaagggttaacagcaattttgtcagtgaaaatgcctgatccaaagttttcttctcaaaccaaagacaaattagtttcttcagaaattagaaatattgttgagtcaatcgtaagtgataaagtgactgtctggtttgatcaaaacccttctgttgtcagagttattctagaaaaagttttacaagctgcaatagccagagatcttgctagaaaagcaagagatagcgttagaagaaaaggttcattggaattatctgggcttcctggaaattag

SEQ ID NO: 294068 - DNA, 802 bp, Unknown
  Bacterial polypeptide expressing nucleotide sequence isolated from the Sargasso Sea
tttaataatggtgaagcaaaagcacctttaaaattaattggaaaatctaaacagactggtactcaaataacttttctaccttctaaagaagttttctcatcaataaaatttaatggaaatattctaattaaaagaatgagagaattagcttttttaaacaaaggtatcaaaataatttttaccgacttaagtttaaagaaagaaaaaacttctgaatttaaatttgatggtggagttcttgaatttgtagattttttagatagagaaagagaaaaattacaaaataaaaatggaaatgatttatttaaaaaacctatatatattgagggaaaaaaaaataatattgaaatagaatgttcgttaaaatggaacgctggttatggagaagatatttttccctatactaataatatatatcaaaaagatggtggaacgcacttattaggttttagaagtgctttaacaagagtaattaataaatatgcaagtgagcataatcttttaaaaaaaaataaattagcaatttcaggagacgatattaaagaaggattaacctgtgtattatccactaaaattcctgatcctaagttttcatctcaaactaaagacaaactagtttcatctgaagttagaatgattgttgagacagttattaatgaaaaattatccatatggtttgatcaaaacccatcaattgcaaaagtaattttagcaaaagttattcaagcagctatggcaagagatgtggcaagaaaagccagagaaaatgttagacgaaaaggtgctttagaattaagtggac

SEQ ID NO: 294069 - DNA, 762 bp, Unknown
  Bacterial polypeptide expressing nucleotide sequence isolated from the Sargasso Sea
attggggaaataccatcctcatggagatggcgcaatttacgaagctatggtccgcatgggtcagcaattttctatgtcggtcccgtttgtcgacccgaagggaaatttcggaagcctcgatgacccgcccgctgcctaccgctataccgaagcgcgcctaacggaagcagcgatggccatggtcgctgacctagacgaggacacagtcgacttttcggcaaacttcgatggagaacgagaagaaccaacctgcctgcctgccggtttaccgaatctgctcatcaacggagcttctggcatcgctgtaggcatggctaccaatatgccccctcataatcttgtcgaggtaggtaaggcaatcgaacacgtgttgacgaaacgacgaccgaagcccactgtcgaagatttgatgaagttcgttaagggtccagactttcccactggaggcattgtcgtcgacgatggctctctactggaggcttacgaatcaggccgaggcacgattcgcgttagagcacgtgcggaaatagaaaatatcactgcccgtcgtcaaggcattgtggtgacggaactgcctttcgctgtagggcccgagcgtgtgcaagctaaaattcgtgaacttatcaacaacggaaaacttgaaggtatcgcagtagtaacagacttatctgatcgcaaccatggtctcaggctcgtgatcgaatgcaaggccggagtaggaccgcactcgctgttggaaaagctctataggctcacgccgtt

SEQ ID NO: 294070 - DNA, 861 bp, Unknown
  Bacterial polypeptide expressing nucleotide sequence isolated from the Sargasso Sea
tggaaaaaaacattttgtagaatttataaatggtgaaactaaaacaccgttaaagataactggtaaatcaaaaaatactggcacaagaataaatttcctaccctctaaagatattttctcatcgataaagtttagcttttcaattattcaaaaaagaatgcgtgagttagcttttctaaacaagggaattaaaattaaaattaatgatttaacacaaaaaaaaataaagtcttatgaatttaaattcgagggaggaataaatgaatttgttgaatttttagatgaaaagagggaaaaattaaaaaataaaaatgacaaagatttgtttagaaagccgatttatattgaaggcatcaaaagtgatatagatgttcagtgttcgctaaaatggaatgcaggatataatgaggatgtttatccttatactaataatatttatcaaaaagatggaggaacccatcttttaggttttagaagcgccctaacaagagttgtgaataaatatgcatcagagcaaaatttattaaagaaaagtaaggttcttctttctggtgatgatgtaaaagagggtttaacttgtgttttgtcagtaaaaattccagatcctaaattttcttcacaaacaaaagataaattagtttcttcagaagtaaggaatatcgttgaaggtattgttagtgaaaaattatcaatttggtttgatcaaaacccatcggtttccaaaataattttgacaaaaataattcaggctgctgttgctagagacgtagctaaaaaagcaagagaaaacgtaagaagaaaaggagccttggagttgaccggattacctggaaaattagcagactgtcaaaattcaaaaac

SEQ ID NO: 294071 - DNA, 918 bp, Unknown
  Bacterial polypeptide expressing nucleotide sequence isolated from the Sargasso Sea
atcaagctatttatgatagtttggttagaatggcacaggatttttctacaagaatacagctaattgacgggcagggaaactttggaaatattgatggtgataatccagcagcaatgcggtacaccgaagcaaggttacaagattatacaaattatttttttgatggaattgaagaaaattctgtagattttaaagaaaattatgatggccaaaatcttgagccagtggttctaccatctcaagttcctaatattttaattaatggagcaatgggtatagctgtaggcatggccacaaatattcctcctcacaatattgttgaattaatcgatgcattaaaattaataattaaaaaagataaagcttcactaactgaaattttaaaaattattaatggaccagatctccctacaggtggtgaaataattttagatagtaatgaaaaaaagcaaatttataagaatggcaagggatcattcaatattaatgctaaatatcatatagaagaattgaaaaatggtttgtatcaaataattatttctgaaattccttatcaagttaataaagttaaaataatcgaacaacttgctaataacatcaataacaaaaaattaccattggatgatgttgttgatgagtcagatgaaaatataagaatagttttaaaacccaaaactagaaatattgatgcagaaaaattaataagcttatgttttaaattaactgacctatcaattaagtactcttgtaattttaacgttttaattgatggtatagaacccaaacaaattggaattattgaaatactctctaattttttagaacatagaaaaattacaattaaaagaaaatccaaatttaatattgaaaaaataaaaaaaagattagaaattttgaagggatatcaaattttttaaa

SEQ ID NO: 294072 - DNA, 814 bp, Unknown
  Bacterial polypeptide expressing nucleotide sequence isolated from the Sargasso Sea
acataggcctggaatgtatataggtggtgtagataacaatgctttgcatcacttagcaattgaaataattgataacagcatggatgaagttgttgcaaaacatgcaacaattataaatgttcaactttctgatgataatactatttctatttcagacaatggcagaggtataccaattgatagtcatccaaagtttaaaaacaaatcagcattagaaattataatgactacactgcacgcaggaggaaagttttcaaataaaaattatataacatccggaggtcttcatggagttggagcgtcagttgttaatgctctttcttcttttttaaaagttcaggtcactcgcaaaggtattatttatgaacaacaattttcaaagggttttcctacaacaaaactcaataaaatagggtcaacaaaaaaatctaatggtacttccatttcatttaaaccagacataagtatatttggtgaaaataatttatttaaccctgacaagctctttcaaattttggaatataaagcttatctttttggtggtgttcaaataaattgggaatgtgaatcatttttgattaaagaaaatagcaaaacaccaaattttaaaaatatatgttataagaatggtataatagattatattcaatataaaactttaacaataccgatgttttcttcatctacttttaacggaaacgtaaaaatcgaagatgaaaatgtagaatgggtaattgcgtggcttacaaaaagtgaaaccagttttatagaaacttactgtaatactgttccaacacctcttggtggcagtcat

SEQ ID NO: 294073 - DNA, 799 bp, Unknown
  Bacterial polypeptide expressing nucleotide sequence isolated from the Sargasso Sea
ttttgttgaatttatagatggagaagcaaaagcacctttaaaggttaccgggaaatctaaacaaaatggaacacaaataacatttttaccatcaacaaagatattttcttcggtaaagtttagtgcaaatattttaattaaacgaatgagagaattagcatttttaaataaaggtattaagataatttttactgatgctagtcttaaaaaagaaaaaactattgaatttaaatttgatggaggtgttcttgaatttgtagaatttttaaatgaaaaaaaagaaaaattgcaaaataaaaatggaaatgatttgtttaaaaaacctatttctatagaaggaaaaaaaaacaatatagaaatagaatgttctttaaaatggaatgctagttattcagaagatatttttccttatactaataatatatatcaaaaagatggaggaacacatttattaggttttagaagtgctttaacaagagtaataaataaatatgcaaatgagcacaatcttcttaaaaaaaataaattagcaatttcaggagatgatattaaagaaggacttacttgtgttctatctactaaaatacctgacccaaaattttcatctcaaactaaagataaattagtttcttctgaagtgagaatgattgtagaaacagttattaatgaaaaactatcaatatggtttgatcaaaatccatctattgcaaaagtaatattagctaaagttattcaagcagctatggcgagagatgttgctagaaaagcaagagaaaacgtgagacgaaagggtgctctt

SEQ ID NO: 294074 - DNA, 919 bp, Unknown
  Bacterial polypeptide expressing nucleotide sequence isolated from the Sargasso Sea
caaaccaataaagcggccttgatagaaagaattgctgatttggttaatgaaaaaaaattagaaggtatttctgatattagagatgaaagtgatcgagatgggatgaggattgttattgaactaaaaagagatgcatacccacaagtagttctaaataatttatttaagttaacacctttacaaaataactttagtgcaaatatccttgcattagtaaaaggagagcccacaacactttcacttaggaaaatgttagacgtttttctagattttagggttgagacaataaggcgaagaacaacatttttattaaaaaaggcagaagaaagagatcatattgtaaaaggtcttttattggccttagatgctatggatgaaattataaacctaataagatcagcgaaagattcaatatcagctcgagaaaaattacaaaacgaccataaattatcttccatacaggcagatgcaattctacaaatgcagttaagaagattaacagcattagaagcagataaaatcaaaggagaacataatgagttgactcgaaaaatcaatctatatcagcaaatattaaatagtaaagaaagaattttagaaattattcttgaagaacttcataaaattgatgaaagattttcttctgctaggaaaacagaaatactaaatttaggcggcggtttagatgatattgatctcattgctaatgacagatccgtagttctattaactgaagcaggttatttaaaaagaatgcctgttaatgattttgaatctaccagtcgtggttcaaggggtaaagccggcacaaaaaccaaagaagatgatgacgtaaaattatttataagctgtaacgatcatgataatcttgtgcttttcagtgatagaggagtagcttatgctctccccagcatatagg

SEQ ID NO: 294075 - DNA, 756 bp, Unknown
  Bacterial polypeptide expressing nucleotide sequence isolated from the Sargasso Sea
aacgaactaggaaatacggatttgagtggaactaaaataacattcagaccaagtaaaaagtatttctcactaacaagctttaactcagatattctgaagaagagatttaaagaactggcttttttgaactctggtattgaaatcaactttgtagatgaaaataaatcaatatctcaaacatttaaatacgagggcggcattatcgaatatgttaaagaacttactaaaaagaaaactccgattcaagagaagatcattaacatttcatcttctaaaaagaatatctcagttgatctcgctctaatgtggtctaataattatcaggaagaagtcttatgtttcacaaataacataccacaaaaggatggcggcacacatctatctggctttaaaacatcactaacaagaactctcaattcgataattttaaaaaataatcctaaagataaaattgatataactggagaggatactcgagagggaattactgcaatcatttctgtgaagatgccagatcctaaattttcatcacagactaaagacaaattagtatcttcggaagttaaaggtatagtcgagactcttgtcagttcaaaacttaaagaatatctcgatgagaatcccaaggatttaaaatcaatcactgctaagatttatcaagctgcaaaggctagagaagaggctcgaaaagcaaaagaactaattaggcgcaaagatcctttgagtatcggtaatttacctggtaagcttgctgat

SEQ ID NO: 294076 - DNA, 515 bp, Unknown
  Bacterial polypeptide expressing nucleotide sequence isolated from the Sargasso Sea
tatggaaaatataaaaattattaatagaaatttttctgatgaaatttcagaaagatatttagcttatgcactttccacaataacatctagatctttaccagatgtaagagatggccttaagccagtccatagaagattattatatgctatgaggcaattgaaacttaattctaatagtaactttaaaaaatccgcaagagttgtcggtgacgttatgggtaagtttcatcctcatggcgatggtgcaatatatgactcaatggttagaatggcacaagagttttcattaaaatatccattggttgatggacaaggtaattttggtaatattgacggtgataatgctgctgctatgcgttacacagaagctaaattaactgaatttgcggaatttttgcttaatgatatagattttgacacagttgattttaaagaaacatatgacggtgaagataaagaacctactgttttaccatcggcaataccaaatatgttagctaatggatcacaaggta

SEQ ID NO: 294077 - DNA, 701 bp, Unknown
  Bacterial polypeptide expressing nucleotide sequence isolated from the Sargasso Sea
tatgtcaaaaaagaagtctgatagcaagaaatacgattcctcaaacatacaagtccttaaaggtcttgaagctgtaaagaaaagacccgggatgtatattggtgatacagatgacggctcgggtcttcaccatatgatatttgaagttgttgataattgtattgatgaagccatggctggacactgctcgaaaatcaatattattattaacaaggatgagtctattactgttaaagatgacggaagaggtattccagtagatacacataaaggcgaaggtgttcctgctgctgagctcataatgacaactcttcattctggaggtaaattcgacgataactcttacaaagtctctggagggctacatggagttggtgtatcagttgtaaatgcgctgtcaaaagaattaactttaactatatgcagggatggcggcatgtatcaacaaaaatatagcgaaggcgtggctaaaactaagcttaaaaaaattaaagcctcgaaggaaacaggtacagagattacattctcagcttccgataaaatttttacttctattaattttgaagctgatagaataaataaaagagttcaggagctttcattccttaatgccggcgttagcattgaagtaaaagacgccagaacgggaaaatctaaaaagtttaaaaatgtaggcggagtttccagttatgttgactact

SEQ ID NO: 294078 - DNA, 940 bp, Unknown
  Bacterial polypeptide expressing nucleotide sequence isolated from the Sargasso Sea
aaaaaagaatgagagaattaaatggattttggatgagggactgagtgactacctcgatgagttttcaggttgtaatgagaaacttcttgatgaaactattattctttccaaaacttccgatgatcaagcattagatgtagcagtgaattggactgaagagacttcaaataatttactcaaagaaacttatgtgaacttaattcctactgcattaggtggctctcatttaaatggttttaaatctggtcttcttgaggcaataaaagaattctgcgactacaggaatctgattccaaaaggtataaaaattaactcggatgacattcttgctaactgcatttttgttatttcctcaaaattaaaaaatcctcagttcgctggtcaaactaaagagaggcttgattctaaagatcatatgagctttgtttcatcttcaacaaaagattctctgagtatttggcttaaccagcataccgaagagggtgaaaagattgcggatcttgcaattgccgctgctcaaaagaggattaaaagctcaacaaaagttgatagaaagaaaacatttaaaggcccggctcttcctggaaagctttcagactgtaactgcgataatatcgaagaaagcgagctatttttagttgagggagactcagcaggagggtctgcaaaacaagctcgagatagaaggtttcaggcaataatgcctttaagaggaaaaattcttaatacctgggatttagaaagtgcagacataataaaatctcaagaaattaaagatcttgcaactgctattggatctttgccaggagatacagatatttccaacctaagatatggaaagatttgtatacttgctgatgccgactcagacggactgcacatagcaactttattatgtgcattatttctcagacactataagaatttagtacctcaggaa

SEQ ID NO: 294079 - DNA, 925 bp, Unknown
  Bacterial polypeptide expressing nucleotide sequence isolated from the Sargasso Sea
cacaaagaagccagcggcaaagaaaacaaccacaaagaagccagcggcaaagaaaacaaccacaaagaagccagcggcaaagaaaacaaccacaaagaagccagagactcaaaacggggcaatagcggtagaagatgaaatctctaagtctttcctggattatgcaatgtcagttattgtttcaagagcactccctgatgttaaagatggtttaaaaccagtacaaagaagaattctttattcaatgtatgaaacagggataaggcccactggtccatttagaaaatgttccaaggttgtaggtgatgttatgggtaattatcacccacatggaaacgaagctatatacggaactcttgtaaggcttggacagcactttagtacaagatatcctcttatcgaaccacaaggcaacttcgggacccccgacgacccaccagcagcgatgagatatacagagtctagaatgtcgttactagcatcgcagcttcttgatggcattgatgaggaaactgttgactttgaaccaaactattcaggagaaacaaccgaaccaaaagtactcccaggaaggtttccaaatcttcttataaacggagcagaaggaatagctgtcgcaatggccacaaacatgccaccatataacctacaagaaattacagaagcagttaaattcacactaaaaaccaaagaacctaaaccaagagactacttgaagataattaaaggcccagactttccaaccggaggcttaatagtcaaaaccccaacaataaaagatgcaatattaaaaggaagagggtctatcaaacttagagctgtcgctgacgttgaagagcttggaaaaggaagatcagcaatcgttgtgaaagagttaccttatcaggcatcaatagatcgaataatggaaaaattgcttccttag

SEQ ID NO: 294080 - DNA, 691 bp, Unknown
  Bacterial polypeptide expressing nucleotide sequence isolated from the Sargasso Sea
ttacctttaagaggtaaaattttaaatacttatgttgactcaaacggatataaaaaaaatggaaaaggcaatgattttaaagttaaagcgttatcaaaaatgatttcttcaaatgaaatagtaacattaattaatgcactaggattagatccaaaagttgaagatatagacttaaaagatctaagatatggaaaaataataataatgactgatgctgatgtggatggttctcacattagagcattgttgcttactttttttaataataaaccctttaataaacttatagaaaatggacatgtttatcttgctcagccaccattatataaaattaataaaggatcaaaaagtatatacattaaagatgaaaaggaacttgaacaatatattttaaataattcaaaagaattaaaaaaatttaaaaagggtaataaagatttttcaaaattttatgctgaagaaaaatcaaaaatgaacatacaaagatttaaaggcttaggtgaaatgaatccagaagagttatggagcacaactttaaatcctcagacaagaaatttacttcaagttcagtactctaaaaatgttaaaaaagaccaagatattattcatacattaatgggtaacgatgttgctttaagaaaagattttattgtatctaatgcaattaatgtttcaaatttagatatctaaa

SEQ ID NO: 294081 - DNA, 548 bp, Unknown
  Bacterial polypeptide expressing nucleotide sequence isolated from the Sargasso Sea
gatgaccgattttcgcgatcctttcgacaatatcaaggaccatccgttcgacgcggcgctgtcgcagcgttatctcgtctatgccctgtccaccattaccgcgcggtccttgccggatttgcgcgacgggttgaagccggtgcatcgccgcctgctctgggcgatgcggctgctcaggatggagccgtccggcgcgtcggccgacgtgctggtcgccaaccctgcccgcaacggcacaagctacaagaaatgcgcccgcgttgtgggcgacgtcatcggcaaatatcacccccatggcgacagcagcgtctatgacgccatggtgcggctggcgcaggatttcgtcctgcgcacgccattggtcgatgggcagggcaatttcggcaatatcgacggcgataatgccgccgcgatgcgctataccgaagcgcgcctgacccagcctgccgccgacctgatggcggggctggacgaaggcacggtcgattttcgcccgacctataatggcgaggatgaagagccggaggtattccccggccttttcccca

SEQ ID NO: 294082 - DNA, 898 bp, Unknown
  Bacterial polypeptide expressing nucleotide sequence isolated from the Sargasso Sea
ataataaaaaatccttctatagaagataaagaactttttgaacttattaagggaccagatttccctactggaggccagatattagggagggatggtattagagaaacatttaaatccggaagagggtctataactatgagaggggttgcagatattgaacaaatcaaatctcctggaagagcagaaaaagatgccgtaataatcactgaacttccatttcaaactaataaagcagctcttatagagaggatagcagatttagtaaatgagaaaagattagaggggatatctgatattagagatgaaagtgatagagatggtatgagaattgtaattgagcttaaaagagatgcctatcctcaagttgttttaaataatttgtttaaaataactcctcttcaaaataactttagcgcaaatattttagcccttgtcaacggggagcctaccaccctttccctaagaaaaatgctagatgtatttctagaatttagaattgaaacaatcaaaagaagaacaagtttcttattgaaaaaagcagaagagagagatcacattatcaaaggtcttcttttagcccttgacgctatggaaaatattataaatttaataagatctgcaaaagatacaaattcagcgagagaacaattgcaaagtaaccatgaattatcagtaattcaagcagatgcaattttacaaatgcaattaagaagattaacagctttagaggcagacaaaataaaggaagaacatgatgaacttacaagaaaaattacagattacaaaaatatattgaatgataaggagagggtaaatgaaataattcttgaagagcttagaaaaataaatgatagatttacatctccgagaaaaacagagattctaaatttaggcgggg

SEQ ID NO: 294083 - DNA, 88 bp, Unknown
  Bacterial polypeptide expressing nucleotide sequence isolated from the Sargasso Sea
atgacaaaaaacaattatcaagcagactcaataaaagttctaaaaggtttagacgctgttagaaaaagaccaggaatgtatataggtg

SEQ ID NO: 294084 - DNA, 824 bp, Unknown
  Bacterial polypeptide expressing nucleotide sequence isolated from the Sargasso Sea
tattgcacaaccgccattatataaactaaaaaaaggcaagaaagaggagtatgttctaactgacgatgagcttaataatttaatactaagcaatgctgttaagggcaccgaggtcagggctaaaaacaagaaaaaaggaattgagggagacggcctcttaaacaccattcttgattattctaattcattgtctgtgattgaaaaaattgagaaacaggcaggaactattgcggcaaaagcaatatctcttcataaaccaatcactaaaacagaagctaatagcaaaaagaaactagaggcttggattaagggcctatcaagaaccgcatcaaagatagcaaaagagaatgggtataaggcgtctgtaaacatagactatgacgatgatggaataggctatataaacacagaagaagaaattggtggagtaacccatcacggcaaaattgctaactcttttttaagatctaacgattacaaaatttttggccgggtacaaaaagcaaaaaaagtattctcaggccctgttgtcatagataacggatctgaaattacagaatttctgaatattgaagattgcctaaaccaaattgttaacaactctaaaagaggccttaatgttcagcgctacaagggtcttggtgagatgaacccagaccaactttgggaaacaacacttgacccaacctcaagatctttgttgcaagttaaggcggacgacgatgcaggcctaacatttgaaacccttatgggcgacgaagtaccacctagaagagagtttattgaagaaaatgccttaaatgtaggtaacgttgatatataat

SEQ ID NO: 294085 - DNA, 321 bp, Unknown
  Bacterial polypeptide expressing nucleotide sequence isolated from the Sargasso Sea
aatgaaagacatagttaaagataatataaacaacattctaaagagcagatatttatcttatgctgtgtctacaataatttcaagatctctcccagatttaagagatggttttaagccagtccatagaagaattatttattcaatgtatttgcttaaattattaaataagtctccatttaaaaaatctgcaaggatagtaggagatgttatgggaaaatttcatcctcatggtgatcaggcaatttatcaaagtctagtaagaatggcacaagatttttcttcaagagttacattaattgaagggcaaggaaattttggtaa

SEQ ID NO: 294086 - DNA, 683 bp, Unknown
  Bacterial polypeptide expressing nucleotide sequence isolated from the Sargasso Sea
tatgagtactgattatccacaaggtttagtagatagcatcccgttaagagaattcgcggagagagcttacttagagtactcaatgtatgtagttcttgatagggcgcttccaaatatcggtgacggtttgaaacccgttcaacgacggattatctacgcgatgtcacaactaggtttggagtacgagtccaagcataagaaatctgcacggacagtcggggatgtcatcggtaagtatcatccacatggagattcggcttgttatgaagcaatggtcttgatggcacaaccctttagttatcgttatccattggtggatggacaagggaattggggctccactgacgatccaaaatcatttgctgctatgcgttatactgaagccaaattgactctattctctaggtctattctggaggaagtaaaccaaggtacagtagattttgctccaaactttgacggtacactcgaagaaccattggtcctaccagcaagactgccgaacgtgctgttaaatggtactacaggaatagcagtgggcatggctactgatatccctcctcacaatattgaagaaatcggtgatgcttgtataaagattttatcgagtcctaagctgaaaactgcggaattactggatgttataaaaggaccagattttcccactggaggagaattgatca

SEQ ID NO: 294087 - DNA, 315 bp, Unknown
  Bacterial polypeptide expressing nucleotide sequence isolated from the Sargasso Sea
tttggttgtgaacgaagcctttggtccagtgaatccgacaatttccatttctgatgaaatgcgcaaatcctatctggattatgcaatgagcgtgattgtctcgcgggcgcttcctgatgtgcgtgatgggttaaagccagtacatcggcgcattttgtatgccatgatggaaggcaactacgattggtcaaagccgccgcgtaaatctgcccgtatcgtcggtgatgttatgggtaactatcatccgcatggtgatagctctatttatgaggccatggtgcggatggcgcaggatttttctatgcgtttaccatt

SEQ ID NO: 294088 - DNA, 823 bp, Unknown
  Bacterial polypeptide expressing nucleotide sequence isolated from the Sargasso Sea
taaaaaaatagagggtattgcagagcttagagatgagtccgacaaagatggaatgagggtggtggtcgaaaccaaaagagatgcggtaccagaagttgtgttaaatcagctttataaacaaacccaacttcaggacacttttgggataattttacttgccttggtcgacggaacaccaaaagtaatgtctttaaaagagcttttagaggtgtttatatcttttagacttgatgttgtagtaaaaagaacagagtttgatctaaaaaaagcagaagccagagcacatattttagagggtcttaaaatagccttaaaaaatattgataagattgttgaaacaattaaaaaaagcaaagatcctattacagcaagacaatccttgatggagggttttggattatcagaaatacaatcacaagctatcttagacatgagactacagcgactaacagggcttgaaacagataaaattattagtgaatacaaagatataatacaacacattgctgagctcaaaggtattttagagagcgaatcaaaaagaatgtcgattataaaagaagagcttttagaaattaaagaaaaatacggagaagagagacgaacagaaattatagaagactttaccaacctaagcattgaggatatgatagccgaagaagaaatggtattaaccattacacataacggctatataaaaagaacaagcttgagcacctatagaagtcaaagaaggggcggaaggggtgtccaaggggcttcttcaagagaagaagattttgtggaacacctgtttgtagccaacacacatagttatatttta

SEQ ID NO: 294089 - DNA, 229 bp, Unknown
  Bacterial polypeptide expressing nucleotide sequence isolated from the Sargasso Sea
gatgagttcgtcttatctctcttatgcaatgagcgttataattagtcgtgctcttccagatgtaagagatggtttaaagccagttcatcgtagaattttatacgcaatgtataaaggtggttatgactggtctaaacaatttagaaagtcagcaagaatagttggagatgttattggtaaataccatccacatggagatcagtcagtttatgatgcattagtaagaaat

SEQ ID NO: 294090 - DNA, 826 bp, Unknown
  Bacterial polypeptide expressing nucleotide sequence isolated from the Sargasso Sea
ctattaataaatggttcatctggtatcgcagtgggtatggcttgttctttccccagccataatttacatgaagttttttcggctctgatatctctaattgatcagccaaaacaaactattacttcgttgatgaaacatattaaaggccccgacttccccaccgaaggcattattctaaatagtaaagcagaactaagaaaggcatatgaaacaggttcaggagcggtgaaaattcgcggcgaatggaaaattgaagatcttccgcgtggtaaaaaacagataatcattacttccattccttatgcgatcaacaaatcacgaatgattgaaagaatcgcagaaataattatctccaaaaaactaacttctttaacagatgtccgcgatgaaagtgatgaaaaagttcgcgttgttctcgaaataaagagtaccgctgatccagataaagtaatgagttaccttttcaaacacaccgatctggattcaaattttcaaatcaatttcacatgccttaaaccaaatggcgagccagcacgattatccttaatcgaaatctgtcaggagttccttgattttcgtaaacaggttgtcacacgccgccttcaatacgaactcactattctagaaaaaagactacatattcttgttggctttgcagcaatttttgcagatctggataaagccttaaaattaattcgctcttccaagtctaaaaaagaggctcatgaaaaaatccgaaaatattttacgctggatgatgagcaaacaattgccatccttgagtttcctctatatcgtttggtgtctttagaaatggataagatta

SEQ ID NO: 294091 - DNA, 172 bp, Unknown
  Bacterial polypeptide expressing nucleotide sequence isolated from the Sargasso Sea
tatgaatactgaatattcatccgattcaattaaagttcttaaaggcctagaggctgtaagaaaaagaccgggaatgtacattggagatactgatgatggatcaggccttcatcaaatgatatatgaagtactagataattctattgatgaagctttagccggtttttgtgat

SEQ ID NO: 294092 - DNA, 304 bp, Unknown
  Bacterial polypeptide expressing nucleotide sequence isolated from the Sargasso Sea
tatgactgatctggcatcatctatttcgccaattaatatcgaagacgaactaaagaattcgtaccttgattacgccatgagcgtcatcatgggacgtgcattaccagacgtgcgtgatggccttaagcctgtgcatcgccgcgtgctgtttgccatgagtgaattgaagaacgattggaacaagccgtacaaaaagtctgcccgtgtggtcggtgacgtgatcggtaaatatcacccccatggtgattcggcggtttacgatactatcgtacgtatggctcagcctttctctctgcgttacacc

SEQ ID NO: 294093 - DNA, 882 bp, Unknown
  Bacterial polypeptide expressing nucleotide sequence isolated from the Sargasso Sea
catggcagcaaagaaaccagcagcaaagaaaccagcaacaaagaaaccagcagcaaagaaaccagcagccaagaaaccagcagccaagaaaccagcagccaagaaaccagcagcaaagaaaccagcagcaaagaaaccagcagcaaagaaatcgaaaaccgctactgctacaaagaaaaaaccaacaattaaacctgatacactaaacggttcaattgctgttgaagatgaaatatctaagtcattcttagattatgctatgtcggttattgtttccagagctcttccagatgtaaaggatggattaaaaccagtacaaagaagaattttatactcaatgtatgaaacaggaattagaccaacaggacctttcagaaagtgttcaaaggttgtaggtgatgttatgggtaactatcatccacatggaaacgacgctatatacggaaccttagtaaggttgggacaaaattttagtactagataccccctgattgaaccacagggtaactttggaacccccgacgatccacctgctgctatgaggtatacagagtctagaatgtcttccctgtcttcacagctattagatgggattgacgaagagacagtagactttgagcctaattattccggagagacaagcgaaccaaaagtattacctggaagatttccaaaccttttaattaatggagctgagggtatcgcagttgctatggcaacaaatatgccaccctacaacctgaaagagattacagaggcagttaaatttacattaaaaacaaaagaccccaaaccacgagattatttaaaaataataaaaggtccagattttcctacaggaggattaattgtagatacccccacgataaaagaagcaatact

SEQ ID NO: 294094 - DNA, 160 bp, Unknown
  Bacterial polypeptide expressing nucleotide sequence isolated from the Sargasso Sea
atgagtgaagatggcgtttacgactcggaaagcatcaaggtcttaaaggggctggatgcggtcaagaaaaggccgggaatgtacattggtgatacggaagacggaaccggtttacatcatatggttcaggagttagtcgataattctatagacgaggctc

SEQ ID NO: 294095 - DNA, 687 bp, Unknown
  Bacterial polypeptide expressing nucleotide sequence isolated from the Sargasso Sea
aatgccagctaaaaaaccaccatcaaaaaaaccagcagctaaaaaaccagcagctaaaaaaccaccatcaaaaaaaccagcagctaaaaaaccaccatcaaaaaaaccagcagctaagcaatctgtaaaagaagaaaaaaataccgacaacacatcaaacggaactattgctgtagaggacgaaatatcaaaatcttttttagattatgcaatgtctgtaatcgtgtcaagagcactacccgatgttaaagacggtttaaagccagttcagagaagaattttgtattctatgtatgaaacaggtataagaccaacaggcccttttagaaaatgttcaaaagtcgttggtgatgtaatgggtaattatcaccctcatggcaacgatgcaatttatggaacgctagtaaggcttggacaaaactttagtacaagatatccacttattgagccccagggcaactttggaacacccgacgatccacctgcagctatgagatacacagagtcacgaatgtcatctctctcatcacaattattggatggaattgatgaggatactgtaaactttgaaccaaactattcaggcgaaacatcagagcctaaagttttacctgcaagatttccaaacctccttgttaacggcgcagaaggaattgctgtagcaatggcaacaaacatgccgccata

SEQ ID NO: 294096 - DNA, 886 bp, Unknown
  Bacterial polypeptide expressing nucleotide sequence isolated from the Sargasso Sea
cgtctggcgggatgataaagaacatgcgatgcgatttttcaatggtgagccagaggctgacttaaaagtaataggagatgcggttggaaaatctggaaccgaaataacatttaagccttctgcttcaacttttactaataccaagtttgatttaccaagactagaacaccgattaagagagctagcgttcctgaactctggggttcatattcagctaaaagatgatagagaagttgaaccaaaaataattgatctagagtatgaaggagggcttaccgcatttgtaagttatctagataaatctcatcaagcattgcattcgccctttgttctagtatctgaaagagagggtataaacgtggaattagctatggagtggacggacagctatcacgaaaccatgctatgttttacaaataacatacctcagagagacggtggtgcacatttagctggatttcgggcagccttaacccgtactgtgaacgcttacgccgtagaaagcggaatttcaaaaaaagaaaaggctcaactctcaggcgaggatgcacgtgaagggttaacgtgtgttttatctgtgaaggttccagatccaaaattttcatcgcaaacaaaagataaactggtctcctccgaggttaggcctgttgtggaagctgctgtctcagataagctgcaacaatggtttgaggaacaccctgctgacgctagaaagattgtttcaaaggcgtatgaggcggcggcagctcgtgaagcagcgcgtaaagcacgagatttaacgcgtaggaagggtgttttagatatttcaagtttgcctgggaaattagctgactgtcaggagcgtgatcctgctttagcagaattgtttcttgtggagggagactcc

SEQ ID NO: 294097 - DNA, 911 bp, Unknown
  Bacterial polypeptide expressing nucleotide sequence isolated from the Sargasso Sea
ggattaaaacaagcttatgagacaggtcgaggaaagattaaaatgagggctagggcgcatattgaaaccaataaaaaaggaagaaatagtattgttgttaccgaggttccttatcaaacaaataaagcagcgctagttgaaaagattgcagacctagttcgcgacaaaaaggttgtaggtataagcgacctacgagatgaatccgataaagatggaatacgtgtagttgtggaaacaaagcgcgatgccgttcctgaggtgatattaaaccaactctacaaacacacacaactacaagatacatttggaataatattattagctcttgtagatggaatcccaaaaataatgccacttaaaacagttttaaatcattttattgattttagacacgaagtagttgttaggcgcaccgaatttgaattaaaagaggccgaaggaagagcccatatattagaggggttaaaaattgcactagacaatattgatgaggttatcaaagtcattaggggcagcaaagatcctgctcaagccaaagaaggccttatgaacagttttaatttatcagaagcgcaatcccaagctattcttgatatgcgccttcaaaaacttaccggtttagaggttgataaagtggtggccgagtataaagaactaatccaaattatttcaaatttaaaaagtgttctagaaaacaaaacaaaacgcatgaacattattaaaacagagctccttgaaataaaagatcaatacggcgatgagcgaagaacagaaattataccagtggacacagatttttctatggaggatatgatagctgaagaagaggttgtgcttacaataacccaccaaggttatataaaaagaacagctttaaatacatacagaactcagcgcaggggtggtcgcgg

SEQ ID NO: 294098 - DNA, 823 bp, Unknown
  Bacterial polypeptide expressing nucleotide sequence isolated from the Sargasso Sea
gtaaacttcattccaacaattcaaggcggaacgcatgttaatgcattgcgacaggggttatttgaaggtgtgcgtgagtatgcggatattcataatctcttacctcgaaacttaaagctcagtcccgatgatgtttggaagaacacaaacttcgtcattagcttaaaaatgaaagagccaaactttgctggccaaacaaaagagcgtttatcttcacgcgaatgtgcccctgttatcaataccgctgtaaaagatgcaatgtcgctttatttgagtgagcacaaagacgccgctgaaatgcttctaacgttagtgcttgccaatgcaaactctcgacttaaagcaaacaaaaaaattgaacgtaagcagttaggcaaagtgatagcgatgcctggaaaacttaccgattgcgaaacatctaatcgagaagaaggtgaactgttcgttgtagaaggcgactctgccggtggctctgctaaacaagctcgaaacaaacagacgcaagcgattatgccccttcgaggtaaaatcctaaactgttgggaaaaagatgaaagtgaaatcatgcgttctgaggaaatcaagaacattgccacggcaatcggggttaaccccaatagtgatgaccttagcggccttcgatacggaaagatatgcatcctagcagatgccgactctgatggacttcacattgccacactgtttgcagcactttttgttagacatttccctagcgttgtaagaaatggaagtgtgtatgttgctatgcctcctctttaccgcatcgaagtaggtaaaaaagttttttatgccttagatgatg

SEQ ID NO: 294099 - DNA, 773 bp, Unknown
  Bacterial polypeptide expressing nucleotide sequence isolated from the Sargasso Sea
aaatactggaactgaaataaattttataccgtcaaaaaaaatattttcttcagtaaaatttagttacacaattattcagaagagacttagagaacttgcttttttaaataaaggaataacaattactttaactgacaaaactaacaagaaagttaaaattgatgaatttaaatatgacggtggaataagcgagtttgttgagtatcttgataaaaaaagagaaaaaataaaaaataaaaataataacgaaatatttaaaaaaccaataaatattgatggtaaaaaaaataatttagaaattgaatgctccttgcagtggaatgctacctatacggaagatgtattaccgtatactaataatatacatcagaaggacggtggtactcacttgcttggttttagaagtgcactaactagagtaataaataaatatgcaagtgagcaaaatcttataaaaaaaaataaaatatctatatccggagatgatataaaagagggacttacatgtgtaatttctataaaacttcaagatcctaaattttcttctcaaacaaaagataaattagtctcatctgaggtaagaaacgtagtagagagtatagtaaatgaaaaactttcaatctggtttgatcaaaacccttctattgccaaaatcattttatataaaattattcaagccgcacaagctagagatgttgcaaggaaagcaagagaaaatgttagacgtaaaggagcccttgaacttaccggattgcctggaaaacttgcggatt

SEQ ID NO: 294100 - DNA, 931 bp, Unknown
  Bacterial polypeptide expressing nucleotide sequence isolated from the Sargasso Sea
atgcaaaatacaatggattttgattttgagcaaagcgaaaaatacccgctcgaaatttatagtgaaaaagcatacctggattactctatgtacgttattcttgatcgcgcattacctcatattggcgatggtttgaaaccagtccagcgacgtattatctatgcaatgtctgaacttggcctgaaagcgacatctaaattcaaaaaatcagcaagaaccgttggcgatgttatcggcaagtttcacccacatggcgactcagcatgttatgaagcaatggttttgatggcacaaagcttttcttatcgatatccattaattaatggccaaggaaattgggggtctatggatgatccaaaatcatttgcagctatgagatatacagagtccaagctaactagctatgccgagacattattagctgaggttgaaaaaggaactgtcgattggttgccaaatttcgatgggaccttgaatgaacccaagctattaccagcaagattaccaaatattttattaaatggtacaacaggcattgcagttggaatggcaactgatattcctcctcacaatttaagagaagttagcgctgcttgcataaagctacttgataagccaaaaagtacaatttctgaattatgtcaacatattaaggctccagatttcccaacaaatgcagaaataattagttctaaatcatcaatacgagaaatctataaaaccggtcaaggctcaataaagatgagagcagtctggcaaaaagaggaagggtatatagttatcacagacataccatatcaaagttctggaagtaaaattttagagcaaattgccacacaaatgcagtcaaaaaaattaccaatgatagatgatttgcgagacgaatccgatcatgaaaacccaacaagattaatattagtaccgccattct

SEQ ID NO: 294101 - DNA, 175 bp, Unknown
  Bacterial polypeptide expressing nucleotide sequence isolated from the Sargasso Sea
atgaacaaaaaatcaaattatcaggcagactcaataaaagtattaaaaggccttgaggcagttcgtaaaagacctggaatgtatattggagacactgatgatgggactggtttacatcatatggtctatgaagtagtagacaatgccattgatgaggcattagcaggctattgca

SEQ ID NO: 294102 - DNA, 796 bp, Unknown
  Bacterial polypeptide expressing nucleotide sequence isolated from the Sargasso Sea
aaaaaaaatagcaagaaaaagccactcagaaaaggaaagctaaaaaataaaatagttagcaaaccaagcaaaagttatacagcaaaggatattgaggtccttgaggggttagagccggttagaaaaagaccaggcatgtatattgggggaactgacattttggcaatgcatcacctagtgagtgaggtgcttgataactcaatggatgaagtagtagctggtcatgcaaataaagtagaaataaacctaaaaaataattcaactattgaaatatcagacaatggtagaggcattccagttgacaagcatcctaagttcaaaatacctgccgctgaagtcatcatgactactcttcattcaggaggaaaattttctaataatagctataaaacatccggcggattgcatggtgttggcatttcagtagttaatgctctttcgaaaaagttaacacttgaaattgcaagagataaaaaatatttctcgcaggtttaccaacaaggtaatcctaaaacaaaattaaaatcttcatcaaaaggctcattgaaaaaaggtacaagaatagttttttcaccagacactgaaatctttggtgaggacgcctattttgattcttcgattatttataatatggccaaagcaaaagcttacttaataccagatgttgagattcattggacttgtgataaatctgtttcaaaaaagaatgttccgattaaggacaaactgcactattcagatgggataaaggattatcttcatagcctgtgttcaccgcaagatccaatattttgaa

SEQ ID NO: 294103 - DNA, 913 bp, Unknown
  Bacterial polypeptide expressing nucleotide sequence isolated from the Sargasso Sea
ttttaaaagtaactatgatgaaactgaaaaagaaccagaagttttacctgctcaataccctaatttacttgtaaatggagctggtggtattgctgtaggtatggccacaagcattcccccacataatcttggtgaaattatagatggaactattgctttaattaataataaagaaattaaacttagcgaacttatgaaacatattcccggcccggattttcctaccggtggaataataatcggtaaaaatattataaaagaaggatataaatcaggcagaggttcatttaaaattagaggtgaaataaaaattgaacaactaaaaaatggaagagaaagacttgtaattacttcaataccctatcaggttaataagtcagttttaaatgagagaattgctgaactagtaagagaaaaaaagattgaaggtataagagatataagagacgagtctaatttggaaggcgtaagagttgctatagatctaagatcaaatgttgaaccagaaactgtaaaaagacaactttttaagtatactacattagaaagttcttttagttttaacactttagcaatagttgataaaaaaccaaagacttgtaatttaaaagagtttttagaaaattttttatcttttagagaagatgttgttataaaaagaacaaaatttgatttaaaaaaagctgaagatagggctcatatactgattggattatctgtctctgtagaaaatttagataaagttattaaaataattagaagttcaaaaaatcctgaagaagctaaaaaatcactaatcaatttaaaatggaaagttaataaaactttaaagcttataaaattaattcaagataaaaaatctaagaatctttattctttatctgaaaaacaaattgaatcaattttagatcta

SEQ ID NO: 294104 - DNA, 521 bp, Unknown
  Bacterial polypeptide expressing nucleotide sequence isolated from the Sargasso Sea
tcgcgctctaggcgctggtgtagggaataacggagaagaggagggggcattcgacacgagtaaactccgatactcgaagatcataataatgtgtgacgcagacattgatggcgcacatattaggactctaatgctgaccttcctttggaggtttatgaggccagcaatagagaaagggcacgtattcatcgctcagcccccactctatcaattgactaaggggagactgagtaggtatgtattctcagatgaagaaagggactctgttactcttgaattgcaagacggcaatcccgatgcgaaaataggcattcagagatacaaggggcttggggagatgaatcctgagcaattgtgggaaacgacgatgaatccaatgactagaaccatgctgaaagttacggtacgagatgcagaggaatctgatgaattgttcgagatattgatgggagaagatgtccctgatcggagaaccttcatcgaaaagcatgcgaaggaggtgaccaatcttgacatctgaa

SEQ ID NO: 294105 - DNA, 805 bp, Unknown
  Bacterial polypeptide expressing nucleotide sequence isolated from the Sargasso Sea
gactgttgattttcagctaaactttgatgatacaataatggaacctactgtattaccaacaagagttccagcattgataataaatggagcctctggaatagcagttggtatggcgactaatatgccaccacataatttatctgaagttatagatggtataatgcagtacatagacaataatgatattacaattgatgagcttattcaatatgtaaaagcccctgattttccaactggtggaacaatatacggatatgatggtgttaaagaagctttccatactggtaaaggaagagttgtaatgagaggaaaagctatcatagagaatgtaaatgatagagagtgcataatagtctcagaaattccctaccaggtaaacaaggcagatatgattaaaaaaacagctgacttagttaatgatggtaaaattgaaggaatatctactataagagatgaatcagatagaaagggtatgagaattgtatatgttcttaaaagagacgcaattccaaacatagttctaaataaactatataagtatacacctttacaatcttcatttagcgtaaacaacgttgctctagtaaatggaagaccagaacttcttaacctcaaggatttaattcatcattttgtagaccatagacatgatgtagttgtcaaaaggacaaactttgagcttaaaaaggctgaacaaagagcgcatatattagaaggacttattattgctagtgataatatagatgatgttatagatttaataaaaaaatcttcaaatgcagaagaggctagacaaaaactttga

SEQ ID NO: 294106 - DNA, 903 bp, Unknown
  Bacterial polypeptide expressing nucleotide sequence isolated from the Sargasso Sea
aagtttcaaaaaagaccggaacaaaagtcaactttttagctgaccctgaaatatttgatgaaacacaaacctacgaatataacattgtttccgagagactgagacaaactgcttttctaaataaaggcttgaaaataacccttgttgacaacagggtaaaaccagcaacaaaggaacagtttcactttaaaggtggattgattgattttgttgagtatctaaacgagggatttgaaccattacacgataaaatcatatctttttcagatcaaacaaaggactcagagatagaagtcgctctacagtggaaaaacgaagacgatgttacggtaaaaagttttgcaaacaacatccacacacttgaaggtggtactcacgaagagggacttagaaccgcagtaacaaaagctattaatgatttcgcaaaaaaaagaaacctccactcagacatatcactaacaggagacgatattagagaaggtatgacaggagtagtttcggtcagagttaaagagccacagttcgagggtcaaacaaagacaaaacttggaaatactgagatgaaatccaaagtccaggtattaataaacgaagagtttccaaagtggctttcaaaaaacacaaaagaaggtagagccattgtagagagatgtgccgtggccgcaaaagctcgcatgagtgcaaaaaaagcaagagagctaacaaaaagaaaaagtattttagagacttctgggttgcctggaaaacttgcagactgttcatcaacagatccaaccgaaagtgaactttttattgttgagggagattctgccgccggtccggcaaaacaagctagagactctagggtgcaggccatacttccaattagaggaaaaattattaatgttcaaaaaagttactgag

SEQ ID NO: 294107 - DNA, 406 bp, Unknown
  Bacterial polypeptide expressing nucleotide sequence isolated from the Sargasso Sea
ttgaaaaagacaattaacattaactttagcgcttttgcttctagagactataaaaattattatgaatatttcttagcttcaaaagagcttttaaaagaagacgcatatttagtaaagcaagacaagacaattaaaatttcaaactttcttgacacttttgcatggattataagcgaagcaaaaaaaggatattctattcaaagatacaaaggtttaggagaaatgaaccctgagcaattatgggaaacaacaatggaccctgaaaatagaacgctcatacaaatcgaagagaaagataaagcaatggcaataaaaacatttgatgatttaatgggagataatgttgccccaagaaagacattcatagaagagaatgctcattttgcagtaaatatagatatataga

SEQ ID NO: 294108 - DNA, 467 bp, Unknown
  Bacterial polypeptide expressing nucleotide sequence isolated from the Sargasso Sea
tatgaccgttcttcatgctggcggtaagtttgatgatgactcttataaagtttctggcgggctccacggtgttggggtctcggttgtaaatgctctttctcagactttaagtttgcgaatccataaaaatggaaacatatacgaacaagactatgctcatggaacgccaaaaaaaccacttaagaagggcgctaagaccgagagaacaggaacaaccatatcgtttcagcccagtaaaaaaactttttcaaatacctcattcagctatgaaacgctctctaaaagattgagagaaatgtcatttctaaacccaggacttaccattaatctcaatgacgaaagaacaaataaggcagactcttattgttatgagggaggcttaaaagattttgttcgtcatcttaataaaccccaaaagccaacacatcaaagcattgcatatatcaacaagaaatccaaaaaagacg

SEQ ID NO: 294109 - DNA, 748 bp, Unknown
  Bacterial polypeptide expressing nucleotide sequence isolated from the Sargasso Sea
atctcatattcgaactttgttacttacattttttttcaaagaaatgccacaacttatagaaaatggaaatttatatattgctcggccacctctatttaaaataaaaagaggaaaagatgaaatatatttaagtgatgaacagtctctacaaaattcgcttattgattacgggctaaaagatttgagatttaaaactgcgctaaatacagaattttcaggagagcaactgagtgagatacttttaaaaatatctgaaatagttgatatttttaataaaatccctgttaggtacgacaaaaaagtgcttgaacaaattgctatttctggatgtttagataccaataagttttctgaaaatcaaaataatattaaagaagcagtaaactatatatcccaaagaataaatattagcaggcctgattatgatagaggctggaaaggaagctttattgagggtggttttaaattcacgagagaattaagaggtgttgatgataatatcgtcattgataaagatttactaaactctcaacttattgaaaatttaaacaaaaattacgttgatatatttcaaatgtttgaaatgcctggaatggctataaaaaaagatgatatacaaattgagatattttcaccttctcaacttctcgaaattgtcaacgaaaacggcaaaaaaggcctaagtttgcagagatacaaaggtcttggtgaaatgaatcccgagcaattatgggaaacaactttggac

SEQ ID NO: 294110 - DNA, 659 bp, Unknown
  Bacterial polypeptide expressing nucleotide sequence isolated from the Sargasso Sea
aatggctagagaatataatgctgaatctatagaagtcctctctggacttgatccggttaaaaaacgaccgggtatgtataccgaaacctctaggccaaatcacttagccttagaagttattgataatagcatcgatgaagcgcttgcaggatatgccacaactattgatgttcaattaaataaagatggttcccttagcgttgaagatgatggaagaggtatgcctgttggggtgcatcctgatgaaggtattccagcagtagagctaatatttactaggctccacgctggagcaaaattttctgatgaagattataaattttctggaggtcttcatggtgttggcgtatctgtagtcaatgctttgtcacttaatttatctgctgaaatcaaaagaggcggtcacaaataccttctagagtttaagaatagtgaaaaaaagaaagaattagctaagctagataaagtaggcaaaaagaataccggtaccaaagtaacctttcttcctgatcctcaatattttgataatgctaagttttcagtatcccaacttatggctgtactgaaagcaaaagcagtgttgtctccaggcctaaagatttcctttaaagataaggaatcaggaaaatcagagagttggtgttttgtagatggtttag

SEQ ID NO: 294111 - DNA, 913 bp, Unknown
  Bacterial polypeptide expressing nucleotide sequence isolated from the Sargasso Sea
attgtatttagagattaatagagatggtaaaaaatattttatagaatttgaaaatggagatgcaaagtctccattaaaagtaattggaaaatcaaaggagtcgggtaccaaaattacttttttaccctctacagaaattttttcgtcaattaaatttagtcctaatattttgattaaaagaatgagagagttggcattcctgaacaaaggaattaaaataatttttataaatgcaagcttaaaaaaagatgcaatatctgaattcaagtttgatggtggtgttatagaatttgtagattttttagatgaaaaaagagaaaaacttcaaaataaaaatggaaacgatttatttagaagaccaatttatatagaaggaaaaaaaaataacatcgagatagagtgttcattaaaatggaacgctggttatgctgaagaaatttttccatacacaaacaatatataccaaaaagatggcggcacacacttattgggctttagaagcgccttaactagagttgtgaataagtatgccaatgaacacaatttattaaaaaaaaataaattggcaatttctggagatgatataaaagaaggtctcacatgcattttgtctactaaaatccctgatccaaaattttcatcacaaaccaaagacaagttagtttcttccgaagttagaatgatagtggaaacagtaattagcgaaaagctatcaacatggtttgatcaaaacccaactgttgcaaagataattttaggtaaaattatccaagctgccatggcaagagatgttgctagaaaggcaagagaaaatgttagaagaaaaggagcacttgaaattaagtggtcttcccaggaagctagcggattgtcaaataggaaagcaagagggtacagaattgtttatttgtga

SEQ ID NO: 294112 - DNA, 814 bp, Unknown
  Bacterial polypeptide expressing nucleotide sequence isolated from the Sargasso Sea
ccaaaaaaagattctaaaagctatgattccaaagacataaaagtcttagagggcctagaggcagtaagaaaaaggccagctatgtatattggttcaacaggaccaaacggcctccaccatctaatttgggaagtggtagacaattcagttgatgaagctatggctggacgatgtaatcaaattgatgttgttcttgaaaaaaacggctcagttactgtaaaagataacggaagtggaattccagtaaagccacaccctaaaacaaaaaaatcagcgctcaccacagtacttacaacccttcatgcaggtggaaaatttgaatcaggtgcgtacaccgtaagtggaggactacacggagtagggatctcggttgtcaatgctctttctacagttgttaaggttgaggttcaaagggatggacacttttggaatcaagactttgaccttggaaaaccaaaaacaaaaataaaaaaagggaaggtgtcaaaaaaaacaggaacaaaaataaattttttacccgatcctaatatctttgacgaaacacagctttttgagtacaacatcgtttctgaaagactaagacaaactgcctttcttaataaaggattaaagataaaccttactgacaacagagtaaagccagcaacaaaggaaaattttcactacaaaggtggtctcgttgatttcgttgattatttaaacgagggcttcgaagttcttcatgaaaaaacaatttcattttcagatcaaagtaaagactcagaaattgaagtagccatgcagtggaaaacagaagacgacataaacattaaaa

SEQ ID NO: 294113 - DNA, 962 bp, Unknown
  Bacterial polypeptide expressing nucleotide sequence isolated from the Sargasso Sea
tctgaactattccatgtacgtcatcatggatagggcgttgccgtttattggcgatggtttgaaacccgttcagcgtcgcatcgtgtacgcgatgtccgaactggggctgaatgccagcgccaaatttaaaaaatccgcccgtaccgtcggtgacgtgctgggtaaataccatccgcacggcgacagcgcctgctatgaagcgatggtgctgatggcgcagccgttctcttaccgttatccgctggttgacgggcaggggaactggggggcgccggacgatccgaaatccttcgcggcgatgcgttataccgaatcccgcctgtctaaatatgcggaagtcctgctgggtgagcttggtcagggcacgtcggactgggtgcctaacttcgacggcaccatgcaggagccgaagatgctgcctgcgcgtctgccaaatattctgctcaacggtacgaccggtattgccgttggtatggcaacggacattccgccgcacaacctgcgtgaagtggcaaaagcagcgattactctgattgagcagccgaaaacgacgctggatcagttgctggatatcgtgcaggggccggattacccgaccgaagcggagatcattacctcgcgcgcggagattcgtaagatttacgaaaacggacgcggctccgtacgtatgcgtgcggtatggacgaaagaagacggcgcggtggtgatttccgcgctgccgcatcaggtttccggggcaaaagtgctggagcagatcgctgctcaaatgcgcaataaaaagctgccgatggtagacgacctgcgcgacgaatcggatcacgaaaacccgactcgtctggtgattgttccgcgctcccatcgcgtggatatggagcaggtgatgaaccacctgttttgcaccaccgatctggaaaaaagttaccgcatcaacctgaatatgatcggtcttgatggtcgtccgg

SEQ ID NO: 294114 - DNA, 844 bp, Unknown
  Bacterial polypeptide expressing nucleotide sequence isolated from the Sargasso Sea
cctaattcaataagtttaaaaaaatatgcagaagaggcatatttaaattatgcaatgtatgtaattttggatcgtgcccttcctaatgttggtgatggtttgaaaccagttcaaaggagaatattatatgcaatgtctgagctgggactagatgcttcatctaaatataaaaaatctgcaagaactgtaggtgatgttattggtaaatttcatccacatggagatagtgcagcatatgaagcaatggttttaatggctcaaaacttttcttttaaatatccattagttgatggtcagggtaactggggttcgcaagatgaccctaaatcatttgctgcaatgcggtatacagaatcgaaattaacaaattttgctaatttattaatttctgaacttaaatcaggaacagtagattggcagcctaactttgatggttcattgctagagccagtaatttttccatcaaagttaccgatgatcttacttaatggaacatctggaatagcagtaggaatggcaacagacattccatcacataatataaatgaagttatagatgctgctatctatttattagataaacctaaatcagaacttagagaaattctaaaaataattaaaggtcctgatttttctaataatgcaaatattgtaataaatgatgatgaattaaaagaaatgtatctcacaggtaggggtggatttaaaatacaagctcattgggagcaggaaaagaatcagataataataaatgcattgccttatcaggcatctggttcaaagattcttgagcaaatagcagaacaaatggtaaataaaaaattacctatggttatcgatttaa

SEQ ID NO: 294115 - DNA, 921 bp, Unknown
  Bacterial polypeptide expressing nucleotide sequence isolated from the Sargasso Sea
tgttcgtatattttatctgcaaaattaaaggatccacagtttactggacaaaccaaagagaaattatcttctaaagacttccagaacatagcaacttcaatcacaaaagattcattttcaatttggctgaatcaggaaacccaagcggcagaagaaattgcttttttatgtattgaaaatgctcaagcccgtgcaagagcaagtcaaaaagttgaaagaaaaaaaataactaaagggattacattgccaggaaaattatctgattgtgtttcatcagattttgaagaaacagagctgtttttggttgaaggagagtcagctggtggttcagctaaacaagcaaggaatagaaactttcaagcagtcatgtccttaaagggtaaaattttaaatacttgggaagtaaataccgactcagttactcaatcacaagaagtcaaagatatagccatggcggttggattagatcctgggtgcaaagagttaactggattgcgctacgggaaaatatgtattttggcagatgctgataccgatggcgctcacatcgcaactttaatttgtgctttatttttaaaacacttcagaccattggtagagaaaggacatttattcgttgctcaacctcctttatttagaatagatcaaggcaaagacgtattttatgctcttgatgaagatgaaaaggatcaaatagttaaacaattaacaaaacaaaataaagtgaaaaaaatagaaattcaaagattcaaaggacttggtgagatgaatccctctcaattaagagaaacaactatgcaggtcgatggaagaaggttattaaaattaacactcgaaaaaggaaacacagctacctcaatgatggataagttgctttctaaaaaacgagcggctgacagaaaagactggttggagacaaaa

SEQ ID NO: 294116 - DNA, 256 bp, Unknown
  Bacterial polypeptide expressing nucleotide sequence isolated from the Sargasso Sea
atgccaaccaagaaaaaatcttccgcatcaaattcatctaaagctactaaaaagccacaaaaaaaagccacaaaaaaagctgaagttgagtcttatgattcctcgagcataacggtactgaagggattagaggccgttaaaaaaaggccaggaatgtatattggagataccgatgatggaacgggattacatcatatggtgtacgagatagtagataattcaattgatgaggcgctagctgggcattgtgatgaaa

SEQ ID NO: 294117 - DNA, 641 bp, Unknown
  Bacterial polypeptide expressing nucleotide sequence isolated from the Sargasso Sea
attgagcgagagcgattacaaagcagacagtatccaggtcctcgaaggactagaagcagttcggaaacgaccaggtatgtacttgggtgatcctcacgatggatctgcgttgcaccactgcatatgggaagtcgtcgacaatgcagttgacgaacacttggcgggccattgtaactctatcgaaattgtcttgcaaactgatgggtcagtgaccattgtcgatcacggcagagggattccagttggtacgcactcagaatatgggattagtgctgctgaagtcatcatgacaaaactccatgctggcggaaagttcgacaattcatcatacaaggtatccggcggattacacggagtaggggtttctgcagtgaatgcagtatctgagtggctcaaaatgaccatccagcgagatgggaaaatgtatgagcagaattacgctcgcggtgaaccacaggattcactgaccgaaatcgggacaagtgattccacggggacggcgattacattcaagcccgacctagacatattcacaaccgtcactgaatttgattatgatgtccttaatacacgtttacgtgagaccgcattcctcaatgctggattgaaaatcacaattgttgaccagcgaggggatgcgc

SEQ ID NO: 294118 - DNA, 917 bp, Unknown
  Bacterial polypeptide expressing nucleotide sequence isolated from the Sargasso Sea
tatggcaactaatattcccccacataatttgggagaaataattgatgcttgttgtgctttaattgataacccgattaataaagatataaacttatctgattatataatgggtccagactttccaacaggaggaataattttaggtaaatctggaattaaggaagcatttagttcaggtaggggttctattattataaggtcaaaagtttctatagaagacctcccaagagataagaaagctattatagttactgaaataccatttcaggtaaataaatctcacttggttgagcaaatagctgatgtagcaaaaaataaaaaagttgagggaatttcagatttaagagatgagtctgaccgagatggtgtaagagttgttattgaattatctaggtcagtcaacccagaaattgtgcttaatcaattatataagtttactaggttacaaaccagttttggtgtaaatatgcttgcattaaattctggtaaacctgaattaatgagcatcaaacaaatgcttcaggcttttatagattttagacaagaagtaattactagaagaactaaatttgatttaaaaaaagtacgtcatagggctcaagttttagtgggtttagctatagcagtttcaaatattgatgaagttattaaattgattagagagtcaaaagacccgaataccgcaaagaaattattactcagtaagagctggtctgctgatgatgttacagatatggttaaattaattgatgatccgtcaaataagatagttgatggtatttataaactcactgatgatcaagctaaagctattttagagcttcgtcttcagagattaacagcacttggaagagatgaaattgactccgaaataaaagaaatttcaaaaaaaatttctaattttcttgatattctta

SEQ ID NO: 294119 - DNA, 892 bp, Unknown
  Bacterial polypeptide expressing nucleotide sequence isolated from the Sargasso Sea
tactgcattaggtggttctcatttaaatggttttaaatctggtcttcttgaggcaataaaagaattctgcgactacaggaatttgattccaaaaggtataaaaattaactcggatgacattcttgctaactgcatttttgttatttcctcaaaattaaagaatcctcagtttgctggtcaaactaaagagaggcttgattctaaagctcatatgagctttgtttcatcttcaacaaaagattctctaagtatttggcttaaccaacataccgaagagggtgaaaagattgcagatcttgcaattgccgctgctcaaaagaggattaaaagctcaactaaagttgatagaaagaaaacatttaaaggcccggctcttcctggaaagctttcagactgtaactgcgacaatatcgaagaaagcgagctttttttagttgagggagactcagcaggagggtctgcaaaacaagctcgagatagaaggtttcaagcaataatgcctttaagaggaaaaattcttaatacctgggatttagaaagtgcagacataataaaatctcaagaaattaaagatcttgcgactgctattggatctttgccaggagatacagatatttccaacctaagatatggaaagatttgtattcttgctgatgccgactcagatggactgcacatagcaactttattatgtgcattatttctaagacactataagaatttagtaacctcaggaaaaatctttgtctccatgcctccgttatataggattgatgctgcaaaagaagttttttatgccctcgatgagaatgaaaaagaatctattgttaagaaaattaaaaaacagaactcgaaaattaagatagatattcaaagattaaagggctggaga

SEQ ID NO: 294120 - DNA, 906 bp, Unknown
  Bacterial polypeptide expressing nucleotide sequence isolated from the Sargasso Sea
agctgggggtatcgctgttggtatggcaacaagcatacctccacataatttaggtgagattattgatggcactttggccttaattgataacaaagatattaaaattaaagaattgatgaaacatatacctggtccagattttccaactggtggtatcattataggtaaagatataattaaacaaggatataacaatggaagaggatcctttaaaattagaggtgaaatctcaattgaacaacaaaaaaatggacgagaaagacttgtaataacttctataccttatcaagttaacaaatctgttttaaacgaaaggattgctcaattagtaagagaaaaaaaaattgaaggaataagagatattagagacgagtctaacagagaaggtattagagtagcaatagatttaagaaacggtgtagaaccagaaaccataaagagactattatataaaaatactcagatagaaagttcatttggttttaatacattagcgattgttgaaggaaaacctcagacttgcacactaaaagattttttatctaattttttaacttttagagaagatgtagttattaagaaaactaaatttgatcttcaaaaagcagaggaacgtgctcatatactaataggattatctgtttcagttgaaaatttggataaaataataaaaattattcgttcatctaaaacaccagatgatgctaaagtatcaattttaaaaaccaaatggaaaataaataaatcacaaaaattaatttctttagtagagggaaaaaggggcaaaaatctttatactttatctgaaccacaagttttagctattttagaattaagacttcaaaaattaactgcattaggaataaatgaaatcgaagttgaaattaaaaaacttgctgagctaat

SEQ ID NO: 294121 - DNA, 250 bp, Unknown
  Bacterial polypeptide expressing nucleotide sequence isolated from the Sargasso Sea
atgaaccaaacgtattcttcagaatcaataaaagtattaaagggcttagaggcagtaagaaaaagacctggtatgtatattggagatactgatgacggttctggcctccatcaaatgatttatgaagttgttgacaactctattgatgaatctctagctggttattgtgacaaaattgaagttatattaaactcagatggaactgttacaatttcagataatggaagaggagtgcctgttgataatcata

SEQ ID NO: 294122 - DNA, 343 bp, Unknown
  Bacterial polypeptide expressing nucleotide sequence isolated from the Sargasso Sea
atggctgaggagcgcgttcaaccgatcgctctgcatcaggagatgcagcgctcctacctcgaatacgcgatgagcgtgatcgtggggcgggcgttgcccgatgcccgcgatggtctcaagcccgtccaacgacgcatcctctacgcgatgcaggaactggggctcaccccagaccgtccttaccgcaaatgcgcaagggtcgttggtgacgtgctgggcaagtaccacccccacggtgatcaggcggtttacgacgccctggtgcggcttgttcagaccttctccagccgtcacccactgcttgacggccacggcaatttcggctcggtggacgacgacccac

SEQ ID NO: 294123 - DNA, 826 bp, Unknown
  Bacterial polypeptide expressing nucleotide sequence isolated from the Sargasso Sea
gacgagctgacatctgttattagagaagaactaattgaaacacaggaaacgtatggtgatgaaagaagaacagaaattgttgaattctattcagacctgactgatgaagatctcatacctgaagaagatctcatcgtgacattatcaaaagcaggttatgcaaaaacacagccacttgacacttaccaagctcaaaatcgaggtggaactggtaagcgtgcagcatcattgaaagatgaagactttgtttcaaaattatttgtggccaatacacatgacacattgctgtgcttttcaagttatggaaaagtttattggataaaagtatatcgtcttccaagaggcggaagaaatgcaaaagggcgaccaattgtaaatcttttaccattagaaaaagatgaacgtattcaagcagttcttcctgtgaaagaattcaatgatgatcaattcattttcatggcgacagaaacagggagcgtcaagaaaacaaaattatctgcttactctagacccatgaaatctggtattaaagcgatcaaactcagagatggagatcgcgttgtcaacgcagagatcactgatggcactaaagaaattatgctcttctcaaattctggtaaatcaatcaggtttaaagagtctgatgcaaggccaatgggacgagtatcacaaggtgtcagaggtatgcgaattgataaagatcagaaaattatttctcttgttgtccttgaggaaggaaatattcttgtagcaacagaaaatggttatggtaaacagacattgcaagatgaattctctataaaaaaaagaggtggaaaggcgtaat

SEQ ID NO: 294124 - DNA, 883 bp, Unknown
  Bacterial polypeptide expressing nucleotide sequence isolated from the Sargasso Sea
tgaagaggcttcaaataatttgctcaaagaaacttatgtgaacttaattcctactgcattaggtggctctcatttaaatgggtttaaatctggtcttcttgaggcaataaaagaattctgcgactacaggaatttgattccaaaaggtataaaaattaactcggatgacattcttgctaactgcatttttgttatttcctcaaaattaaaaaatcctcagtttgctggtcaaactaaagagaggcttgattctaaagatcatatgagctttgtttcatcttcaacaaaagattctctaagtatttggcttaaccaacataccgaagagggtgaaaagattgcggatcttgcaattgccgctgctcaaaagaggattaaaagctcaacaaaagttgatagaaagaaaacatttaaaggcccggctcttcctggaaagctttcagactgtaactgcgataatatcgaagaaagcgagctatttttagttgagggagactcagcaggagggtctgcaaaacaagctcgagatagaaggtttcaagcaataatgcctttaagaggaaaaattcttaatacctgggatttagaaagtgcagacataataaaatctcaagaaattaaagatcttgcgactgctattggatctttaccaggagatacagatatttccaacctaaggtatggaaagatttgtattcttgctgatgccgactcagatggactgcacatagcaactttattatgtgcattattcctcagacactataagaatttagtaacctcaggaaaaatctttgtctccatgcctccgttatataggattgatgctgcaaaagaagttttttatgccctagatgagaatgaaaaagaatctattgttaag

SEQ ID NO: 294125 - DNA, 887 bp, Unknown
  Bacterial polypeptide expressing nucleotide sequence isolated from the Sargasso Sea
tgatgaaaccgaacaagaaccagatgtccttcctgcacagtatccaaatttattagttaatggagcaggaggaattgccgttggtatggcaacaagtataccacctcataatttaggtgaagttgtagatgctactttggctttaatcaaaaataaggacataaaattaagtgaattgatgaaacatgtacctggtccagattttccaactggtggtattattattggcaaagatattattaaacaaggttataaatctggcagaggttcttttaaaatcagaggcgatattaagattgagcaagttaaagggggtagagaaagattagtaataacctccataccttatcaagtcaacaaatctgttttaaatgagagaatagctgaattagtaagagaaaaaaaaattgaaggaattagagatataagagatgagtctaatagagaaggaattagagttgcaattgatttaagatcaagtgttgaacctgaaacaattaaaagacaattatataaatatacatccattgaaagttcgtttggtttcaatactttagctattgtagataacaaaccaaagacttgtaatttaaaagattttttagaaaattttttaaaatttagagaagatgtagtaataaaaaaaactaaatatgatctaaaaaaagcagaagatcgcgttcatattttaatcggattatctgtcagtgttgaaaatatagataaagtaataaaaataataagacaatccaaaaatcctgaagaggctaagaattctctattaaaaactaagtggaaaataaacaagtcagcaaaattgattaaattagttgataataaaaattataaaggaacttatagtttatctaatgagcaagttgtatcta

SEQ ID NO: 294126 - DNA, 394 bp, Unknown
  Bacterial polypeptide expressing nucleotide sequence isolated from the Sargasso Sea
atgccaaaaaagaaatcagaagacaaaaaatacgactcctctaatattcaagttttaaaaggcctcgaggctgttaaaaaaagacctggcatgtacataggagatacagatgatggctctggtcttcatcatatgatttttgaggtagttgataactgcatagatgaggcaatggcaggccactgctccaaaatcgatatcataattaacaaagatgagtcaatcaccgttaaagataatggaagaggcattcctgtagatacacacaagggcgaaggcgtccctgccgctgagctgataatgacaaccctccattctggcggaaaatttgatgacaactcatataaagtatccggaggccttcatggtgttggagtttcggttgtgaatgccc

SEQ ID NO: 294127 - DNA, 595 bp, Unknown
  Bacterial polypeptide expressing nucleotide sequence isolated from the Sargasso Sea
catgcgaaaaaaatcaaaaaaaaataaatcaattaaaaataaaaactcgtccaaaaagacaataaaaaattcaaactcatcttacaccgcaaaagatattgaggtccttgaaggattagagccagtcagaaaacgtcctggaatgtacattgggggcactgatgttatggctatgcatcaccttgtaagcgaggttcttgataattcaatggatgaggttgttgctggttttgctaataaggtagaaataaaacttgtttctgaagacacaattgagatctctgataatggacgcggcatcccaattgataaacatccaaaattcaagatatctgcagctgaagtcataatgacaacgcttcattccggaggaaagttttcaaaaaataattacaaaacttctggaggtttgcatggtgttggaatttctgttgtaaacgcactgtctaaaaaacttacacttgaaattgcaagagataaaaaatattttgtacaaacttattgtcaaggttctcctaaaaataaattaaaagcatcggcaaaaggtcctcttaaaaagggtacaaaaatagtattttcaccagacccagaaatt

SEQ ID NO: 294128 - DNA, 634 bp, Unknown
  Bacterial polypeptide expressing nucleotide sequence isolated from the Sargasso Sea
aatgtctaaatttttaaaaaaagatattaacgaaatactaagtgataaatatctttcatatgcagtttctactattatgtcacgatcattgccagatatcagagatggtttaaagccagtacacagaagaataatttattctatgtatcaattaaaactttttgataattcatcatataaaaaatgtgcaagaattgtaggagatgtaatgggtaaattccatccacatggtgatcaagcaatttatgatagtttagtcagattagcgcaagatttttcaacaagagcgccacttattgatggacagggcaattttggtaatgttgatggagataatgctgcagcaatgagatacactgaagcaagattagattctattgcaaattatttttttgatggaattgatgaaaatgcaattgacttcaaagaaaactatgatggtcaaaatttagaacctgaagtattaccaactaagcttccaaacatattattaaatggagctactggaatagcagtcgggatggctactaatattcctcctcacaatattttcgaattgaataagtgtattattaagattattcaaaaccctgaaactagtttatctacattgctcaaaattttaccaggacct

SEQ ID NO: 294129 - DNA, 701 bp, Unknown
  Bacterial polypeptide expressing nucleotide sequence isolated from the Sargasso Sea
cgatggattaaagccagttcaaagaaggattttatatgctatgtctgaattaggattagatgcatcttctaagtataagaaatctgcaagaacagtcggcgatgttataggaaaatttcatcctcatggtgacagtgctgcatacgaagctatggttttaatggcacaaaatttttcatttaaatatcctctagtagatggtcaaggtaactgggggtctcaggatgatccaaaatcatttgcagcaatgagatatacagaatctaaactgacaaattttgcaaatctactcatttctgagctcaaatcaggaactgttgattggcaacctaattttgatggctcacttttggagccagtaattttcccatcaaaaattccaatgattttattaaatggtacatctggtatagctgtaggaatggcaacagatataccatctcataatattaatgagatcattgatgcaacaataaaaattcttgataaaccaaaatcggacttaaaagatattttgaaaattataagaggtccagatttttctaatatgtcttcaattatcgcaagttatgaagaattagaagaaatgtactttactggaagagggggttttaaaattcaagcaaattggaagcaagaaaaaaatcagatagtgattgatgccctgccataccaagcatctggatcaaaaattcttgagc

SEQ ID NO: 294130 - DNA, 172 bp, Unknown
  Bacterial polypeptide expressing nucleotide sequence isolated from the Sargasso Sea
tatgcctaaatcaaaaaaaaataccaatacaaaaaattacgattcatccaacattaaggtcttaaagggactagacgctgtccgaaaaagacccggtatgtacattggtgatactgatgacggcacaggacttcaccacatggttttgaggtcgttgacaactctgttgatg

SEQ ID NO: 294131 - DNA, 88 bp, Unknown
  Bacterial polypeptide expressing nucleotide sequence isolated from the Sargasso Sea
atgaacgcagataattactcttcagattcaataaaagtattgaaaggcttagatgctgtaagaaaaagacctggaatgtatattgggg

SEQ ID NO: 294132 - DNA, 920 bp, Unknown
  Bacterial polypeptide expressing nucleotide sequence isolated from the Sargasso Sea
attgtttggggatgtaatgggtaaatttcatccgcatggagatcaagcaatttatcaaagtttagtaagaatggcacaagatttttcatcaagagtaactctaattgaaggtcaaggcaactttggcaatattgatggagataatgctgcagcaatgagatatacagaagcaagattagaagaaatcactgaattattttttgatggcatagaagaggactccactactttcagtgacaattatgatgggcaaaatctagaaccagatgttctaccttcaaaattaccaaatattttgttaaatggatcaactggaattgctgttggtatggctaccaatattccacctcataatctattagaattaaatgattgtataataaagttaattaaaaaaccaaatacctcagactcagaacttttaaaaatactaaaaggccctgatttaccaactggtggtgaaataataataagcaattcagaaaagaaaaaaatttataagaaaggatttggctcattcctcattaattcaaattggcatgatgaaaaaattaaaaatggaatgtatgaaatagttattactgaaataccttttcaagtaaataaagttaaaattatagaacaattagcaagttgtataaattcaaaaaaattaccattagatgatgttagagatgagtcagatgaaaatataagaattgtattaaaacccaaaaatagaaatatagataaaaagaaattagtagatttatgttttaaacttacagacttatctatcaaatactcatgtaattttaacgtacttgaaaatggacgtgttcctaggcaattaggtttaaagtccatacttactcaatttatcaattttagaaagtttacagtaaagaggaaatcaaaatttaatatcgataaaaatagta

SEQ ID NO: 294133 - DNA, 280 bp, Unknown
  Bacterial polypeptide expressing nucleotide sequence isolated from the Sargasso Sea
atgacacaacaatatgatgccgaacacattaaggttctagaaggattagaggccgttagaaaacgtccaggaatgtatattggaaccacaggagttaatggcctaaaccaccttatctatgaggtcgttgataatagtattgatgaggccatggccggatactgtagcgatgtaaccgttgaaatcggagccgatagcatcgtcacagtcacagataatggacgaggaattcctattgatacccataaatccaagaacttgccggctgttgaggttgtta

SEQ ID NO: 294134 - DNA, 832 bp, Unknown
  Bacterial polypeptide expressing nucleotide sequence isolated from the Sargasso Sea
aaagaaactgtatcattcaaaagtaattatgatgaaacagaactagaacctagcgtacttccggctcagtatccaaatttattagtcaatggtgctggaggaattgccgttggaatggccacaagcatacctccgcataatcttggtgaagtaattgatggaactttagcattaataaagaacaaagatattaaaattaaagaactaatgaaatttatacctggacctgattttccaactggaggaataataataggaaaagatattattaaacaaggttacaaaattggaagaggttcttttaaaataagaggagaaataaatgttgaaaacttaaaaaatggtaaagatagactggtaattacatcgatcccatatcaaattaataaatctaatcttaatgaaagaatagctgaattagttagagagaaaaaaattgaaggtataagtgatattagagatgaatctaatagagagggtatcagagttgctatagaccttagaagaaacgttgaacctgaaacagttaaaagacagttatataaatatacatctattgagagttcatttggatttaatagccttgctatagtagataataaaccaaaaacatgtggcctgaaagactttttagaaaattttttaaaatttagagaagatgtagtaattaaaaaaactaaatatgatttgcaaaaagctgaagatagagctcatatactagtaggtttatctgtaagtgtagaaaatattgataaagtaattaagattattagatcatcaaaaaatcctgaagatgctaaaaattctttattaaaaacaaagtggaaaataa

SEQ ID NO: 294135 - DNA, 676 bp, Unknown
  Bacterial polypeptide expressing nucleotide sequence isolated from the Sargasso Sea
acctgctcaattccctaatttacttgtaaatggagcttcaggaattgcagtgggaatggcaacaaatattgcaccacataatttaggtgaagttatagatgcaactctttacttaattgaaaacccagattcagatataaatgatcttattaaatttatccacggacctgattttcctactggaggtcagataattggtagaaagggtatagttgatacttttgaaactggaaaaggtggagtaatattaagatcgaagacatcaattgaaaactttaaaaaagatagagaagctatagttattcatgagataccttatcaagttaataaatctaaactaattgaaaaaatagctgcaacagtaaaaaataatataattgaaggtatatcagacctaagagatgagtctgatcgcaatggtgttcgtgtagttgtggaattaaaaaaagatgtagacgcgaatattattctaaaccaattgtataaacacacacttcttcaaactacctttaattcaaatatgttagctttaaataagggtaagccagaacaaatgaatctaaaggacatgttaagcgcctttatagattttagagaagaagtaattactaaaagaacaatatttgatttaaataaagccagagataaagctcacattttaattggcttagtagtt

SEQ ID NO: 294136 - DNA, 313 bp, Unknown
  Bacterial polypeptide expressing nucleotide sequence isolated from the Sargasso Sea
atgtctgatattatagattccggaaattctggattaagcgaagataacgatcgaattattcagacagacttaagaaacgagatgtctcgctcatatctcgagtatgcaatgagcgtcatagttggtcgtgcccttcctgacgcgagagatggattaaagcctgttcatagaagaattctttatgcaatgtatgaacttggtttaacaagcagtagaccttacagaaaatgtgcaagagtcgttggagaggtacttggtaaatatcacccccatggtgacactgctgtctatgatgccttggtgaggatggctc

SEQ ID NO: 294137 - DNA, 918 bp, Unknown
  Bacterial polypeptide expressing nucleotide sequence isolated from the Sargasso Sea
ttctatcgatggagatccaccagctgcaatgcgatataccgtaactaaacttggaaagatagcccaatttttaacagaagatcttgaaaaaaatacggttagctacagaaataattatgatgaaactgaaaaagaaccagaggtacttccttctcaatatccaaatattttagttaatggagctggtggaatcgccgtcggtatggcaacaagtatacctcctcataatctaggtgaaattattaacgcaacaattgcttacattgaaaacaaagagataacgataagtcaattaatgaaacatgttccaggacctgattttcctactggcggaataataatcgggaaagatatattaaagcaaggatacaacaaaggcagaggatcttttaaaattagaggtgaaatcgatttagaagaaaaaaaaggtagtagagaaagtttaataattaaatcaatcccatatcaagtaaataaatcaattttaatagagaaaattgctcaactagttagagataaaaagattgaaggtattagagatattagagatgagtcaaatagagaaggaataagagtagtgcttgagttaagaaagtctgtagagcctgagacaattagaaggcagctatataaattgacaaatatagaaaactcatttggatttaatacgttagcaattgtaaataataaaccaaaaattttaaatttaaaagaatttataacagaatttttaaaattcagagaagacacagtagtaaaaagaattaaatttgacttagcaaaagcagaggaaaaagcgcatattcttattgggttagcaactgccgttgaaaatattgatcaaattataaagataattaaaaattctaaggatactgaaatagcaaaaaaaaatcttcttaataaaaaatggaaaat

SEQ ID NO: 294138 - DNA, 213 bp, Unknown
  Bacterial polypeptide expressing nucleotide sequence isolated from the Sargasso Sea
aatgtcaggtgatacgtacgattcaggcagtattaaagtattaaaagggctagaggcggttaaaaaaaggccaggaatgtacatcggggataccgatgacggcactggacttcatcatatggtttttgaagtgcttgataactcaatagacgagggaatggctggcttctgtaagcagatagatgtagtaataggcaaagatgggtctgtatc

SEQ ID NO: 294139 - DNA, 925 bp, Unknown
  Bacterial polypeptide expressing nucleotide sequence isolated from the Sargasso Sea
atggaaaagatttgggagcaagattatgaaaaaggcaaagctctatctcctgtcaaagaaattggaactaccgataaaagaggaaccctagtaacatttaagcccgatacagatatttttactcaaaccatagagtatagttatgaaactttatctcagaggttacgtgaactttcttttttaaataaaggtattaatttgtctattgtagatgctagaattaaaaatgaaaaaggtgaacatccatcggaggttttttattcaaaagaaggtttaaaagaatttattcgttttttagatgaaagcagagaacccattattcagcaagttatctccgttgaaggtgaaaagcatgatataccggttgaagttgctatgatatataatacctcatattctgaaaatttacattcttatgtaaataatattaatacacatgagggtggaactcatctttcgggctttaggagagggcttacatcaactttaaaaaaatatgctgattcatcgggacttttagataagttaaaatttgaaatttctggagatgattttagagaaggtttaacagctattgtttccgttaaggttgctgaacctcaatttgaaggacagacaaaaactaaattaggaaatagagaggtttcttcagcggtatctcaagcagtttctgaaatgttagaaaattatttagaggaacacccaaatgatgctaaaataatcgtccaaaaagttattttggctgctcaagctaggcatgcggctcgtaaagctcgtgaaatggttcaaagaaaatcagttatgagtggtggaggtttacctggaaaactatctgattgttctgaacaagatcctgcgttatgtgaggtttttcttgtggagggtgattcagcaggaggaactgcaaagcagggacgagatagga

SEQ ID NO: 294140 - DNA, 847 bp, Unknown
  Bacterial polypeptide expressing nucleotide sequence isolated from the Sargasso Sea
gttggtgtttcagtggttaatgctctttcggagtggctttgggttgaggtacaaagagatggaaaaaaatacaaacaggattataagattggtgtaacccaaaacaaactaaaagaggttggcaaaacgaaaaaaagcggcacaaaagtttgttttatgccagacggtggggtttttaacactacccgttttgaatatgatataatagcagaaagactaagggaacttgcttatttaaataaggggcttgaaatcaaccttcgcgaccagcgggaggaagaagggcaaagcgactcttttaaatttaaagggggattaagtgattttgtaaaataccttgatgagcacaacaacccccttcacaacaaagttataacagtcacaaaagaagatggtgagataccggtagatgttgctcttaggtatggaaacacatacaacgataacatactaacatttgtaaacaatataaatacaatagagggggggacacatctttctgggtttcgctcagcgctaactagggcaatgaacaaccacgcttcgaaaaacaacctaattaaaacaaaaaaaaccgaaaaactatctcttacgggagaggactttagagaaggccttacagcaataataagtgttaaggttccagaaccacaatttgaagggcagacaaaaacaaagctcggaaacggtgatgttaagggacttgttgataaggttgtttatgagggtatattagacttcctagaagaaaacccatccattggaagaaaggtgattgaaaaagctttattggctgccaggagtcgctcagcagcaagaaaagccagggagttgattgaaggaaaag

SEQ ID NO: 294141 - DNA, 934 bp, Unknown
  Bacterial polypeptide expressing nucleotide sequence isolated from the Sargasso Sea
gaaaaactagaactagaaattaatagagatggaaaaaaatattttattgaatttcaaaatggcgatgccaaatctcctttaaaggtaattggaaaatcaaaagaaactggcacaaaaatcacattttttccatcagaagatattttttcatctacaaagtttagcaataccattatacagagaagaatgcaggaattggcattcttaaacaaaggtttaaaaatttctgtaaacgattttactttaaaaaaagaaaaatcggttatttataagtttgatggtggtattttagaatttgttaacttccttgatgaaaaaagagaaaaattaaaaaataaaaatgggaatgatttatttaaaaaaccaatctttattgagcaagccaaaaataatatggaggtagaatgtgctctacaatggaattctatgtattctgaagatgtatacccctacacaaataatatatttcaaaaagatggaggaacccatttattaggttttagaagcgcactaacaagagttattaataaatatgccaatgaatcaaacttattaaaaaaaaataaactttcaatttctggagatgatgtaaaggaagggctcacttgcgtcttatcaattaaaataccagatcctaaattttcatcacaaacaaaagataaacttgtatcatccgaggttagaaacatagttgaaacaattattagcgagaaactatctctatggttcgaccaaaacccatcagtggtaaaagtcatacttacaaagattgttcaagccgcgcaagcacgtgatgttgctagaaaagccagagaaaatgtaagaagaaaaggtgctcttgagctaacaggtttacccggaaaattggcagattgtcaaaattcaaaacaagaaggaacagaattatttattgttgagggagactctgcaggtg

SEQ ID NO: 294142 - DNA, 181 bp, Unknown
  Bacterial polypeptide expressing nucleotide sequence isolated from the Sargasso Sea
atgatcaaaaaaactgaagacaaaatacctaaatatggtgcggattctatcaaggtactaaaaggtctagaagcagttagaaaaagacctggaatgtatattggtgacaccgatgatggcacaggattgcatcacatggtttatgaagttgttgataatgcaattgatgaagcattagcag

SEQ ID NO: 294143 - DNA, 136 bp, Unknown
  Bacterial polypeptide expressing nucleotide sequence isolated from the Sargasso Sea
aatgcccaaaaatactgaattaaaaaataatcaaaactatggtgcggatgccataaaagtactcaaaggtctggacgcagtaagaaaaagacctggaatgtatatcggagacacagatgatggatctggtctacac

SEQ ID NO: 294144 - DNA, 361 bp, Unknown
  Bacterial polypeptide expressing nucleotide sequence isolated from the Sargasso Sea
atgggtaaaaaatcaacttataatgctaaagatattgaagtacttgaaggacttgaaccagtccgtaaaagaccaggtatgtacatcggaagtacaaaccaagatggcctacaccatttggtcaatgaagtgttagataatagtatagacgaagttttagctggtcatgcaactgaaataagttttcattacaaaaaagatggcacaataataataaaggataatggcagaggcattcctgttgattttcatccaaaatataaaaataaaagagcgcttgaggtagttttaacaacacttcatgcaggtggaaaatttaatagtagtgcttacaaaacatcaggtggattgcatggggttg

SEQ ID NO: 294145 - DNA, 922 bp, Unknown
  Bacterial polypeptide expressing nucleotide sequence isolated from the Sargasso Sea
tgtataagaaatacaggtactagatttcaatttaaaccaaatgctaaatattttgaatcaatagatgttaataataaacagcttaaacatcttttaaaagctaaagcagttttatgtccaggacttacaattgatttttttgatgagaagaaaaaagaaaaaattaaatggttttttgaggatgggctaaaaagttatcttgaggaagcttctagtgaaagcaatttattactggatgagtcgatattaaccgcaaagaaatctaaagagcatgaagtagaatttgtaataaattggtctgacaaaccatcaaaaaataaattagatgaaacctacgtaaatttaataccaactgcccaaggtggatctcatctaaatggatttaagtctggtttgctagattctatgaaggaattttgtgaaataagaaaacttctacctaaaggtttaaaacttaatgcggatgatgttatcaataatgctatttttgttatttcatcaaagatgcagaatccgcagtttgctggtcaaacaaaagaaagacttgattcaaaagagcatatgtcgtttgttagtagttcaacaaaagatgtgctgagtatttggtttaataaacatactgaagagggagaaaagattgcagaattagcaattatttcggcccaagctagagctaaggctacaaatactgttgaaagaaagaaaactttcaaaggtccagctcttcctggcaagctttcagattgtaatagtgaggatttaaataagactgaattatttcttgttgaaggagattctgccggcggttctgcaaagcaagcaagggagagatcttttcaagcaataatgcctttaagaggaaaaattttaaatacatgggatttagaaagtgatgagattattaaatctcaagaaataaaga

SEQ ID NO: 294146 - DNA, 190 bp, Unknown
  Bacterial polypeptide expressing nucleotide sequence isolated from the Sargasso Sea
atgaatcaaaattactcatcagattccataaaagtactaaaaggtcttgaagctgtaagaaaaagaccaggtatgtatattggtgatacagatgatgggtctggacttcatcaaatgatttatgaggttgtagataactcaattgatgagtccttggcaggttactgtgataaaattgaagtaattttaa

SEQ ID NO: 294147 - DNA, 391 bp, Unknown
  Bacterial polypeptide expressing nucleotide sequence isolated from the Sargasso Sea
tatcctaatttactcgtaaatggagcaggtggaattgctgttggtatggctacaagcattcctcctcacaatcttggtgaaattatagatggtacgcttgctttaattgataacaaagaaataaaaataaaagaattaatgaaacatatacctggtccagatttccctacgggtggtattattattgggaaaaatattattaaagaaggttataaaagtggaagaggttcatttaagataagaggtgaaataactgtagaaaatttaaaaaataatagagatagacttgtaataacatctataccatatcagattaataaatcagtactaaatgaaaaaatagctgatttagttagagaaaaaaaaattgaaggtattagagatattagag

SEQ ID NO: 294148 - DNA, 223 bp, Unknown
  Bacterial polypeptide expressing nucleotide sequence isolated from the Sargasso Sea
aatgtcaaaacaatctcaggtaaatcagaaaaacgattacagcgcatcgtctataaaagttttaaaaggtttagatgctgtaagaaaaagacctggcatgtatattggggacactgatgatggcaccggtctacatcatatggtcttcgaagtgctagacaattccattgacgaggctctaggaggatatgtaaaaatatttccgtatctattattcaaataa

SEQ ID NO: 294149 - DNA, 765 bp, Unknown
  Bacterial polypeptide expressing nucleotide sequence isolated from the Sargasso Sea
aaaaacaaaaaaaaagggtacaaaaataaattttttaccatcaaaagaggttttttcatcgattaaatttagtgctacaattttagaaaaaagaattagggaattggcctttttaaataaaggagtatgcataagtcttattgatcaaacttctaaaaaagaaaaggaatttgttcataaatatgatggtggaatagtagaatttgtaaaacatattaataataaaaaaccaattttagttaataagaatgaaaaacaggtattcaaaaaaccggtttacataacagcaacaaagaacaatgtagtagtagaatgttcttttgagtggaattcaggatattctgaagatgttcttccttttacaaataatattccccagaaagacggtggtactcatttgttaggctttagaagcgcactaacaagagtgattaacaagtatacaaatgaaagaaatactaaaaaaaataaaattactttatcaggcgaagatataaaagaaggattaacagcggtactgtcaataaagatgccagaccctaaattttcttcacaaactaaagataaacttgtttcatctgaagtcagactaatcgttgagagtataataagtgataagatctcaacttggtttgatcaaaatccttcaattgccagaactgttatagaaaaaattactcaagcagcaatggcaagagatgttgctagaaaggctagagacagtgtcagaagaaaaggatcttttgaattatcaggtttacccgg

SEQ ID NO: 294150 - DNA, 640 bp, Unknown
  Bacterial polypeptide expressing nucleotide sequence isolated from the Sargasso Sea
tggtgacagcgcttgttacgaagctatggtactgatggctcagccgttttcttaccgctacccgctagtcgatggtcagggcaactggggtgcgccggacgatccaaagtccttcgcggccatgcgttataccgaagccaagttgtcgcgttttagtgaagttttactgaacgagctggggcagggcactgtggactgggtgccaaactttgacggcactatggatgagccacgcactttacctgcgcgtttacctcatattctgctgaatggcgtcacaggtatagctgttggtatggcaacagatataccaccgcataatgcccgtgaagtggccaacgccaccgcctttttactggataacccaaaagccactgtccctgacttaatgcagtatattcagggcccggattatccgactgacgctgaaattatcagtccggcgcacgaactgcaggctatttatgaaacaggccgcggcagcattaagatgcgtggtttgtatcagttggaagatggtgacattattatcaccgccttgccacatcaaacctcaggctcgaaagtgctggagcagatagcggctcagatgaacgcgaaaaaactgcctatggtcagtgatttacgtgatgaatctgat

SEQ ID NO: 294151 - DNA, 853 bp, Unknown
  Bacterial polypeptide expressing nucleotide sequence isolated from the Sargasso Sea
ggcgtcgcataccggtacacgagtgcatttttggccagacgtaaactattttgactcgcctaacttttctgtgagtaagctgatttatttattgcgcgcgaaagcggtattgtgcccgggcttacgcatcaaatttaccaataagcacaccaatgaagtgcacgaatggttttatgaaagtggcttaacggattacttgcaagaagcggtaaaagggtcgttaatgctgccagaagagccttttgtgggcagttttaaaggtgagttagaagccgcagactgggcgattacttggttacctgaaggtggcgaaagcctcaacgaaagttatgttaacttaattcctacccccttaggcggaactcacgtgaatgggtttagacaaggtttacttgagtctatgcgtgagttttgtgagtttcgtaatttgatccctcgtggtattaaattatctcctgacgatatctgggaccgcgcggcatttattttgtcgataaaaatgcaagacccgcaatttgcaggacaaaccaaagaaaaactctctagccgccaaagttcggcctttgttgctggcattgttcgtgatgctttctctctatggttgaactcaaatacagaacttgcagagcaattagctgaactgtgtattagtaatgcacaacgccgcttaaaagccgctaaaaaaatcgcccgtaaaaaagtggtttcaggcccagctttgcctggtaagttaaccgattgcagcggccaagatccgatgcgcggtgagttatttttggttgagggtgactccgctggtggcagcgcgaaacaagctcgcgaccgcgagtttcaggcgattatgccgctacgg

SEQ ID NO: 294152 - DNA, 538 bp, Unknown
  Bacterial polypeptide expressing nucleotide sequence isolated from the Sargasso Sea
gatgcatggtgtgagaccttgggtaaacgtgtggatgcgattactgatgcgacccagaccttcactattactgctcagcgggacgaggagcggggtctgtatcttcctcgtgtgcaagtgctcgctcacggtgtaccccgcgaatataaggtgacactggatttcttgctgtctccggactaccagaaaatcaaggcgctgggggaaacccttgaaggcttgctggctgaggatgcctatattcaacgtggtgagtcacagcggcctatccgtcatttcgcagaagctctagactggctgatggcccaggctcgtcgtggcaccagtttccagcgctataaagggctgggtgagatgaacgcggaccagctatgggaaaccaccatggatccggaaagtcgtcgtatgttgcaggtgaccatcgaagatgccatcgcagcggatcagattttcacctgcctgatgggtgatgatgtagacccgcgccgtcggttcatcgagtccaacgcgcttcaggtatctaatttggatgtgtaaa

SEQ ID NO: 294153 - DNA, 328 bp, Unknown
  Bacterial polypeptide expressing nucleotide sequence isolated from the Sargasso Sea
atggcaaacgctaaatatacatctgaagaaataacagtactaaaaggcctggaggctgtaagaaaaaggcctggtatgtatattggtacaactggattagaaggggttcagcaccttattcacgaaattgtcgataatagcgttgatgaatcaatggctggattttgtgacactgttgaaattgtattaaattctgatgggtcggtgactgtttctgacaatgggagaggtatacctgtagacgtaaaaaaaggtaccggcaagtctgcactggaaattgtaatgactactttacatgccggaggaaaattcgagagcaaatcttatc

SEQ ID NO: 294154 - DNA, 954 bp, Unknown
  Bacterial polypeptide expressing nucleotide sequence isolated from the Sargasso Sea
tgaactgaaatcaggtcaaattccagatgtagttcttaataatctatattctcaaactcaaatgcaaactgtttttggcattaataatgttgcgttaattgatggagagccaaagttactgaatcttaaatcaatactttcagttttcttcaaccatagaaaagaagttgtttctcgaagaacatttttcgatttaagaaaagcaaaagaaagagggcacatcttagaaggtctcaccatagcattggctaatattgatgagatgatagaccttattaagaaatcaaaggagggatccgaagcaaagaagaaattactctcaaaaaaatggaaaccaggaaaaataactgcaatgcttgaaaaggctggaccagatgcttgtaaaattgatgtaactgataattctgttggtctaattggaaagacttatcaattatctgaacagcaagctcaagctatattggacatgagattgcaaaggcttaccggccttgagcaagataagttaattaaagaatatgaagaaataatagatcacataacatatttgctagaaatacttggagactccgaaagattaatcgaggttgttaaagaagaacttttagaagttcaagagaaatacaaggatgataggcgaactgaaattcaagattcagcagcagatctaactgaagcagatctgattactcccgaagatagagtggtaactatttctcatgaaggttatgccaagactcaaccacttgaagaatatagggcacagagaagaggaggaaccggaaagaccgccgcatcagttaaagatgaagattttgttgaacagctattggtagctaatacacatacaacacttctatgcttttctaatttaggacaagtttactggttaaaagtatatgagatttcttctgctggacgtgctgcgaaaggtcgacctctagtcaacctgat

SEQ ID NO: 294155 - DNA, 841 bp, Unknown
  Bacterial polypeptide expressing nucleotide sequence isolated from the Sargasso Sea
tctgaaaagcttggttgaagatattgacaaaaatactgttatgtttgaatccaattatgatgacacaacaaaagaaccgtcagttttaccatctcaatttccaaatcttttagttaatggagcatcaggaattgcagttggaatggcaactaatatcgctccacataacttaggagaagtcatagacgcatctttgtatcttattaaaaatccagaatgtaatatttcagatcttcaaaaatatatttttggtcctgattttccaacaggaggtcaaataattggtaaaaaaggtatagcagaagcttttgaaactggaagaggaggttgtgtagttagatcgaaaactagtattgaaaattttaaaaaggatcgagaagctataattctccatgaaataccttaccaggttaataaatcgaaattattagagaggattgcagaaattgtaaaaaatggaattgttgaaggaatttcagatttaagagatgagtcagacagaaacggtgttagggttgttatagaacttaaaaaagatgtagattcaaatattattctcaatcaattatataaacatactttaattcaaacgacattcaattctaatatgctcgccctaaataaaggtaagccagagcaaatgaatttaaaagaaattttatcttcatttttagattttagagaagaagtaattattaaaagaacattatttgatctaaataaggcaagagaaaaagctcatattttagttggattagttgttactaacgaacatattgatgaaattatagaattaataaaaagttcaaaagatacaaaagaagcaaaagaaaaattaatt

SEQ ID NO: 294156 - DNA, 655 bp, Unknown
  Bacterial polypeptide expressing nucleotide sequence isolated from the Sargasso Sea
gcaggaggtaaatttgaccaaaatagttataagatttcgggaggccttcatggtgtcggtgtctctgttgtaaatgctttatctgaaaagctctctttaacaatccgtagaggtggaaaaattcatactatgcaatttaatgacggtgttacatcaaaaaaattaacagaggtgggagttatgaagaagactgagagaactggaaccactgttcaattttggccatctaaaaaaattttttctaatacgactctggtactcaaaactctagaaaatagagttcgtcaattagcttttcttaattctaacgtccgagtaacattggcagacatgcgtactcctaatgcagaaccaatagagttttattataaaggaggactgactgcatatgttcaatttcttaatttgagaaaatcaactctaaataggataattccatttaacggtgagtctaatggaattaaagttgaaggagccttgcaatggaatgatggatacaatgaaaatatgttatgttttacaaacaacataccacaaggagatgggggaacgcacctacaaggttttcgatcagcgcttactcgatcattagttggatattcaaataccgttgctgtttcaaaaaaaggtaatatttactatatcaggagatgat

SEQ ID NO: 294157 - DNA, 629 bp, Unknown
  Bacterial polypeptide expressing nucleotide sequence isolated from the Sargasso Sea
aacagagatacgcttcctcccctcaaaagaaacattctcacaaactgaattcgactataatcgccttgaacaccgcttcagagagcttgcttttttgaattcaggcgtacggatcttcctaaccgatgcacgcctaccagaaccaaaagtaactgagctttattatgagggaggcttaatagcttttgttgattaccttgatcgcgccaagaaccccctccacaaaccagcggtttctgtattaaaagaaaatgaaggcatcactgtcgaagctgcaatgcaatggacagatagctatcatgaaaatgtcctgtgctttacaaacaatatcccgcagcgcgatggcggaacccatttggctggtctcagaggcgcagttacgcgtgttgtgaatagctatgctgagagctcaggccttttaaagaaagaaaaagttagcctgacgggtgacgatatccgcgaggggactacctgcatcttgtctgttaaagtccctgacccgaaattttcatctcaaacaaaagacaagcttgtttcttctgaagtccgccctgttgttgaatctgctatcggagaagcgcttacaaattggtttgaagaacaccctcaagaagcgaagaaaattgttc

SEQ ID NO: 294158 - DNA, 910 bp, Unknown
  Bacterial polypeptide expressing nucleotide sequence isolated from the Sargasso Sea
tgctggaataattatgggctcatcgggaatcaaagatgcttatgaaactgggcgcggtagaatcgaagttcgtgccaaaagtaaaattgaagaaagcgactctggagataaaattattataagcgaacttccttatcaagttaataaagcacgcttattggaaaaaatagctgaattagttaaagaaaagaaagtaagtggtatacgcgagcttcgcgatgaatcagatagagatgggatgcgagttgtagttgaactgcgccgaggggaggtagcaaaagtaattttaaacaatttgtataaaatgactcaaatgcaatcagcttttagtgttaatactgtcgcattagttgatagtaagcctcaggcaaatttaaatttgaaacaacttctcgagcattttattaaacatcgcagagaaattgttactaaaagaactatctttgaattacgtaaggcaagaacacgcgcacatatattagaaggactagcagtcgcgctagcaaatattgatcctgttattaagttaataaaaaaatccattaatccagcagaggcaaaagcagaactccttaaagtggtttggaaatcagatattgttgttgagatgacagaagatgcaggttcagaaatatctagacctgataatttaagagatgaatttggtattcataaagatggctatcatttatctcctgaacaggcacaagcaattttagagttacgtttacaaaaattaacaggtcttgaaaaagataaaatacttaaagaatataaagaattattagaaagaattattaatctgctcgatattttgtctagaccagagagattaatgaaagttattcatgatgaattaaaagatgtacaagagcgctatggagatgaacgtagaacaaagatgaaagta

SEQ ID NO: 294159 - DNA, 894 bp, Unknown
  Bacterial polypeptide expressing nucleotide sequence isolated from the Sargasso Sea
aaccgaactgccttttcaaacaaataaagcagccttgatagagagaattgcagacttggttaatgagaaaaaattagaaggtatttctgatattagagatgaaagtgatcgagatggaatgagaattgttatcgagctaaaaagagatgcctatccacaagtggttttaaataacttatttaagttaacacctctacaaaataatttcagtgcaaatattctagctttagttaaaggagaaccaacaactctttcacttcgaaaaatgttagatgttttcctagattttagagtagagacaataaggcgaagaactggttttttattaaaaaaggcagaagatagagatcacattgtaaagggcctattattagctttaggttctatggatgaaattatcaatctaataagatcagcaaaggatacaatttcagctagagaacaattacaaactgatcatgagttatcttccacgcaggcagaagcaattttacaaatgcagttgagaagattaacagccctagaggcagataaaatcaaagctgaacatgatgaattaacgcaaaaaataaactcctatcaacaaatattgaatagtaaagaaagaattcttcaaattattcttgaagaaattaacaaaattgatgaaagattttcttccccaagaaaaacagaaatattagatttaggtggtggtctagatgatattgatcttatagccaatgatagatcagttgttttattaactgaagcaggttatttaaaaaggatgcctgttaatgaatttgaatctaccagtcgagggtcaaggggtaaagcaggaacaaagacacaaggagatgatgaagttaaattatttataagctgtaacgatcatgatactcttttactttt

SEQ ID NO: 294160 - DNA, 259 bp, Unknown
  Bacterial polypeptide expressing nucleotide sequence isolated from the Sargasso Sea
atgaaaaatattgaagattttaaagataaaaacataaaattaatctcaatgcatgatgagatgagctcatcgtatctttcttacgcaatgagtgttattgtgagtcgtgcacttcctgatgtaagagatggattgaaacctgttcatagaagaattttatacgctatgtacaaaggtggatatgattggtccaaacaatttagaaaatccgcaagaatagttggagatgttattggtaaatatcatcctccatggtgat

SEQ ID NO: 294161 - DNA, 870 bp, Unknown
  Bacterial polypeptide expressing nucleotide sequence isolated from the Sargasso Sea
tatattgggatccacgggtccaaatggattacaccacttaatttgggaagttttagacaactctgttgatgaagctatggctggaagatgttctaagataaaagttagtctagaaaaaaacggttcagttactgttgaagacgacggaagcggaataccggtaaaaccgcaccccaaaacaaaaatatctgcactcacaacagtattaacaacacttcatgccggtggaaagtttgaatcgggagcctataccgttagtggtgggttgcacggagttggaatatctgttgttaacgctttatcaacatacgttaaagtagaggttcaaagagacggtcatttttggaaccaagacttcgatttgggaaaaccaaaatccaaaatcaaaaaaggaaaagtttcaaaaaaaacaggtacaaaagttaactttttagcagatccagaaatatttgatgagacccaaacatatgattacaacacagttgatgaaagacttagacaaactgcgtttcttaacaaaggtttgaaaataacacttgttgataacagggttaagccacctacaaaagaagagtatcactataaaggtggcctcacagattttgttgaatatttaaatgacggtttcgacccactacatcaaaaaataatttctttttcagaccaaacaaaagactcagaaattgaggttgcactccaatggaaaaacgaagacgacgtaacgataaaaagctttgctaacaacatacacactctagagggtggtacccatgaagaagggctaagaacagctgttaccaaagcaattaacgactttgcaaaaaaaagaaatcttcattcggacatatcttttacaggagacgacataag

SEQ ID NO: 294162 - DNA, 193 bp, Unknown
  Bacterial polypeptide expressing nucleotide sequence isolated from the Sargasso Sea
catgaattctgaatattcttctgattccattaaagttctaaaaggtctcgaagctgtaagaaaaagaccagggatgtatattggagatactgatgatggatcaggtctccatcaaatgatttatgaagtattagataattctattgatgaagctttagccggttattgtgataaaatagaagtaattttaaat

SEQ ID NO: 294163 - DNA, 664 bp, Unknown
  Bacterial polypeptide expressing nucleotide sequence isolated from the Sargasso Sea
aatgaacaaaattattgaatccaatttaaatactattcttagtgaaaaatatctttcttatgcaatatcaactatcgtttcaaggtcgttacctgatgtaagagatggtttaaaacctgttcaccgcagaataatttattcaatgtatcaacttaaacttttcaaaagttcaagttataaaaaatgtgcaagaattgttggtgatgtaatgggtaaatttcatcctcatggagatcaagctatttatgatagtttggtaagaatggcgcaggatttttctacaagaattacattagtagatggtcagggtaattttggaaatattgatggagataaccctgcagcaatgcggtacacagaagcaagattacaagattatacaaattattttttcgacggcatcgaagaaaactctgtagattttaaagataattacgatggtcaaaatttagaaccagtagttctaccatctcagcttcctaatattttaattaatggagcaatggggatagctgtaggcatggctacaaacattcctcctcataatattgttgaattaattgatgcattaaaattaaaaataaaaaaagataaagcttcactaactgaaattttaaaaattattcatggaccagatcttcccacaggtggtgaaataatttta

SEQ ID NO: 294164 - DNA, 499 bp, Unknown
  Bacterial polypeptide expressing nucleotide sequence isolated from the Sargasso Sea
atgggcgaaatagcagcaaaagaaatagttccaattaacttagaagaagagcttaagcagtcttatctaaattatgcaatgcatgtaatagttggaagggcattacccgatgctagagacggtttaaaaccagttcatagaagaatcctttatgcaatgcatgtacttaataatgattggaataagcctcccaaaaaatctatgagaatagttggagatgtaacaggcaaataccatcctcatggagatactgctgcgtatgaaactatcgtcagaatggcccagtggtggagtctaagatataccctagtagaaggtcagggaaattttggttcaatggatggagatcctcctgcagcagctaggtatacagaagtaagaatggaaagaatagcacatgaattgcttgaagatttagataaagaaacagtaaagttcattgagaattacgatggccaagaaacaatgcccgatgttcttcctgcaagaattccaaatt

SEQ ID NO: 294165 - DNA, 727 bp, Unknown
  Bacterial polypeptide expressing nucleotide sequence isolated from the Sargasso Sea
gaaaatgcatatctcaattattcgatgtatgtcattttggatcgagctttgcccaatattggagatgggctgaagccagtacaaagaaggattttatatgcaatgtcagaacttggattaaatgcatcatcaaagtacaagaaatctgctagaactgttggagatgtaataggtaaattccatccgcatggtgatagtgctgcttatgaagcgatggttttaatggcacaagatttttcatttaggtacccatttgtagatggtcaaggaaattggggatcgcaagatgatcctaaatcttttgcggcaatgcgatatacagaatctaaactaacaaaattttcagaccttctaatagatgagttaaagcaagggacagtggattggcagccaaattttgatggatcacttcttgagccagtaatctttccagcaaaagttccatcgattttacttaatggaactacaggcatagcagttggtatggctacagatatcccttcacacaatatgacagaggtaattgacgcaactatccatgttttagaaaaccctaagacttctgttgaccaaattctcaaatatataaagggaccagatttttctaacaaggctccaattgttgcatctccagaagagttaaatgaaatgtatagcactggaagaggtgcttttaaaatgaagtgtgcttggaaaaaagaaggtaatgacatcattgtaactgacc

SEQ ID NO: 294166 - DNA, 688 bp, Unknown
  Bacterial polypeptide expressing nucleotide sequence isolated from the Sargasso Sea
gctttcagattgcaatagcacggatctaaatgaaacagagttattttttgtagaaggggattccgctggaggctctgctaaacagtcaagagaaagaaaatttcaagcgattatgccgctgagaggaaaaattttgaacacttgggatttagagagctctgaaattatgaaatctgcagaaataaaggatatctctacagcgattggagttaatccagggaacccagatattgaatctctgagatatgggaagatttgtattttagctgacgctgattcagatggtcttcacattgccacattgttatgcgctctatttttacgacactacaagccattaattaaagctggtcatatttttgtagccatgcctccactttttagaattgattgtgcaaaagaggtattttatgcccttgatgaagatgaaaaagattcaatagttaaaaaactaaagacaaagccaggaaaaccaaaaatagatatccaaagatttaaaggcttaggtgagatgaacccctctcagcttcgggaaacagtaatggatcctaaaacaagaagattggttcagcttaccatcacctccactgacaatgttaatagtatgatggatctattgctttctaagaaaaatgctggagccagaaaagagtggcttgagaaacgagggaaaatagtaacagtttaa

SEQ ID NO: 294167 - DNA, 982 bp, Unknown
  Bacterial polypeptide expressing nucleotide sequence isolated from the Sargasso Sea
ttcacccttttgtagaaggtcaagggaaattggggtacacaaggatgacccaaaatcttttgcagccatgagatatactgaatcaaggctgacaaaattttctgatctttttttagatgaaattaatatgggaactattaagtgggctcctaattttgatggcactttaaatgagccaaaaacccttccgtctaaagtcccaaatatactgatcaatggaagttcaggaattgctgttggaatgtcaactgatattccatcacataatcttcaagaaattattaatgctgtaatcgcatttttagattcaaataaattatcagtgaaagatttaagaaaaattataaaaggtcctgattttccaacatctggtgaaattatgttgggtgaatctgaattagatgaaatttataatcatggaacgggaaatataaaagtacgtgcaacatatacagttcatggtaaagaaatcataattgagtctataccttatcaagcaaatacaactaaaatcattgagcaaatacaagagcaaattcatctcaagaaaaatgtttttcttgatagtgttatggatgcatccgatcaagatcatcctgttagaattatcattaaaattaaaggaagaacatatggatcagacgaaattatgtcacatctattttttacaactgatttagaaaaaagcatgagagttaatctgaacatgatcggtcttgatggaaagccacaagtaaaaaatcttcttcaaatactatctgagtggattaaatatagattaactactattaaaaataagttaacatgggagctagataaaattaatcaacgcatccatattcttgatgcatatataattgtatacaataatcttgataaaattatttctatgatacgaaatgaagatgatcctaaaaagaaaattgttcgcacatttaaatttacggatatttcatatgaagcaattattaatatacgcata

SEQ ID NO: 294168 - DNA, 871 bp, Unknown
  Bacterial polypeptide expressing nucleotide sequence isolated from the Sargasso Sea
cagagaagaattttgtattctatgtatgaaacgggtataagaccaacaggtccatctagaaaatgttcaaaagtcgttggtgatgtaatgggtaattatcaccctcacggcaatgatgcaatttatggaacactagtaaggcttggacaaaactttagtacaagatacccacttattgagccccaaggcaactttggaacacccgacgatccacccgcagctatgagatacacagagtcacgaatgtcatctctctcatcacaattattggatggaattgatgaggacactgtaaattttgaaccaaactattcaggtgaaacatcagagcctaaagttttacctgcaagatttccaaacctccttgttaacggtgcagaaggaattgctgtagcaatggcaacaaatatgccgccatataaccttagagagataacagatgctgttaaatacactgttgaaaacaaggatgtaaaaccaaaagactatctaaaaataattaaaggaccggatttcccaacgggtggtcttgttgtcgatacaccaacaattaaagaagcaatattaaaaggaagaggatcaatcaaaataagagctgttgctgatgtagaagaactaggaagaggtaggtctgcaatagttgttaaagaattaccctaccaagcatctacagaccgaattatggaaaaaattgcaacacttgttcaagacaagaaactcctgggaatttctgatcttaggaacgaaagcagtgacaggaacggaacaagattagttgtcgagctaaaaagagatgcagttccacaagtggtacttaatcaactttttaaacaaactcaactacaagacactttttccgtaaactcagtag

SEQ ID NO: 294169 - DNA, 397 bp, Unknown
  Bacterial polypeptide expressing nucleotide sequence isolated from the Sargasso Sea
tacaccactttcaaccgcgacttcttcgccagcaatgactacaagaccgtcactaccctgggcgaacagctgaacaacctgctggaagaaggcgcctacgtgcagcgtggcgagcgcaagaaaccggtcagcaccttcaaggaagcgctggactggctgatgaccgaaagcaccaagcgtcacagtatccagcgatacaaaggtctcggtgagatgaacccggatcagttgtgggaaaccaccatggacccggaagtgcgccgtatgctcaaggtaaccatcgaagacgccatcgcggccgatcagatcttcaacaccctgatgggcgatgccgtggagccgcgccgcgacttcatcgagtccaacgccctggcggtgtcgaatctggacttctgat

SEQ ID NO: 294170 - DNA, 716 bp, Unknown
  Bacterial polypeptide expressing nucleotide sequence isolated from the Sargasso Sea
cgatcacgactcatacaaagtctctggtggattgcatggtgtaggtgtctcagttgtgaatgcactatctgaaaaattaaaactagaaatcagtcgtaatggaaataaatattatattgaatttaaaaatggtgaagcaaagggacctctcaaaataattggtaagtcaaaagaaactgggacccaaatcacctttttaccttctagagaaattttttcctcaattaagtttagttatggtattttaattaaaagaatgagagagcttgcttttttaaacaaaaatataaaaataatttttactgacgcaagccaaaaaaaagaaaaaactgatgaatttcaatatagtggtggaattttagaatatgttgaattcttggatgataaaagagaaaaattaaaaaataaaaatgaaaatgatttgtttaaaaaacctatttatattgaaggaaaaaaaaataatatagaagtagaatgttctttaaagtggaatgcatcttactcagaggatgtatttgcttatacaaataatatttatcaaaaagatggggggacacatttattaggttttagaagtgctttaactagagtcattaataaatatgcaaatgagcataatttattaaaaaaaaacaaactaacaatatcaggagatgacataaaagagggattgacatgtgtattatcaacaaagatcccagatccaaaattttcat

SEQ ID NO: 294171 - DNA, 879 bp, Unknown
  Bacterial polypeptide expressing nucleotide sequence isolated from the Sargasso Sea
tattaactttcttttacagggagcttcaagatcttatcaacggtgggtacttgtatattgcacaaccgcctttatataaactaaaaaaaggcaagaaagaggagtacgtactaactgatgatgatcttaataatttaatactaagcaatgctgttaggggcactgaggtcagagctaaaaacaagaaaaaaggaatcgagggagacgggctcttaaacactattcttgattactctaattcattatctgtggttgaaaaaattgagaaacaggcaggaactatcgcggcaaaagcaatatcgcttcataaaccaatcactaaaacagaagcaaacaacaaaaagaagttagaggtttggattaagggcctatcaagaactgcatcaaagatagcaaaagagaaagggtataaggcatcagtaagtatagactatgacgatgatggaataggctacataaatacagaagaagaaattggtggagtaactcatcacggcatgattgctaactcttttttaagatctaacgattacaaagtttttggccgcgtacaaaaagcacagaaagtattttcaggcccagttgtcatagataacggatctgaaattacagaatatgccaatattgaagattgcctaaaccaaattgttatcgcctctaaaagaggccttaatgttcagcgctacaaggggctaggcgagatgaacccagaccagctttgggaaacgacacttgaccctaacacaagatctttgttgcaagttaaagcggacgacgatgcaggtctgacatttgaaacccttatgggagacgaagtaccaccaagaagggagtttatcgaagaaaatgccttaaatgctggcaatgttgatgtttaac

SEQ ID NO: 294172 - DNA, 217 bp, Unknown
  Bacterial polypeptide expressing nucleotide sequence isolated from the Sargasso Sea
atggttgatataaatagagacaacacactcccaagagacattgtagatgaaatgagggagagttatttaaactactctatgtcagtaattgtatcaagggcactcccagatgttcgagacggtttaaaacctgttcatagaagaattttatatggaatgagtgagttagaatcctcatggaaccgcccatacaaaaaatcagcaagaattgtaggtg

SEQ ID NO: 294173 - DNA, 268 bp, Unknown
  Bacterial polypeptide expressing nucleotide sequence isolated from the Sargasso Sea
aatggatttaggtagagataatatattagataagcagttagtaaaagagcttgaagaaagctatttaaactattcaatgtctgtcattatgtcgagagcgcttcccgacgcaagagacggattaaaaccagtacatagaagaattttatttagtatgagtgaaatgtctgctatgtggaataggccttataaaaaatctgctagggtggtgggagaagttttaggtaaatatcacccccacggagacagctccatatatgatgctctt

SEQ ID NO: 294174 - DNA, 907 bp, Unknown
  Bacterial polypeptide expressing nucleotide sequence isolated from the Sargasso Sea
gaatctagaggtatggatcaaaagaggtgggcaagaatacaatatgagcttcagcaatggtgacaggacatcagagcttgagatagttgatagtgttggaaaagccaacactggaacagccatacgcttctggccaaatgagtcgtattttgattctgccgatataagacttgatgaaataaaacacaaccttcgtgcgaaagcatttctttgcccaggcttaaaaattaaatttaaagacgaagaaactggagaaaaatgtgaatgggagtatcaagaaggagccagtgaatatctagtagaaatgcttgaaaacattgaatgcattccatcagtaccattttctggcaaagcaaattcagatgaacaagagcttgagtggagtatgacatggcctgatagagaccatgaagccattcaagaatcctatgtcaatctgatacccaccaaatatggcgggacacatgtatcaggctttagatcaggattgtcagagtcagtgaaagagtttgctgattaccggaatcttctaccgagaggagttaagctttctcctgaagatgtttggatgggtctgagctacattatttctgtcagaattgaggacccacaattctcaggacaaacgaaagagaaactaagttcaaggtctgtttcaggttttgttacgggcctcattaaagatgcgttcacactttggttgaatcaacaccctgaagcgggagatcaaattgtcgctagggcaattgagaatgctcaaaaaagagctaaaaagaatgtaaaggtaaaacgaaagaaggccacaggtggaccaacattgcctggtaaactcgcagactgtacgagcgacgagcctgatctttgtgaattatttattgttgaaggtgattctgctggcggatctgca

SEQ ID NO: 294175 - DNA, 903 bp, Unknown
  Bacterial polypeptide expressing nucleotide sequence isolated from the Sargasso Sea
agacaatagcgttgatgaggccctagctggtttctgtaacgaaattcatgtagtaatcaactctgatggcagtatctcagtagaggataacggaagaggaataccggtcggtattcacgaagaagaaggtattcctgctgtagaattgattctgacccgcttacatgctggtggaaaatttgataacagtaactacaaggtttccggaggacttaatggcgtgggagcatccgttgtgaatgcactttctaacaagatgattgctgaaattcatcgtgaaggatttttgtggaaacaggaatataagaagggtaatacagctagcacacttcaacagattgaggatagcagaaaaactggtacaaacatcacattctggcctgacgatacaatttttgatcatgtagagttcaattatgaaatattagcccataggttgagagaattagcttttttgaataggggaatcgctatttcgattagggataaccgtagtgaacgatttcaagaatttaaatatgacggaggaatttcttctttcataaagcatattaatgaaaacaaaaatatactacatgaagatccggtttatttttctggaaaatcagaagatgtagaaattgaagtagctttccagtacaacgacagctacactgagcgaatatactcttttgtaaatactatcaatacaatagatggagggactcacctcacaggcttcaaaggagcgcttacccgaactctcaataattataagacctcaaataatattgctaacgattctaaagaaaatttttctggtgaggatgtacgagaaggtatggctgctgtgattagcatacgtgtacctgaaccacagtttgaatctcagaaaaaaatcaaattgacgaatgttgaaatcaa

SEQ ID NO: 294176 - DNA, 973 bp, Unknown
  Bacterial polypeptide expressing nucleotide sequence isolated from the Sargasso Sea
aatcaatggtatttcggatttacgagatgaatctgataaaaaaggatgcgaaatttacattgaattaaagcgtgatgcgcaagaggcgattattttaaatcaattgtttaagcatacccaattgcaaacatcgtttggtattaatattgttgcgttggttgatgggcacccaaaaacacttggtttacgagagattttttatcactatgtgaatcatcgtaaagatgtgattcgtaaacgtactgagtatgatttacgtatcgctaaaaatcgattgcatattttagaagggcttcgaattgcacttcagcacattgatgaaatcattgcattaattaaaaaatctgaaacggccaatattgcgaaagaaaagttaattgaaacgtataaattgagtgaaaagcaggcgtctgcaattttagaaatgagactgcaacgattaactggtttagagcaagaaaagattgaaaatgaatacaatgaattgatcgttaagattgctgatttggaagatattttggttaatcaacctcgagtacttcaaattattaaagatgaacataccgaattgaaaaatcgttttggtgatgagcgtcgtactgaaattggcgaagaaattcataatgtaaatatggaagacttgataccgaagcaaaccgttgcattgctacgaactcaaaatgggtttattaagcgcatggctgtttctaattttagaagccaattacgtggtgggcgtggcgttagtggtatgtcaactcgtgatgaagatattattaagcaaatcattattacaagtagccatgattatattttatgttttacttcattaggtaaggttcataaaattaaggcgtatcaaattccagaatcatcgcgaaccagtaaagggttatctattagccatttgtttgagcttgaagaaaatgaaattattaccagtttaattcaggttgagtcgttgattcaggcg

SEQ ID NO: 294177 - DNA, 222 bp, Unknown
  Bacterial polypeptide expressing nucleotide sequence isolated from the Sargasso Sea
aatgagtgaggacaaaagatctaataaaatctctaatgattatggggcggaacagattcaggttttagagggtttagaaccagttcgtaaacgccctggaatgtatataggtttcacaggacctaggggattacaccatttagtatatgaggtagttgaatactcagttgatgaagcactagcaggacattgtgatcatatagaaatagtttctagagcaga

SEQ ID NO: 294178 - DNA, 732 bp, Unknown
  Bacterial polypeptide expressing nucleotide sequence isolated from the Sargasso Sea
aatgagtgattcgattgaattaagccttgatggcgtagagcaaatgccattaaggcgctttaccgaagaggcttatttaaattattcaatgtacgtcattatggaccgtgctttaccgcatataggtgatgggttaaagcctgttcagcggcgtattatttatgctatgagcgagcttggcctgtcggctcaatctaagcataaaaaatcagcccgtacggtaggtgatgtattaggtaaatatcatcctcatggtgacagtgcctgttatgaagcgatggtgcttatggcacaaccattctcataccgttatccgcttgttgatggtcaaggtaactggggggctccagatgatcctaagtcatttgcggcaatgcgttataccgaagccagattgtctaaattttcagaagtattattgtcagagttaggccaaggtaccgtcgagtggggggctaactttgatggcactcttaaagagcctaaaaccttacctgcgcgattaccgcatattttacttaatggtattaccggtatagcggtgggtatggcaacggacattccaccgcataacgtgcgcgaattagtgtctgcctgcattgagttgcttgataatcctaaaactgagcttgagcggttaatggagttagtgcccggccctgactacccaacagaggctgagattattacgccaagagacgatatcgcgaagatatatgaaagtggcaaagg

SEQ ID NO: 294179 - DNA, 685 bp, Unknown
  Bacterial polypeptide expressing nucleotide sequence isolated from the Sargasso Sea
atgactaaagaaaatttagataaacaaagcattaaaaaatatgcagaaaatgcatatctcaattattcgatgtatgtcattttggatcgagctttgcccaatattggagatgggctgaagccagtacaaagaaggattttatatgcaatgtcagaacttggattaaatgcatcatcaaagtacaagaaatctgctagaactgttggagatgtaataggtaaattccatccgcatggtgatagtgctgcttatgaagcgatggttttaatggcacaagatttttcatttaggtacccatttgtagatggtcaaggaaattggggatcgcaagatgatcctaaatcttttgcggcaatgagatatacagaatctaaactaacaaaattttcagaccttctaatagatgagttaaagcaagggacagtggattggcagccaaattttgatggatcacttcttgagccagtaatctttccagcaaaagttccatcgattttacttaatggaactacaggcatagcagttggtatggctacagatatcccatcacacaatatgacagaggtaattgatgcaactatccatgttttagaaaatccaaagacttctgttgatcaaattctcaaatatataaagggaccggatttttctaacaaggctccaattgtgcatctccagaagagtt

SEQ ID NO: 294180 - DNA, 936 bp, Unknown
  Bacterial polypeptide expressing nucleotide sequence isolated from the Sargasso Sea
cgccgaagctttgttagagggtttagacgaaagtgctgtagattttagagaaaattatgatgggacgttaagcgaaccaatagtacttcctgcgtcctttccaaacctactggccaatggggcgagtggaatagctgttggaatggcaactaacatcccacctcataatatagcagaactatgtgacgcttgtttgcacctgattaaaaaaccagatgcgcgcaacgaaactttgctcaactttgtacctggtcctgattttccaacaggtggtgttattgttgaaagcgtggaatcaatagcagaaacttacaaaaccggacgaggttcttttagattaagagcaaactgggaagttgaacatctcgatagaggacaatggcaaatcatagtcaaagagatcccctatcaggttcaaaagtcgaaacttatcgaaagattggcagagttaatacaaactaaaaagatccctattttgtcagatgtcagggacgaaagcgccgacgatattagattagttttagagccaaaatcaaaaaacatagatcctgaaattttgatgggtctattatttagaaattcagacttagaaatacgtttttctctcaatatgaatgttttaattgacggtgttactcctaaagtttgcagtttaaaagaagttctcaaagcgttcttaaatcatcgccgtgaagtcttgatcagacgggccaatcatagacttgaaaaaattgacaaacgtctggaggttcttgaaggtctaataatagcatttcttaatctggatcgggtgattgatattatccgatatgacgaggatcccaagaaagctcttatggctgaagactggagtatagaacatcatcgtgcaacaaatgagagtgactatattgcgcctacgaatttggagggagagcttactgagatacaggttga

SEQ ID NO: 294181 - DNA, 973 bp, Unknown
  Bacterial polypeptide expressing nucleotide sequence isolated from the Sargasso Sea
gagcctaaaatcatctcttcagcacttcattgaatttaggaaaacagtcgtgcggcgtagagccgaatacgatttggcacgagccagagagcgtgcacatatcctcgaaggattgagagttgctttagaaaatttggatgatgttattgcgcttataaggcagtctccagacgtagaaaatgccaggaatggtttgaccgtaaaatttggcctaactgaccaacaggcgcaagccatactcgatatgcaactgcgccgattagcggctttggaaagagagcggattgagaatgaatatcaagatttaatgaaaaaaattgctgagctggaggaattactatcgagcgcttctaaagtattagcagtaattaaattggagaattctgagctccgcaagaattttgggcaagataggcgcacgcagatatctgacgaagaggcacgagaccagtcacgagaagaattaactcctcacgctgatgtggtatttacgttaagtgatcgagggtatattaagcgattacctattgcactttatcgactgcaacaccggaagggtaaaggcgttagagggcagcagccccgagaaggagatgctgttcagcaattgattgttgctgatacgcatgattggctactatttttcacggataaggggaagatatacagaaaacgagtgtttgaagtaagtcaggattcttccaggacatcgcgtggcacacccatccaaaatttgattgacacgatcaatcctaatgaagaaatagttacagcagtagtcaatatttcggaccctaatgcggatcaatatattttcatggctacgcgaaaagggaaaattaaaaaaatgcatttaagcaaattcgctaacatacgaaggagcggaatagctgcatttgatctggaaaaagatgatagcttgcttacagctaggctagttagcgatggtatgaccgcaattcttgttagtaag

SEQ ID NO: 294182 - DNA, 202 bp, Unknown
  Bacterial polypeptide expressing nucleotide sequence isolated from the Sargasso Sea
atgtcggatactgaatcttataattcggacagtattaaggttttaaaaggactcgaggccgtaaaaaaaaggcctggcatgtatattggtgataccgaggatggcaccgggcttcaccatatggtccacgagttggtggataactcgatagatgaggcgctagcaggctattgtgacgagataatagttattattcacaaag

SEQ ID NO: 294183 - DNA, 259 bp, Unknown
  Bacterial polypeptide expressing nucleotide sequence isolated from the Sargasso Sea
tatgcaaaaaacagaaatacctaaagataaaaatatcaaacaaatctccatgcatgatgagatgagctcatcttacttatcatatgcaatgagtgtaattgtaagcagagcacttcctgatataagggatggattaaaaccagttcatagaagaattttatatgcaatgtataaaggtggatatgattgggcaaaacaatttagaaaatctgcaagaatagtcggagatgttattggtaaatatcacccacatggtgat

SEQ ID NO: 294184 - DNA, 882 bp, Unknown
  Bacterial polypeptide expressing nucleotide sequence isolated from the Sargasso Sea
atcagaaaaaattaaatggttctttgaagatggcttgaaaagttatcttgaagaggcatccgatggagtagatttaattcttgaagagtcgatactttcttcaaaagattctgattcacaagaggttgagtttgtaatcaattggagtagtagacctccaaataataagcttgatgaaacatatgtcaatttaattccaacatcacagggagggtctcatttaaatggattcaaatcaggtcttttagaggctttaaaagagttttgtgattataggagtcttgtaccaaaggggataaaacttaatgctgatgatgttcttaataatgcaatttttgtagtttcatcgaaattacagaatcctcaatttgcggggcagacaaaagaaaggcttgattcaaaagatcatatgtcttttgttagcagctcaacaaaagacattttaagcatatggttgaatacccatacagaagagggagagaagatagctgaattagcaataatatctgcacaaacaagagcaaaagcagctaacactgttgaaaggaagaaaaatttcaagggacctgccctacctgggaaattatccgactgtaatagcgaagacttaaatgaaactgaattattcttagtagagggagactcagctggtggttctgctaagcaagctagagagagatcttttcaagcgataatgcctttaaggggaaaaatattaaatacttgggatttagaaagtgaagatattattaaatcacaagaaataaagaatctttctactgcaataggagtattgccaggaaataatgatattacaggacttcgttatggaaaaatctgtatattggctgatgctgattcagatggtctccatattgctac

SEQ ID NO: 294185 - DNA, 744 bp, Unknown
  Bacterial polypeptide expressing nucleotide sequence isolated from the Sargasso Sea
tttgtatcaaaaacacaatacttttgctaaagaaattcttgtgccaaaaaaaaatacatacagcgctaaagatatagaagtacttgaaggcttggatccagtaagaaaaagaccaggaatgtatattggtaatacaaatgaagatggtcttcatcatcttgttaatgaagttttagacaattcaattgatgaagtagttgcagggtatgctaaaaatattttttttcactactcaaaagacaattcaattactattaaagacgatggaagaggtatccctgtagattttcatccaagatttaaaaataaaagagcacttgaaatagtaatgactactcttcatgcaggaggtaaattttctgacaaagtatataaaacttcaggaggacttcatggtgttggcatttctgttgttaatgcgctgagcaaaaaaatggacgttaaagtttttaataaatcaaagttatattctcaaaattattctcaaggaaaaataaaaagtaaaataaaaattcaaaaatgttctgcaaaagataaaggaactgaaattaaatttactcctgataatgaaatttttgaaaatataaatttttctccaaaaaaactatttaattttataagaatgaaatcagttttagttaaaggtactaaaatttcatttcaaatagacaaagatttaattaaagataaaactcctaataagatagattttttttatcctaacggcttagttgattttattaa

SEQ ID NO: 294186 - DNA, 885 bp, Unknown
  Bacterial polypeptide expressing nucleotide sequence isolated from the Sargasso Sea
attttattggcgcttggtagatggcgttccaaaaataatgtctttaaaaacaattcttcaacattttgttgacttcaggcatgaaatagtcgttcggagaacagagttcgaattaaaagaagctgaagcaagagcccatattcttgaggggttaaaaatcgcactggataatattgatgaggttatagaaatcatccgcggaagcaaagacggcacaatggcaaaagagggtttaatgaacggatttaatctatccgaaattcaggcgcaagccattctggatatgcgcttacaaaagcttacaggcttagaggtcgataaagttgtcgaggaatataaagagctaataaaacacattgcccaccttaaaggaatattggaaagcaaaagccagagaatggaaatcattaaaaacgaaatgatagaaatcagagatcagtatggcgatgaaagacgaactgaaatagttcctgttgacatggatttttctatggaggatatgattgcagaagaggaggtggttttaaccattacccatcagggctatattaaaagaacagctcttaacacatatagaactcaacgccgtggcggaaggggtgtgcagggagcaatgagcaaagaagaagactttgttgagcatctgtttattgcaaacacccacaactacatgttgttctttacggaccaaggaaagtgctattggctaaaggtttatgatattccccaagggggtcgcgcagctagaggccgtgcaattgtaaacctgattggttgtgatcccggagaaaaaatcgaagcattcgttagtgtaaaagagtttgacgataaacactatattgctatggcaaccagaagcggaatagtaaaaaagaccgttctgtc

SEQ ID NO: 294187 - DNA, 376 bp, Unknown
  Bacterial polypeptide expressing nucleotide sequence isolated from the Sargasso Sea
ttatatagaaaaatgccagaattaattgaagctggatatatttatattgctcaaccaccattgtataaaatatcaaaaggtcgacaggtagaatatgcatttactgatttagaaaaagataaaattattagcaattggtctgaaaatacaaatacgaaaattgatttacaacgttataaaggactaggtgaaatgaatgctgagcaattatgggaaactactatggatccagaaaatagaacattattacaagtaacaattgaacagccagatgaagcggatgatagatttacaactttaatgggtgaagaagtcgcaccaagaagagaattcattgttacacgtgcaaacttagtatcaaacttagatatataaa

SEQ ID NO: 294188 - DNA, 487 bp, Unknown
  Bacterial polypeptide expressing nucleotide sequence isolated from the Sargasso Sea
atctaagagcatagaaaaccttagatataataaaatcataattatgacggatgcggatgttgatggtgatcacattgcagctttacttttaacttttttttataacaattttccagaaattattgaaaaagggcatttgtatatagctcaaccacctttatatagaattacattcaagggccagtccttttatgctcaaactgaagatagtaaaaataaaataatggatcaagaatttaatggtaaaggtttaatcagtaggtttaaaggtttaggtgaaatgccgccaaatcagttaaaagagacgacaatgtctaaaaaaaccagaaaattgttaaaagtaactgtaccaaaaagagatatagaagaggctgatagaagaagagaagtggatagtttagtaaacattctaatgggaaaaaagccagagcttagatttaaatatattcaagaaaacgcaaatagtataaatgattttgatatttaa

SEQ ID NO: 294189 - DNA, 322 bp, Unknown
  Bacterial polypeptide expressing nucleotide sequence isolated from the Sargasso Sea
atgagtagtgaagcaaaaaaatatagcgcagaaagcataaaggttttagaaggtttagaggcggtaagaaaaagacccgcaatgtacattggtgatgttggaaaaagaggccttcaccacctcatatatgaagtggtagataactctattgatgaggctcttgctggacactgcactaaaataacagttttttttaataaagatgggtccgttacggttgaggacaatgggcgtggaatcctcagttgggatgcacaaagaagaaaaaaaaccggctgtggaggttgttatgactgttttacatgctggtggaaagtttgat

SEQ ID NO: 294190 - DNA, 526 bp, Unknown
  Bacterial polypeptide expressing nucleotide sequence isolated from the Sargasso Sea
atgaacaaaataattgaatccaatttagatgctattcttagtgaaaaatatctttcttatgcaatatcaactatcgtctcaaggtctttacctgatgtgagagatggattaaaacctgttcaccgcagaataatttattcaatgtatcaactaaaacttttcaaaagttcaagttataaaaaatgtgctagaattgttggtgatgttatgggtaaatttcatcctcatggagatcaagctatttatgatagtttggtaagaatggctcaggatttttctacacgaattacattagttgacggtcagggtaattttggaaatattgatggagataatcctgcagcgatgcgatacactgaagcaagattacaagattatacaaattatttttttgacggcattgaagaaaactctgtagattttaaagacaattacgatggtcaaaatttagaaccagtggttctaccatctcaacttcctaatattttaaataatggcgcaatgggaatagctgtaggcatggcca

SEQ ID NO: 294191 - DNA, 853 bp, Unknown
  Bacterial polypeptide expressing nucleotide sequence isolated from the Sargasso Sea
accccacaacctcaatgaactgattgatggctcgctcgcgttgatcgcgaaccctgagatcaccgatcaggagttgatcaagctgatccccggaccggacttccccaccggcggtcagatcctggggcgtgaaggcatacgtgagacctacttgggtggtcgcggctcagtgaccatgcgcggcgtggccaacatcgaaacgatcgaggctccggggcgtcccgatcgtgatgcggtgatcatcaccgagttgccgtatcagaccaacaaagcggcgctgatcgagcgcatcgctgagttggtgaacgacaagaagctcgagggcatctctgacatccgcgacgagagcgaccgcgacggcatgcggatagtggtggagctgcgccgcgacgcctacccgcaggtggtgctgaacaacctgttcaagctcactccgctccaaagcaacttcagtgcctacatgctggcgctggtgaacggtgagccgatcctgctcaccctacgcaagatgctcgaggtgttcctcgacttccgggtcgagacgatcgaacgccgcactcgctaccttctgcgcaaggccgaagagcgcgaccacatcctgctgggattgctgctggccctcgatcagctcgatccgatcattgccttgatccgagctgcccctgatacagccacggcacggcaacagctgcaggatcgccatggcctgtcagacatccaggctgacgccatcctgcagatgcagctgcgtcgtctcaccgctcttgaggccgacaagatccggctcgagcatgaggatctggtcaccaagatcgcagactacaaggacattcttggccggcgtgagcgggtg

SEQ ID NO: 294192 - DNA, 640 bp, Unknown
  Bacterial polypeptide expressing nucleotide sequence isolated from the Sargasso Sea
ctgcatctttgtttttcctcaaagttaaaaaatcctcagtttgctggtcaaactaaagagaggcttgattctaaagatcatatgagctttgtttcatcttcaacaaaagattctctaagtatttggcttaaccaacataccgaagagggtgaaaagattgcagatcttgcaattgccgctgctcaaaagaggattaaaagctcaacaaaagttgatagaaagaaaacatttaaaggcccagctcttcctggaaagctttcagactgtaactgcgataatatcgaagaaagcgagctatttttagttgagggagactcagcaggagggtctgcaaagcaagcccgagatagaaggtttcaggcaataatgcctttaagaggaaaaattcttaatacctgggatttagaaagtgcagacataataaaatctcaagaaattaaagatcttgcgactgctattggatctttgccaggagatacagatatttccaacctaagatatggaaagatttgtatactcgctgatgctgactcagatggactgcacatagcaactttactatgtgcattattcctaagacactataagaatttagtaacctctggaaaaatctttgtctccatgccctccgtttatatag

SEQ ID NO: 294193 - DNA, 296 bp, Unknown
  Bacterial polypeptide expressing nucleotide sequence isolated from the Sargasso Sea
aatgagcacaaacaaaaactatcaagctgaaagcataaccgttttaaaaggtttagaggctgttcgaaaaaggcccgccatgtatataggggacgtagggaaaaaggggctacaccatcttgtttgggaggttgttgacaactcaatagacgaagcaatggcagggcattgtacagaaatacaagtttctttattagagggaggaattatttctgttgaagacaacggaagagggattcctgttgacattcacaaagaagagggcaaatcagggttagagctagtaatgacagttt

SEQ ID NO: 294194 - DNA, 737 bp, Unknown
  Bacterial polypeptide expressing nucleotide sequence isolated from the Sargasso Sea
tgttttttctcataaaggctttgaagaagaaataataaaaggaagacttaaagagctggcttatttaaataaaaaactttcaattaaattaataaatgaacccgaagaaactgaaacggaatattgttttcctggaggattatctgattttgttaaatatttagacggaaatgaagatcttattcatgacgaagttatttctgttacaaaagaagacatagaggttccagtagatttagctttaagatatagcacaaactataatagcaatattttttcttttgtaaataatattaacacaattgaagggggaacacacctttctggttttagatctgctcttacaagagcattaaacagttatgccaataaaaatgacctaattaaaacaaaaaagaatgaaaagttttctctttctggagatgatttcagagaaggattaacagttgttatttctgtaaaagttcaagaacctcaatttgaaggacaaacaaaaaccaagctcggaaatggtgaagttaagggaatggtagataatgttgtatatgatggaatacaggcatttcttgaacaaaatccaaaagttggaaaaagaataattgaaaaggcagcagaggctgcaagggcaagaattgctgctaaaaaagcgagagaattagttagaaaaaaatctggactaggctcaacaaccctgccaggaaaattagcagattgttcaaataaagatcccctacagt

SEQ ID NO: 294195 - DNA, 874 bp, Unknown
  Bacterial polypeptide expressing nucleotide sequence isolated from the Sargasso Sea
ttctgaaaaattagatttatttatagagagagatggaaataaatactttgtagaatttaataatggagacgctaaaaaaccacttaaagttataggaaaatcaaaaagcacaggaactaagataaattttttaccttctaaagaaattttttcttcaacaaaatttagcttctctatattacaaaaaagaatgcgggaattagcttttttgaataaaggaattaaaatttctctaaatgatttaactcaaaaaaaaataaagagtgtaaattttaaatttgatggtggtataattgaatttgtagaatatttagatgaaaaaagagagaaattaaaaaataaaaataataatgatttatttaaaaaaccaatttatatagaaggacttaaaaacaatgtagaaatacaatgttcactaaaatggaattctggatataacgaagatgtatatccctacactaataacatttatcaaaaagatggaggtacacatttactaggctttagaactgcactcacaagagttataaataaatatgcatctgaacaaaatttattaaaaaaaaataaggttacactttctggtgacgatataaaagaaggattaacttgtgttttatcagttaaaattcctgatccaaaattttcttctcaaactaaagataaactagtttcttcggaggtcagaaatattgttgaaagtatcataagtgaaaaattgtctatatggtttgatcaaaacccatctgtatcaaaaataattttaacaaaaattattcaagcagctgttgcaagagatgttgctagaaaagcaagagaaaatgtaagaagaaaaggagcattagaacttacaggtttgcctggtaagttggca

SEQ ID NO: 294196 - DNA, 814 bp, Unknown
  Bacterial polypeptide expressing nucleotide sequence isolated from the Sargasso Sea
taaatattttattgaatttagaaatggggatccagttaaacctttaaaacttatgggtaaatcaaaaattagtggaacccaaattacttttttaccatcaaaaaaaattttttcatcaacaaaatttagttttaatacaattcaaaaaagaatgagggaacttgcttttttgaataaaggaataaagatttcaataaatgatttaacacttaaaaaaaataaaaatgtagattttaaatttgatggaggaatttcagaatttgtagaatttatagacaaagatagggctaaattaaaaaataaaaacgataacgatttatttaaaaaaccaatttttgtagaaggaaaaaaagagagcctagaagtggaatgttctttaaaatggaatgcaggatactccgaagatgtttattcatatactaacaatatatatcaaaaagatggaggaactcatttgttaggatttagaagtgcattaacaagagtaattaataaatatgcgcaagaacaaaatttgctaaaaaaaaataaagtttctatttcaggagatgatataaaggaaggattaacatgtgtattatcaataaaaattcctgatccaaaattttcatctcaaacaaaagataaactagtttcttctgaagtaagaaatattgttgaaacattagttaatgaaaaactatctgtttggtttgatcagaacccttcaattgcaaaaattattttggccaaagttgtacaagcagccctagcaagagatgtggcgagaaaagctagagaaaatgttagaaggaaaggagcactagaattaact

SEQ ID NO: 294197 - DNA, 569 bp, Unknown
  Bacterial polypeptide expressing nucleotide sequence isolated from the Sargasso Sea
aattattaatgtcaaaaaggttacagagaacagagctttacaaaatgaagaaataagttctcttatcaaggcaatcggaacaggaataaaagccgaatataatggagaagaatcaaggtatgacaaaattatatttttaacagatgcagacgttgatggtgcccatattagaaccttgttgttaacattcttctttaaatttatgcccggactcattaaagaaggaaaggtttggatctccgaacctccactttatagagctaagtcttctggttcaataaattatttgaaagacgatcaagcccttgaaaattttaaaaaagaaaacaaaaataagaaatttgatatcagcagattcaaaggtcttggagaaatgaacgcaggagagctttgggacactgcaatgaatccagaaagtagaactcttataaaagtaagcattgctgatggaaaggcagctgaagctagagcagcaaacatgtttgaaatactaatgggtaacgacgttgcaaaaagaaaaactttcattgaggaaaacgccaaagatgtaaggttcttggacgtataac

SEQ ID NO: 294198 - DNA, 430 bp, Unknown
  Bacterial polypeptide expressing nucleotide sequence isolated from the Sargasso Sea
atgacggataattatggcgctgagagcatacaggttttggaaggtctagaagccgtccggaaaagaccggggatgtatctgggagatcctcatgacggaaccgctttacatcattgcatttgggaggttgtggataattcggtggatgagcatctggctgggcatacgtcagaaatcaaagtttatttgcatgaagatcattccttgtctgttcgagattttggaagaggcatacctgtcgccatccatgagaagtacggtatttctgctgctgaagtcatcatgacgaaattacatgcaggtggtaaatttgacaatagttcatacaaagtatctggaggtctgcacggagttggagtttcagctgtcaacgccgtatctgaatggatggaagtgaccatccatcgaaatcaaaaaatctacttccaaa

SEQ ID NO: 294199 - DNA, 791 bp, Unknown
  Bacterial polypeptide expressing nucleotide sequence isolated from the Sargasso Sea
aatggaggttgtaaacgggattatctctctaatagacaaagccgacattaccaccgaagagcttatggaccacattaagggacccgattttccaaccgctggtttaataatgggaatggatggactgaaagacgcctatgaaacagggcgtggtaaaataaagatgagagcaagggcacacatagaatcaaacaagaacgggaaagacagtatagttgtcacagaggttccataccaaaccaataaagcaaacctcgttgaaaaaatagctgatcttgttcgagataaaaaagtagaaggcatcaccgacttaagggatgaatctgataaggacgggatacgcgttgttattgaaacaaagcgcgatgcagtaccggaggtcatattaaaccaactctataaacacacacagctccaagacacttttggaattattttattggcgctggttggtggtgttccaaaaatcatgtcattaaaaacaatattacaacactttgttgattttaggcatgaaatagtagttcgaagaacagagtttgagctaagagaagcagaggcgcgggcacatattcttgaaggacttaaaattgcactggacaatattgatgaggttattgaaataattaggggtagtaaagacccggcaatggccaaagagggcctgatgaacggctttaatctttctgaaatccaatctcaggctattttagatatgagactacaaaaactcacaggcctagaagttgataaggttgttggggagtacaaagaattaataaagcacattg

SEQ ID NO: 294200 - DNA, 853 bp, Unknown
  Bacterial polypeptide expressing nucleotide sequence isolated from the Sargasso Sea
gatggaagaggaattcctagtagaaattcacaaaacagaaggaaaaccagctcttgaagtggtaatgacagtattacatgcgggtggaaaatttgataaaaatacatataaagtttctggaggtcttcatggtgttggtgtatctgttgtaaatgctctttcagaaagcttaatagctgaagttcatagagatggtttttattataaacaagaatataaaataggagaacctacaacagaggttgaaaaaattggaaaaagtgataaaacaggaacaattatttcatttaaacccgaccaatctgttttttctcacaaaggttttgaagaagaaataattaaaggaagacttaaagaattagcatatttaaataaaaacctttcaataaaattaataaacgaaccagaagaaacagaaacagaatattgttttcctggaggattatcagattttgttaaatatcttgatggaaacgaagaccttattcatgaggaagttatttctgttacaaaagaagatatagaggttccagtagacttagccttaagatatagtacaaactataacaataatattttttcttttgtaaacaatattaacaccattgaagggggtactcacctttctggctttagatctgctcttacaagagcattaaatagttatgcaaataaaaacgacctaattaaaacaaaaaagaatgaaaaattttctttatctggagacgactttagagaaggtttaactgttgttatatctgtaaaagttcaagaacctcaatttgaaggacaaacaaaaaccaaacttggtaatggtgaagttaaaggaatggttgataatgttgtatatgat

SEQ ID NO: 294201 - DNA, 716 bp, Unknown
  Bacterial polypeptide expressing nucleotide sequence isolated from the Sargasso Sea
tatgaatgaaaatataacaattaatgctgaaggcatcgaacagatagcgttaaagaactatacagaacaggcatacttaaattattcgatgtatgtcattaatgatcgggcccttccaaatattggtgatgggttaaaacctgttcaaagaccaattatttatgcaatgtccgagctgggccttaagcaaacggcgaagtttaaaaaatccgcgagaactataggagatgtgatcggtaaatttcatccccatggggattcagcttgctatgaggccatggtgttaatggctcagtggttcacttatcgctatcctttagttgacgggcagggaaactggggatctcaagatgatccaaaatcatttgcagcgatgcgctataccgagtcacgtttgcgaaaatatgctgagttgctactcagtgagctagggcaaggcacagttgattggcgaccgaattttgatggtactttagaagagccagagatccttccagcacgattgccaaatgtgttgctcaatggtggtagtgggatagcggttgggatggccactgacataccaccgcataaccttaaggaggtagcaagtgcttgcgtacacttgcttgataagccaaagtcatcaattgatgaaatttgtaaaataataaaaggccctgatttcccgacggaagcagagctagtcacacctaaaggcgatattgttgaactgt

SEQ ID NO: 294202 - DNA, 941 bp, Unknown
  Bacterial polypeptide expressing nucleotide sequence isolated from the Sargasso Sea
aagaatgcaaaaaatatctgaagaccttctttcagatattgataaagaaactgtagactttcaattaaactttgatgatacaattatggaacctacagttctaccaactagagttcctgctttattaataaatggtgcttcaggtatagccgttggaatggccacaaatatgccgcctcataatttatctgaagttattgatggcattattcagtacatagataataatgatataacaattgatgaattaattcagtatgtaaaggcgccagattttcctactggtggtacaatttatggttatgatggagtaaaagaagcttttcacacaggaaaaggtagagtagttatgaggggtaaggctgtaatcgagaatgtaaatgatagagagtgtataattgtatctgagattccttatttagtaaacaaagcagatatgataagaaaaacagctgaattaataaacgatggaaaaattgagggaatttcaactatcagagatgaatcagatagaaagggaatgcgaatagtatatgttttaaagagggatgctatcccaaatatagttctaaacaaattatataaattcactccattacaatcatcttttagtgttaataatgttgcacttgttaatggaagacctcagctacttaacttaaaagatttaatccatcattttgttgatcacagacatgatgtagttgtaaaaaggacaacttttgaacttaaaaaagctgaacaaagagctcacattctggaaggtcttataatagctagtgacaatattgatgatgtaataagtttaataaaaaaatcatcaaatgcagaggaggcaagattaaaactagagaagaaatataagctttctgagactcaagcaaaagcaattattgaaatgagattacgtcaattaactggtcttgagcaaagcaaataag

SEQ ID NO: 294203 - DNA, 783 bp, Unknown
  Bacterial polypeptide expressing nucleotide sequence isolated from the Sargasso Sea
gagggcatcagcgaccttcgcgacgagtccgaccgtcagggcgtgcgcgtggttgtcgagctcaagcgtgatgccgagccggaggtcgtgctggcccaattgttccgttttacgcccctacagacatcgttcggggttaacatgttggcgttggacggtggccagccccggttaatgaacctcaaggaaattctggaagcctttatagtctttcgcgaggaggtcatccgtcggcgtacgatctatcaattggtcaaggcccgggatcgggctcatattttggccggattagccgtcgcggtagccaatatcgatgaagtgatcgagctgattcggagtgctcccgactcgcagactgcgcgccacgaacttatggcttgtgaatggctagctgccgacgtggcacccatgattgcattgctggatgagcccggacgtggagtatccgatggcaaatacactctttcggaggagcagtccaaggccatcctggaactgcgcctgcaacgactaactgggctggagcgcaacaagattggcgacgaccttcgcgaattgggtgagcagattggggaatatctatcaatcctcgcatcacgggagaagcttttcggaattcttcgcgacgagctcctggagatgaagcagcagtttggcgacgagcggcgtactactatcgaagaaagtgaatttgagcacgaccttgaggatttgatccaacgtgaagacatggtcgtcacggtgactcagtcgggatacgtgaaacgcgtaccgttatcgacc

SEQ ID NO: 294204 - DNA, 823 bp, Unknown
  Bacterial polypeptide expressing nucleotide sequence isolated from the Sargasso Sea
caaagacagcattgtaataacagaggttgcatatcaaaccaataaagctaatttagttgaaaaaattgcagatttggttagagataaaaaagttcaagggattacagacttaagggacgagtcagataaagatggcataagggttgtgattgaaacaaaacgagatgctgtgccagaggtaatattgaaccagctttataaacacacacagcttcaggacacctttggtattattctccttgccctagtaaacggtataccaaaaataatgggattaaagacagttttacagcattttatagacttccgtcataatgttgtagttcgccggaccgagtttgagcttcgagaagctgaggccagagcacatattcttgaggggttaaaaattgccctagacaacatcgacgaggtgatctcaattatcagagaaagcaaagatcctgttatggctaaagaggggttgatcaatagttttaacctaaccgagattcagtcccaggcaattttagatatgagactacagcgccttacgggcttggaggtagataaggttgtaaaggaatacaaagagctcatccagcacattgctcacctaaggggtattttagaaagcaaaagccagcgaatggaaataataaagtctgagcttttagaaatacgagaccaatacggagatgagcgcaggacagagattgttcctgtggattctgatttttcaatggaagacatgattgctgaagaagaggttgtattaacaattactcatcaaggatatataaaacgaacagcactaaacacctatagaacacaacggcgtggc

SEQ ID NO: 294205 - DNA, 443 bp, Unknown
  Bacterial polypeptide expressing nucleotide sequence isolated from the Sargasso Sea
aatggctagagaatacaatgctgaatcaatagaagtcctctctggacttgatccggttaaaaaaagaccgggtatgtataccgagacctctagaccaaatcacttagcattagaagttattgataacagtatcgatgaagcgcttgcaggtcatgcttcgactattgatgttgaattaaataaagatggctctctcagcgttgaagacgacggaagaggtatgccggtagacattcaccctgaagaaggtatcccagcagctgagcttatatttactagacttcatgccggagcaaaattttctgatgaagattataagttttcaggtggattacatggtgtaggtgtttctgttgtgaatgcattatctctaaatttgactgctgaaattaaaagagggggtcataaatatcttttagagtttgaagatagcgaaaaaaaga

SEQ ID NO: 294206 - DNA, 981 bp, Unknown
  Bacterial polypeptide expressing nucleotide sequence isolated from the Sargasso Sea
actttggaaccccgacgatccacccgcagctatgagatacacagagtcacgaatgtcatctctctcatcacaattattggatggaattgatgaggacactgtaaattttgaaccaaactattcaggcgaaacatcagagcctaaagttttacctgcaagatttccaaacctccttgttaacggtgcagaaggaattgctgtagcaatggcaacaaatatgccgccatataaccttagagagataacagaagctgttaaatacactgttgaaaacaaggatgtaaaaccaaaagactatctaaaaataattaaaggaccagatttcccaacaggtggtcttgttgttgatacaccaacaattaaagaagcaatattaaaaggaagaggatcaatcaaaataagagctgttgcagacgtagaagaactaggcagaggtaggtctgcaatagttgttaaagaattaccctaccaagcatctacagaccgaattatggaaaaaattgcaacgcttgttcaagacaagaaactcctaggaatttctgatcttaggaacgaaagcagtgacaggaacggaactaggttagttgtcgagctaaaaagagatgcagttccacaagttgtacttaatcaactttttaaacaaactcaactacaagacactttttccgtaaactcagtagcccttgttgaaggagttccaaaagtactttcagttcctgagttaattaaatattatattgatcatcaaattgatgtaatacaaagaagaacaaaacacagactacaaaaagccgaaaatagactccatatagtagaaggcttgcttctggctttaaaaaagattgaccaaattattaaagtcataaaagcttcaaaagatgtagacacagcaagaaaatctttaaatgacaaatttaaacttagtgagatacaggcttctcacatattggatatgccgcttagaagactaactgcgcttga

SEQ ID NO: 294207 - DNA, 852 bp, Unknown
  Bacterial polypeptide expressing nucleotide sequence isolated from the Sargasso Sea
aatgccggaacttatagagaaagggtatgtttatatagctcaaccgccattatataaactaaagaaaggaaagcaggagacttatgtaaaagatgatgctgagctaagagagcttctcgtagctgagattcttgatgacgctcaaattgttttaaacaagaaaggagaatctattagtggcgaggccttgggtaaatttatttctcagcatgaaaaagtacaagcgctcgtcaaaggcttgacccacaattacccaatagagctcctagagagcgtgaaacatgttgaaatattaaaagggttggaagacgataaagaagtaaaaaaatggtgtaaattaattgagaagtatttaaatgagaatgctgagcaaggttctgcctggtccgttgctgccgaaaaaaatgaagagactggaactattgaaccaagtgtaaagcttgttaagcatggtacttcttcctcttggtcattgaataaagctttttttagatcgaaggcgtataaagacattgctgctcatggcgcagatatgtctgatttgtttactaaagaaagttactttgagattaattctaaaaaattgccagtagaaaattttgctaatgcgctggaagaggttcttacaatctctgagagatcttttaccaagtctcgttataaaggccttggggagatgaatgcagatcagttatgggacactacaatgaaccccgatatgagaattctaggtcaggttagtatagaggatgcgcaggttgctgatgacctttttcatgctttgatgggagatgaagtagagcccagaagagactttattgatgaaaatgcaaagctagttgtcaatcttga

SEQ ID NO: 294208 - DNA, 926 bp, Unknown
  Bacterial polypeptide expressing nucleotide sequence isolated from the Sargasso Sea
catgagaaaaaaatatatcaagaaaaagtcgcccaaaaaaggaaagctaaaaaataaaatagttagtaaaccaagcaaaagttatacagcaaaggatattgaggtcctagaggggttagagccggtcagaaaaagaccgggcatgtatattggtggcactgacattttagcaatgcatcacctagtgagtgaggtacttgataactcaatggatgaggtagtagctggtcacgcaaataaagtagaaataaatctaaaaaataactcaactattgaaatatccgacaatggcagaggcattccagttgacaagcatcctaaattcaaaatacctgccgctgaagtcatcatgactacacttcattcaggaggaaaattctctaataatagctataaaacatccggcggattgcatggtgttggcatttcagtagttaatgctctttcgaaaaaattaacacttgaaattgcgagagataaaaaatatttctcgcaggtttaccaacaaggtaatcctaaaacaaaattaaaatctttctcaaaaggctcattgaaaaaagggacaagaatagttttttcaccagacactgaaatctttggtaatgacgcctatttcgattcttcgattatttataatatggccaaagcaaaagcttacttaataccagatgttgagattcattggtcttgtgataaatctgtttcaaaaaagaatgttcccattaaggacaaactgcactattcagatgggataaaggattatcttcatagcctgtgttcaccgcaagatccaatctttgaagaccccttttattttaacacaaaaattactgaagaagatggaaagatagaaggaattattaattggtttgattctatagaaccattaaacgagtcatactgtaatacaataaaacacccatggg

SEQ ID NO: 294209 - DNA, 984 bp, Unknown
  Bacterial polypeptide expressing nucleotide sequence isolated from the Sargasso Sea
tgatcgagcgattgctgaattagtgaaggacaaaaagatagaagggatttctgaactaagagatgaatcagataaagatgggttaaggatagttatagaacttcgaaaaggagagatgggagaagtcgttttaaacaatttatacgcacaaacgcagatgcaatccgtgtttggtattaacatggttgcgcttgttgagggcgcgcctcgattgctcaacttgaaggaaatcctagattcgtttgttcggcatcgccgagaagtagtatccaggagaacggtctatttactgagaaaagctagggagaaaggtcatatccttgaggggctagcggttgcgctggctaatatagatcaggtaatcgagttaataaaaaaatctccttcgtcgaatgaggccaaagaggaattgcttaagcggtcttggaggtctgatagcgttttaaaaatgctgggcgaagcaggctctgattcttgccggccagatgatttggccgagcaatatgggctaaaagacgaattatattttctttcgccggatcaggcgcaagcaatattagacctcaggcttcaccggctgactgggttggaacacgaaaaattaatcaacgactataaagaattgttggaacaaattgctgattatcttgatatcttggaaaacagatcgagactagtttctgtggtaaggggcgaactagaaaatgttagaaatgagtatggtgatgaaaggcgcacagaaattgtagggtcccaacaagacttaaccatggaagatttaatttctgaggaggatcgcgtcgttactatttctcaaaatggatatgcaaaaacacaacctttagcggattattccgcgcagcgtcgaggtgggaccggcaaggccgctgcgagtgtaaaggaagaagattttgttgagcacctcttaatcgctaatacgcatgacacgctgctgtgtttcagcagtgtaggtaaggtctattg

SEQ ID NO: 294210 - DNA, 329 bp, Unknown
  Bacterial polypeptide expressing nucleotide sequence isolated from the Sargasso Sea
tatgtctgacattgctaaagaaattcttccaattgcaattgaggatgaactaaaaaaatcttatttaagttatgctatgagtgttattcatggcagggcactacctgatgttcgagatggtttaaaacccgtacatcgtcgcattctttatgcaatgcatgatttaagaaatttttataataagccttataaaaaatctgcgagagtagttggagatgtgataggaaaatatcatccgcatggagattctgctgtttatgatgctatggttagaatggctcaagatttttctatgaggtataccttaattgaggggcaaagtaattttg

SEQ ID NO: 294211 - DNA, 808 bp, Unknown
  Bacterial polypeptide expressing nucleotide sequence isolated from the Sargasso Sea
cttactactctgcatgccggcggaaagtttgattccaaaacttatgctgtctcaggaggtttacatggtgtaggtgtaacagttgttaacttcctttccgaatatcttgaagtcgaaatagcgagagatggaaaattatggaaacaaaggtatgaagaaggaaaagtcgtttctaagcttactccaacaggtaaatcaaaaaaaacaggcaccaagattacttttaagccagatataaaaattttccaaccagttattaatactaaaggaagctacgattttgaaccaaaatttgattttaaatatctttgcaatagaactagagagctcgcttttctaaatgctggtctaaagataactttgaacgatgatagaacattagaaacagaaacttatcattacaaaggagggatcacttcatttgttgaacatcttaatcatggtaagaaaaccataaactctaagccaatttttgtgtcaggcagtaaagacaaaaacattgttgagatagctattcaatacaatgaaggatattcagagactatttattcatatgtaaacaatataaatactatcgaaggtggaactcatcttagtggttttagaagtgcactaacaagatcaattaacaaatacgcaaaagaatacaatattattaaaaatggcaatgtgcaaataatgggagatgatacaagagaaggtctaactgcggtagtatctatcaaagtcccagagccaaaattcgaaggacaaacaaaaacaaagctaggtaattcagaaacatccggaatagtagagtctctactta

SEQ ID NO: 294212 - DNA, 389 bp, Unknown
  Bacterial polypeptide expressing nucleotide sequence isolated from the Sargasso Sea
tatggctaaaaagaaaacctatggtgcaaaagatattgaggtactagaaggcttacttccagttcgaaaaagacctgggatgtatataggaaatactaatattgatggactgcatcatcttgttaatgaaattttagataattcaatagatgaagtagttgctggatatgctaaaaaaattgattttaaatataatttagataattcaattactatcaaggatgatggaagaggaattcctgtagattttcatcctaaattcaaaaataaaagagcgtttgagattgttctaacaactctccattcagggggaaagtttacaaataatgcttacaaaacttctggggggcttcatggagttggcatatcagttgtaaatgcacttagtg

SEQ ID NO: 294213 - DNA, 724 bp, Unknown
  Bacterial polypeptide expressing nucleotide sequence isolated from the Sargasso Sea
tacaaggtttcaggtggtttacacggagttggtgtctcagtagtaaatgccctttctaaatggctaaaattacaaatcaagagaggagggaaaaaatatattcttgaatttaaagaagggttgtgtgtaaaacctttaacagaaattgacagctgtaacgacacaggaactgaaatacatttcaaaccgtcaaatgaaattttcagcgcaatagaatttaattacagcatattagttaaaaggattcgagaactaagtttccttaatgatggtgtaaatattgtattgtctgatgagaagacagcaaaacaggaaaactttgcaaattccggaggactaactggttacgtagaatttcttaatcagagcaaacacccaatacatccaaaaatttttcaaatcaagaaagatgcaaataatataactatagaaatagcactgcaatggaacaatagttattatgagaatgttatatgttttacaaacaatatacctcaacgagacggtggtacgcatcttacaggcttaagatcaggtatgacgcgttgtataaataaatatcttgaaataaatgatcttggaaaaaaagcgaaagttagtatcactggcgatgatctgagagagggtttaacttgtatactctcggtaaagttagcggaaccaaaattttcatcacaaacaaaggacaagcttgtgtcaagcgaggtacgccaacctgtagagg

SEQ ID NO: 294214 - DNA, 808 bp, Unknown
  Bacterial polypeptide expressing nucleotide sequence isolated from the Sargasso Sea
aagagttttttgaataagttcattgaatttcgagaagaagtagttgcaagacgaaccatttttgaacttgagaaagccagagaaagaagccaccttctttgtggcttagccgttgcagtttcgaatgttgatgaagttattgctataattagaaattctgaaaatccatcgaaagcaaaagaaacccttatgaatactaagtggaaagtaaaagagttaagccaatatttagaacttattgatgaccctcttcatacaattaacgaggatggaacttatttgttgtctgaacaacaggcaaaagcaatactcgagttgcgccttcagagactgacagcactaggagcgaccgaaataggcagtgagctagaagacttagcagataagataagaatctgcctcgatattttaaaatcaagagaacaaataagaaaaataatttctgaagaacttaaggaagtcaaagaaaattacgccattccgagaaggtcggaaattcaggaatttgagggagactttgaagatgaagaccttatcgagaaagaagagatggtcgttacagttaccagagaaggatacataaaaagaacagcattatctgagtacagagagcaaaaacgcggtggcaagggtactcaaggcatgaatacaaaggaaactgatgtggtaactaatctattcgttacgaatacacatactcctttattatttttttcatcagatggttttgtatacaagcttaagacttggcgcctaccacaaagtggcagaagctcgaaaggtaaagctattgtaaatctgctaccaa

SEQ ID NO: 294215 - DNA, 469 bp, Unknown
  Bacterial polypeptide expressing nucleotide sequence isolated from the Sargasso Sea
catataagaacactgttacttacgttttttaataacaaaccatttaatcaattaatcgaaaaaggccatctttaccttgcacaaccaccacttttcaaggttacgagaggaactaaaagtacgtatataaaaaatgagaaagatttagaaaaatatattttaaagtcatcagataaaggagaaaaaaaattaaaaaaatttgatttagaaaagttcttaagtgaggaaaaacaaaaattaaatattcaaagatttaaaggattaggagaaatgaatccagaggagctttggcaaacgactttaaatcctgaaaatagaacacttttaaaaattgagtattcaaaagggacaaaagacaaatcaaaagaagatcaaaatataattaaaatacttatgggtgacgaagttgctccaagaaaagatttcatcactgaaaaagcattggaagtagaaaacctagatatataga

SEQ ID NO: 294216 - DNA, 829 bp, Unknown
  Bacterial polypeptide expressing nucleotide sequence isolated from the Sargasso Sea
gggtttaaatctggtcttcttgaggcaataaaagaattctgcgactacaggaatttgattccaaaaggtataaaaattaactcggatgacattcttgctaactgcatttttgttatttcctcaaaattaaaaaatcctcagtttgctggtcaaactaaagagaggcttgattctaaagatcatatgagctttgtttcatcttcaacaaaagattctctaagtatttggcttaaccaacataccgaagagggtgaaaagattgcggatcttgcaattgccgctgctcaaaagaggattaaaagctcaacaaaagttgatagaaagaaaacatttaaaggcccggctcttcctggaaagctttcagactgtaactgcgataatatcgaagaaagcgagctatttttagttgagggagactcagcaggagggtctgcaaaacaagctcgagatagaaggtttcaagcaataatgcctttaagaggaaaaattcttaatacctgggatttagaaagtgcagacataataaaatctcaagaaattaaagatcttgcgactgctattggatctttaccaggagatacagatatttccaacctaaggtatggaaagatttgtattcttgctgatgccgactcagatggactgcacatagcaactttattatgtgcattattcctcagacactataagaatttagtaacctcaggaaaaatctttgtctccatgcctccgttatataggattgatgctgcaaaagaagttttttatgccctagaagagaatgaaaaagaatctattgttaagaaaattaaaaaacagaactcgaaaa

SEQ ID NO: 294217 - DNA, 573 bp, Unknown
  Bacterial polypeptide expressing nucleotide sequence isolated from the Sargasso Sea
actgaaatctttatagtcgaaggtgacagtgttggtggaagtgctaagcaagctagagataggaatactcaggctatattaccattaagagggaaaatacttaatgtagccagtgcttcaaaagaaaaattaagtaataaccaggaaatttcagaccttaaacttgcattgggttataaagctaataatattattaatttaagatatggaaaaataataattatgacagatgccgatgttgatggagctcatattgctgcattgttgatgacttttttttataccgaaatgccctcaattattgaaaacgggaatttatttttagctcagccccctctttataaattaactttgggagacgtaagtgaatacgcttcagacgacgctcaaaaagagcttttaattaaaaataaatttaaaaattcaaaaaatattgaaattagtcgtttcaaaggcttaggtgagatgcctcccaagcagctaagagaaacaacaatgtctaaacataatagaaaattgataaaaattgagctgccccaaaggaattttgaagaagcagataaaagaagagcc

SEQ ID NO: 294218 - DNA, 799 bp, Unknown
  Bacterial polypeptide expressing nucleotide sequence isolated from the Sargasso Sea
aaaggccaaactcgctttgttatagaactcaaacgcgatgccccggcaagtgttgttctcaacaacttgtataaacacaccccgctgcaaactagcttcgcggcaaacatggtggctttgattgacggcgttccgcgcacaatcaatctcgctgatgctctcaacgcgtatgttcaacaccaaatcgaagtcgtcactcgccgttctgaatatcgactccaacaagcaggggatcgcgcccacattgtggaaggcctcttgagggcccttgacttgatcgacgaaatcattgcattgatacgtgcaagtgaagatcgagcatccgctcttgctgagcttcaactcgaaccattcgaatttagtgagcgacaagcgaatcacatccttgacatgcaactcggacgtctgacgcgactgggaagaacacgcctcgaggaagagttggtggagttacaggaacgaataaaagaactcgaagaaattctgaacaacgagacacagttgcggtccgttatcaaaagtgagctttccgaagtacgggaagaacacgacacaccccgtagatctcaaattgtgtttgacgaaggggatatggaagttgaggacctgatagataacgaaccggttgtgattaccctgagcaaaggtggctacatcaaatcagtggctgccgacactttccgaacacaaggacgtggggggagaggcgtacaaggagcacgactaaaagaagatgacattttggtgcgggtcctgactactacagcccactcctatctcctgttctttaccaataagg

SEQ ID NO: 294219 - DNA, 853 bp, Unknown
  Bacterial polypeptide expressing nucleotide sequence isolated from the Sargasso Sea
tgcgatttacgatgctatggccagactagcgcaagacttcaatgtcagatatccactagttgatggccaaggtaactttggaaatatagatggagataaccctgcagccagtcgatatactgaggcgcgtatgacagttatcgctgaagccctgttagagggtttagacgaaaatgctgttgattttagagagaattacgacgggacattaagtgaaccaatagtacttcctgcgtcctttccaaacctacttgccaatggggcaagtggtattgctgttggaatggcaactaatatcccaccccacaatatagcagaattatgcgacgcttgtttgcacctgattaaaaaaccagatgcacggaacgaaactttactcaactttgttcctggacctgatttcccaacagggggcgttattgttgaaagcctggaatctataaccgaaacttacaaaacgggacgcggatctttcagattgagagcaaattgggaggttgagcatctcgacaggggacaatggcaaatcatagtcaaagaaatcccatatcaggttcaaaagtccaaattaatcgaaaaattggcagaattaatacaaactaaaaagatccctattttatcagatgtacgggacgaaagcgccgacgatgtaagattagtcttagagccaaaatcaaaaaatatagatcctgaaattttgatggggctgctattcagaaattcagatttagagatacgtttttctcttaatatgaacgtattgattgatggtgtgactcctaaagtctgtagcttgaaagaagttctaaaagcatttttagaccatcgccgtgaagttttaataagacggacc

SEQ ID NO: 294220 - DNA, 665 bp, Unknown
  Bacterial polypeptide expressing nucleotide sequence isolated from the Sargasso Sea
tatgcacaaagaagaaaaaaaaccggctgtagaggttgttatgacggttttgcatgctggtggaaaatttgacaaagacacctataaggtatcaggggggcttcacggtgttggggtttctgttgttaatgctttatcagaatggttgtgggttgaggttcaaagagatggaaaaatatacaagcaggattacaagattggtgtaactcaaaacaagctaaaagaaacaggtaaaacaaaaaaaagtggaacgagggtttgttttatgcctgacagcggggtttttaacacaacaacattcgaatacgacataatagcagaaagacttagagagttggcatatttaaataaggggcttgagatcaatcttcgcgataaaagagaagaagacggacaaagcgattcttttaaatttaaaggcggactaagtgattttgtaaaataccttgatgaacacaacaacccccttcacaacaaggtcataacagttacaaaagaagatggcgacataccggttgatgttgctcttcggtatggaaacacatacaacgacaacatactaacatttgtaaacaatataaatacaatagaggggggtacgcacctctcagggtttcgctcggcactaaccagggcgatgaacaatcatgcctcgaaaaacaact

SEQ ID NO: 294221 - DNA, 641 bp, Unknown
  Bacterial polypeptide expressing nucleotide sequence isolated from the Sargasso Sea
cccgctgtggaagttgttatgacggttcttcatgctgggggaaaattcgataaaggatcctacaaagtttcaggcggccttcacggtgttggtgtctctgttgtaaacgcattatcagagtggatgtgggttgaggtaaaaagagatggtggtgttcacaggcaggattataaaattggagagcctcaaaacaagcttaaaaccgtaggaaaagcaaaaaaaacaggaactaaggtctgtttttatcctgacagttcaatatttaaaactattgcctttgagtatgatataatagcagaaagacttagagaattagcatatctaaatagcggtttggaaattgttcttcgagatcaaagaatagaagatggacaagttgactcctttaagtttaaggggggattaagtgattttgtaaaatacctcgatgaaaacaataatccactccacaataaggtgatcacagttcaaaacgattcaggagaggttccagttgatgtagcccttcgctacagccattcttataatgataacattttgacctttgtcaataatattaatacaatcgaaggaggaacccacctgtcgggttttcgatctgcgcttacgagggcgatgaataaccacgcatcaaaaaacaa

SEQ ID NO: 294222 - DNA, 397 bp, Unknown
  Bacterial polypeptide expressing nucleotide sequence isolated from the Sargasso Sea
atggataagaaaaacttcacttccatctcgcttcaagaagaaatgcaacgttcttatttggagtatgcaatgagcgtcatagttggacgtgcgttgcctgatgcaagagatggtcttaaacctgtacaaagaagaatcatattcgcgatgtatgaattaggtttaactcctgataaaccattcagaaagtgtgcaagagttgttggagatgtacttggaaaataccatcctcatggagatcaagcagtttacgatgcattggtaaagctggtacaaaatttctcaactaaatatcctactcttgacgggcatgggaattttggatcggtagataatgatccgccggcagcaatgaggtatacagagacaagattagctccaatagctcataaaggat

SEQ ID NO: 294223 - DNA, 858 bp, Unknown
  Bacterial polypeptide expressing nucleotide sequence isolated from the Sargasso Sea
tgcaaaaagtcttttagaagagcttgggcaaggtacggtagattgggatagtaatttcgatggaacacttctagaacccactgtgctgcctgcgaggttaccaaatctcttattgaatggcgctacaggaatagctgtcggaatggcaacggacatacctccccacaatctaaacgaagttgtaaacgcatgcattaaaatcctagatgaacctaaagtttctgttgaagaactctataaaattattccaggacctgatttcccaactcaagctgaaataatttcatctgaagaagacctcaaggaaatttatcaatcaggtagaggatcagtaagaatgagatctacttatagtattgaaaatggtgaaattgtcatcactgccttgcctcatcaaacatcaagttccaagatattggaacaaatagcgcttcaaatggacgcaaagaagctccccatgatagtagatttaagagatgagagtgatgaagagaaccctactagattagtgctagtaccaaaatctaacagggttgataaagatgcagtaatgaaccatttatttgccacaacagatcttcaaaagaactatagggtaaatatgaatctcattggccttaatggtaaacctcagacaagagatattaagctcgttctaaaagaatggcttacatttagatctcaaacagtaacgagaaggctccagtataggttggattgggttttagatagacttcatatcttggaaggtcttctagttatttacctaaatattgatgaggtgattaatatcatcagaaatgaagatgatccgaagaaagtactacagaaaaaatttaaattaagcgtagtccaagt

SEQ ID NO: 294224 - DNA, 102 bp, Unknown
  Bacterial polypeptide expressing nucleotide sequence isolated from the Sargasso Sea
tgagcttgtagatgggcaagggaattttggctctatagatggtgataacgctgcagcgatgcgctataccgaatttagaatgaccaaactttcaagcgaaat

SEQ ID NO: 294225 - DNA, 283 bp, Unknown
  Bacterial polypeptide expressing nucleotide sequence isolated from the Sargasso Sea
tatgtctgatattttagattccggcaattctggatcaagtgaagatagcgatcgaattattcagaccgacttaaggaacgagatgtctcgatcatatctcgagtatgcaatgagcgtcatagttggtcgtgcgcttccagatgcaagggatgggttaaagcctgttcatagaaggatcttgtatgcaatgtatgaactgggtctaactagcggtagaccttatagaaaatgtgcaagggttgtcggagaagtacttggtaaataccacccccatggtgacaca

SEQ ID NO: 294226 - DNA, 763 bp, Unknown
  Bacterial polypeptide expressing nucleotide sequence isolated from the Sargasso Sea
gatgaaacttttatttttagcaaagatggagaaggtcaaggcattgatgtagggatcaattggactgatgaggcttcaaaagacttactcaaagaaacttatgtcaacctgattccaaccgcattaggaggttcacatttaaatggtttcaaagcaggtttgctggattcaatcagagaattttgtgactatcgtaatttattacctaagggtattaaaattaattctgaagatattctcgttaattgcgtattcgttatatcttcaaagttacaaaaccctcagtttgctggacaaactaaagagagactagattcaaaagatcatacttcttttgttagtgcggcagtgaaagattccatgagtatttggcttaatcaacataccgaagaaggggagaaaattgctgatttagctataagagcagcacaaaagcgtgcaaagagtacggtcaaagtggatcgtaaaaaaacctttaagggtccagctttgcctggaaaattatctgactgcaacagtgatgatattgagcagagtgaattattcctagtagaaggtgattctgctggagggtctgcaaaacaggcacgcgagagaaagtttcaagccatcatgcctttacgggggaaaattctcaatacatgggacttggaaagtagtgatattttaaagtcgcaagaaattaaagatttaacaacagctattggagttacacctggagacgataacatctcaaaattacggtatggcaaaatctgtattc

SEQ ID NO: 294227 - DNA, 469 bp, Unknown
  Bacterial polypeptide expressing nucleotide sequence isolated from the Sargasso Sea
tgaaattcgcactgatgctgagcttagcgagtactacattacaatcattatgcgtatgcacggtatcgattatgagtacgttatcgatcatgagtttattgagtcgtctgaatatcagcgccttaaagagcttaaccttgctatcaatgacatgatgggtaaagacgcttacatccagcgtggcgaacgtagacagccagtcgagtctttcaaagaagccctagagtggcttatgaatgaagcgaaacgcggccaatacattcagcgctataaagggctaggtgagatgaacccagagcaattatgggaaaccactatggacccagaaagccgccgtatgcttcaagttaccattgaagatgctattggttgtgaccagctgttcactacattgatgggtgaccaagttgagccacgtcgagagtttatcgaagctaatgcacttaaagtggaaaacttagacgtgtag

SEQ ID NO: 294228 - DNA, 742 bp, Unknown
  Bacterial polypeptide expressing nucleotide sequence isolated from the Sargasso Sea
ttatctgaaaaattaaaattaacgatcaatagggaaggaaaaaaatattttatcgaatttctaaatggggatgcgaaagcacctttaaaatctgttggcaaatcaaaagtatctggaacagaaattaattttttaccttctaaagaaattttttcatcaacaaaatttagcaatcttattcttcaaaaaagaatgagagaattggcttttttgaataagggaattaaaatttctttaaatgactttacacaaaaaaaacctaaaaacttagaatttaaatttgatggaggcatcattgaatttgttgaatatttagacgagaagagagaaaagttaaaaaataaaaatgacaatgatttgtttagaaaacctatatatattgagggatcaaaaaaccatgtagacgtacaatgttcgcttaaatggaatgccggatataatgaagatgtatatccttacacaaataatatttatcaaaaagatggaggaacccatttacttggttttagaagttcacttactagagttgttaataaatatgccaatgaacaaaatttattaaaaaaaaataaagtaagtctatctggtgatgatataaaagaaggtttaacttgcgtgctttctgtaaaaattccagatccaaaattttcatctcaaacaaaagataaacttgtatcttcagaagtcagaaacattgttgaaaatattattaatgaaaaattatctatttggtttgatcaaa

SEQ ID NO: 294229 - DNA, 880 bp, Unknown
  Bacterial polypeptide expressing nucleotide sequence isolated from the Sargasso Sea
ttcaggtatcgctgtaggtatggctacaaatattgccccacataatttaggagaagtgatagatgccactatgtatttaattgaaaatccaaatgctgagattcaagatttaactaaatatatatttgggccagattttccaacaggcggccaaataattggcaagaaaggtatcatagatgggtttgaaactggaaaaggaggagttgtattaaggtcaaaaacatccattgaaaattttaagaaagatagggaggcaataataattcatgaaattccttatcaggtaaataaatctaaacttatagaaaaaattgcagagacggtaaaaaataacatcattgaagggatatctgatttaagagatgagtctgatcgcaatggtgttcgggtcgttatagagttaaaaaaagatgttgatgcaaatataatcctaaaccaactatataaaaacacccttcttcaaaccacttttaattctaatatgttggctcttaacaaaggtaagccagaacaaatgaatctaaaagaaatgttagtagcatttattgattttagagaagaagtaataactaatcgaactatttatgatttaaataaagctagagacaaagcccatatattagtaggtttagtagtagctaatgaaaatattgatgaaatcattgaattaattaagtcttcaaaggattcaaaagaagctaaacagaaattgataaagaaaaaatggatactggatgaaaaaaatattaattttattaaacttgtagatgaagaaaatatacaacttaataaaaatgttttcctacttagtgataaatcagccaaagcaattttagaacttagattacaccgttttgacctctctagagagagatga

SEQ ID NO: 294230 - DNA, 847 bp, Unknown
  Bacterial polypeptide expressing nucleotide sequence isolated from the Sargasso Sea
atccaatcttctcgttaatggtgctggaggaattgccgtgggtatggcaacaagtataccacctcataatttaggggaggttgtagatggaactttagccttaattaaaaacaaagatattaaaattaatgagttaatgaaacatattcctggaccagattttcctacaggagggttaataattggaaaagatataattaagcaaggatacaaaactggaagaggatcttttaaaattcgtggagaaatttcagtagagaatttaaaaaatggtaaagatagactagtagtttcatccataccttaccaaattaacaaatctaatttaaatgaaagaattgcagaactagtaagagataaaaaaattgagggtataagtgatattagagatgaatctaatagcgaaggtataagagtatcaattgatcttagaagaaatgttgaaccagaaacagttaaaagacaattatataagtacacctcaatagagtcatcgtttggttttaactcattagcaattgttgatcaaaaacctaagacctgcactctcaaagattttttagaaaattttttaaaatttagagaagatgtagttataaaaaaaactaaatttgatcttaaaaaagcagaggagcgagttcacattttattaggattatctgtcagcgttgaaaatatagacaaagtcattaaaattattagatcatcaaaaaatccagaagaagcaaaaaattcacttttaaaaactacttggaaaataaaccaagcatcgaaacttattaaattagttgatagtaaaaattacaaaggaaaatatgttctatctaaggatcaagttatatctata

SEQ ID NO: 294231 - DNA, 849 bp, Unknown
  Bacterial polypeptide expressing nucleotide sequence isolated from the Sargasso Sea
tccgaaaaagacctgggtatgtacatttggaagcactaatcaagatggattacatcatttagtaaatgaaattcttgataatagtattgacgaagttttggctgggtatgcatcaaaaatatcatttcattacaaaaaaaatggaagcattaatataaaagatgacggaagaggtattccggttgatttccatccaaagtataaaaataaaagagcgcttgaagtagtcttaagcacacttcatgcaggaggtaaatttaacaacaatgcttacaaaacttcaggaggtttgcatggagttggcatttcagttgtaaatgctttgagttcgtacttaaaagttaatgtatataagaatggaaaagcttatcgacaagaatactctaaaggaaaagttaaaacaaaagttaaaattgaaaaatgtagtaaaaaattaaaaggtacggaaatagcatttttacctgatgatacgatttttgaaataaccaattatgatccaaaaaaactatataattttattaatatgaaatcagtattagttggtggaacaacaataaattttgaaatcgataaagaattaataaacgacaaaacaccaaataaaaaagatttttattataaaaatggaatagaggatttttttaaattagaattctcaagtaaaaataaattatttgaaaaagatttttctcttaaaaaaaaattaaatgataataaaatttttgaagtctatatatcttttaataaaaatgaatcatctagcttaaaatcattttgtaacacaattgaaacacctgatggtggatcacatgagactggtataaaaaatggattaataaaggcaataaa

SEQ ID NO: 294232 - DNA, 341 bp, Unknown
  Bacterial polypeptide expressing nucleotide sequence isolated from the Sargasso Sea
tatgcaggaaaatcaaaatgtagaaatcacggattacgatgaatcaaatattacagtgctgcagggacttgaagcagtacgcttgcgacctggcatgtatattggaggtgtcgataataccgcactgcatcatctggtctttgaagtagtagataacagcgttgatgaagctttagccggtttctgtactgaaattcatgtagtaattaattctgatggtagcatttcggtggaggataatggtaggggaataccagtaggaattcacgaagaagaaggtattccagcagtagaattgattctgacccgtctacatgccggtggtaaatttgataacagta

SEQ ID NO: 294233 - DNA, 817 bp, Unknown
  Bacterial polypeptide expressing nucleotide sequence isolated from the Sargasso Sea
gataactctggttgatgaagccctggcgggccattgcgaccgcattgttgtggtgctcggtgaagacggctcagcctcggtgagcgacaacggccgcggcatccccaccgacgtgcacccccggacgggtaagagcgccttggagacggtgctcaccgtgctccatgccggcggcaagtttggcgccggtggttacaaggtgtccggcggcctgcacggtgtcggggtgtccgtggtgaacgccctgagtgaatgggtgcaggtgacggtgcgccgacagggccaggtgcatcgccagcgttttgagcgcggtgctgcgatcggggcattggcgtcggagtcgcagcctgcagccgagtccggcgagaccggcaccaccgtctgcttcaagcccgacctcgaaattttcaccggcggcatcgttttcgattacgccaccctttcggcccgtttgagggagctggcctacctcaatggcggcgtgcagatcgtgttccgcgatgagcgggagtcggcccgggatgaggaaggcaacccccatgaggagacctacttctacaaaggcggcatcaaggaatacgtcgcctacatgaacaaggagaaggacgcccttcaccctgagatcatctacgtgaattcggagaaggatggcgttcaggtggaggctgctcttcagtggtgctccgacgcctactccgacagcatccttggttttgccaacaacatccgcaccgtggatggcggcacccatatcgagggcttgaagactgttctgacccgcaccctcaatgccttcgccaagaagctgggcaaacgc

SEQ ID NO: 294234 - DNA, 850 bp, Unknown
  Bacterial polypeptide expressing nucleotide sequence isolated from the Sargasso Sea
cgcgatggcttttggtggtcacaaagttatcaactaggtgttcctgacgcgccagttgcaaaaggtaaagcaacagatggtcacggaaccatcgtccgcttctacccttcagatgaaattttcgaaaccacagatttctcatttgaaacactttcaactcgtttccgcgaaatggcctttttaaataaaggtttaacaattgcgttaaaagatatgcgccctggccatgttgatgagaaaggcgaacaactagaagttgtttaccactacgaaggtggaattgttgatttcgttaagtacatcaactcaactcgcggcgaactacataaatcaatcattgctttagaacaagaagatactaagcgcaaaatggcgcttgaaattgcaatgcaatggaactctggattctccgaatctgtatttacttttgctaatgcaattaatactcacgaaggcggaacacatgaagaaggtttccgcaccgcattaacttcagtggtaaataagtttggcgaagattggggatttatccgcaagaaagaagatcgattaaccggtgaagatatccgtgaagggctaactgcgattgtctcaattaaaatttccgaaccacaatttgaaggtcaaacaaaaaccaaacttggaaatactgaagcgaaaacatttacccaaaagtgcgtaaatgaagcgttaactgagtggtttgagaagaatccaaccgaaggtaaagatattgttcgaaagagcattgatgctgcggcagcgcgtgtagctgcacgtaaagcacgcgatctatctcgtaaccgaaaaggtttattagaaggtcgcggaatgccaggcaagcttgatg

SEQ ID NO: 294235 - DNA, 787 bp, Unknown
  Bacterial polypeptide expressing nucleotide sequence isolated from the Sargasso Sea
agaaggaacagaattatttatagttgagggtgactcttctggtggttcagccaaacaaggacgaaatagatcaaatcaagcagtattacctttacgtggaaaaattttaaatacttatgtagaggaacttacaattaaaaaaaatggtaatggtaataaaaatggatctgatcatagaacaaaagctttagcaaaaatgatttcttcaaatgagatagtgactttaattaacgctctcggcttagatccaaaagtacaagaaatagatttaaaagatttaagatatggaaaaattataattatgaccgatgctgatgttgatggatctcacattagagctttattattaacattttttaacaataaaccattcaataaattaattgaaaatggtcatgtttatttagctcaacccccactatttaaaattaataaaggttcaaaaggaatttatataaaagatgaaaaagaactggaaaattatattcttaataataataaagatctaaaaaaaataaaaagaggttcaaaagaatttataaaagcattagatcttgaaaaatcaaaaatgaatattcaaagatttaaaggtttaggtgaaatgaatcctgaagaattatggagcacaactcttgatcctgagacaagaaatttacttcaagttcaatattcaaaagatacaaaaaaagatcaaaatttgattcatacattaatgggtaacgatgttgctttaagaaaagattttataatttcgaatgcaataaatgtccaaaaccttgacatttaa

SEQ ID NO: 294236 - DNA, 868 bp, Unknown
  Bacterial polypeptide expressing nucleotide sequence isolated from the Sargasso Sea
gaaatattagataattctatggacgaggcagttgccggccaagccactagaattgaagtcgagttacatccagattattcgataagcgtaaaagataatggtcgaggtattccgaccgacccacatccaaaatttccagataaatcggcattagaggtaattttctgtacacttcacgctggtggtaaattcagtggtgaggcttatcaaacatcgggtggcttacatggtgtgggagcctctgttgtaaatgctttatcagactacatgatcgtagaagtagccagaaataaagagctatttcgccaaagtttttcccgaggtaatccaacaaaaacaattgaaaaattgggctcagcaccaaatagacgcggaactatggtacatttccatccagacgaagaaatctttggtagccatcggtttaagcccgctaggctctttaaaacaattaggtctaaggcttatcttttcagtggcgttgagattcgctggaaatcagaaattgacgataatgtaacccctcttgaggccagttttcatttcccaggagggttatctgattatttgggcgaaacacttgaaaataattcaacatattctgagttgccatttgccggcagtgttgactttcaggaaagattccaaactgccggcaaagtcgaatgggctattaattggacaccagcacgtgatggctttatccaatcttattgtaatacagtacccactccagagggcgggacgcatgaaaacggtttttggtctgcaattttaaagggtattagggcatatggagaactcataaacaatagaaaagctaaagaaattatccgtgaagatttaattgcaggtggatgcgcattag

SEQ ID NO: 294237 - DNA, 874 bp, Unknown
  Bacterial polypeptide expressing nucleotide sequence isolated from the Sargasso Sea
gagttgcgtctgcatcgcctgaccggcctggagcacgagaagctgttggccgagtaccaggaaattctcggcctgatcggcgagctgatccgcatcctgaccagtcccgagcgcctgatggaagtcatccgcgaggagctggagaaggtcaaggccgagttcggcgacaagcgtcgtaccgagatcgtcgcctcgcgtcaggatctgaccattgccgacctgatcaccgaagaagagcgcgtcgtcaccatctctcatggaggctatgccaagagtcagccgctggccgcctacgaggcgcagcgtcgcggtggcaagggcaaatccgccaccggggtgaaggacgaggactacgtcgagcacctgctggttgccaacagccatgccacgctgctgctgttctccagcaagggcaaggtgtactggctgcgtactttcgagattcccgaggcttcgcgtgctgcccgtggtcgcccgctggtcaacctgttgccgctggacgagggcgagcgcatcaccgcgatgctgcagatcgacctcgaagcgctgcagcagagcgccggtgccgacgaagacctggacgacgaaggcgtggcgatcgaaggcgaagccactgaagtggtcgaggccgaggaagtcgaagaagtcgagggtgaaacccccgaactggtcgccgaaccgaccggcgcctacatcttcatggccaccgccttcggtaccgttaagaaaaccccgctggtgcagttcagtcgtccgcgcagcgccggtctgatcgccctgaagctggaagagggcgacaccctgatcgccgccgccatcactgacggtgccaaggaagtcatgctgttctccgatgccggcaaggtgctgcgct

SEQ ID NO: 294238 - DNA, 292 bp, Unknown
  Bacterial polypeptide expressing nucleotide sequence isolated from the Sargasso Sea
atgcaggaaaatcaaaatttagaaattacggattacgatgaatctaatattacagtgctgcagggacttgaagcagtacgcttgcgaccgggcatgtatattggaggtgtcgacaatactgcactacatcacctggtttttgaagtagtagataacagcgttgatgaagctttagccggtttctgtactgaaattcatgtagtaatcaattctgatggtagtatttcagtggaggataatggtaggggaataccagtaggaattcacgaggaagaaggaattcctgcagtag

SEQ ID NO: 294239 - DNA, 865 bp, Unknown
  Bacterial polypeptide expressing nucleotide sequence isolated from the Sargasso Sea
aatgagtaacacgtataatgccgacgccatagaggttctaaccggacttgatcctgtcaggaaaaggcccggcatgtatacagacacctcccggccaaatcatctaatccaggaagttattgacaatagcgttgatgaggcgttggctggattcgctcgaaatctaaccttaactcttaataaagatggtaccgtcgaggttgcggacgacggccgtggcatgcccgttgacattcataagggcgaaaaagtcagtggagtagaattgatactgactcgtttgcatgctggaggaaagttttcagataagaactaccaatactcgggaggcttacatggtgttggcgtttcggttgtcaatgctctttcagaatttctcgaagttaaagttaagaggaatagcaatatttactctatgaagttcaaaaatggtaacaaagcgtctgagcttaaagttatcaagaaggttggaaaacgtaatactgggactgtagttcgatttcttcccaatagccagtactttgattcaacaagaatctctattcctaaattgaagcatgtacttagggctaaagcggtattgtgtccaggtttaactgtgatctttaatgataacactgtagcgaaatctaaatcgcaaagtgaggactggtattacgaggacgggctaactgattatctagtccaagggacgcgcgagcttgaaactctgccagaaactccattcacaggttcagttcaggggaatgatgaagcggtcgattgggcaatccagtggttgcctatgggcggtgaggagattacagagagttacgtaaatcttataccaaccccactggggggcacccatgtaagtggtcttcgg

SEQ ID NO: 294240 - DNA, 893 bp, Unknown
  Bacterial polypeptide expressing nucleotide sequence isolated from the Sargasso Sea
gaagaccttattggcgcatatcaaaggcccagattttccaccgcgggattaatcatgggtatggatgggttgaaagacgcctatgaaacaggtcgaggaaaaatcaaaatgcgtgcaagggcacacattgaatcaaataagaatggaaaagacagtatagttgtaacggaggttccataccaaacaaacaaagcaaatctagtagaaaaaatagcggaccttgttcgtgataaaaaagttgaggggatcacagacctgcgcgatgagtctgataaagatggtatacgtgttgttatcgaaacaaaacgggatgcggttccagaggtgatattaaaccagctctataaacacacacaactccaagacacctttggcattattttattggcgcttgtggatggcgttccaaaaataatggctttaaaaacaatacttcagcactttgttgattttagacatgaaatagtggttcgtagaactgagtttgaattaaaagaagcggaagcaagggcacatattcttgaggggttgaaaattgctctagacaacattgatgaggttatagaaatcattcgaggaagcaaggatggaacaatggcaaaagagggtttaatgaatggatttaatctatccgaaattcaagcccaggcaattttagatatgcggttgcaaagacttacaggcctagaagttgacaaggttgtcgaagagtataaagagctaataaagcacattgcgcacctcaaaggaatattagatagcaaaagccagcgtatggcaattataaaaaacgaaatgatagaaataagagaccaatatggtgatgagaggcgaactgaaataattcctgttgatatggatttttctatggaagacatgatcgcagaagaaga

SEQ ID NO: 294241 - DNA, 511 bp, Unknown
  Bacterial polypeptide expressing nucleotide sequence isolated from the Sargasso Sea
atgcatgatgatactaatattccggctggtggacgaattgaaccaacagccttttctgatgcgctttcagaacgctatcttgcctatgcattatcgacaattacctcgcgctcgcttcctgatgttagggacgggttgaaaccggttcaccggcggttgctctttgctatgcgtcagctaaaactcgatcccgggcaggggtttaaaaaatcagcccgtgttgttggcgatgtgatgggtaaattccatccgcatggtgacgccgcaatttatgacgcgatggttcggttggcacaggaatttgctatgcggtattgccttgttcaagggcagggtaattttggcaatatcgatggtgataatgcagcagctatgcgatatactgaggctcggatgaccgaagttgccaggcttttgcttgatgggattgacgaagatgcggttgatttccgaccaacctacgatggcgaggcagaagagcctgcattattgccagcggggtattcctaat

SEQ ID NO: 294242 - DNA, 212 bp, Unknown
  Bacterial polypeptide expressing nucleotide sequence isolated from the Sargasso Sea
aatgcctaagcaaaacaattacgattcatctaacatcaaggtcttaaaaggcctggaagcagtacaaaaaagaccaggcatgtacataggagatacggatgatggcagcggtctgcatcaaatggtatacgaagtcatggataactccatagacgaagcacttgccggccattgctctaatattacagtaacagttcatgaggataatgctg

SEQ ID NO: 294243 - DNA, 778 bp, Unknown
  Bacterial polypeptide expressing nucleotide sequence isolated from the Sargasso Sea
atgagtgaagaaaagtattctgcctcatctttacaggttctttcgggtttagaaccagtacgaaggcgtcctggaatgtataccgatacatcgaggccgaaccacttagttcaagaagtcgttgataatagtgtagacgaagcgatttcgggctacgcaaaaaatattgaagtcactctttttaaagatggatcgattgaggtgattgatgatggccgtgggatgcctgtcgacgatcatcctgagtataagatttcgggtgtcgaattgattttgaccagactgcattcgggagggaaatttgactctgagaattataactactcgggtggccttcatggtgttggtgtgtccgtggtaaacgcattgtccttatggcttgaagttcaggtgaagcgagatgggagtgtttttcaacaaaaatatgaaaaaggctccccgacgacagggttagaactcatcgatactgttggaaaacgaaacacgggtacaacgatacgctttcagcccgaggcagaatattttgatacaccgaatgtgtcggtgaccaggttgaagcatcttttaagagcaaaagcggtacttagccctggcttgagagttgctttcaatgttgagggcaagaaagaagacagtgctacgtggatatatgaaggggggttagaagaatatcttcttgactcattaaacggatccgagtcaattcctaccgatgtcgtaattcacagtgctcagggagagggggaggccgtggactatgccttgaaatgggttgtag

SEQ ID NO: 294244 - DNA, 1099 bp, Unknown
  Bacterial polypeptide expressing nucleotide sequence isolated from the Sargasso Sea
cgcttgtattctgctcatagatagacctgagaccgacataaatgaattatgtgaaattataccaggtccagactttcctaccggcggtttaatacttggtaaaagtggtgctaagaacgcatatacaactggaagagggtctgtagtgattagggccaaagtagaggtagaagaaataagaaaagatagggaagctctaatagttacggaaataccttatcaattaaataaagttttattaattgaaaaaattgccgaattagtaagaaataaatcaattgagggaatatctgatttaagagatgagagcgatcggcacggtatgcgaatagttatcgaactaaagagagattctgttgctgatgtaattttgaatcagctatataaatttactcaacttcaatcatcatttggagctaatcttgttgctttagatagaggttctccaaaagttatgaatctcaaagaaatgcttacctgttttattgattttagagaagaggttgtaacaagaagacttaaatttaaactaaataaagcaagagatagagcgcacattcttgtaggccttgcaattgcggtttccaatattgatgaaattataaagttaataaggtcttctaagtcaccagctgaagcaagagaagatttaatggatcgtgaatggccagccaaagatgttgagccccttattaagcttattgatgatcctaggcatggcattaccgcaaaggggaattgttcttttactgaagatcaggcaagagcgattttggagttgagacttcaaagattaacagcgatggggattggtgaaatccagtctgaattagatgatcttaaaaagactatcgaagatctattattaacactaggcgacaaagataaaatctacaatatcattaaagatgaattgatatttgttaaagataattttgctgttgaaagaagaacagaaattcttggagaattagatgatgttcaagatgaagatctaattaaaaaggaagatatggcggttactgttacaagatctggttatattaagcgtgttcccttatcaacatatcgttctcaaaatcgaggtggcaagggtaga

SEQ ID NO: 294245 - DNA, 1432 bp, Unknown
  Bacterial polypeptide expressing nucleotide sequence isolated from the Sargasso Sea
ggtaaaggatttttcagaaaaagcatatttgaattattcaatgtatgtaattcttgatagggcattgcctcatatctcagatggtttaaaaccagttcaaagaaggatcctttatgcaatgagtgaattatcgttgaactacacgtctaaatttaagaaatctgctagaacaattggtgatgtattagggaaattccatccacatggcgatactgcatgttatgaagccatggtaatgttagctcaagatttttcgtataatcatccttttattgagggtcaagggaactggggcactcaggatgatcctaaatctttcgcagcaatgagatatacagaatctaggttgaccaaattttcagaccttttcctaaatgagatagacatgggcactgttgattggagccctaattttgatggcactcttgaagaacctaaaacacttccttcaaaaatcccaaatattctagtaaatggtagttctggcattgctgtaggaatgtctacagatattccatcacataatttaggcgaagttattgatgctattaataaaatattaactactgataaaatatctcatagtaatcttacagatattatccaaggaccagattttcctaccaggggccagattgttctagatacttcagatttgaaaagtatctatgagaatggaagtggaaatgtgactcttagatcgacatatagctcaaatggcaaagaaattataattgattctattccatatcaatctacaacaactaaaataattgatcagattcaggatcaaatatatcaaaaaaaatcagtttttatagatagtgttctagatgcatctgaccaagaaaatcctgtgagaattataattaaaaccaaagggagatcatatagccatgatgagattatgctacatttgttctttactacagatttagagaaaagtattagggtaaatctaaatatgataggtctagatggcaagcctcagattaaaaatttatttgagatattatcagaatggattagttatagactcgcaactataaaaaataaactaaaatgggagctcaataaaattacaaaacgcattcatattctagaatcatatattattgtctacaaaaatcttgatgcaattataaatatcataagaagtcatgataatcctaagcaaaaattagttgccaaatataaatttacagatattcaatatgaagcaattataaatatcaagttaaggaatttagcaaaacttcaagaaaaaaatatccgtgaggaacttgatgaattacgcacatcagaaaagaaaatatcatcaatagttaaatctaaaattaaactcaaaaactatctcatcgaagaacttaatgaaattaaaaaagaattctcaagagataggcaaactaaaatgtcagatctccatatttct

SEQ ID NO: 294246 - DNA, 1207 bp, Unknown
  Bacterial polypeptide expressing nucleotide sequence isolated from the Sargasso Sea
gaattgcccattcgtgaatttactgaaaaagcctatctagattattctatgtatgtgattttagacagggcgcttcccagtttgctggatggtctaaaaccagtacaaaggcgcattatatacgctatgtccgaattgggcctaaaatccacggctaagtataaaaaatctgctcgaaccgttggtgatgtgttgggtaagtttcatcctcatggtgattcagcttgttacgaggcaatggtgctcatggctcaaacattttcttaccgttacccttttatagatgggcaagggaactggggttctgctgatgatccaaagtcgtttgctgcaatgcgttataccgaatcgagaatgacgccttatgcgcaaagtttgttggctgaattgcaacaaggtacggttgattgggtgccaaattttgatggaacaatgcgtgaaccgagtttattacccgcgcgattacccaatgtgttgcttaatggtggttctggtattgctgtgggtatggcaactgacattcctccgcataacctgaatgaagttgtaaaggccacgttacatgttttagagaacccaaaggctacgctttccgaggtgatgaagtttatcaaagcacccgattatcctacttctgctgaaatcatcactccgcgtgctgatattaaacaaatgtataaaacgggaacgggttctattcgtatgcgtgcggtatggcgtaaagaagatgatgatatcattgtaaccgcattgccacaccaggtttctggggctaaggtgttagagcaaattgcacaacaaatgctagcaaagaaactaccgacggtatccgatttgcgcgatgaatcggatcatgagaatcctgttcgattggttattacgccgcgatctaatcgagtcgatattgatattttgatgagccatttgttcgcgactacggacctggagcgcacgtatcgtgtgaacatgaacatgataggtttaaacggtaggccagcggtaaaagatctagtgactgtgttgcaggaatggattgaatttcgaaaaatgacggtcaagcgccgcttgcagtttcgtttagacaaagttttagatcgcctgcatattctagatggtttgttggtggcttttttaaatattgatgaagtgattcgtatcattcgtagcgaagataaacccaagccggtactgattaaaaagtttaaac

SEQ ID NO: 294247 - DNA, 1150 bp, Unknown
  Bacterial polypeptide expressing nucleotide sequence isolated from the Sargasso Sea
aattacgatgacagcactttagaaccatctgttttacctgcacaatatccaaatttacttgtcaatggcgcatcaggaattgctgttggaatggctactaatatagctcctcataatcttggagaagtaatcgaagcaactctccatttaattgagaatccaaatgctgaattagaagatttgactaaatacatccttggtccagactttccaactggaggccagataattggaaaaaaaggtattatagatgcttttcaaactggcaagggcggtgttattcttagatcaaaaacttctattgaaaattttaaaaaagatagagaggctataataattcatgagatcccttatcaagttaataaatctaaactaatagaaagaattgccgagacagtaaaaaataatattattgaaggaatatctgatcttagagacgagtctgatcgtaatggtgtacgtgttgttgttgagctgaaaaaagatgttgatgcaaatataatattaaaccaactttataaaaatacacttcttcaaactacttttaattcaaatatgttagccttgaataaaggcaaacctgagcaaatgaatctaaaggaaatattagttgcttttattgattttagagaagaggttataactaaaagaacaatctttgatttaaataaggcaagagacaaggcacatgttttgctcggtttagttgttgctaatgctaatattgatgaaataattgaattaattaaatcatccaaagattctaaagaagctagaaaaaaattaataaataaaaaatggaagttaagtgaacaaaatataaattttataaagttagtagatgaaggtactacacaattaaataaaaatatattcacattaacggagactcaagcaagagcaatattagaattaagacttcatcgtctaacctcattagagagggatgatattcaaaaagatttagagcaattaatattagaaattaaaggttatttagaagttttacagtcacgttcgaaactattagatgagattaaacaagaattaattgaaattaaaaaagaatttgtaactccgagaaaaagcgaaattattgatatggagtatgaagaagttgatgatttaaaatatattcaaaaagaagata

SEQ ID NO: 294248 - DNA, 634 bp, Unknown
  Bacterial polypeptide expressing nucleotide sequence isolated from the Sargasso Sea
atggcaaaagataagttcaattcaataagtctaaagaaatatgctgaagaatcttatctaaattatgcaatgtatgtaattcttgatcgtgcccttcctaatgttggagatggacttaagcctgttcaaagaagaattttatatgcgatgtcagaattaggattagatgcaacatctaagtataaaaagtctgcaagaacagttggagacgtaattggaaaattccatcctcatggtgacagtgctgcttatgaggccatggtcttaatggcacaaaatttttcatttaagtatccactggttgatggtcagggaaattgggggtctcaagatgaccccaaatcatttgcagcaatgcgatacacagaatcaaaattaacaagttttgcaaatttgctaatatctgaacttaagtcaggtactgtagattggcaacctaactttgatggttcgctactcgagccaataattttcccatctaaaataccaatgattcttcttaacggaacgtctggaatagcggttggaatggccactgacatcccttcacacaatattaatgaagtaattgatgctactgtcaccttacttgaaaaacctaaatctgatttaaaggatttattagaaattataa

SEQ ID NO: 294249 - DNA, 814 bp, Unknown
  Bacterial polypeptide expressing nucleotide sequence isolated from the Sargasso Sea
tctaactgttgaggataatggtaggggtatacctgttggacttcacaaaaaagaaggggtatctgcattagaagttgtaatgacaaaaattggagcaggaggtaaatttgataaagattcctacaaagtttcaggaggacttcatggagttggtgtttcttgtgttaacgctttatcagagtctttaactgcaaaagttttcagagagggtaaggaatatgaacagaattacagtaaaggcaagccagatggacctgtaaaagaaattggtaaatcagataaaagaggaacacttgtaacatttactcctgataaagaaatttttaaagaaataactgatttcgattatgatattctatcaaagagaatgagagaactatcttttctcaacaaaggaattacaatttcaattttggataatagaaaaaaagataaggatggaaatcctatatcagaatcctttcattcaaaagaaggtctaagtgaatttattaagtatttggatgaatctagggagcctataattaataacattataaaaatggaaggtgaaaagaatggaattcctgttgaagttgccatgatatataattcatcctttacagaaaatcttcactcttatgttaataatataaacacacacgaaggggggactcatttgtcaggatttagaagaggtttaactaatacacttaaaaaatatgcagaatcctctggacttactgataaacttaaatttgatatatcaggtgacgactttagagaagggcttaactgctgttatatctgtaaaggtagcagagcctcaatttga

SEQ ID NO: 294250 - DNA, 799 bp, Unknown
  Bacterial polypeptide expressing nucleotide sequence isolated from the Sargasso Sea
ttatttgtagcaaacactcatgatactttgttgtgtttttctagttatggaaaagtttattggattaaagtttatcgacttcccagaggtgggagaaatgcaaaaggccgtccaatcgtaaatctcttgccactagaaaaggatgaaagaatacaggctgttcttccagtcaaagaattcaacgatgatcaatttatctttatggcgactgaatcaggcagtgttaagaaaacaaaattatctgcatactctagaccaatgaaatcaggtataaaagcaataaagctaagagaaggtgaccgagtagttaatgcagagatcactgacggttcaaaagaaattatgcttttctcaaattctggtaaatccattcgcttcaaggaaactgatgctagaccgatggggcgtgtctctcaaggagtcagaggaatgcgtattgaaaaagatcagagaataatctcacttgttgtgctcaaagagggaaatattcttgtcgcaactgaaaatggatttggcaaacaaactttaaaagagcaattctcaattcagaaaagaggagggaagggtgttattgcaatccagacatcaaagcgaaatggaaacctcataggtgcaaatcaagtgagtactggtgacgaggtaatgttcatcagcactactggaaatctcatacggactcgaaccgatgatatatccgtcatcggaagaaatacacaaggcgtaaggctcattagactatccgaagatgataatttactaggcatggaaaaagtcatcagtgaagatgatgaagaataaa

SEQ ID NO: 294251 - DNA, 910 bp, Unknown
  Bacterial polypeptide expressing nucleotide sequence isolated from the Sargasso Sea
aatgccagcaaagaaaacaaccacaaagaagccagcggcaaagaaaacaaccacaaagaagccagcggcaaagaaaacaaccacaaagaagccagagactcaaaacggggcaatagcggtagaagatgaaatctccaagtctttcctggactatgcaatgtcagttattgtttcaagagcactccctgatgttaaagacggtttaaaaccagtacaaagaagaattctttattcaatgtatgaaacagggataaggcccactggtccatttagaaaatgttccaaggttgtaggtgatgttatgggtaattatcacccacatggaaacgaagctatatacggaactcttgtaagacttggacagcactttagtacaaggtatcctcttatcgaaccacaaggtaacttcgggacccccgatgatccaccagcagcgatgagatatacagagtctagaatgtcgttactggcatcgcagcttcttgatggcattgatgaggaaactgttgactttgaaccaaactattcaggagaaacaactgaaccaaaagtactcccaggaaggtttccaaatcttcttataaacggagcagaaggaatagctgtcgcaatggccacaaacatgccaccatataacctacaagaaattacagaagcagttaaattcacactaaaaaccaaagaacctaaaccaagagactacttgaagataattaaaggcccagactttccaaccggaggcttaatagtcaaaaccccaacaataaaagatgcaatattaaaaggaagagggtctatcaaacttagagctgttgccgacgttgaagagcttggaaaaggaagatcagcaatcgttgtgaaagagttaccttatcaggcatcaatagatcgaataatgggaaaaaattgc

SEQ ID NO: 294252 - DNA, 994 bp, Unknown
  Bacterial polypeptide expressing nucleotide sequence isolated from the Sargasso Sea
tatgaaaatagatttagacaaaattatcaaacaatctaaaactaatattgaggatatagcactaaaagaattttctgaaagtgcttatctcaactattcgatgtatgtaatattagatagagcactgccgcatatatctgatggattaaagcctgtccaacgtagaataatatattctatgcaccagttgggtttggataacgcctcaaaatataaaaaatcagctcgaactattggcgatgttctgggtaaatttcacccacatggtgactcagcatgttatgaggcaatggtcatgatggctcaggattttaattataattttccattagttgatggtcaagggaactggggtactcaggacgatccaaaatcttttgcagcaatgagatatacggagtctcgcttaacagccttctctgatctttttttagatgaaatagacaaaggaacagtgcaatggaatccgaattttgatggctcattattagagccaaggcagcttccatcaaaaattccaaatattatgattaacggtagttcagggatagctgtaggaatgtctactgatataccctcgcataatattactgaaattcttaatgcaactatgatgcttttagataaaccaaaaactactaatgatgaattaatgaatatagtcaaaggcccagattttccaaccgctggagaaattatcgctcatgattctgaaattgattcaatttataagcatggtacaggtaacattaaattaagagccacttatagtgataacaaaaaagagataataattaactcaataccatatcaaacacatgtaactaaaattattgatcaaattcattacgaagttaatgctaagaaacttccattcattcaaagtattttagatgattctgatcaggacaaccctgtcagaattattattaaatatagaggccgttctcatacatccgaagaaataatgtcacatctttttttaaaccactga

SEQ ID NO: 294253 - DNA, 2065 bp, Unknown
  Bacterial polypeptide expressing nucleotide sequence isolated from the Sargasso Sea
aatggcaaaaaacaaagacctattttcatcaaatatagataaaatttctattggcgcttttagcgaggacgcatatttaaattattcaatgtatgtgatccttgatcgagctttaccaagtctattggatggactaaagcctgttcaaagaagaataatatatgcaatgagtgaattaggtctaaaacataacactaaacacaaaaaatcagcaagaacagtgggagatgtactgggaaaattccatccgcatggagacacagcatgttatgaagctatggttatgatggcgcaatcattttcatataactcaccgttgatagacggacagggtaattgggggactcaagatgatcctaagtcttttgccgctatgaggtataccgaatctaagttaaccaaatactctgatctacttcttagaaatcttaaaaatggtactgttgattggataccaaattttgatggctcccttgatgagcctaagtttttaccttcacttatccccaatatacttgtaaatggtagctcaggcattgcagtcggaatgtcaacagatattccaccgcataaccttggagaaataattctcgccgtgcaacatttgataaagaatcctaaatgtagtgttaaagatttgatagatttcattccagcacccgactatccaacaggcgggtctcttttaagaaatgaatctgatattgatgaaatttataacgaaggcactggaaatataaaactacgagctgagtatgcttctaagtcaaaagaaataacaatccactctctgccttatcaagcatctaccacaaaaatcatagagcaaattcaatctcaaattattgagaagaagattagctttattggatctgttgaggatcaatcagatgagaaaaaccctgtaaagattattattagaatcaaaggcagcagtatcagcgctgaagatgtgatgaaccatctatatttcaccacggatttagaaagaagttacagagcaaatctaaatattattacatcagaaggcaagccgaaggttatgaatttaagagatattctctctcaatggttagcatttcgtatagatacattcaagaaacagctaaatcatgagaataatcaaatactcgaaagactccacatccttgaaggcttcttaatcgtctacaaacatcttgataaaattatttcaattctgcgcaatgaggataatccaaaacaaaagataatgaaaattggtaagtttacagaaatacagtacgaatcaattgtgaatatgagactgagaaacattgctaaacttgaagagcaaaaaattaatgatgagttcgcaaaactgaaggagagaaatagggagattagttctatattaaaatctaaatctaaattaaataaactaatcagtgaagaactcgatgagctgagtgaagaatattcatctgatagaaaaacaaatattgtggagggtgtatcctcttctaagcaaatcaagaaagaaataaaaatatcaaatgaggcaatgtttgttattttatcaactaatggttggataaaatctaatagaggttcactagataaaaccgatgatctggcatttaaatcaggcgactcattgcttgattatttaaatattgacaacgacaaagaggttgcctttttcgatcaaaaaggattcttatacacaatgactgtcaatgatatgccttctggtagaggttacggtgaatccttaaagaaatactttaacattgatgatggtatccatgttatcggaatggttgattcgcaaaatactaatcatacactattaagcaccgagtcggggtatggttttatatgtgataatcatgatctcagttcttcgaacagaaagggtaaagctatcttaaagaacaaagcatcaatgctttcaaaacctgttgcttttaagatggaagactataaatactatatattgataactgacaaacaatatatgctcgtcggagatttatccgatataccgataatgtcaaaagggaagggagtaaagttgatcaatattcctaagtctgacgaggaa

SEQ ID NO: 294254 - DNA, 387 bp, Unknown
  Bacterial polypeptide expressing nucleotide sequence isolated from the Sargasso Sea
aatggcaaaaaaatcaacagaagccaaatacgattcatcaaatattcaagtcttaaaaggtttagaggctgtcaaaaaaagacctggaatgtacataggagatacagatgatggctctggtttacatcacatggtttttgaggtcttggataactgcattgatgaagcaatggcaggccattgttcagatatacaagtaataattaataaaaatggatcagtgaccgttcaagacaatggcagaggaatacccgttgacgttcacaaaaaagaaggtgtatcagcggccgaactaatcttaacaacccttcactctggtggtaagtttgatgacaatagctataaagtttcaggaggtcttcatggagttggcgtatctgttgtaaa

SEQ ID NO: 294255 - DNA, 937 bp, Unknown
  Bacterial polypeptide expressing nucleotide sequence isolated from the Sargasso Sea
aatgactaaagaaaatttagataaacaaagcattaaaaaatatgcagaaaatgcatatctcaattattcgatgtatgtcattttggatcgagctttacctaatattggagacgggctgaagccagtacaaagaaggattttatatgcaatgtcagaacttggattaaatgcatcatcaaagtataagaaatctgctagaaccgttggtgatgtaataggtaaattccatccacatggtgatagtgctgcttatgaagcgatggttttaatggcgcaagatttttcatttagatacccatttgtagatggtcaagggaattggggatcacaagatgatcctaaatcttttgcggcaatgagatatacagaatccaaactaacaaaattttcagaccttctaatagatgagttaaagcaaggaacagtggattggcagccaaattttgatggatcacttcttgagccagtaatctttccagcaaaagttccatccattttgcttaacggaactacaggcatagcagttggtatggctacagatatcccctcacacaatatgacagaggtaattgatgcaactatccatgttttagaaaatccaaagacttctgttgatcaaattctcaaatatataaagggaccagatttttctaataacgctccaattgttgcatctccagaagagttaaatgaaatgtatagcactggaagaggcgcttttaaaatgaagagtgcatggaaaaaagaaggcaatgacatcattgtaactgaccttcctcatcaaacgtctggctcaaaagttttagagcaaatttcaaatcaaatgatgaataaaaaactcccaatgattgttgaccttagagatgagggcgatcatgaggagccaacaagattagtaataagcttaaaatcgaatcgagttaatgcagaggacctc

SEQ ID NO: 294256 - DNA, 2530 bp, Unknown
  Bacterial polypeptide expressing nucleotide sequence isolated from the Sargasso Sea
atgccagcaaagaaaacaaccacaaagaagccagcggcaaagaagccaaccacaaagaagccaaccacaaagaagccagcggcaaagaagccaaccacaaagaagccagcggcaaagaagctagagacccaaaacggggcaatagcggtagaagatgaaatctccaagtctttcctggactatgcaatgtcagtcattgtttcaagagcactccctgatgttaaagacggtttaaaaccagtacaaagaagaattctttattcaatgtatgaaacagggataaggcccactggtccatttagaaaatgttcaaaggttgtaggtgatgttatgggtaattatcacccacatggaaacgaagctatatacggaactcttgtaaggcttggacagcactttagtacaaggtatcctcttatcgaaccacaaggtaacttcgggacccccgatgatccaccagcagcgatgagatatacagagtctagaatgtcgttactagcatcgcagcttcttgatggcattgatgaggaaactgttgactttgaaccaaactattcaggagaaacaaccgaaccaaaagtactcccaggaaggtttccaaatcttcttataaacggagcagaaggaatagctgtcgcaatggccacaaacatgccaccatataacctacaagaaattacagaagcagttaaattcacactaaaaaccaaagaacctaaaccaagagactacttgaagataattaaaggcccagactttccaaccggaggcttaatagtcaaaaccccaacaataaaagatgcaatattaaaaggaagagggtctatcaaacttagagctgttgctgacgttgaagagcttggaaaaggaagatcagcaatcgttgtgaaagagttaccttatcaggcatcaatagatcgaataatggaaaaaattgcttccttagtgcaggataagaaacttgcaggagtttcagacctcaggaatgaaagtagcgacagaaacggcaccaggcttgttattgagttaaaaagagatgctgttcctcaggttgttttaaaccaactttttaaacaaacccagcttcaagactcattttctgtaaattctgttgctcttgttgacggggtaccaaaagtcctttccgttcctgagcttattgggtattacataaagcatcaaatagacgttattcaaagaagaacaaaacatagacttgataaagcaaaagataggttgcatattgtagaaggtcttttgcttgctctaaataaaattgatcaaattattaaaacaatcaaggcatcaaaagatgtagatattgcaagaaagtcgttaatgaagaaatttaaactatcaaaaatacaagcatcacacatattagatatgccactaagaaggctaacagccctcgaaagagaaaaattagatgaagaaaagaaagacctaaaagaaacgataaaagaacttacagcaattcttaaaagcagggcaaaacaaaacaaaatacttgtcgaagaacttgaagctataacagaaaagtttggagacgaaagaaggtctcgattagtagatgacgtaggagaggtaaaaatagaagacctcattgaagacgaagaaataatagtttcagtatcttcaggtggatatgtaaagtcagtaccttctgattcatacaaaaagcaaggcagaggaggaaagggtgtcaaagcttcatcctcggatgaagacgtaatagaacaccttttatcgacatctgttcactcttatttattgttttttacagacaaaggaaaagtatatagagcaaaagctcatgagcttccaaaaacgacaaggaccgcaaaaggatctttaatccacaatgttctttcaatgggtcaggacgaaaaagttcaggcaataattgatacaagagattatgagacagagaaatttcttttgataatgacagaaaaaggaacagtaaaaaaatctgcttttaaagactttgattcaaactataagtctttacaggcaataaaacttaaagaagaagacagagttgtttctgtaaagacaacctcaggaaaagaagatgtaatacttgtatcgaagaaaggtcaagcaataagatttgatgagaagaaccttaaaccacagggtcgaacagcaatgggtgttaggggtatcaaactaagagaaggagacaaggttgttggagcatctacatcaagagaagaaactcttttatttattacggccaagggatacggaaagagaacaaagttagaagaatttagaagagcaggaagaggaggaatgggagtaaaggccctaaaagtaacagaaacaaagggagatttagttggtgctaggtctgtagatgaagatacagaggttatgcttatgagtaccggtggaacagctataagatgtgcagtaaagcaaataaaacaaatgagcagagcagctcaaggggtaaaagttatgaagctttctaaagaagaagaaatatcagcttttattccaataaaaactgaagattaaa

SEQ ID NO: 294257 - DNA, 1047 bp, Unknown
  Bacterial polypeptide expressing nucleotide sequence isolated from the Sargasso Sea
tatggctaaaagtaaaacctatggggcaaaagatattgaagtactagaaggattacttccagtgcgaaagaggcctggaatgtatataggaaatactaatattgatggacttcatcatcttgttaatgaaattttagataattcaatagatgaagtagttgctggatatgctaaaaaaattgattttaaatataatttagataattcaattactatcaaggatgatgggagaggaattcctgtagattttcatcctaaatacaaaaataaaagagcatttgagattgttttgacaaccctccattcggggggaaagtttacaaataatgcttataaaacttctggggggcttcatggagttggtatatcagttgtaaatgctcttagtgaaaaacttgaaattaaaatttataacaaatctaaattatattctcaaacgtattctaagggtaaagcaaaaacaaaagtaaaaatagaaaaatgtaataaaaatcttaaaggcactgaaattaagtttattccagataaagaaatttttgaaagtattttattttctcctaaaaaactctactcctttattaaaatgaaagctgttttagtaaaagatactaaaattaattttaatataaacaaagaattaatcaaagataaaacaccagataaagaagagtttctatatgtaaaaggaattgcagattttatgcaatcaaattttcagcaaagaaaaaaaattacaaataaagatttttatgcatctttagtattcaatgccaatgaaaaatgtgaagtttatatatcttttaatgaattagaaaaatcttccttaatgtctttttgtaatacaattgaaacaccagatggtggttctcacgaaaatgctcttaaaaattcttttatgaaagcaattaaaatttttagtcataaaaatcaattaactaaatatcaaaatataaatatcaatgatatatttgattatactgataccttgatttctatttttattaattctccaagttttgaagggcaaacaaaaaaaagaattacaat

SEQ ID NO: 294258 - DNA, 1234 bp, Unknown
  Bacterial polypeptide expressing nucleotide sequence isolated from the Sargasso Sea
atgagtgatgctatcgagctcagtctggacggggtagagcgccagccaatgcgcacctttaccgagcaggcttacttgaactactccatgtacgtcatcatggatcgggccctgccgcacatcggtgacggcctcaagcccgtgcagcggcgcatcatctacgccatgagcgagctggggctgtcggcgctgtccaagcacaagaaatccgcccgtaccgtgggtgacgtgctgggtaagtaccacccccacggcgacagcgcctgttacgaagccatggtgctgatggcccagcccttctcctaccgctacccgctggtggacggtcagggcaactggggggcgccggacgatcccaaatctttcgccgccatgcgttacaccgaggcgcgcctgtcgcgcttctccgagctgctgctctccgagctcggccagggcacggtggagtggacgccgaacttcgacggcaccatgaaagagcccgtggtgctgcccgcccgcctgccgcacatcctgctcaacggggtgaccggtatcgcggtgggcatggcgaccgatatcccgccccacaacgcccgggaagtggcccacgcctgcgtggagctcttggacaaccccaatgccggcctggatgccctgatggcccatgtgcaggggccggactacccgaccaacgccgagatcatcacgccccgcgacgacatccgcaagatctacgagaccggcaagggctccatcaagcagcgggcggtgtggagcgaggaggatggcgacatcgtcatcacggcgctgccccatcaggcctcaggcgccaagatcatggagcagattgccgcccagatggtggccaagaagctgcccatggtcaccgacctgcgcgatgaatcggaccacgaaaacccgacccgtctggtcatagtgccgcgctccaaccgggtggatgttgaggggctgatggcccacctgttcgccaccacggacttggagaagaactaccgggtcaacctcaacatcctgggtctggacaaccggccccaggtgaaagacctcaagaccatcctcaccgagtggctgagcttccgccgtgagacggtgcgccgccgcctgcagtatcgcctcgacaaggtgctggcccgcctgcacatcctcgaaggcttgctgatcgcctacctcaatatcgacgaggtgatcgagatcatccgtaccgaggaggagccgggccgggtgatgatgg

SEQ ID NO: 294259 - DNA, 768 bp, Unknown
  Bacterial polypeptide expressing nucleotide sequence isolated from the Sargasso Sea
gccggatgcgcgccgccaagacggtggtgcgcaagaagataacccagggcccggccctgcccggcaagctgaccgactgcggctgcgccgaccccatgcagggggagctgttcctggtggagggtgactccgcgggcggcagtgccaagcaggcgcgggatcgcgagtttcaggccatcatgccgctgcgcggcaagatcctgaacacctgggaggtggaggccggtcaggtgctcgcctcgcaggaggtgcacgatatctcggtggccatcgggctcgatcccgactcggacgatctttccggcctgcgctacggcaaggtgtgcatcctggcggatgcggactcggacggtctgcacatcgccaccctgctctgcgccctgttcgtgaaacacttccgcgcgctggtcaatcagggtcacgtctatgtggccatgccgcccctctaccggatcgatatcggcaaggaggtctactacgccctcgacgaggacgagaagaacggcgtgctgcagcgggtcgaggccgagaagaagaaaggcaaggtgatggtgacccgattcaagggtctgggtgagatgaacccgaaacagctgcgggaaaccaccatggatcccaacactcgccgcctggtgcagctcaccatgggcgcggaaggggacgagggggatgagaccctgcagctgatggacatgctgctggccaagaagcgggcgagcgatcgccgcgaatggctcgaagagaagggcaacctcgccatcatctaag

SEQ ID NO: 294260 - DNA, 1921 bp, Unknown
  Bacterial polypeptide expressing nucleotide sequence isolated from the Sargasso Sea
aatggattttaataaaaccggaggaggatcaaaatctgattctcaaccactcagtgagtttgtagagaaggcataccttgactattcaatgtatgtcattcttgatcgtgcactcccgttcataggagatggcctaaaacctgtccagaggagaattatatttgccatgtctgagctgggcctatctgctcaatcaaagccgaagaagtctgcaagaaccgtaggagatgttcttggaaaatatcatccacacggagacactgcatgttatgaggcaatggtcaatatggcacaagacttctcatatcgatatccattgatcattggccaaggaaactggggctcatatgatgatccaaaatcatttgctgccatgaggtataccgaagcaaagctgagcgcatatacaaagttgatgttgagcgagcttggccaagggacaaccgattggaaaccgaatttcgacggcacactcaaggagcctgaattccttccttccagattacccaacctcattctcaatggtgtaaccggtattgctgtgggtatgtcaactgatattccgccacataacatcaaggaaatagcttatctattggataaattgattaaaaatccagacatttcattgggtcaactcacaaggattacaaagaattttcaaggacctgatttcccatctggcggagagatgatttcttcgccagaggagcttaaacagatttacacaactgggaatggaagtgtcaaaatcagagccaagtataaaaaagaaaaaaatcagattgtcatcactcagcttccttatcaagtgtcaggcaataagatcattgagcaaattgccacacaaatgaaagacaagaagttgccattgattacagatatcaatgatgaatctgatcacgaaacacctatccgaattgtccttacacccaaatccaatagagtgaacaccgatgaattgatgggccatctttttgcaacaacagatctagaaaagaatgtaagagtgaatatgaatttgattggcctcgatggaagaccaagggtctttgatctcaaagcactgttgtcagaatggatagaattcagaacacaaactgtgaccagaaggcttcagttcagattagatgaagtagagtcaaggcttcatatattagaaggtctcatggtcgcctatttaaatcttgatgaagtcattaggatcatccgtgaggaggatgatccaaaatcaaagttgatcaagaagttcaaactttcagagatacaagctgaggcaattttgaatttaagacttaggaatttagccaagctggaagaggagaaaattctcacagaaaaaaatgatcttgagaaagaacaaagtgagttgaaaaaaatactcaagagcaagaaaaaaataaatgaactcattcaaaatgagatcaagcaagacacaaaagatttcggcgatgatagaagaacaaccttaaacgaatcagcgatcacctcgcaagcccttgatcaaactcaacttgcgagcagtgatccagtgacgattgtcttatcaaaggctggttgggttagagctgcaaaagggacacttgatgaccctcgttctctcaattataaatctggagatgattacttgtcttcagtccctggcagaagcaaccagtttgcagtatttatagacagcacaggtagagtatatagtattgttgccgatacccttccttcagccagaagcaatggcgagcctttgtctagtaggctcaatccacccgatggcgcttattttgcaggcgtgatttcaggtaatccaggccaacattggctattgtcttcgagcgcaggatatggtttttttgttaaattggaagatctttataccaaaaaaagaaaaggcaagacatgcctgagtgtaaaaggctctgaagta

SEQ ID NO: 294261 - DNA, 654 bp, Unknown
  Bacterial polypeptide expressing nucleotide sequence isolated from the Sargasso Sea
gatgtatgtcattcttgatcgggcacttccaaatgttggagatggtttaaaacctgttcaaagaagaattttgtatgctatgtcagaactaggactagatgctggctcgaaatataaaaaatcagctcgaactgttggagatgtaatcggaaaattccatcctcatggtgatagtgctgcatatgaagctatggttttaatggcacaaaacttctcatttaaatatccattagttgatggtcaaggaaattggggttctcaagatgatccaaaatcctttgcagcaatgaggtatacagaatcaaagttaacaaattttgcaaatctactaatttctgaacttaagtctggaaccgttgactggcagccaaactttgatggctcattactagagccggtaatttttcctgcaaaaatacctatgattcttttaaatggcacatctggaatagctgttggtatggcaacagatattccatctcataatataaatgaagttattgatgctactgtaaaaatacttgagaaacctaagtcagatctaaaagatttacttaaaatcattaagggtcctgatttttcaaataatgcctctattgtggcaagtcctgaagagttggaagagatgtattcatcaggcagaggaggtttaaa

SEQ ID NO: 294262 - DNA, 316 bp, Unknown
  Bacterial polypeptide expressing nucleotide sequence isolated from the Sargasso Sea
atggccaaaaaatcacaagaagccaaatatgactcaagcaacatccaagttttaaaaggtttagaagcggtaaaaaaaagaccaggaatgtacattggtgacactgatgacgggtctggattacatcatatggtttttgaggttttggataattgcatcgatgaggcaatggcgggatattgttctgacattaaagtaataattaataaaaacggatcagtaacaattgaagataatggtagagggataccagtagatgttcataaaaaagagggcgtatccgcagctcaattgataatgacaactttacactcag

SEQ ID NO: 294263 - DNA, 267 bp, Unknown
  Bacterial polypeptide expressing nucleotide sequence isolated from the Sargasso Sea
catgactaatacacaaaaaaacgtttcatcttcagactataaagcagattctataaaagttttaaaaggtttggaggccgttcgtaagagaccaggaatgtacataggtgatactgatgatgggtcaggtcttcaccatatggttttcgaggtagtagataattctatcgatgaggccatagtaggtttttgtaaaaatataacagttactatacataaaaataattccgtgacagtagaagacgatggaagaggtatcccggtaga

SEQ ID NO: 294264 - DNA, 397 bp, Unknown
  Bacterial polypeptide expressing nucleotide sequence isolated from the Sargasso Sea
aatgccaaaaaaacaaaataaaaaaggatcttacgactcatcaaacatacaagttcttaaaggtcttgaagctgttaaaaaaagaccaggaatgtatataggtgatacagatgacggctcagggcttcatcatatggttttcgaggttgttgataattgtattgatgaagcaatggcaggacattgttcagaaatagttgtttcaattaataaaaatgggtcaataactgttaaagataatggtagaggaattcctgtagatacacacaaaaaagaaaaagtacctgcagcagaacttattatgacaacccttcactctggtggaaagtttgatgataacagctataaagtttcgggtggcttacacggtgtgggtgtgtctgttgtaaatgccctt

SEQ ID NO: 294265 - DNA, 403 bp, Unknown
  Bacterial polypeptide expressing nucleotide sequence isolated from the Sargasso Sea
tgattatgagtacattatcgatcatgagtttatcgagtcgtctgaataccatcgtcttaaagagcttaaccttgccattaacgacatgatgggcaaagacgcctatattcagcgtggcgagcgtagacagccagttgagtctttcaaagaagcactagagtggctaatgaacgaagcgaaacgcggccaatacattcagcgctataaagggctaggtgaaatgaaccctgagcaactctgggaaaccaccatggatcctgaaagccgccgtatgctacaagttaccattgaggatgccattggttgtgatcagctgttcactacattgatgggtgaccaagttgagcctcgtagagagtttatcgaagctaacgcgcttaaagtggaaaacttagacgtgtag

SEQ ID NO: 294266 - DNA, 409 bp, Unknown
  Bacterial polypeptide expressing nucleotide sequence isolated from the Sargasso Sea
tggcttagaaaaaagctatgtgtttaactttgacttttttggctctgctgaatacaactcgattgctaatcttgggaaaactttacatggactgatagaaaaaggtgcttatgtgcagcgcggagagaggacatctgaggttagtaagttttcagaagctattgaatggttgaaaaaagaagccatgagaggggtttatttacagcgatacaagggccttggggaaatgaaccctagccaactctgggaaaccacaatggaccctgactcaagacggatgttgcaagtcaccatagatgatgccatcggagcagatcatttatttaataccctaatgggagatcaagtggacccacggagggaattcatcgaggaaaatgctctttctgctgataacctggatatttaa

SEQ ID NO: 294267 - DNA, 2245 bp, Unknown
  Bacterial polypeptide expressing nucleotide sequence isolated from the Sargasso Sea
atgacaaaagataaatttgattcaattagtcttaaaaagtatgcagaagattcttatctgaattatgcaatgtatgtgatacttgatcgagctcttccaaatattggtgatggtctcaagccggttcaaagaagaattttatatgcaatgtccgagttgggattagatgcatcttcaaaatataaaaaatcagcaagaactgttggtgatgttataggtaaatttcatccgcatggagatagcgctgcttatgaagcaatggtattgatggctcaaaacttttcatttaaatatcctttggttgatggacaaggcaactggggctcacaagatgatccaaaatcatttgcagcaatgagatacacagaatcaaaattaaccagctttgcaaatctgcttatctctgaactaaaatctgggactgtagattggcaacctaattttgatggatctttattagaacctgtaatatttccatcaaaactcccagtaattttactaaatggaacatctggaattgcagtaggaatggccacagatataccatcacataatatcaatgaggtaatagatgcaactgttaaaattcttgagaaaccaaaatcagaattaaatgatcttttaaaaattattaaaggaccagacttttcaaatgcagcccccattattgtcaataatgaagaattgcaggagatgtattcttctggaagaggtggtttcaaaattcaagcgcagtggaagcaagaaaagaactcaatcattataaattcattgccatatcaggcatctggttcaaagattcttgaacaaatagctgaacagatgttaaataaaaaacttccaatggtagttgatcttgctgacgaaggagatcatgaggatccagttagattagtgatcactcttaaatcaaatagagtaaacgctgaagatttaatgaatcatctttttgcatcaactgatcttcaaaagtcttacagaatgaatatgaatttgatatctcttaaaggagggcctaaagtttttccattggtcgatttattaaaagaatggctggcctttagaaaagataccgttaaaagaaaacttgaacacagacttgatcaagtaaatgatagattgcatattttagagggactattatcaattttcatcgatattgatgaggttataaagatcataagaaagtctgatgagcccaaaaaagatcttattaaagcttttaaattatctgagacacaagcaaacgcaatcttagaaataaaattaagacagcttgcaaaattagaacaaattaaattagaggatgaaaagaataatttagataatgaacaaaatgaaattgaaaaagttttaaaatcaaaggcaagattaaaaaccctcataaaaaaagaactagttgaaataaaagaaatgttcggtgaagaaagaaaatcaccaataattgaatcatcaaatgcaaaagttttttctgaagaagacactttagttacagagcctataacagtagttttatctaaggctggatggataagaagtgctaagggacatgatattgacccgcattcattgtcttacagaggagatgataatttgcaagattttgcaagaggtaagagtaatcagcttgcagtttttttagattctaacgggaaagcatattcaattccaagtcattccctaccgtcggcaagaggaatgggagaacctataacaggcagattaaatgctgactctggagttcaattcatatcttcaattattggtgaagacaacggcaaatatctaattatgaatacagcagggtatggatatatctctgaatttaagaatatgacttcaaataaaaaaactggaaaagcttttatgaaattgcctgaacatgcaaaaatgttaaaagccattcctattagagaagatcattcgtatatagctgctgtatcaaacataggtaagcttttaattttcaaattagaagagctaccaatccttggcaaaggaaaaggaaataaaatcataaatatacccaaggataaattaagtgcaggtgaggagtttatggcacatgctcaagttttggcagatgaaagttcattaatggtagaggttggtaaacgatctgtcactttgaaaccaaaagattggaacgaatatatcttatctagagctaaaagaggaaaaaaagttggtaagttaataaacatagaaagattaactgaaatagtaagctcaaaagaagaataac

SEQ ID NO: 294268 - DNA, 704 bp, Unknown
  Bacterial polypeptide expressing nucleotide sequence isolated from the Sargasso Sea
aaacgcaaaaggtcgaccaattgtaaatctcttgccattagaaaaagatgaacgtattcaggctgttcttcctgtgaaagaatttaatgatgatcaattcatattcatggcgacagaaacagggagcgtcaagaaaacaaaattatctgcttactctagacccatgaaatctggtataaaagcgatcaaactcagagatggagatcgcgttgtcaacgcagagattactgatggctctaaagaaattatgctcttttcaaattctggtaaatcaatcaggtttaaagaatctgatgctaggccaatgggacgagtatcacaaggtgtcagaggtatgcgaattgataaagatcagaaaattatttctcttgttgtccttgaggaaggaaatattcttgttgcgactgaaaatggttacggtaaacaaacattaaaagatgaattctctattcaaaaaagaggcggaaaaggtgtaattgcaatccaaacatcaaatagaaatggaaatttgattggtgcaaaacaagttagcacaggcgatgaagtcatgttcattagtacctcaggtaacctaattcggactcgaactgatgatatatctgttattggaagaaatactcagggtgtcagacttataagactatctgaagatgataacttgttaggcatggagaaagtcatcagcgaaaatgatgaggagtaaa

SEQ ID NO: 294269 - DNA, 1732 bp, Unknown
  Bacterial polypeptide expressing nucleotide sequence isolated from the Sargasso Sea
tatagaacaatttatatctcaaacaggatttaaaggcccagattttccaacaggagctgaaattaaagacaacggaggaattaatgatgctatagaaactggccgaggttcttttaaaattagggctgtgcattctatcgaagaaaaaaaagataaaagctctatagtcatcaatgagctaccttatcaagttaataaagctaagctaattgaatcaattgctttattagtgagagataaaaaaattaatggtataagtcatcttagggatgaatctgatcgagatggcctaagagttgttattgaacttaagaagggtgaacaacccgatgttattttaagtagcctatacaaacaaaccaacttacaaacttcattttcagtaaatatggtttgtctagttgacggcgaaccatgcactattagtgtaccaagggctctgcaagaatttatcaagcatcgtagggaaattatcacaagaagaacattatatcttttaaataagacatatattaaagctcacgtacttgaagggctaagcatagctttggataacatagatgaaatgattgatttgattaaaaaatcaaaatctacagatgaagccaagaaaaaaataataaataaaacatggaaagcagctaaaaacaaatgggttttatctaaactaataaatgattgtagtgactttatgacagttgatacgaaagttgaatcaaaagatgaaaaatataaaattagcgaggagcaagcccaagctgttttagatatgaagcttaacaagttgactaacctggagcaagactcaattttgaatgactataatactgctatctcatctattaaagagcatttaaatatcttgtctaaacctgaagaacttaacaatttaatgattaatgaattattagagatcaaggatatatatggacaagaaagaaaatcacaaatctcacaagatgaagggctcttaaatagagaagacatgatcaaaaaagaggatgttatagttgtacttacggatgcaaattatgtcaaacgtatgccgattacagaatttagaagtcaaaagcgtggtggaagaggtgtaaatgctgctaattttaaagagggagacaaagctaagctacttgtatgtgctcatactcatgacacgatattatgtttttccactaaaggtaaagcgttctcaataagagtatttgacataccagacaccagtagacaagctaggggaaaatccataaataatattatcccccttgagtctgatgaatccatatcagcaatattagcaattaagagtttcgatgaggatagttatttatttttaacaacccggaatggcatggttaatagagtgtcattatcatcatttaagaaggttcgaaatagtgggctcaaggctattcttctaaaaagggatgattatctatttaatgcattgcacacgaatgggaatgataaaattattttgtcttcaacaagtggcaaatcaattatgttttcagagtcacaaattagggagagatctagaggaacgcagggtgtcacaggaatcaaactttctggagactctaaaattatttcgtcactaaatatacaatgtagccaagttatatttgttacagagaatggctttggtaataaaatatctgttgattcgtataatgaacaaaatagaggcgggcaaggggtaatttctataaaaacctccgaacgcaatggtcag

SEQ ID NO: 294270 - DNA, 388 bp, Unknown
  Bacterial polypeptide expressing nucleotide sequence isolated from the Sargasso Sea
gctgcattacgacttcatcacgtcagtagactacggccgcatgtttgaactaggcactgcgattcgtgacttaattgaagaaggtggttatgttcgtcgtggtgagaaaatcaagccaatagaaagctttgtcgaagggcttgaatggctgatggccgaatccaaacgtggtttatatatccagcgttataaaggactgggtgagatgaaccctgagcagttatgggaaaccaccatggatccaaatactcgccgcatgttgcgcgtgactattgaagacgccattggtgccgaccagctgtttagcacactgatgggtgacgacgtagaaccacgccgtaactttatcgaagaaaacgcgctaagggtggcaaacctggacgtgtaa

SEQ ID NO: 294271 - DNA, 418 bp, Unknown
  Bacterial polypeptide expressing nucleotide sequence isolated from the Sargasso Sea
ttggctaaaaattatgattcagagtcgatagaggttctatcaggcttagatccggtccgaaaaagaccgggtatgtatactgacacctcttgcccaaatcatcttatccaagaagttcttgataattcaattgatgaggctctagcaggccactgttcaaagatcaaagttacacttcacaaagaagggactgtttctgtcatagatgatgggcgcggtatgccggtagatatccatcctgagcataaggtttctggggtagagttgataatgtgcaagctgcatgctggagcaaaattttcaggcgaagattacaatttttctggaggcttgcatggtgtaggggtctctgtagtaaacgctctttcgcaaaatttatctgtagaaataaaagagacagtcataagtttgaaatgaa

SEQ ID NO: 294272 - DNA, 346 bp, Unknown
  Bacterial polypeptide expressing nucleotide sequence isolated from the Sargasso Sea
atgccaaaaaaacaaaataaaaaagaatcttacgactcaacaaatattcaagtattaaaaggattagaagctgttaaaaaaagaccagggatgtatataggagatactgatgatggatcaggtcttcaccatatggtttttgaagttgttgataattgtattgatgaagcaatggcaggctactgctcagaaataattgtttcaatcaataaaaatggatcaataactgttaaagacaatggcagaggtatacctgtagacacacataaaaaagaaaaggttccagcagcagagcttattatgacaacccttcactctggaggtaaatttgacgataacagctata

SEQ ID NO: 294273 - DNA, 2052 bp, Unknown
  Bacterial polypeptide expressing nucleotide sequence isolated from the Sargasso Sea
taaatcaaattataaaaggcccagactttcctactggcggaacaattattggcataaaagggataaaagactctcagtcatcaggtagaggctcaatcattgttcaggcaaaatcaaacatagaggaatttaaaacagatcgagaggcaatcgtttttactgaagtaccttaccaagtaaacaaatcagctttgcttgagaaaatagctgaacttgtcagagataaaaaaattgatggtataagtgatttaagagatgagtctgaccgccaaggagtaagagttgttgttgaattaaaaaaaggggtaatatcacaggttgtattaaataaattatataaatttactgctctacaaagttcttacggtgttaattcattggcgttggtaaacggaaaaccaaaattaatgaatataaaagaattcattcaccattttatagaattcagaaaagaaattatcagaaacaggactcgtcatgatctcggcaaagcaagagatagggcccatgtattgattggcctagcagttgctgttgctaatgttgatcaaataatagaaataattaaaagctccaaagatcctaatgaagcaagaacctcgcttcttaaaactaagtggctaagcaaggatattgatgatttgttaaagttagttgatgacccaaggcaaattaaaaatgaaaaagaaatttatttaacagacgagcaggccaaagcgatattagagttaaggttgcaacgtttgactgctctaggcaaagatgagatcaagtcagaattatcagatctttccaatcaaataaacaaattcctctcaatattaagggatacggaggtattgaatgatgtaataaatgttgagctaaatgaaattaaaaagcaatttgcaataccaagaaggacagaaattaatgaaggtgaggctacagatattgatcaagaagacctagttcaaaaaagtgatatggtcgtaagtgtaacaaactcaggttatattaaaagggttcctttaaatatgtacagagcacagaaaagaggtggcaaaggaagagcgggaatgaaaaccaatgaagaagattttgtaactcaagtttttacctcaagtactcatgacaatatgttgtttttctcgtctggaggaatagcttacaaacttaagacatggaagattcctgagtcatcaccccaagctaagggcaaagcaataatcaatctcttaaatcttaaagacactgaaagtctatcaagtatccttgtgttgccagaaaataaacaatcaaatggaaatgagtatttaatatttgctacatcagacggcagcatcagaaaaaatagtttagaagatttcaaaaggattcaagcaaatggtaaaattgcaatgaaattagataataataatgcaatcgtaggtgtaaaactttgtagtgatgaagacgatattttactatcaacaaaacatggaaagtgtattcgaactcctgtttcaaaactgagaacaactaaaagtagaagttcggtgggtgtaaggggcatcaggctaacaaaagatgataaaattatttcaatttctgtcatttctcatactgatgtatcgtcagcagaagcaaaagcttacttaaaaatgatttcaaaggaaaaaggaatgcaagaagaaactgagagtgacgataatgatactgataactctgtttctgacattgaaatatctaaggatcgatatgatgaattaaaagcgagagaacaattcattttaaccgttactgaaaatggctttggcaaaagatcttcttcttaccagtttagagtttctaatcgcggaggatcgggcattatgtgtattgcgacatcagatagaaatggcgatgttctagcttcttttccagtcaataatgatgatgatataatgctgataactaaaacaggtcaattaattcgctgcccggtaaaagatgttcgcgtagctggtagaaatacgcagggagtaagtatatttaaaacgacaaaagaagaaaaagttgtttctgcaagcagagttgagctagatagttaat

SEQ ID NO: 294274 - DNA, 1822 bp, Unknown
  Bacterial polypeptide expressing nucleotide sequence isolated from the Sargasso Sea
attgcagagcttatgaaattaaaaaaggttgaaggtatatcagaagttagagacgaatcagataggaaaggcacaagattagttgtagaacttaagagaggttcaagtgaatttgtagtattaaataatttatacaaattgacaccattaagatcatcattttcaataaatatggttgctttagttgatgggtcacctagagttttaaatttaaaacaaattttaaagtattatgttgaattcagagttgatattgttaccaaaagagccgaatttgagttaaaaaaggctcaggctagaattcatattcttgaaggcctgagaatagcccttcaaaatatcgatgaagttgttgaaacaattaagtctgctggccccgttgaagaagcaagagaagctttgaaaaatagattcgatttaagtgaaattcaagcacaggcaatacttgatatgcaattaagacgtatcgcagcgcttgaaactgaaaaaattgaatcagaatacaatgagttaaaagaaattattaaggatttgaatgacctattagctaataaatcaagagtgtatgaggtcataaaaaaagagacaaatgatttaaaagataaatatggagataaaagacttaccaagcttcacaaggaagaattaggtcaatggaacagagaagatgtagagcctcatgaagagtctgttgttacattaagcagaaatggctatcttaaaagagttaaaagcgatacttttagaagacaacatagaggaggtaaaggtgtgaagggcttcaaggcaactaaggatgacgatgttactccttacatgcagattgcagatacgcatgacaccatattgttttttaccgataaaggtagagtattttcttcaagagtatttgatttgcctgcaaatcagagtaaaaacagcagggggactccggtccacaacataatttctctggagcaaagagaaaaagtaaatgcaattctaactgtccctgaaattaatcagactttagaatcttatattgttatggctacaaagagtggaaaaataaaaacaatggaaatttctaaatttaaaaatataagaaaatcaggattgcattctttcaagcttaaaaatgatgatgaaattatttcagttgctctagctttaccattagaaggggtagagaaaaaaaatattattaaacttaatgatataaagaaaaatcctgatagggcagtctcttatgttcttgatagtttggttgaaatagatataaatactattgataaagatttgattaaccctgaatccgaaaaaaaggattcaaatatattaaaaaaggatggcgggagaaaatattacagcattgttgattcaaaaggcaaagaaactgcagtaaaagtttatccagatgttgtaatggtctcagacgctggaaaacaaatcaggttttcaattgaaaaagttagaccccaaggcaggattgctggaggtgttaggggaatgaaattagaatcaaagcagaaagttgttgctatggttcttacatctaaagacccagatagttatattcttgtcgcaagtcaaaaaggattcggaaagctttcaaaaatggagcattttaaggtccaaaggcacggatcaaaaggtcttattactatgaaagtgactgctaaaaacggtaaggttgctgacgcacaatcagttaaaatggacaaaggtgcaggtacatctgatagtgtttaccttcttacagaaaaggctcaggtgcaagagatccctttagatgaaattagtatttatggaagatctactcaaggttctacacttatgaagc

SEQ ID NO: 294275 - DNA, 2278 bp, Unknown
  Bacterial polypeptide expressing nucleotide sequence isolated from the Sargasso Sea
atgagtgacgcaatcaagttaagcttggatggcgtagagcagatgccattgcggcgctttaccgaagaagcttatctgaattattccatgtacgtcattatggaccgagccttaccccatattggtgatggccttaaacccgtacaacgacggattatttatgctatgagcgagcttggtttatcggctcaatcaaagcataaaaaatcagctcgtacagtgggtgacgtattaggtaagtaccatccccatggcgatagtgcctgttatgaggcgatggtgctgatggcgcagccattttcctatcgttatccactggtagatggtcaaggaaactggggggcaccagacgatcctaagtcatttgcagcaatgcgttataccgaggcgcgcctgtcgaagttttctgagctgttattatctgagctgggacaaggtacggttgactggggggcgaacttcgatggcacgttaaaagagcccaaagtgctgcctgcacgtttaccccatattttgctgaacgggatcactggtattgcggtgggcatggcgacagatataccgccacataatgccagagagttagtgaatgcctgcgttgcgcttttggacgatcccaaactcgaccttgcgcagttgatggcctatgtgccagggcctgattatcctacagaagctgagatcatcaccccgtctgccgatattgccaaaatctatgaaactgggcggggctccttaaaagcccgtgcggtttatactgtcgaagccggtgaaatagtgatcaccgcgctaccacatcaggcgggtagtggtaagattttagagcagattgctgctcaaatgcaggcgaaaaaattgcctatggttgctgacttgcgtgatgagtctgaccatgaaaatcccgttcgcttagtgattgtaccgcgctcaaatcgcgtcgattgcgatcaactgatggcgcacttgtttgcgactaccgatcttgagaaaagttttagggtaaaccttaacgtactgggccttgatggtcgtccaagagttaagggcctaaaagacttactcaccgaatggcttgagtttcgtgtcgataccgtaagacggcgcctcgaatatcgtttagataaagtgttggcgcgcttacatatccttgaagcgttaatgatcgcttttctcaatattgatgaagtcattgagatcattcgttttcatgatgagcccaaagcggagttgatggcgcgttttaacctgacagacaagcaggctgaggccatcctcgagttaaaattacgccatttagctaagttagaagaatttaagatcaaggctgagcaggacgaactggaagctgaacgtgaaaagttagagcaattattaggttctgagcgccgcttaaaaaccttaataaagaaagaattaatccaagatggtgagacctatggcgatgatcgacgctctcctattgtagaacgccatgagtcccgtgccttaacagagcaagagcttaccccgagtgaacctgtgactgtggtgttatcagaaaaaggttgggtgcgttgtgctaagggccatgatattgatgccgagtctttatcctataaggcgggcgatcaatatctctgtagtgccatcggacgcagtaatcaggtggcagtgtttattgactcatccggtcgcgcctttgccaccgatagtcatagtctgccatcggctcgtacccaaggcgagcccattactacgcgctttaatatggcatctggtgagaccatgcagcatgttattttgggtgaagacgagcaatgcttcctcttagcaaccgatgcgggttatggctttatttgtactttcaatgacatggtgtctcgtaataaggcgggtaaagcgctattgagcttaccgacgaatgccaagtctttaccacccaaaccgattgatcgtaatcgagagatgtctatccttgccatcaccaatgaaggtcgtatgctactgttttcattggaagcattgccgcaattatctaagggtaaaggtaataagattatcggtattccaagcgagcgcgctaaaaaccgtgaagagttaatgacacatttacaacttgtgccagcagatactccagttactttgtgggcgggtaagcgcaaactcacacttaaaccaagtgatttagagcattatcgcggtgagcgcggacgtcgtggggcaaaattaccacgtggattacagcgtgttgatagtgtggaattaggcgaaggtgctgaggtcttgcctagcatttaac

SEQ ID NO: 294276 - DNA, 1395 bp, Unknown
  Bacterial polypeptide expressing nucleotide sequence isolated from the Sargasso Sea
cctaagtcttttgcagctatgagatatacagaatcaaagctcacacaatattcagaattattacttcacgatttaaaaaatggtacatcagattggatccccaattttgatggcacattaaatgaacctaaatttttaccatctcaaattcctaatattcttataaatggaagttcaggtatagctgtaggtatgtctacagatattccaccgcataatcttggcgagattatattggcggtccaatatcttattaataaccctaagtgtagtattaaggaacttatggaatttatcccagcaccagactacccaactggtgcagacttattgcaagatgaatccgatatagatgctatctataatgagggtacgggtaacattaaattgagagctgaatacagccatcatgggaagactatagaaataacatccttaccttatcaagcctcgactacaaaaattattgagcaaattcagtcacaaatcattgataaaaagattaattttataaactcaatcgaagatcaatctgacgagaaaaatcctgtaaaaatcattataaaaattaaaggaaatagtcatgactcaaatgatgttatgaatcatttatacttcacgactgatctagagagaagttatagagtaaatctaaatatgatttcaatggatggtaaaccgaaggttttgaatttgaaagaaatcttaactgaatgggtctcatttagaattaatacatataaaagaaaacttaatcatgagaacaacaatatacttgatagacttcatattcttgaagggtttttaattgtgtataagcatctagataagattatagaaatactgaggaatgaagataatccaaaactaaagataatgaaaataggaaagttttctgaaaaacaatatgaatctattattaatatgcgattaagaaatatagctaaacttgaagaagataaaataaaagatgagtataaaaaacttcaaaaacgaaataaagagataaactctattcttaaatctaaagcaaaactcaataaattaatcattcatgaacttgatgttcttagtgaagagtatgcacatgatagaagaacaaatattttgtataatacagactcatctaaacaaatcatacaagaaataaaaatatcaagtgagcctgtatctctaattctatcaagtaatggatggatcaaaactagcaaaggtagttctgtatcactcgataatttaacatttaaatcaggtgattcatatcttgctcatttagatatagataataataagcaagtaacttttttagatcaaaaaggatttatatattcaatgatggtcaatgatattccttctggaagaggttatggtgaatctttaaaaaaatatttcaat

SEQ ID NO: 294277 - DNA, 289 bp, Unknown
  Bacterial polypeptide expressing nucleotide sequence isolated from the Sargasso Sea
ttgtatgacgaaatgagctcatcatatttgtcttacgcaatgagcgtaataataagtagagcattaccagacattcgtgatgggttaaaaccagtccatagaagaattatattcgcaatgcataaaggaggatttgattggtcaaaacagtttagaaagtcagcaagaatagttggagatgtaataggtaaatatcatccacatggagatcaagcagtttatgatgctttagttagaatggtacaagatttttcaatgagtttaccattaattgaaggacaaaggtaat

SEQ ID NO: 294278 - DNA, 1120 bp, Unknown
  Bacterial polypeptide expressing nucleotide sequence isolated from the Sargasso Sea
aatgaatggtgcaattgcggtcgaagatgaaatttcaaaatcttttcttgattatgcaatgtctgttattgtttcaagggccctgccagacgttaaagacgggttgaaaccagtacagagaagaattttgtattcgatgtatgaaacaggaattcgcccaacaggtccctttagaaagtgttcaaaggtagtgggggatgttatgggtaattatcacccacatggaaatgatgcaatttatggaacacttgtaagacttggtcaaaactttagtactagatatccattgattgagcctcaaggaaactttggcacccctgatgatccccccgcagctatgagatatacagaatcaagaatgtcatcgctttcgtcccagcttttagatggcattgatgaagacactgttatttttgaacccaactattcaggagaaacaagtgagccaagagttttaccaggaagatttccaaatcttttaatcaatggagccgagggcattgctgttgctatggcaacaaatatgccaccatataaccttagagaaataactgaggctgttaaatttacgttaaatacaaaagatccaaaacctagagattatttgaaaataattaaaggtccagactttcctacaggtggattaattgttgaaaccccaacaataaaagatgcaattttaaaaggaagaggatctataaagttaagggctgttgctgacatcgaagaactaggaaaaggcagatcagcaatagtagtgaaggagcttccttaccaagcctcaactgataggataatggaaaaaatagcttcattagttcaagacaaaaaactaacgggcgtgtctgatttaagaaatgaaagtagcgatagaaacggaacacgacttgttgttgaactaaaaagagacgcagtaccacaggttgttttaaacgatttatttaaatacacacagcttcaagatacattttctgtaaactctgttgcattagttgagggtgtgccaagggttctatcagtaccagaactaataagatattatattgaccaccaaattgatgtaatccaaagaaggtctcaatttaggcttgataaagcaaaatcacgattacatatgtag

SEQ ID NO: 294279 - DNA, 196 bp, Unknown
  Bacterial polypeptide expressing nucleotide sequence isolated from the Sargasso Sea
atgagcttagaaaaccaaaaacaatatagcgcagaaagcatcaaggtcttagagggtttagaggcagtaagaaagcgcccagcgatgtatataggggacgttgggaaaagaggcctgcatcaccttatatatgaggtggtcgacaactcaattgacgaggcgctagccgggtattgcactagggtagtagtaacct

SEQ ID NO: 294280 - DNA, 1993 bp, Unknown
  Bacterial polypeptide expressing nucleotide sequence isolated from the Sargasso Sea
gcacaaaaaggaattaaagactctcaaaaacagtgaagagggatcgatcattgttcaagctaagtcaacgttcgaagagtttaaaagtgatcgtgaagcaattatttttacagaattgccttatcaagtaaataaatcaactttaattgaaaagatagcagagcttgtaagagataaaaaaattgaagggatcagtgatttgagagatgagtctgatcgacaaggtgtcagagtagttgttgaacttaaaaaaggagtcatcgcacaagtaattttaaataaattatacaagtttacgcctttgcaaagttcatatggtgttaatgctttagctctcaacgatcagaagccagagttgatgaatataaaagatttcttaaggcatttcataaatcaccgggaagaaattatttctcttagaactaggtatgatttaaataaagccagagatcgagcgcatgtcttaacgggactagcgattgctatctccaatgtagatcaagtaatcgaaatcataaaaaactctaaggaccctagctctgcaaaaatagagttgctgaaaacaaaatggaagagctctgatgtaaaggatattttagaattaattgatgatccaaggcaaataaaaaatgataaagatatttatttaactgaggatcaagccaaatctatattagaattacggcttcagaggcttacggcattaggcaaaggggagttggaagaagaattaaaaactttatcagataatataaatgagtacttatcaattttaagagacaaaaataaattacaatctgttattaaatatgaattagagaatgtaaaacaagaattctcatctccaagaaaaactgaaattactgaccatgaagcttcagacatagatcaagaggatcttgttcaaagaagtgatatggtaattagtattactaattccggctatataaaaagagttcctctagaaatgtaccgtgcccaaaaaagaggcggcaaaggtagatcaggaatgaaaacaaacgatgaagattttgttacacaagtttttacctctagtactcatgacaatatgttatttttttcatcaagtggcatcgtatacaaacttaaaacatggaagataccagaatcatctcctacagcaaaaggtaaagcaattataaatttattgaatttgaaacaagacgatcaactatcaagcatacttgtcatgccagaaaataaagcctctaaggatgataattttttaatatttgctaccgctgatggcagtattagaaaaaatagtattgatgatttcaaaaatattcaagctaatggaaaaattgcaatgaaactaagtaattcaaataaaattgttggtgttaaaatttgtactgaaaatgatgacgtattactttctacaaaagaaggcaaatgcattagaacacctgtttctaaattacgaacaacaaagagccggtcttcaattggagtaaggggtattaaattagcagaaaatgactcaattatatcattatcaatattatctcatctagatgtaacttcagctgaggcaaaggcctacttaaaaatgaataaagcaactaaagaagataatgatgacaatgaagaggattctaaagaagaaatagaagatattaaattatcagaagatcgatttcaggaaatgaaagcatgtgaacaatttgttcttacagtaactgaaaatggattcggaaaaagaacgtcttcatatcaatttagagttaccaatagagggggttcaggaattatgtgcataactacttcgtcgcgaaatggaaatgttttagcctcatttccagtcggacatgatgacgatataatgctgatcacaaagtctggccaattgatcagatgtccagttatagatataagagttgctggtagaaatactcagggagtaagcatattcaaaacatctgatagtgaaaaagttgtttcagcttcacgagttgaaatagaaaattaa

SEQ ID NO: 294281 - DNA, 1507 bp, Unknown
  Bacterial polypeptide expressing nucleotide sequence isolated from the Sargasso Sea
atgagcaaagaaagtgatctgccatttttcaattacgctgaaaaggcgtacttggaatattcgatgtacgtcattcttgatagggcattaccttttataggcgatgggttaaagccagtccaaagaaggattatttatgcaatgtctgaattaggacttaaatccagctctaaatttaaaaaaagtgccaggactgtaggagatgtaataggtaaattccatccgcacggtgattctgcagcctacgaagcaatggtactgttagctcaaaacttttctaccagatatcctttgttagaaggacagggaaattggggatcgttagatgatccaaaaagttttgctgctatgaggtatacggaatgcagattgtcagcttatgcccaatcacttcttgatgaggcggcacaaggaacagtcgactggataccaaactttgatggaactctaattgaaccaaaatttcttccggatagacttccaaatgttttattaaatggtgcttctggaattgcagttgggatggcaacagatataccgccgcataatcttaaagagattgttaatggtgtgatttctttgatcgatagtccaaaactttcaaataaagaattgatgaaagatatttcagcgccagactatcctacttcggctcagattatgaattccgatgacgaggttttagaaatatatgaaactggaagaggagccattactttaagatcaacatttgatgtagaggatggaaatatcgtcataaattctcttccgtatcaagtctcttccatgaaagcaattgaacaaattgctgcacagattgattctaaaaagctttcaatgatcgaagatataagagatgaaggagatgaacataatccagttcgaatcgtgattgttccaagatcaaatcgtgttgataaagatgcgttaatgtctcatttgttcgctacaactgagctacaaaaaaatacacgtgtaaacattaatggtatcggccttgacggtaagccgaaagtatttgacctcaaaggaattctgaaggaatggattaagttcaggacagagactgtaaaaaggcgaataaaacataggcttgactgggttgatgacagactgcacatcttaaaaggccttcttatagcgtatctaaatcttgatgaaataataaatatcatcagaaacgaagatgatccaaaaaagactttaatgaaaaaatttaagctttcagatctgcaagctaatgcaattctggatatacgtctcaggcaattagctaaacttgaagaaatttctataaaaactgaacaagaagatctagcctcggaaaaaaaagagttggaggcatatctaaaatcttcgcctaggctgaaaactctaatcaaaaaagaacttaaagctgactcagaggaatatggcgatgaacgaaaaagtttttatggagaaggagtctctgcaaaagcatttgatgagttagatctaatttctaatgacccaatgacggttgtat

SEQ ID NO: 294282 - DNA, 628 bp, Unknown
  Bacterial polypeptide expressing nucleotide sequence isolated from the Sargasso Sea
tatgacaaaagatcaatttaattcaatcagtttaaagaaatatgctgaagaatcatatttgaattatgcaatgtatgtaattttagatcgtgcactcccaaatgttggcgatggtctaaagcctgttcaaagaagaatcttatatgcaatgtctgagctagggcttgatgccacatctaaatataaaaaatcagcaagaacagttggagatgttataggtaaattccaccctcatggagatagcgcagcatacgaagctatggttttgatggcacagaatttttcttttaaatatcctttagttgatggtcaaggaaattggggctctcaagatgatccaaaatcatttgctgcaatgagatatacagaatctaaattaactaattttgcaaacttactaatttctgaactgaaatcaggaacagttgattggcaaccaaattttgatggttctttattagagccagttatctttccctcaaaggtacctatgattttacttaatggaacatctggtattgctgttggaatggcaacagatattccatcacataatataaatgaaatcattgatgccgcagttcgcctattagataagccaaaatcaactttaaaggaacttgcttaa

SEQ ID NO: 294283 - DNA, 900 bp, Unknown
  Bacterial polypeptide expressing nucleotide sequence isolated from the Sargasso Sea
catgattaaaaaaaatatcaagaaaaagttacccaaaaaagacaagctaaaaaataaaatagttagcaaatcaactaaaagttatacagcaaaggatattgaggtccttgaggggttagagccagttagaaaaagaccgggcatgtatattggcggtactgacattttagcaatgcatcacctagtaagcgaggttcttgataattcaatggatgaggtagtagctggtcatgctaacaaagtagaaataaacctaaaaaataactcaactattgaaatatccgataatggaagaggcattccagtcgacaagcatcctaaattcaaaatacctgccgccgaagtcattatgactacacttcattcaggaggaaaattttctaacaacagctataaaacatcaggtgggttgcatggcgttggcatttcagtggttaatgctctttcgaaaaaattaacacttgaaattgcgagagataaaaaatatttcacacaagtttaccagcaagggaatcctaaaacaaaattaaaatcttcctcaaaaggctcattgaaaaaaggtacaagaatagttttttcaccagataccgaaatctttggtgatgaggcctatttcgatgcttcgattatttacaatatggccaaagcaaaagcttatttgatacccgatgttgagattcattggtcttgtgataaatctgtttcaaaaaagaatgtaccccttaaagataaactgcactattcagatggtataaaagattatcttcatagcttgtgttcaccgcaagatccaatatttgaagatcccttttattttaatacaaaaattagtgacgaagacggaaagatagaaggaattgtcaattggtttgatgccatagaaccaataaatgagtcata

SEQ ID NO: 294284 - DNA, 355 bp, Unknown
  Bacterial polypeptide expressing nucleotide sequence isolated from the Sargasso Sea
atggcaaaaaaatctaaggaagccaaatacgactcaagtaacattcaagttctaaaaggtttagaagcggttaaaaaaagaccaggtatgtacataggtgatacagatgatgggtctggattacatcacatggtttttgaggttttagacaattgtattgacgaagcaatggcgggttattgttcagacattaatgtcataatcaataaaaatggttctgtaacaatcgaagataacggaagaggaatacctgttgatgttcataaaaaagaaggagtgtcagctgcgcaattaataatgactacccttcactctggtggtaaatttgatgataactcttataaagtttcgggcg

SEQ ID NO: 294285 - DNA, 1227 bp, Unknown
  Bacterial polypeptide expressing nucleotide sequence isolated from the Sargasso Sea
atcgggtattgctgtgggtatggctacaaatattccgccgcataatcttactgaagttcttaatgcatgcgttaacttaataaatgaccccaaactttccattgatgatcttattaaagacatctctggcccggattttccaactggtggaacaattgacggaaaagttggtatatatgaagcctacaagactggaagaggtattattcacattagatctaatacttccattgaagaagatgagaaatcaggcaaacaatcgctcataatcaatgaaattccctttatggtaaataaagctaagatgcttgaaaaaattgctgaattagtcaaagagaaaaagatagaaggaattacagaaataagagatgagtcggataaggatgggttgcgagtcgtcattgaagtaagaaaaggagattctgtagaggttttagaaaataacctttttgcacaaactcaattagaacaatcatttggtatcaattttaccgttttagttgatggacagccaaaggaagtaaatctcaaagaaatgctcgaagctttcattaagcatcgaaaggacattataactaaacgtacaaaatacgatttaaaaaaggctaaggatagaggtcacattgttgagggacttatggttgctatagctaatattgatgaagttataacaattattaagaagtcaaaagatccaaaattagctgctgatgctctgtgtaaaaaagtttggaaagcgggaccagttgaggctattcttaaaaaagttggtaaagatgcatgcaagcctaaaggccttagcaaagatcttggtatcaatggcaaaaaatataaactttctcctgatcaagcaaaagcaattttagaactaagattgggaagactaactggtttagagcaagataatttaagtaatgaattttctgacatagttgcaaaaattatagatcttcaaaaaatattagatgacaaagagacactaaagaatttgatgatagaagagcttgaagaggtaaaaactaattttggagatgaaagaagaactttaattaatgatacaagaagagggataactaacgaggatcttatacctgaggagatgagagttttaactgtatcaagaagtggatatgcaaaaactcaacctctcgacgaatatagagagcagagaagaggaggacaaggcaaagctgcagctgctgtaaaagaagaggatttaattcagaa

SEQ ID NO: 294286 - DNA, 313 bp, Unknown
  Bacterial polypeptide expressing nucleotide sequence isolated from the Sargasso Sea
aatgaaaaatataattaaagacaatatcaattcaattcttaagagtagatatttgtcttacgcagtatctactattatatctagatcgctacctgacttaagagatggtttaaagccagtccatagaagaattatatattctatgtatttacttaaattgtttaataattcaccttttaaaaaatctgcaagaattgttggtgatgtaatgggaaaatttcaccctcatggtgatcaagctatttatcagagcttagttagaatggcacaggatttttcctcaagaatgactcttttcaagggcaaggtaatt

SEQ ID NO: 294287 - DNA, 1264 bp, Unknown
  Bacterial polypeptide expressing nucleotide sequence isolated from the Sargasso Sea
aatgactaaagaaaatttagataaacaaagcattaaaaaatatgcagaaaatgcatatctcaattattcgatgtatgtcattttggatcgagctttgcccaatattggagatgggctgaagccagtacaaagaaggattttatatgcaatgtcagaacttggattaaatgcatcatcaaagtacaagaaatctgctagaactgttggagatgtaataggtaaattccatccgcatggtgatagtgctgcttatgaagcgatggttttaatggcacaagatttttcatttaggtacccatttgtagatggtcaaggaaattggggatcgcaagatgatcctaaatcttttgcggcaatgagatatacagaatctaaactaacaaaattttcagaccttctaatagatgagttaaagcaagggacagtggattggcagccaaattttgatggatcacttcttgagccagtaatctttccagcaaaagttccatcgattttacttaatggaactacaggcatagcagttggtatggctacagatatcccatcacacaatatgacagaggtaattgacgcaactatccatgttttagaaaacccaaagacttctgttgaccaaattctcaaatatataaagggaccagatttttctaataacgctccaattgttgcatctccagaagagttaaatgaaatgtatagcactggaagaggtgcttttaaaatgaagtgtgcttggaaaaaagaaggcaatgacatcattgtaactgaccttcctcatcaaacgtctggctcaaaagttttagagcaaatttcaaatcaaatgataaataaaaaacttccaatgattgttgacctaagagatgagggcgatcatgaggagccaacaagattagtaataagccttaaatcgaatcgagttaatgcagaggatctcatgaatcatttatatgcatcaacagacttgcagaaaaactacaggggtaactttaatttaatttctctaaaagggtcacctaaggtttattcaataaaagatcttcttagcgactggatagcattcaggaaaataacagtaaccagaaagctcgaacataggctcgatcaagtagatgatagattgcatatattagaaggcttattaattgtctatctcgatctagataaagtaattaagatcatcagacaatcagatgatcccaaaaaagaactcactaaaaaatttaaaatatctgatattcaggctaatgcaatattagagata

SEQ ID NO: 294288 - DNA, 1084 bp, Unknown
  Bacterial polypeptide expressing nucleotide sequence isolated from the Sargasso Sea
tctggaggtcttcatggtgttggcgtatctgtagtcaatgctttatcacttaatttatctgctgaaattaaaagaggagggcataagtacctcttagagtttaaaaatagtgaaaaaaagaaagaattagccaagatagacaaagtaggcaaaaaaaataccggaacaaaagttacattccttcctgaccctcaatacttcgataataataagttctccgtttctcaactgatggctgctttgaaagcaaaagctgttttatctccaggtcttaagatttccttcaaagataaggagtcagggaaatctgaaagctggtgttttgtagatggtctagctgcatatttagttactagcaataaagggggagatttaattccatctgaaccttttgaaggggagcattttaatgatgatggaggtctcacatgggccttgcaatgggtacaaggaatatctgatcctatttctgagagttatgtaaatttaattccaactactcaaggtggtacccatgttaatggattaagatcaggtctaaatgaagcgttaaaagaattctgtgaattcaggaacctaattccaagaggggttaagctaaccgcagatgatgtctggttgaactgtagttcaatactttctgctaaattaaaagacccccaatttaccggccaaacaaaagaaagactttcttcgaaagaattttccacagttgcttcagcaattgttaaagacgcttttagtctttggctaaatcaacacactgaagagggtgaagccattgctcaaatatgtatagaaaatgctcaagcgagacagaaaagtaataaaaaagtagaccgaaagaaggtaagttctggactggcattgcctggaaagttaactgattgcacttcaggagatccagaaattggcgaactatttctagtagaaggccagtcagcaggaggttcagctattaaggctagagatagaaactttcaggctatattgcctttaaaagggaagatcatgaacacttgggaagtggaggttagtgatgtcttggcttctcaagaagtaaataacattgctgtagcattag

SEQ ID NO: 294289 - DNA, 1657 bp, Unknown
  Bacterial polypeptide expressing nucleotide sequence isolated from the Sargasso Sea
atggcagatacactgagttttgactttgagcagaacgaaaaacagccactagaagagtacacggaaaaggcctatttggattattccatgtatgtcattttggatcgtgctctccctcatataagtgatggattaaagcccgtacaacgacgaattatctacgcaatgtcagaattagggctcaaggcatcatcaaaatttaaaaaatcagcccgcacagtgggggatgttattggcaaatttcatccgcatggcgattccgcctgttatgaggccatggtattgatggcacaagatttttcatatagatatcctcttattgatggtcagggaaactgggggtcaatggatgacccaaagtcatttgcagcgatgaggtatacagaatcaaagttaactgcttatgcagatgttctacttagcgaagttgagcaaggtaccgttgagtggcttcctaatttcgatggaactctagaagagccaaagttattaccggctagactaccaaatatcttattaaatggtacaacaggaatagcagtaggaatggcgactgatataccgccgcataatttaaaagaagttgctagcgcatgtattaggttgcttgacaccccaaagagctcagtacttgaactatgtaaacacattaaaggtcctgactttccaacaaatgcggaaattattagttctaaaacttcaatacgtgaaatttataaaacaggctatggttcaataaaagcacgtgcagtttggtgcgaggaagatggaaacattgttattacagcaataccgtaccaaagttcaggaaataaaatattagaacaaatcgcttcacaaatgcagtcaaaaaaattacctatgattgatgatttaagggatgagtcagatcatgaaaaccctactagattggttttagttccacgttctaatcgcgtggttttagaagagctaatgctacatctgtttgcgacaacagaccttgaacgaagttatcgagtaaatttaaatattattggtctagatgggcgacctcaagttaaagatttaaaagttattttaaaagaatggattcaatacagaactgaaacagttagaaagagattgcagtttagattagataatgtcacttcttcaatccatattttagcaggcctgatgattgcgtatcttaatatagataaaataataaaaataataagaaaagaagaaaaaccaaaagatactttgatgaaaaattttaaattaagcgatacacaggcagatgcaattttaaatttacgattgagaagattagcaaagctcgaagaactaaagattaaaacagatttaggcaatttaaaaaaagagaaaaaggagttagaagctatattaaaatctaagcagcgtttaaaaacagttatcaaaaaggaaatagaagctgatacgaaactctttgctgatgacagacaatcggaaataaaagaagcaaaagaggcaaaggtcatagatgaaaaaagtcttattacatcagaatcagttacgattgtactttctgaaaaaggatgggtacgagctgctaaaggtcatgatattgatccgacatcattaaattacaaaagtggtgataatttcaagcaaatgtctcaaggtaaaacaaatcagcttgctgtattta

SEQ ID NO: 294290 - DNA, 2260 bp, Unknown
  Bacterial polypeptide expressing nucleotide sequence isolated from the Sargasso Sea
atgtctgaaaagcttgaaaaacaatcaataagtcaattcagtgaaaaggcatacctagattattctatgtatgtcatcttggatagagctttgcctcatataggagatggattgaagccggtgcaaagaagaattatttacgctatgtcagagctaggtttaagtgcagcggcaaaatataaaaagagcgcaaggaccgttggagatgttataggtaaatttcatcctcatggagatagtgctgcttatgaagctatggtacttttatctcaatcttttactactagatatcctttaatagacggtcaaggaaattggggttctttagatgatcctaaatcttttgcagcaatgcgttacacagaatgcagattgtctccttatgctaaaagtcttttagaagaattaggccaaggaacagtagattggacaagtaattttgatggaactcttttagaaccctctgttttaccagctcgccttccgaatctcttattaaacggggctacaggcattgcagttggtatggcaactgatattccttcgcataatctcaatgaagtagtgaaagcttgtattaagattctagaagaaccaaaagtaagtttagaagatctttataaaatcattcctggtcctgattatccaactgaagcagaaattatttcccctgaagaagaacttagagaaatttatagcactggtagaggtagcgtaaagatgagagcaacttatgaagtagaggatggagaaatagttattcttgcactccctcatcaaacttccagttctaagattctggaacaaattgcatctcagatggaagcaaagaaacttcctatgattatagatttaagagatgagagtgatgaagaaagcccaacaagattagtattagtgcctaaatccaatagagtagataaagaagctgttatgaatcatctgtttgccacaacagacttacagaagaattacagggtaaatatgaatttaattggtttaaatggaaaacctcaaacaagagacataaagcttgtattaaaagagtggttgtcatttagaacacagacggtaacgcgaaggctccaatatagacttgactgggttttagacagattacatattctagaaggtttattggttgtctttataaatatagatgaagtaataagcataattaggaatgaagacgaacccaaaaaagtcttacagaagaaatttaaattgagcgttatacaagtagatgcaattcttgagatacggttgcgccaattagcaaaattagaagaaataaaaattaaagaagaacaaggaagtctagattctgaaagaaaagatttagaaaaattattgggctctaagacaagactaaagactttaataaaaaaagaactaaaagccgatgccgaagtttatggagacgaaaggaatagcccaatagtttatagagaagaggcaacggcatttgatgagactgaattgatctcttctgatcctgttactgtaatattatctgaaagaggttgggtaagagctgctaaaggccatgacattgaacccgaatcattaaactatagagaaggcgatactttcttcgcttctgcaaaaggaagaaataatcaaaacgcagtgttcttagattccaaaggaaaagcttacacacttccttgtcattctttgccttcagcgagaagccaaggagagccactgagtggaagattaaatgcagagtcaggagagacttttgccggagttatttcaggtccggtagaatcacaagtagtacttgcctctagttcgggttatggctttgtggcgaatctaggtgatttacagacgaagaacaaatcaggaaaagcggccttaagagttcaagagggcgcacaagtacttattcctagagctgtagagaacgaacaggatgtgctagcagccattactaatcaaggaaggatgttggtatttccattaaccgaattaccaaaattggctagaggcaaaggaaataaaattataggaatccccaaagctagttttgaatctggagaggacttcctacaagaagttgctgtcttaggtgaaggaagggaattaaggttattgagtggaaaaagacattttacgatcaagtctaaagatttggagaattttgttggcaatagaggtagaagaggtaatttcttacctaaaggttttagaaaggttgatggcatagaagtcattggcagtgatcaaagcaataataaacaagaaaattaaa

SEQ ID NO: 294291 - DNA, 2245 bp, Unknown
  Bacterial polypeptide expressing nucleotide sequence isolated from the Sargasso Sea
atgacaaaagataaatttgattcaattagtcttaaaaagtatgcagaagactcttatctaaactatgcaatgtatgtgatacttgaccgagctctccctaatattggtgatggtctcaagcctgttcaaagaagaattttatatgcaatgtcagagttaggattagacgcatcttcaaaatataaaaaatcagcaagaactgttggcgatgttataggtaaatttcatccacatggagacagtgcagcttatgaagcaatggtattgatggctcaaaacttttcatttaaatatcctttgattgatggacaaggtaactggggttcgcaagatgatccaaaatcatttgcagctatgcggtatacagaatctaaattaactagctttgcaaatttactgatttctgaactaaagtctggaactgttgattggcaacctaattttgatggatctctattagaacccgtaatatttccatcaaaacttccagtcattcttttgaatggaacatcaggaattgcagtaggtatggctacagatataccgtctcataatattaatgaggtaattgatgcaacagttaaaattcttgagaagccaaaatcagaattaaaagatctcttaaaaattataaaagggccagatttttctaatgcagctcctatcattgttaatagtgaagaattagaggagatgtattcaactggaagaggtggttttaaaattcaagcagaatggaagcaagaaaagaacacaattattataaattcattgccatatcaagcatccggctcaaagattcttgaacaaatagctgaacaaatgttaaataagaaacttccaatggtggttgatcttgctgatgaaggagatcatgaagatcctgttagattagtgattacccttaaatcaaacagagtaaatgctgaagatttaatgaatcatctttttgcatcaactgatcttcaaaaatcgtacagaatgaatatgaatttgatttctcttaaaggaggacctcgtgttttctcattggttgatttattaaaagaatggctggtctttagaaaggatactgttaaaagaaaacttgaacacagacttgatcaagttaatgatagattgcatattttagagggattattatcaatattcattgatatcgatgaagttataaagatcattagaaaatctgatgagcccaaaaaagatcttataaaagcttttaaattatctgaaatacaagcaaacgcaatcttagaaataaaattaaggcaacttgcaaaattagaacaaattaaattagaagatgaaaagaataacttggataatgaacaaaatgacattgaaaaagttttaaaatcaaaggcaagactaaaaactcttataaaaaaagaactaatagaaataaaagaaatgtttggtgaggcaagaaaatcaccaataatcgaatcatcaaatgcaaaagttttttctgaagaagatactctagttacagagcctataacagtagttttatcaaaggctggatggataagaagcgctaaaggacatgatattgacccacattcattatcttatagaggagatgataacttgcaggattttgcaagaggtaagagtaatcagcttgccgttttcttagattctaatgggaaagcttattcgattccaagtcattctctaccgtctgcaagaggaatgggagagcctatcacaggcagattaaatgcagactctggagttcaatttatatcatcaattattggtgaggagaacggcaaatatctaattatgaacactgcaggctatggatatatctctgaatttaagaacatgacttcaaataaaaaaactggaagagcttttatgaaattgcctgaacatgcaaaaatgttaaaagccattcctattagagaagatcatacgcacattgctgctgtgtctaacatagggaagcttttaatttttaaattagaagagctaccaattcttggtaaaggaaaaggtaacaaaatcataaatatacctaaggataaattaagtgcaggtgaggagtttatggctcatgctcaagttttggcagatgaaagttcattaatgatagaggttggtaaacggtctgtcactttgaaaccaaaagattggaacgaatatatcttatctagagctaaaagaggaaaaaaagttggcaagttaattaacatagaaagattaactgaaataataagctcaaaagaagaataat

SEQ ID NO: 294292 - DNA, 256 bp, Unknown
  Bacterial polypeptide expressing nucleotide sequence isolated from the Sargasso Sea
atgtcagaaaattatgattcagatagtataaaggtccttaaaggacttgaggcggtaaaaaaacgtcctggtatgtatataggcgatacagacgatggaactggactacaccatatggtatttgaggttctagataattcaatagatgagggattggctgggttttgcgatcaaatagatgtagttattggaaaagacggatcagtatctgtcgccgataacgggagaggcataccggtagacaagcatgaggagg

SEQ ID NO: 294293 - DNA, 1164 bp, Unknown
  Bacterial polypeptide expressing nucleotide sequence isolated from the Sargasso Sea
aaaaagagacgcagttccagaggttatactaaaccagctgtacaagcatactcaactacaggacactttcggaattatcttgcttgccttagtggaaggcgttcctcaggtaatgagtctaaaaacggttttacaacactttgttgatttccgacaccgggttgttgttaggcgaacagagttcgatcttagagaagcagaagcacgcgctcatatacttgaaggtttaaagattgcgttagacaatatagatgaggtgatctcaattattaggggtagcaaagatcccgttatggcaaaagaggggctgatgaatggttttaatttatcagagattcaatcacaggcgatattagacatgagactacaaaggcttaccggccttgaggttgataaggttgtaaaagagtataaagaactgataaaacacatcgcacaccttaaaggaattttggaaagcaagagtcagaggatggacataataaaaacagagcttatcgaaattcgtgaccaatacggagatgaaagacggacagagattgttcctgtagattctgatttctcaatggaagacatgatagctgaagaagaagttgttcttactattacccaccaaggatatataaagcgcacagctttgaatacctacagaacacaacggcgcggtggtcgcggagttcaaggggctatgagcaaggaagaagactttgtagagcatttgtttatagctaatacacacaattacatgttgtttttcacagaccaggggaagtgttattggctcaaggtctatgatattccacaaggtggccgagctgctaggggaagggccattgtcaatcttattggttgtgatccaggtgaaaaaatagaggcctttgttagcgttaaagagtttgatgatcagcattatattgtgatggcaacacgaaatggaatagttaaaaaaacagttctttctgcatatggtaagccacggaaaggaggtatatatgcaatagagatcagagagggcgatgaacttattgaagcaagaatcactaacggtgaacacgatattcttttaggaacgaacgaggggaaatccataaggttttctgagaacaatgttcgtccaagtggaaggaaaaccatgggggtcaaggggataacgcttggctctaa

SEQ ID NO: 294294 - DNA, 295 bp, Unknown
  Bacterial polypeptide expressing nucleotide sequence isolated from the Sargasso Sea
tttgagtgattctaaagatcaaaatgaagatctgaaaacgcctaaagagcaatcaattatacccatactaattgatacagaaatgcagaattcatatctggattatgcaatgagtgtgattgtcagcagggcgttacctgatgttagagacggactaaagcctgttcatcgcagaatattatatgccatgcatgagtcaggctatgaatggaataagcaacacaggaaaagtgcaagagtagttggagatgtaatcggtaagtatcatcctcatggagatcaggcagtctacgat

SEQ ID NO: 294295 - DNA, 445 bp, Unknown
  Bacterial polypeptide expressing nucleotide sequence isolated from the Sargasso Sea
aatgccaaaaaaatctaaaaaagatcccaaatacgattcatcaaatatccaagttttaaaagggcttgaggctgttaaaaaaaggccaggaatgtatataggtgatacagatgacgggactggcctacatcatatgatctttgaagttctagataatagtattgatgaagcaatggctagttattgcagcaagatcctattgcaaataaacaaaaatggttcggtaacggttaaagacgatggtcgaggaataccggttgacaagcatgagaaagaaggagtcccagctgctgaattaatcatgacgacacttcattccggtggaaaatttgacgataactcatacaaagtttctggcgggcttcatggtgttggggtctcagttgttaatgcgctatcaagtgaattagttttgactgtatgtagagatgggggaatgtaccaa

SEQ ID NO: 294296 - DNA, 787 bp, Unknown
  Bacterial polypeptide expressing nucleotide sequence isolated from the Sargasso Sea
aatgccaaaagatcaatctaattcaataagcctaaagaaatacgctgaggaatcttatttaaattacgcgatgtatgtcattcttgatcgggcacttccaaatgttggtgatggtttaaaacctgttcaaagaagaattttgtatgctatgtctgaattaggactagacgcaggatcgaaatataaaaaatctgcacgaacagttggagacgtaataggaaaattccatcctcatggtgatagtgcagcatacgaagctatggttttaatggctcaaaacttctcatttaaatatccattagttgatggtcaaggaaattggggttctcaagatgatccaaaatcctttgcagcaatgaggtacacagaatcaaagttaacaaattttgcaaatctgctaatttctgaacttaaatctggaactgttgactggcagccaaactttgatggttcattactagagccggtaattttccctgcaaagatacccatgattcttttaaatggtacatccggaatagctgtaggtatggcaacagatatcccatctcataatataaatgaagttattgatgctactgtaaaaatacttgagaaacctaagtcagatctaaaagatttacttaaaatcattaagggtccagatttttcaaataatgcttctattgtcgcaagtccagaagagttggaagagatgtatgcatcaggcagaggaggttttaaaattcaagctcaatggaggcaagacaagaatcaaataatcattaatgcactaccatatcaggcc

SEQ ID NO: 294297 - DNA, 809 bp, Unknown
  Bacterial polypeptide expressing nucleotide sequence isolated from the Sargasso Sea
tgtttcgaaattatttgtagcaaacactcatgacacattgttatgtttttctagttatggaaaagtttattggattaaagtttatcgacttccgagaggtgggagaaatgcaaaaggccgtccaatcgtaaatctcttaccactagaaaaagatgaaagaatacaggctgttcttccagtcaaagtattcaatgatgatcaatttatctttatggtgactgagtcaggcagtgttaagaaaacaaagttatctgcatactctagaccaatgaaatcaggtataaaagcaataaagctaagagaaggtgaccgagtagttaatgcagagatcactgacggctcaaaagaaattatgcttttctcaaattctggtaaatccattcgcttcaaggaaaccgatgccagaccgatggggcgtgtctctcaaggagtcaggggaatgcgtattgaaaaagatcagagaataatctcacttgttgtactcgaagagggaaatattcttgtcgcaactgaaaatggatttggcaagcaaactttaaaagatgaattctcaattcagaaaagaggaggaaagggggttattgcaatccagacatcaaagcgaaatggaaacctcataggtgcaaatcaagtgagaactggtgacgaggtaatgttcatcagcactaccggaaatctcatacggactcgaaccgatgatatatcggtcattggaagaaatacacaaggcgtaaggctcattagactatccgaagatgataatttactaggcatggaaaaagtcatcagtgaagataatgaagaataaa

SEQ ID NO: 294298 - DNA, 1034 bp, Unknown
  Bacterial polypeptide expressing nucleotide sequence isolated from the Sargasso Sea
aatgtctgaaaaactagaaaaattatctttaagccaattcagcgaaaaggcatatctagattattctatgtatgtaattttggacagggcattgcctcatataggtgatggtttaaagccggttcagagaaggataatttacgctatgtctgagttaggtttaagtgctgccgccaaatacaaaaagagcgccagaacagtaggtgatgtaataggcaaattccatcctcatggagatagcgcagcctatgaggcaatggttctattgtctcaatctttcactactagataccctttgatagatggtcaaggaaattggggctctatagacgatccaaaatcttttgcggccatgagatatacagaatgtcgattatcgccttatgcaaaaagccttttagaagaattagggcaaggtactgtagattggacaagcaactttgacggcactttactggaaccatcagtcttgccagcaaggcttcccaatttattgctgaatggggctaccggaatagctgtaggtatggctaccgacataccacctcacaatttaaatgaagttgtaaaagcttgtattaagatccttgaagaaccaaaagtcagtcttgaagagttatacaaaataattccaggtcctgattaccccactgaagctgagattatttcttctgaggaagaattaaaagaaatttataagacaggaaggggggctgtaaagatgagggctacttatgaggttgaagatggagaaatagtaattcttgctctcccgcaccaaacttcaagctctaaaattcttgaacaaattgcttctcagatggaatcaaaaaaacttcccatgattgttgatttaagggatgaaagcgatgaacaaaaccctacaagattagttttagttcctaaatcaaaccgtgtagataaagaggctgtcatgaatcatctttttgctacaactgatttacaaaagaattacagagttaacatgaatttaatagggttaaacggcaagcctcaaaccagagatataaagc

SEQ ID NO: 294299 - DNA, 460 bp, Unknown
  Bacterial polypeptide expressing nucleotide sequence isolated from the Sargasso Sea
ggatcaaggtacggcaagataatatttttaacagacgccgatgttgacggagcccacataagaacacttttattaacgtttttctttaaattcatgccaggactaataaaagaaggcaaggtatggattgctgaacctccactttatagagcaaaatcctctggttcaataaactaccttaaagacgacaaatcgttagaagaatttaaaaaagaaaacaaaaataaaaaattcgacataagtagattcaaaggtcttggggagatgaatgcaggagaactatgggacaccgcgatgaacccagatacgagaagtttaataaaagttagtattgccgacggaaaggcagcagaagccaaagccgcaaacatgtttgaagttcttatgggaaatgatgttgcaaagagaaaaacattcattgaacaaaacgcaaaagacgtaagatttttggacgtataat

SEQ ID NO: 294300 - DNA, 2587 bp, Unknown
  Bacterial polypeptide expressing nucleotide sequence isolated from the Sargasso Sea
catggcagccaagaaaccagcagccaagaaaccagcagccaagaaaccagcagccaagaaaccagcagccaagaaaccagcagctaagaaaccagcagccaagaaaccagcagctaagaaaccagcagctaagaaatcgaaaaccgctactgctacaaagaaaaaaccaacaattaaatctgatacactaaacggttcaattgctgttgaagatgaaatatctaagtcattcttagattatgctatgtcggttattgtttccagagctcttccagatgtaaaggatggattaaaaccagtacaaagaagaattttatactcaatgtatgaaacaggaattagaccaacaggacctttcagaaagtgttcaaaggttgtaggtgatgttatgggtaactatcatccacatggaaacgacgctatatacggaaccttagtaaggttgggacaaaattttagtactagataccccctgattgaaccacagggtaactttggaacccccgacgatccacctgctgctatgaggtatacagagtctagaatgtcttccctgtcttcacagctattagatgggattgacgaagagacagtagactttgagcctaattattccggagagacaagcgaaccaaaagtattacctggaagatttccaaaccttttaattaatggagctgagggtatcgcagttgctatggcaacaaatatgccaccctacaacctgaaagagattacagaggcagttaaatttacattaaaaacaaaagaccccaaaccacgagattatttaaaaataataaaaggtccagattttcctacaggaggattaattgtagatacccccacgataaaagaagcaatacttaaaggtagagggtctataaaacttcgagctgttgcagacatagaagaattaggaaaaggtagatctgcaattattgttaaagagcttccgtatcaggcttcaattgacagaattatggaaaaaatagcatctttggttcaggacaaaaaattaaccggagtctcagacttaaggaatgaaagtagtgacagaaacggaaccagactcgttgttgagttaaagagagacgccgtaccacaagttgtgttaaatgatctttttaaatttacacaacttcaagatactttttcagttaattcagtagcccttgttgaaggagtgcctaaagtactatcggttcccgaacttattagatactacattgatcatcaaatagatgtaattcaaagaagatctaaatacagacttgaaaaggcaaaagcacggttacatatcgttgatggcttattgcttgcattgaataaaatcgatcaaataataaaagtcattaaatcttccaaagatgtggaggtagcaagaaaatcactgatgagtaaatttaaattatcagaaattcaggcaacacacatccttgatatgcccctaagaaggttaactgcattggaaaaagaaaagctcgaagatgaaaagaaagaactcaaagaaacaattaaagaccttacagcaatattaaaaagtagagcgaaacaaaatcaaatacttattgaagagcttgatgcaataacagacaagtttggtgatgaaagaagatccagaattgttccagatgttggcgaggtaaaaattgaagatttaattgaagacgaggaaattattgtttccatctcatctgaaggttatataaaatcagttccttcaacctcctataaaaaacaaggtagaggaggtaagggtgttaaagcagcttcttcagaggaagacgtaattgagcacctcctttcaacatctgttcactcttatttacttttctttacagacaacggaaaagtatacagagccaaggcacatgaaattccaaaaacaaataggactgcaaaaggatctttaattcacaatgtactttcaatgggacaagatgaaaaagttcaggcaataattgacacaagggactatgaaacagaaaaattcttattaataatgactgagaaaggaacggtaaaaaaatcaaaatttaaagattttgattcaaactataaatcattacaagccataaagctaaaggatggtgacaaagttgtttctgtaaaaacaacgtctgggaaagaagacataatacttgtttcccagaagggacaagcaataagatttgatgaaaacaatctcaaagcccaaggtagatcagcaatgggagttagaggaataaaacttcgtgaaggggacaaggttgtaggtgcagcaacatccagagaggaaacactcttatttattacggccaaagggtatggaaagcgtacaaaattagatgaattcagaagagctggaagaggaggactcggagtcaaggctcttaaggttacggaagccaaaggagatttaattggcgcaggacccgttgatgaagatacagaggttatgcttatgagtactggtggaacagcaataagatgtgctgtaaaacaaataaaacaaatgagtagagttgctcaaggagtaaaggttatgaagctttcaaaagaagaagaaatatctgcctttattccaattaaaaatgaatcgtaa

SEQ ID NO: 294301 - DNA, 311 bp, Unknown
  Bacterial polypeptide expressing nucleotide sequence isolated from the Sargasso Sea
aatgtcagattttgctaaagaaattcttcccgtaaacattgaggatgaactaaaacaatcttatcttagttatgccatgagcgtaattcatggcagggcactgccagatgtccgtgatggtttaaaacctgttcatagaagaatactttatgcaatgcatgatcttaaaaataattacaacaaaccatataaaaaatctgcaagggttgtaggagatgtaattggtaaatatcatcctcatggagatagtgcagcgtatgatgcaattgtgaggatggcccaagatttctcaatgagatataccctaattc

SEQ ID NO: 294302 - DNA, 2272 bp, Unknown
  Bacterial polypeptide expressing nucleotide sequence isolated from the Sargasso Sea
atggatttcaagaaaacgaagtcaggttcaaaatcggattctcagcctctcagtgagtttgtggaaaaagcgtacctcgattattcgatgtatgtcattcttgatcgtgcattgccatttataggtgacggtttaaagcccgtgcagaggcgcattgtttttgccatgtctgaattggggttgtctgcccaatcaaaaccaaagaagtctgcaagaactgtgggtgatgtccttggcaaataccatcctcatggagacactgcatgttatgaggctatggtcaatatggcacaggacttttcttatcgatacccattgatcataggccagggtaactggggctcgtacgatgatccaaaatcatttgccgcaatgaggtacaccgaagcaaaactcagtgcttacacaaaattgatgttaagcgaacttggtcaagggacaaccgattggaaacccaattttgatggaacactgaaggaacccgagtttctgccttcgagattacccaatcttatactcaatggtgtcaccggtatcgcagtcggtatgtcaacagacattccgcctcacaacatcaaagaaatttcttatttattggataaattgattaaaaatcctgacatttcattgggtcaattgactcgaattacaaaaaatttccagggtcctgattttccgtctggaggagagatgatttctacgccagaagagcttaagcaaatttacaccactggcaatggaaccgtaaaaatcagagcgaaatacaaaaaagaaaagaatttaattgtcatctctcaacttccttatcaagtttccggtaataagatcattgagcagattgcttcgcaaatgaaagacaagaaactgccattgattacagacatcaacgatgaatctgatcacgaaacacccattcgtattgtgcttacacccaagtccaatagagtcaatacagacgaattgatgggacacctttttgcaacaactgatcttgagaagaatgtcagagtcaatatgaatctgattggactcgatggacgaccaagggtttttgatctcaaagcattgttgtcagaatggatagagtttagaaaacagaccgttaccagaagacttcagttcagattggatgaagtggaggctcgacttcatattttagaaggattaatggtcgcatatttaaatttggatgaagtcatcaggatcatcagagaagaagatgatccaaaatcaaagttgatcaagaagtttaaactttcagagattcaagccgaagcaatcttaaatctgagacttaggaatctagcgaaactcgaagaggaaaaaattcttacagaaaagaatgatcttgagaaagagcagagtgagttgacaaaaatactgaagagcaagaagaaaataaacgaactcattcaaaacgagatcaaacaagacacaaaagatttcggtgacgatcgaagaacaactttaaatgaatccggaatcgcctctcaagctctcgatcaaactcaacttgccagcagtgacccagtgacaattgttttatctaaggctggctgggttagggctgctaaaggtgccctggaggacccgcaatctctcaattataaaacaggtgatgattatttatcttcggttcctggaagaagcaatcagtttgcagtattcatagacagcacaggcagagtttatagcatcgttgccgatacccttccttcggcaagaagcaatggtgagccattgtctagcagactcaatccgccagacggatcttattttgctggagtaatgtcaggagatccaggccaacattggcttttgtcttcgagtgccggttacggcttttttgttaaattggaagatctgtacaccaagaataggaaaggaaagacatgcctgagtgtaaaaggcgccgaagtactcattccttcgaatgcaacatcttttgggtatccggacgaaacttatgttgcagcagcaaattcagctggtaaattacttatttttaaaagcaatgaactaatggaaatgagcaaagggaagggattgaaaatcattggcattaattctaagaaattcaaagaagggaaggaaaaaatggtttcagcaattgtgattggcgcgaaagattcaattcgggtttacagcggaaagaaacccaaaattatcagacccgatgaatttgaaaattacatgagcgatagagggaaaagagggcgatcggtgcccccatttaaaaaaatagattcccttcaagttgagccaaagtaag

SEQ ID NO: 294303 - DNA, 2248 bp, Unknown
  Bacterial polypeptide expressing nucleotide sequence isolated from the Sargasso Sea
aatgccaaaagatctttctaattcaataagccttaagaaatacgctgaggaatcttatttaaattatgcgatgtatgtcattcttgatcgggcacttccaaatgttggagatggtttaaaacctgttcaaagaagaattttgtatgctatgtcagaactaggactagatgctggctcgaaatataaaaaatcagctcgaactgttggagacgtaatcggaaaattccatcctcatggtgatagtgctgcatatgaagctatggttttaatggcacaaaacttctcatttaaatatccattagttgatggtcaaggaaattggggttctcaagatgatccaaaatcctttgcagcaatgaggtatacagaatcaaagttaacaaattttgcaaatctactaatttctgaacttaagtctggaaccgttgactggcagccaaactttgatggctcattactagagccggtaatttttcctgcaaaaatacctatgattcttttaaatggcacatctggaatagctgttggtatggcaacagatattccatctcataatataaatgaagttattgatgctactgtaaaaatacttgagaaacctaagtcagatctaaaagatttacttaaaatcattaagggtcctgatttttcaaataatgcctctattgtggcaagtccagaagagttggaagagatgtattcatcaggcagaggaggttttaaaattcaagctcagtggaggcaagacaagaatcaaataatcattaatgcactaccatatcaggcttctggttcgaaaatattagaacaaatagcagaacaaatgattaataaaaaacttcctatggtcgttgatttagctgatgagggtgatcatgaagatccaataagattagtaatcaccttgaaatcaaatagagttaatgccgaagatgtaatgaatcatctctatgcctcaacagatcttcaaaagaattacagagttaacatgaaccttatttcattaaaaggtggaccaaaagttttctcacttgttgaccttcttaaagaatgggtcatctttagaaaagatactgtaaaacgaaagcttgaacatcgtcttgatcaagttaacgataggctgcatattcttgaagggctgctaacaatctttgttgacatagataaagtaataaaaatcattagaaactcagatgaaccaaagaaagaattaataaaagcatttaaattgtctgagatccaagcaaatgcaattttagaaattaggctaaggcaattagcaaagttagaacagcttaaaatagaaaatgaaagaaatgaattggttgatgagcgagatgatattgaaaaaattctaaaatcaaaatcaagactcaaaacattaattaagaatgaattaaatgaaattaaagaactatttggagaagaaagaaaatcaccaattattaactcaacaaatgcaaagatcttttctgaggaagaaacaattgttacagagcctatcaccgtagttttatcaaaagctggatgggtgagaagtgcaaaaggacatgaaatcgatccaaatacactttcatacagaggagatgactctctgcaagattttgcaagaggcagaagcaatcagctggctgtttttcttgactcaaacgggaaagcgtactcaatacaaagtcattctttgccatctgcaagggggatgggtgaaccaatcactggaagactaaatgctgattcgggtgtccaatttatttcttcggttattggagttgaaggcaataaatttttgataatgaataccgcaggatatggttatatttctgaatatcagaacatgatctcaaataaaaaaacgggaagggcattcatgaagttaccagataatgcaaaaatgttgaaagctattcctgtaaaagataatcatactcatattgctgcagtttcaaatattgggaagcttttaatctttaatattgaggagttaccaatacttggaaaaggtaagggcaataagataataaacataccaaaagataaacttgctgctggagaagaatttatggcacatgctcaactccttgcagatgatagttctctcaaaatagaggtaggtaaaagatctgtaaccttaaaaccaaaagattggtcagagtatgttctttcaagggctaagagaggcaaaaaagttggtaaattaataaatattgaaaggttgatagaagaaccaaaatctctagaagaacaataa

SEQ ID NO: 294304 - DNA, 2287 bp, Unknown
  Bacterial polypeptide expressing nucleotide sequence isolated from the Sargasso Sea
catgagtgacgagatcatcattaatcgcgatggggtagagcaacttcctcttcgacgtttcaccgaagacgcttatctaaactattccatgtacgtcatcatggaccgtgcacttccacatatttcggatggcttaaagcctgttcagcgacgcatcatttatgcgatgtcagacctagggttaaatgcaaacgccaaatataaaaaatcggcgagaaccgtaggtgatgtgctgggtaagtttcaccctcacggcgattctgcctgttatgaggcgatggtgctcatggctcagcctttctcttatcgctaccctttagtagatggtcaaggtaactggggggcgccggatgatccgaaatcgtttgctgccatgcgttatacggaagctaagctctcgcgtttctctgaggtgctactaaatgaacttggacaaggtacagtagattgggtacctaattttgacggtacgctgaacgaaccaagtgtgcttccagctcgcttgccacatatcctactaaacggtgtgacagggattgcagttggtatggcgaccgatattccccctcacaacgtaagagagttagccaacgcgtgtgccatgttgttagacaacagcaaagcagagcttagcgatgtgctagagcacgttaatggacctgactatccgaccgaagccgaaattattacgccaaaggctgatattcaaaaactgtacgagactgggcgtggttcaataaaaatgcgtgcggtgtatacggaagagaatggcgatgtagttattaccgctctacctcatcaagcgtcaggcgccaagattctagagcaaattgcagcgcaaatgcaggcgaagaagttacctatggtaagcgatcttcgtgacgaatcagatcatgaaaatccaacccgtttggtgattacgcctcgctcaaatcgcattgatgtaactcagctgatgcagcatttatttgcaactaccgacctagagaaaaactaccgggtcaacttgaacatgattggcctagacggtcgccctcaggtgaaagacttacgtacgattttgtctgaatggctgcagtaccgaaaagataccgtgacgcgccgcttgcaataccgtttagataaagtgttagcgcgtttgcatattttagaaggtttattaattgcgtttttgaatatcgatgaagttatcgaaattattcgcacgtacgacaaaccaaaaccagaattaatggcgcgattcggtttaagtgacacacaagcggaagcaattctggaattgaagcttcgtcacttagccaagttagaagaaatgaaaattaaaggcgagcaagatgaacttgcagaagagcgcgacaagctccagcagcttctaggctcagatcgccgccttaaaaccctcattaagaaagaaatccttgcagacgctgaaaagtacggtgacgacagacgttcacctattgttgagcgtggtgaagctaaagcgctgtctgaaaaagagctggtacctgctgagtctgtaacagttgtgctgtcagaaaaaggctgggcacgctgtgcaaaaggtcatgatatcgatgcggaaggtttaagttacaaagctggtgatgcctatttatccagcgctgaaggcaagagtaatcagcctgccgtgtttatggacagttcaggtcgtactttctcttgtgacgctcacgggttgccgtctgcacgaagtcagggggaaccgctaacaggccgcttcagcatagtgggtggcgagtcattccaacacgtgattatggcgcaagacgaaagcaaattcttagtaggttctgatgcaggttacggcttcgtcggcacatttaaagatatggtgagtaagaacaaggcaggtaaagcctatttatcattgcctactgcggcgaaagtgatgaaaccaacaccggttactaatccagactccgattggtgcctaagtatttccaacgaaggtcgcatgctcatgttcccactacgcgacttaccaagtttaggtaaagggaaggggaataagcttatcaatattccttctgcaaaatcgcaatctcgagaagagtacgtgaaagtgcttgctgttgtacctgatggtgccgcaattaaagtgggagccggtaagcgcaacatgacactgacggctgacgaccttacccactatcagggagaaagaggccgaagagggaataaattaccgcgaggactacagcgggttgatacggttgaagttgtcttacccagcaaggacgaaacatctgaagatttgtcataa

SEQ ID NO: 294305 - DNA, 2359 bp, Unknown
  Bacterial polypeptide expressing nucleotide sequence isolated from the Sargasso Sea
atgccagcaaagaaaacaacaacaaagaagccggcagcaaagaaaacaactacaaagaagccggcagcaaagaaaacaacaacaaagaagccggcagcaaagaaaacaacaacaaagaagccggcagcaaagaaaacaacaacaaagaagccggaaattcaaaacggtgcaatagcggtagaagatgaaatttctaaatcttttctggactatgcaatgtcagttattgtttcaagagcgcttcctgatgttaaggatggtttaaaaccagtacaaagaagaattctttattcaatgtatgaaacagggataagacccaccggtccgtttagaaaatgttccaaggttgtaggtgatgttatgggtaattatcaccctcatggaaacgaagctatatacggaacccttgtaaggcttggacagcacttcagcacaagatacccacttatcgaaccacagggaaactttggaactcctgatgatccaccagcagcgatgagatatacagagtctagaatgtcattattagcatcccagcttcttgatggaattgatgaggaaactgttgactttgaaccaaactattcaggagaaacaacagaaccaaaagtactcccaggaaggtttccaaacctccttataaatggagcagaaggaatagctgttgcaatggccacaaacatgccgccatataatctccaagaaattacagaagcagttaaattcacactaaaaaccaaagatcccaaaccaagagattacttaaagataattaaaggtccagactttccaacaggaggtctaatagttaaaaccccaacaataaaagacgcaatattaaaaggaaggggctctatcaaactaagagcagttgcggacgttgaagagcttggaaaaggaagatcagcaatcgtggtaaaagagctaccctatcaggcctcaattgatcgaataatggaaaaaattgcttctttagtacaagacaaaaaacttgcaggagtttcagaccttaggaatgaaagcagcgacagaaacggaacgaggcttgttgttgagttaaaaagagacgcggttcctcaggttgttttaaaccaactattcaaacaaacccagcttcaagattcgttttctgtaaattcagtagctcttgttgatggggtcccgaaagttttgtccgttcctgagcttatcagtttttacataaagcatcaaatagacgttattcaaagaagaacaaaacatagacttgataaagcaaaagacagattacacattgtagagggtcttttgcttgctttaaataaaattgatcaaattattaaaacaattaaggcttcaaaagatgttgatgttgcaagaaagtcgttaatgaagaaatttaaactatcaaaaatacaagcttcacacatattagatatgccactaagaagactaacggctcttgaaagagaaaaactagacgaagaaaagaaagacctcaaagaaacgataaaagaacttacagcaattcttaaaagcagggcaaaacaaaacaaaatacttatagaagaactggaagctataacagaaaagttcggagacgaaagaagatctcgactagtagatgatgtaggagaagtaaaaatagaagacctcattgaagatgaagaaataatagtttcagtatcttcaggcggatatgtaaagtcagtaccttctgattcatacaaaaagcaaggtagaggaggaaagggagttaaagcttcatcttcggacgaagacgtaatagaacaccttttatcgacatcagtacattcttacttgttgtttttcacagacaaaggaaaagtatatagagcaaaagctcatgagcttccaaaaaccacaaggacggcaaaggggtcattaatccacaatgttctttcaatgggtcaggacgaaaaagttcaggcaataattgacactagagattacgagacagagaagtttcttttgataatgacggaaaaaggaacagtcaaaaaatctgcctttaaagactttgattcaaactacaagtctttacaggcgataaaacttaaagaagaagacagggttgtctcagtaaagacaacctcaggaaaagaagatgtaatacttgtatcaaagaaaggccaggcaataagatttgatgagaacaatttaaaaccacagggccgaacagcaatgggcgttaggggcatcaaactaagagaaggagacaaagttgttggagcttctacatcaagagaagaaactctgttgtttataacagccaagggttatggaaaaagaacaaaattagaagaatttagaagagcaggaagagggggaatgggagtcaaggccctaaaagtaacag

SEQ ID NO: 294306 - DNA, 631 bp, Unknown
  Bacterial polypeptide expressing nucleotide sequence isolated from the Sargasso Sea
gcgggaccagcaaaacaggcaagagagtcaaaaacacaggcaatattaccaataaggggaaaaattattaacgtacaaaaggtcacagaaaatagagcactccagaatgaagaaataagctcgcttataaaagcaataggtacaggaataaaagacgaatataaaggtgaggaatcaagatacggcaagataatatttttaacagacgctgatgttgacggagcacacataaggacacttttattaacgtttttctttaaattcatgccaggactaataaaagaaggcaaggtctggattgctgaacccccactttatagagcaaaatcctctggttcaataaactatctgaaagacgacaaatcactagaagagtttaaaaaagaaaacaaaaataaaaaatttgatataagcagattcaaaggtcttggggagatgaacgcaggagaactgtgggacaccgcgatgaacccagatacgagaagtttaataaaagttagcattgccgacggaaaggcagcagaagccaaagccgcaaacatgtttgaagttcttatgggaaatgatgttgcaaagagaaaaacattcattgaacaaaatgcaaaagatgtaagatttttggacgtataat

SEQ ID NO: 294307 - DNA, 1111 bp, Unknown
  Bacterial polypeptide expressing nucleotide sequence isolated from the Sargasso Sea
gaaaaatacagtttcatttagaagcaattatgatgaaacagagaaagaacctgaagttttaccctcacaatacccaaatatcttagttaatggagctggaggaatagcagttggaatggccacaagtattccccctcataatcttggtgaaataattaatgctacagtagcctacataaacaataaggacataacaattagtcaattaatgaaatatgtgcctggaccagattttcctactggcggaattattattggtaaagatattattaaacaaggatacaataaaggaagaggctcttttaaaattagaggagaaattgatttagaagaaaaaaaaggtggtcgagaaacattaattattaagtcaattccatatcaagtaaataaatcaattctgattgaaaaaattgctcaactagttagagataaaaaaattgaaggtataagagatataagagacgagtcaaacagagaaggaataagagttgttattgaattaagaaaagcagttgaacccgaaactgttagaagacaattgtataaacttacaagcattgaaagttcatttggttttaatacattagcaattgtcaacaacaaaccaaaaattctaaatttaaaagaatttatttcagagtttttatcttttagagagaaaactgttattgcaagagttaaatttgatttaaaaaaagctgaagaaagagcacatattttaattggtatagctgcagctgtagaaaatattgacgaagttattaaaataattaagaactcgaaagacactgagagcgctaagaagaatcttttaacaaaaaaatggaaaataaaaaaaagtgtcaatttagtgagtttaattgagaagaaaaaaaatacttcaggttatcaactttcaaaaaatcaagttgaagccattctcgaactgaaacttcagaaattgacagcttatggaataggtgagatagaggaagaaattaaaaagttatctaaattaattattgagtttaacaaaataatcaactcaaaaaaaattctttataaactcataatagatgaactagaaaaaattaaagataaattttcttcacctcgaaaaacgaaaattata

SEQ ID NO: 294308 - DNA, 214 bp, Unknown
  Bacterial polypeptide expressing nucleotide sequence isolated from the Sargasso Sea
atggctttaaaaaagacaaaaaatcaatattctgctgacagtatccaagcccttgagggaatggaacatgtaaggaaaagaccttcaatgtacataggagatgttgggtcaagaggactccatcatttagtttacgaagttgtagataattctattgatgaagctatggctggccattgttctgaaatatctattcaaatcaataaggataaaa
